United States Patent Application Publication US 2015/0376612 A1 - sequence listing, part 21

SEQ ID NO: 52976 - DNA, 1050 bp, Homo sapiens
gcaagagtaagtggacactgaggttggaggctgggggttatcacaagacaagcaaatacaaatgcataaaatacactgttgtacaccagagctcacagtttagtagagatgatcctactttacatggcaatgacaaaagagataattgactggtgtgcaaagtgtgtagaacacagaagaggaagctagcaagcctcccctaccccactaggacatagacaggcctttcaaggtgagtgagagtctactagctagagaagaaagggaagaggaacagtattcaggatagatgggggaggcggaaaactgaagatgaggaaaccagttagaagcctatgaattcttgaactgacatgctgacactatagaatgaagggatggtttttagataggttttagaaagaagtggcatggttggtggagaaaaggaggaatcagagacaactgcatggtttctagctaaggcaaatgctatccagtgaggtgtgggacccaggtggcagagggtgctggactgggggtggtggagcacatgccaattgcatgacatgttgaccattcattacttttccaggacatctaggctagacagaaatttcagcctggagctcagggagaagagggagatttgagagatacactgcctcccagatctttaggtgtttgtcccagtgtgggagtggagatggttgtgcagggagagcaggaagggagggagtcagggtggacactagagggagggtagagagaggagctcctaaggcagactgccaaggaagttagagaagcaggaaagacagatccatcacggaggacaagggaggagagaatatatggaagataaggagtgattcttgccagggacctcccaggccccaggaagggagcactgcagggtttgcctttgattgggcacctgggacgccctgagtgaccttcacagcagccctttatgtaaagtagtggggtacaagccaggctgcaatcagttcaaaagagatttacctttaatcttggtcaaaatcctctattttgaaaacccagccagtg

SEQ ID NO: 52977 - DNA, 1084 bp, Homo sapiens
caggtcaaagaaaagatcatcctagtcctgtcttggctacatagattagaacaaatgaaatgaggacataggatcatctagtccagcccacttgtcttgtaggcctggatagagtaacttgcatgcagtcacacggagatacgatggaaagtctagagttatagcccgtatctctgcccagaactccattcattgtacttatatttccctaactgaagcaatgtgtgaaatttccttttgacatagcaagattttctttaaaccctagataggtgttacttggagtgctaacccaggaggcctccaaacctcatagaatacagtgtctttggcacagttgaccttaactaaatgaagctcctttctctgcttagaggaaagtgccttctgttttaagactatatggcctttgatgactgcgtgcagtttgacattattggatacaccagggatagtgtccatgctcttccttctccctcttctcaggagttccaggatctctggcctcagttgtccttggttattgatgggggacaaattggggatggccagagccccgagtgtcgccttggctcaactgtggttgatttgtctgtgcccggaaagtttggcatcattcgtccaggctggtaagtctctttcctgtggtgtggggaaataatttgagggaggttggagagatgcaaaaaagctttgacaagataaagatggtgcctcctatgttgccctgaaggagtgtgggccaggtttggagaagtggtagttgcagtgggactaagtttcctggctttcttaggattcaaaaggtttcatcaagggttgatgaacagggcttaacaaggctagccagtttcgatgtccctgctcaccagcctctggtgggctcgggacttctgagaagtcagactggtaactgtcctgtttcctcctcagtgccctggaaagtactacagccatcctccaacagaagtacggactgctcccctcacatgcgtcctacctgtgaaactctgggaagcaggaaggcccaagacctggtgctggatactatgtgtctgtccactgacgactgtcaaggcctcat

SEQ ID NO: 52978 - DNA, 1049 bp, Homo sapiens
cagctgctggacgcggtggagcagcggcagcggcagctcctggacaccatcgcagcctgcgaggagatgttacggcagctgggccgccggcgcccggagccggctggtggcggggttagtgcccaccctgggctgggctggggtggggtggggtctgcccactggctaggctggccaagccctagcttaccctggaggggggaagtatgtctccgccgctttatccctaacctcctttgatctggtgagaggtttcgaaaaagttaatactatccaaatgccaaatggccacatccttgtggggcctaatccaaggccttgcctcccagcctcacttttttcctttctgttccaactagaacgtctcagccaaacctggagcgcccccccagccggctgtctccgccagaggcggctttccaaaggatgctggcgatggagctgcggagccctgaccatccccgagcagaataccctgacttctctccctccccagggccggtggctggactctgaacaactcccttcagtaaaggggccagtcttcactggcagtggctggtacttggctctcagcctggagtggcagctctgctagcagctgggttcactcccacttcatcctggctgaaagcagtgctgtgctttgaaatgcagccaatgaatacccagtctgattacccagatttgggcagaccagcagtgctcgccagagtggtctggcctgctatgggggatccaggtggtgttacatgtccatttcatgttttgggggcttttagccccacaaaacaccttcagtagagccttgattaaaaggaaacctgcagactctcctggtgaccgacgtttcctttctgtcccctctccaagactgatggctgggaaggggggagtggtggaaaaatgtcaactatgggcagggttggtaagaaatgccacagatactaccagatttaaataagcatttaattaggatttcattagtatttaatattgctttttcaattccaaaaagttaaattttcactttttagcagatattttaa

SEQ ID NO: 52979 - DNA, 1017 bp, Homo sapiens
gtgtgcctgttgggccaaaaattgggtgataatgtagtgtcactttctcagctcaatgcagtttctactttttcttatgggaaaatttttcataaaacctttttgcaccaaaacccaggggtgttttttgcaatatccttgttatcctcgtagtgtgccaagtcagaggctttctcttgcccttttcctgctgtgttctcaggcctcccaagggctatttgactcaacagtctacatccttcgttgtgttttggagaatgtgggggtgggggtcagagttcaaggtgtctgttcccttttcctgtgaactctttctagtccctatttggggagggtggctggaaacagatttttgctgaatttctggctcagatcttctagccaggaaaggcaagagcccccaagagcccttttttttgacatacactaatcattggccggggtcttggtgacaacttttaaaatcccaaatagttttatttggattatgtaaaagtaagtgtgaaacatgggaacaacggacttccactgagcgatgtgaaaacgttacaggttcagtacttccaaaggaagaaacctccaaacccaaaaaagaataaatatgaatttgtatttttgaagaatgtgaaataatggtgtttgcttaattgctcattttgtataaacttaatattgtactttaaaatatctgctaaaaagtgaaaatttaactttttggaattgaaaaagcaatattaaatactaatgaaatcctaattaaatgcttatttaaatctggtagtatctgtggcatttcttaccaaccctgcccatagttgacatttttccaccactccccccttcccagccatcagtcttggagaggggacagaaaggaaacgtcggtcaccaggagagtctgcaggtttccttttaatcaaggctctactgaaggtgttttgtggggctaaaagcccccaaaacatgaaatggacatgtaacaccacctggatcccccatagcaggccagaccactct

SEQ ID NO: 52980 - DNA, 1098 bp, Homo sapiens
tgtaattgactccactaaccactctttcacagcattcctgaatcattcagtctctgttcaaatacttcccatcatatttattcattatgcacataatcacagaaaatctagcctatgctatatttatttaccaggaaaaacgacaacaaaaaacccaaactcaaaattagtgttagcaatactataaaactctcatgttcaacatggaggaggctgcataagctcagactcaatgcattggtttgtaagttgcatcatggagccatgggaatggcagtcaaatttcctaacagcttgaatcaaagcaatcagattaagataaagtgggcttgtcctttagcagatagaggcctctatatgtgtaagaggttttcttcaaaaagctaataaacctaaagaagggaaatttttctctccccattgcacagaaaaaaaataaataaataaaattaaaatgaaaaaggaaaagaccaagccaggtcatatagataggatttgagaaagtccagaaactagaattctggttatgtcttacagtactagactttaagttcctcaaggacaaactataccaacatttttaactactataagctcagtactggcacagtgcctggtcaataaatatttgctaaatgagtaaaaaaaagaaattttctggggccaggttaccgagtgagtgacctgcgtcaaaaggaatcaggcatcagagagaacaggctctaatagaactcttatcagaagaagaaaaaatcctacatggtcagtaattaaacacaattaaatttagaaaacttcaaagactggcctgcctcaattttcccaccaaagggagtgcttaattcttgcccttatttttctagcactggtattacaggtacacttaccgtactggaattttctcgcaattcagaatctgtggacagaaggctcaagtcacttagacaaagtgagtgatttgtatcctgtgaaagagaaaaaattctaattgagtaacaaaaatcaggatttacagtggcatatcatgtaacaaaacatttgattacaaagtccctaatgttccacatgtctacatgtattatctgaagaagtataagc

SEQ ID NO: 52981 - DNA, 1050 bp, Homo sapiens
ctgagtagctgggattacaggcacgcaccaccatgcccagctaattttttgaatttttagtagaaatgaggtttcaccatgttagccaggctggtctcgaactcttgacctcaggtgatccacctgccttggccttccaaagtgctgggattacaggcatgaaccaccatgcccggcccatccaggaactattacaggtcaattagaaaaaaataagtcactagtagttacagtaccaaggactaagatgttaccaaacagaaatagggtgaatgatttagcaaggaatatcttttttgctgtggttgaggtcttaaaattgcatatggcttattgatggcatatcacttttcctttgctagccttagagagaccatcttgtcccacctcctaccctatgcagaaatctccctatggcatccctgacatcagttaatcttgtttctgcttgaagacatccagaacaacaagagcagagtgtttcataccccaacccaatacatttgttagccagctctgattgttagaaagcttttacttgtatagaaccaaaacctgcctttctgcaggtgctgcccactggttctagatctgccttcctgagtaaactttctcccacagaacagtccatcagctatttgaagatcatggatttttcttcctcttgtacaggctaaccacctccatttacttaaatgtccctctgtgacattttccccagtctctcatcagcctagtcacctttgattatatgaattccagttttccaaggtcctttttttcttctttttttgagatggagttttgctgttgttgcccaggctggagtgcagtggcgtgatcccggctcactgcaacctccgcctcccaggttcaagcgattctcctgcctcagcctcccaagtagctgggattacaggcatgcgctaccacacccagctaattttgtatttttagtagagacagggtttctccatgttggtcaggctgatctcgaactcctgacctcaggggatatgcctgccttggcctcccaaagtgctgggatta

SEQ ID NO: 52982 - DNA, 1122 bp, Homo sapiens
ggctaatttttgtatttttagtagagatggggtttcaccatgttggccaggttggtcttgaactactgacctcaggtgatccaccctcttcggcctcccaaagtgctgggattacaggcatgagccactgagcccataatcacttttggaatctattcaaacttccaaactgattctgatatgcagatagctggagtactcattgatcagggcctgatcaacccttctaattatgctcctgccaaaattgacttctcataaagtgttctctctacttacttcactatttcccttctcctgccctttttttatactttctttgctctcaccccagttattaacctctgtaagtcccattttgtcttacattcaagacccaactaaaatgtcttatttctttcagtcttataggaacatgtagttaaaagtttgacttctaaattcatgttgcatttgacccgtacctctcttttgatacttatgccaagtggtaagcaaccagttttctgtgcacagtctttctcgtgcacttggatcgtgtatacagttcttggactatagtaggcacttgagaaatgattcagtgaacaaaagacaaatcccggttcttcctctttcaggtcatttctactctccccatattccacaaaaatgtcttccactacttgatggcgtttttgcgagaactgctgaaaaattcagcaaaaaatcatttggatgagaatattctaggtaagcagccaaatgtctatggaaagcatttctgcaaactgagagactcgtaatgagaaatgaggttgaggagggtcccaggtcccttgcagtagaactaaaatatcaagctctgggcaaagattttttaaagcagaaagttttgcgtttggacactcctccccactcctaacaacacaagagtaagtatagtcatgggctgggggcggtggctcacacctgtagtcctagcactttgtgaggctcaggtggacggatcacctgaggtcaggagttcaagaccagcctggccaacatggtgaaaccccatctctactaaaaatacaaaaattagctgagtgtggtggtgcatgcctgtaatcccagctaaacgggaggctgagttaggag

SEQ ID NO: 52983 - DNA, 1029 bp, Homo sapiens
agcatgcttactgtcagattggttttttaattctctcctgattctcataggaggataaagatcagagaatcagtctgaactctgttttggctttgagctttcatggttgttttggatgatacccacaggatacatgttatcccttggtgggcccgaattgctcttgctgcctcagatgacttagccacatggacatgaaggccctgattcatcactccccacctgagccagggcactcgccaggcagcgggcactgctgtttctgtgagtacttccagtgtggactttgcatttcagtgagaagtgccgtgctcctgcctggtgtgatcggattctctggaaagggaagaacatcactcagctgagttaccagagccacatggccctgaagaccagtgaccacaagcctgtcagctcagtgtttgacatcggggtaggtggcagctggtacctgttgtaatcattctggagggaattggctttcacaactaagaccatttcttgtctttctggtttcttcctctccttttgagagggaagaagccccttttaggacaatttaaaacaattattaacaacttggttaataattgttttagtatgcctctgcatttttcctcatacatggaagttcccttttgcatttttgaactgtctctttgcagacctttctctatgcgtttataaatgggtgtgtcagtattgtgtatacaacattgaggatatttttccttttttgtaaaagagatcatattatacattttgctctgaggacatctttttttccctgactgaatatgtcttaggagatctttccaggacagtgaaggtagagctttcttctcattatttttaaaggttgcaaagtattccatagtatggatgagccataatgtatgtattgatgatcataaagttatttccaaagttttgctattatacacagtgctgttgtgaccacccttcacatgtatgtttgtgtatcagtgtatttctatagaatgaaattattagagatgaaattagcgg

SEQ ID NO: 52984 - DNA, 1022 bp, Homo sapiens
gagaggtacttgataaatggtagtcatcattattaaagcagtgggggattaggagtgatggagaagagggagaggaacagttcctgaatgtctgctgtgtaccaggcattgtgctaggttcgtgacccatgtagattgtatttgtttatccttttgaggtctccgtaaatatggtagcattacttccattttacaaatgaggaagcaaattaagtaatttgtttgaggtttcataagaggtgatggatggagtcagtaacatcaccagctctattttattccaaagcccaaggcattttccaaaacagtctaatgtttcttaaagtgccagacacattatatagacaggaagacactcaaaattcagagaaatgactactgagaacttatgtggctggggagggcttcatgaaggaggaggtgggagttgaggctgggcttcgaaggagaggtggccaaaaagtaggagtaacttcatatgaaggcaggagtgcggatggcatgtgtgaagaatctatccttttagatcaggctgtctttgggtgatggattgatgaaggagagtagagccatttgcaaagggcgtcagatgccaattgaaccagtttgggtcttaacctgtacaggaagatttagagcagagagatgaaatcagagtttaatcaggccaagtgcagaggctaaatgggtagggagaagtgggaagatctcttagttgggagactcctgaggtagcaagtgaggagatggtagcctggaggaaggcagctgtgagactgaagaaatggatgactaactctctctggggggccaaggagagaggtgagccgatggcaagactgtacacctggctgataggaagaatgatggtgctggtaataggcgggagagctcagggaaagagtccagaatcagactacagttttacctgggtcccccctgcatacagaacgtcttgtagaaatgcccaggggatggtggaggtgctgagctcagacagggctggacagcctcattcataa

SEQ ID NO: 52985 - DNA, 1044 bp, Homo sapiens
cactgactttagattggtagttgaatcggtagattggtaggagtctttctgctcctgcacttatttaactgctcctttttttttttgagacggagtcttgctgtgtcaccaggctaggagtgcagtggcacgatcttggctcactgcaacttccacctcccgggttcaagtaattctcctgccttagcctctctagtagctgggactacatacatgcacctgcacgccaccacacccagctaatttttgtatttttagtagggatggtgtttcaccttgttggccaggatggtctccatctcctgaccttgtgatctgcccgcctgggcctcccaaagtgctgagattacaggcgtgagccaccgcgcctggcctcactgttcttaacatcttttttcttttctttttttttcttcctaaccactagatgaccagggatgctgttaacttccttttgcagctttttctttccttaaaaagagtgaagtctgatttgggagaaatacctcattatttccatctagcaactgaagttgctcttattcagaaaaccccattgaggatcctgtacagggcccagtacttatccaagtcagtctgtaaaatgttcacctgcattgcatcctgggtacatgcaaaacctggagctgtgttctggagggttttgaactatgcactaaaaaggaaatggctactcagaagtcccacaggggccattctgggctattttaacaaagcagtaatagcaaatacattttgtttttttttaatccaaagttgattagaaatgagccagcttcgccgggtgtggtggctcaagcctgtaatcccagcactttcagaggccgaggtgggcggatcacaaggtcaggagttcaagaccatcctggccaacgtggtgaaaccccatctctactaaaatataaaaaattagctgggcgtggtggcgtgcgcctgtatcccagctacttgagaggctgaagcaatcacttgaacctgggaggcggaggttgcagtgggctgagatcacgccactgcatgcca

SEQ ID NO: 52986 - DNA, 1050 bp, Homo sapiens
gctccataaatgttgtctagtaacacccacataccacacagaagcagagagagagtaatagttgtcaaaggtctcatagctggtaagtgactcagggtctaggagctgggagggagggggccttagacattttctgatccatcaccccagttttacagatgggaaacaggttcagggagagaagtgggtagctaaggttgcactgttcctgtcacacacagtgctagaatgcaccatggttagatcaaacatgtgtttgtgttttactaacaatcaggggctcctgcagatgagaaaagttctggtttgatgacctcatccataaaactgcagtctctgatgggcaccacagacagagatggcatgaggagtgtgcctagccagggcaccaccagcacagtgttagggaccaacgagcgagtgtgagcaccccgagacctccaagatagggctgagggacagccagcgggcccccatcctcacctctgcttcctgcccttagtctcttcctctatacgcaccggaggatggccattaccggggacgatgtctctctggaccagatagtgccagtctcgcgggattttacgctggaagaaggtgccacagggggctgggtggtatgaatcctctcctatgggccccccagctcatctttgtccttgatgggggggcaagggggagtaagctcaattgctaagggcattctcatttccctccccacagtgtccccagatggtgaactctacatccttggtgagtggtcctcttggtctgggtcccactcggggcaggggtgcctgattttcagagaaagaagaatggtgtaaagtaagagcaccccctgctaaacttattgcagcaagtaagaccctgtaggatctggcacagcccatctccgtgggctcatctcccatcactctcctccttgctgctgtttccgtctcccccgataacacacattctcaccccggagcccctgcacacgctgtcctctcctcctgcaagcctcacatctcttcacctagccaactcctactcagccttcag

SEQ ID NO: 52987 - DNA, 1050 bp, Homo sapiens
ccagcatggaccagtctgtggcaatccaggagacgctggctgagggggaatactgcgtcatcatatccttcctgtgctaactgcggccctgagcctgccctggccttgggaagaggaatggaaggtgtcgaggtgtctatcccctctcctgcccctctgaaccatcaggggagaaggaaatcagtatttactaagtacttactgagtcctggactctcagccaaatgctttaaatacgcagttatcctcctaactccctatgaagttggggattattatcctcatttcatagataaggaaggcttagagagcctgtttgtctgttagttcagcacatggtttgagtgctcacccaaggccacacagtgaatctgggggggcaggggaacagagggaaggtgggacagcctgggtggggagaggcctcgcctctgggttgtcttcccttgactctgagccgcaggcggtgcaaggtgtgctgtgtgagggggacagccggcagagccgcctcctgggactcgtgcgctaccgcctggagcacggcggccaggaacacgcgtgagtgaggggcttggtccccacctgtctgggccatggggttgttcatcactgcaccctccagctgaacttcaactgtccctccagggcagggtctgagtctcctagaataattatcacaatgatagttaatattttttgaacactatattttaaaccctgcacacgtactaactcataatcctcaagatctaaggaggaagtttcttgagaagagacagtttaacatactagtccagatcttgagcctcgtggtccaaatgcctgggttcaaacccaggctttgttactaacaagccacatgatctattgtttgtttgttttgagaaggagtcttggtctttgcccaggctggagtgcagtggggtgatcttggctcactgcaacctctgcgtcccaggtccaagcaattctcgtgcttcagcctcttgaggagctggtattacagaggtgcccgccaccatgcctggctcatttctgtatttttagtaa

SEQ ID NO: 52988 - DNA, 1054 bp, Homo sapiens
cttgtaatatagtactctgatatataaaatagaatcaagcagaattgccctggacatggggaagctcagacttcctggcttccctttcaacccctgcaatggcctctgagcagaatcctgggattcttgggaaccatttgaaaactgctgttgtaggtcagcctttctcaaccagggttccccatcttaaacatagagagctaaataaactattttctcagatactctaatgatgggtcatgactgatatcattctagatgtctacgagagaagttaattcattgcacacggtggctgctttggggcagtgggacttaattctcttgtggaaccccagttgagaaaggcttagatgaatgccaatcttagtgtaccagagtatgccatggaatcaggccaggatgagctcaggtacttagagattggttccaaacatttcttttaggagagctgtctaacaaagtgtaccccttccttttcaggaagaatatgaagactcaagtgggaatgttgtgaataagaagacatacgaggatctgaaaagacaaggactgctctagtgttcagggatgtagctcagcttttgggctagcccaggcttccctaagatctgctttttctatttctcccaaccaaatcctcttaaagaccctttgctatgtagtctcatggtctagcatgcatcttgtagaaacaaggcatgctggcagattgcagggttgagatgtgttttatctgttttatattttaaaagattctgccagaaaataaaaccagaccttgttctaaagcccagggttatggaccaactcagtgcttcaggtcttaacgcctccatacctcttcctcaccaactttactagtagctgagatttaatgggcacctattatgctacatatcatgttaggtaaatctgacctgacctctttccccaccctcctttgttgctgcttccctgaatgagtattaccccaggatgaggtctgccatcagcttagttagccattgatgcaaatactagggaaagactaggaggatgagccagggttgct

SEQ ID NO: 52989 - DNA, 1236 bp, Homo sapiens
agatgagatcccattgtgttgcccaggctgatgtcaaactcctggcctcaagtgattctcccaccccagcctccaaaagtgatgggattacaggcgtgagccaccacacccagccaggaaatattttagagtcagaatagatgagactgttttctgttgttctataatagcctcagatgagtaattaggcaagtgatgtaaaacctttgactcttttctttgggatcaggtagagcctgctgataaggagttctgatatgaaggcaagattttcctttattctgtaagaaagaaccttatccttggaagtaaggggtcagcaaaagttacaggaaaacaggaaatttcccttcttattctgcactacttttttctgacttttcatttatggacctgctttaggaacagcgacatctcactcatgaaaatgtacagcgcaagcaagccaggacaggagaagagcgagaagaagaggaagaagagcagatcagtgagagtgagagtgaagatgaagagaacgagatcatttacaaccccaaaaacctgccacttggctgggatggcaaagtaagtctcagcactaccactttctccccattccccattttggaaacagatacagagtttagtaggctaacacttcttggttttgttttgtttttttcttttttagcctattccctactggctgtataagcttcatggcctaaatatcaactacaactgtgagatttgtggaaactacacctaccgagggcccaaagccttccagcgacactttgctgtaaggaattcagagccatttttcctgggaattgaagtaaaaacatgagacttttagagaaaagagtaggagcagcctatgtggaccactggtgtccagagctgaagggaatcagagaaggatggttttaaaatcaagcccatggcatttgacttttggcaccaatgttagtcttaaatacctgagatagtttctggaggaattctaccgcaccactctttgaaccttatttggttttctcttgcctgctcttaaacttctctgtttttgtctttctgctagcattttagaccaatttctgacttcttggttatttctctaccccattgctaatactcaagataaaaaatagggctgactgatctctttcagatcttaaatggatctttgcctcttgagaaaataaaaaatgaaggggctgatatttatcaagccattcttgagacagggta

SEQ ID NO: 52990 - DNA, 1055 bp, Homo sapiens
aatgacatgttgggaaaaaagtccattgtaagttcatttaaaaatgagtattggccgggcgcggtggctcacacctgtaatcccagcactttgggaggccgaggcagacggatcacctgaggtcaggagttcgcgaccagcctgaccaacgtggagaaacaccgtctctgctaaaaatacaaaattagccgggcatggtggcgcatgcctgtaatcccagctattcgggaggctgagacaggagaatcgctttaacccgggaggcggaggttgtggtgagccaagatcccgccattgcactccagcctgggtaagaggagcgaaactctgcctcaaaaaaaaaaaaaaaaaaaaaaaaagagtattaaaaagatagcattactagaattataagtactttatattctgcagggaataacaagataccaaaaatagaaaccctttttgctttgtctgcattgtgtgttcctctgtagatacctagagatgctgcttgagtaccttcaggattacacagatagagtgaagcctctccaagatcagaatgaactttttgggaagattcaggctgagtttgagaagaaatgggagaatgggacctttcctggatggccggtgagcttcagtgggatgtgaatggtggacatgccagggaattgaagtaattattttcctttatcttgagcttccactttagggcattaggtatcaattccttggtatcacttgtgacaatgaggtattccctgccaagtatgctatgttttttttttttggagacggagtttcgcttttgttgcccaggctggagtacaatggcgggatctcggctcacctcaacctccgcttcccgggttcaagcagttctcctgcctcagcctcccgagtaactgggattacaggcacgcgcctccacacccggctaattttgtgtttttagtggggacagggtttctccatatttgtcaggctggtctcaaattcccgacctcaggtgatccgcccacctcggcctcccaaagtgctgggattacaggtgtgagccaccgcacctg

SEQ ID NO: 52991 - DNA, 1003 bp, Homo sapiens
gtgagtctgttacaggggaagttaggcatcggtggtatgtaaagataggagccaccccttaaatgtatcatttaggtaatcttccaatcgacctgcttaaaaaactaaacaggaatcaaggctgttaaagggctattaaaaaactaaccaggaatcagggctgttaaaggtactaggaagcacagaactgttaagactatctcatatccatgtctcttgaggttgccctgggctttgactggagaacccttgttgtttgcttagctctacagttgtgcaaattgcatcattctgatggttttgtatttgcctttcagaggtatatggaggtcagtgggaacctgagggatttgtatgatgataaggatgggtaagtgacagtcacagctaatccaggagttagtgcttctgaggagccatggttagaggactgactttgtgctctatcttctttgaaattttcctgaaattgcagattacgaaaggaggagctcaatgccatttcaggacccaatgagtttgctgaattctataatagactcaagcaaataaaggaattccaccggaagcacccaaatgaggtatgtcctcagaaaagtattttctccagacctatccttaaagcatactaaaggaaaggtataaaggaaactggacatgtgctattcaaatgcacttcaagaaagaacttgccatttagctgcaaggaccatagttagctgacatcctacaatacagtgttttcagtatctccctcagcttttaagccaaggccggctgggcacggtggctcacgcctgtaatcccagcactttgggaggctgaggtgggtggatcacctgaggtcaggagttcaagaccagcctggccaacatagtgaaactcaacctctactaaaaatacaaaaattagccaggcatggtggcatgtgcctgtaatcccaactactcaggaggctgaggcaagagaatcacttgaacctgggaggtggaggttgcagtga

SEQ ID NO: 52992 - DNA, 1073 bp, Homo sapiens
ggagctgaaataaaatgagaagacactcggtggcgacctgctgggcagcaccctgtaccctagggccccttatcagtgggctcctgatctgctgcccccacagcctcaaccgcggggatggggtggggcaggtcaagcctgagaacagtccactttcaaggacttcccaggcacccataggagacctgaaacctataaagagaagtctagatttaagggggcctaagtcccagagtccaggtttggagggctcgggtctagagccctgatttggggagaggactcagtctgggaacccagactgcaggggagagggtgaattctggagtccaggtgtggggagggggcttgactcatggaggctctgtaagagcccaggtttggggccctgggtcagggagtaccagtttggggatgctggagtggggagacaatcctggagcccagaaggagacccattttttttggcggggggagctgagtcccagaggtggtttagaaaaggagccacagtcctgggcccgtggtatgggaaagcctgggtccaggagccctggcttagggccctgcctggctacagccctggcagagcacttggtctccatccggtacgaagccctggcccaccagggaggtagagcagcgggcgcaggagaagcagttgtggtgccagtgtcggtcttcaaaggacacatacttgcctccaccgagtcctggagggaggctggaagttagctatgcagatgtggggatggtccggccctcaacctcacccaataccacatcccactcccttgcctgcaccctacccactccgttctttgacccttgtcccacctacgatggggcgcttgcagctgctgcacttaggtgcaaagagttctccaaaacaggccacacagtagggatcttcatcccgggaggtgaactgctgccctgccaggggcgtctggcatccggtacagaccagacattctcgatgccacggctgatcacggtatgtcactccaccctgtgtcagcgtctgtgggggcagcatccattagtaggtatgagtggggattcccacccca

SEQ ID NO: 52993 - DNA, 1034 bp, Homo sapiens
cccctactgtgtgccctgctatgacaatacctttgccaacacctgtgctgagtgccagcagcttatcgggcatgactcgagggtaaggagagggccaggccaggcaggaggtgggtggtgaccagtggaagggggcaaaggatgggtccatgaggcctgggtgccagtgcccctgctgtgttccccacaggagctgttctatgaagaccgccatttccacgagggctgcttccgctgctgccgctgccagcgctcactagccgatgaacccttcacctgccaggacagtgagctgctctgcaatgactgctactgcagtgcgttttcctcgcagtgctccgcttgtggggagactgtcatgcctggtatgtgttcaggggctcatcttgtgtgagaactggcatctgcgtagggtctttgcatgtgtctgtctgatacatggagacttggtctgtgtaaagacctgcatacacagcatgtttctggaaatttagtatatacgggatctgtttgcctggtatactcctgggggctactatgtacaggcagattgacacatgtgatacatacttgggggcttagcatgtgtgaatatctgcatgtttagtacaggtaggaactagaggtgtgctgagactgtcatgcttgttgcattgggtcttaatgtatgcagaagcagataaacagagggcttaacatgtgtggggacctgcatgcctaatagaaatgctgggactcagcacctatggagaatggtgtgccgaggagatgcgagggcttagcatgtaccgaacctgtcatgcccagggcattagaactttgtgtgggcagatacttacttgcctggtacatgtggggtcccatgtgagtgctaaaatcatcacatctgttatatgagggcttagctcttagtgagacttcatgactgttacatggaggcttgatgtgtgctgaaattgtcatctctgggacatatgggggcttaacataggccaaaaccctcgtgtctagctgggtcatcatgtccggtgtct

SEQ ID NO: 52994 - DNA, 1050 bp, Homo sapiens
tgacaacaaacttaggaggtaggaagtggtagtatctcatttaattagatgggaaaacaggcttagggatttgcccaagatcactcagccagtaagtgcaggagccaggattcaaaccttacagcttgagctgctccatacaccatagccagttacgcagtcattctgagctccaggaggttcactgggaggtgccttgtgaggggagattgttggaggtgcagggttgtgagccatctgtagaggagcagtctcccccaaaccccgccccactgccggtcaggaaggaatacaaggctggctcccttcagtccccgcagtccccagccttgccagggaaaagggcagggagaggggtatgggcagagacaggtgggccttgttggtgccctttactctgtcctcaccagagcccagctggatagactagggcattgggggattctgggaaggaaatagaagccatgcccataccctatttgggttgccctggtttcggagtgctgactgtctctcagggggtggacccaagtctagcctgggcctgagaaggtggcagccgcagtgggccaagccaagaaggaaggaagaggcccaggcaccccctgtggacgcattccacctgtgtggccccctgctgccccgtggctgacagcccaggcaatcctcagatgttgggccagaggaaacctgggcctgagtggcaggaagggggctgagaaagaggagtatcttctctacaccatagcccccagcccaggagttccagctctaaagaccctggcccctggtggcctcatgccctggcctggagcgcaagctggctgttctcccattgcgcagaggcttgatgtatggagagtcaggcctccaagctgggggcatctgctggtgcctggagtctgaacttcaagccagagcagcgcttgttgtcaagaatttcgcactgggggtggatgagaaaaggaggacttctccttcagcttgagccagggcaggccctggcgactgccagcactggagccttgtgggagagtgggttggtggatt

SEQ ID NO: 52995 - DNA, 1411 bp, Homo sapiens
ggctctggccacgggtgcccggggcacgccgagcccgggacagcgcccgccgggactggacccctccgggctatcgggcggggcgggggcgggggcggcagcgagagttgggcgggggagggggctaagtttgaaatagaaaagccggagagagacagacagaccgaccgaccagaagcgctggagaaactgaggttctcggaaagcccggtggagcgagagaccgagacaggcagggactcgaggcacaggaggctaccgagaccactgaaacaaggacacaccgggcgtacagagttactggtggacagacccgaggcatgggggccgtcctaggctttgtggagcattttcagaaaaagcatacgtgggaccccagcgaacacattccctagggcccttccccgggccttggaggtgccctgaggcttgggcgtcattggcctcatgctgaatctgctctctgaggcctgcagagacgctcagagactagagacagagacattcaggcgtgcagaggtggcgaaagagacttggatgcagagacagagaaagggaggtggtggggattgagacattcagccatgtagacaagaagagaccaagacttgagatccacagaggcatgggccccctgggggacagccagtcaagatacagagccgtccaaaacctaaagacagagactgaagtgtgcccagacacagagatgctgagtgaagcagagacagacaccagaaactgagactaagtgggggcagagagacctaggtggtctgacagcttccaggacagcccctgacttacccgggcctgaaccattgggaggtgaggctgtggggaaacagaaactctgagcctaccgatcccccatgaggcagaggccctgagacagtaagttcgagatcaagaagagccccacgcacacacacagccaccaagacagccccaacttatttttgaactcaaatcttggatgggctgcctcagccctgggggacccagggtgaatgaactgttcctctcatgtccccagagcagctgcgggatcttgctccccaacccccttccctaaacttctctgacttccaggccacatgggggagagcagagcttggggttggtgcccggtagcagagggtgagggttgagggagttggatttctccccttaagtctcctgtcagcttctagaaggtgggggaggggtctgttctgatcctgactcacagctgtgggacctggccagggtcctcctggacagtgggcatgttgggggtgggggcagaaggattgaatggttggcatggggcattggaaaggcttctgggtgtcttccaatcacagggctagcagctgaggagaagagccaggctctggtgcatctcctgttcccctgcccttaaaaactg

SEQ ID NO: 52996 - DNA, 1845 bp, Homo sapiens
acttagccagaagttgtcaagtccagatttgaacccatgctgtctggctccagagtccatgattctagtcattgcgctatactgtactgtgtagtttctgaattacatatggtcatttggtgcccaagcttgcaccatatcctaaggagttttaatttgtactttgtttggtgtctccctgtaatgatataaatggcactgaaacatatataggctggggacagttaatttcaggttccactggaataggaactgttgattagactgtggaccctgcgaagacatgagctcagctcagtgacagtggagtgtccagatccagtcagtgcttttggcttttttgagtttcactctgtgtgaccttttagatgcttgtaaagtttgcttattgtgggtttttggttttttaaaattatctatttttttttttttgctatgaacctcatttaacctgtcttttagtgactaccgtaaaaaacaagaatacctcaaagctcttcggaagaaggctcttgaaaaaaatccagatgaattctactacaaaatgactcgggttaaactccaggtgggtgcccaatggcttggttggtgttttgagctccacacattggaaaataaggacagggaggagatggagaggaagaatcgttggccttaatttaacccttctctggttactccaggtgctcttggtcagtgtccaaggcaaaccctccacttccagaggagcgtgcatttttacctttgaatctgggttgtcttatacctggagctgttctaggacagatgactggaggtgctacattgaacgtacgcctcaggggcctgtgtctaggattgctgttagcatacagcatttggttgtctttttgtttttttttttgagatggactcactctctgttgcccaggctggagtgcagtggtgcgacctcggctccctgcaacctctgcctcccgggttcaagtgattctcgtgcctcagcctctcgagtagctgaactacaggcacacactactgtgcccggctaagtttttgtatttttagtagagacggggtttcaccatgttggtcaggctggtcttgaactcctgacctcaagtgatctgcccatctcggtctcccaaagtgctgggattacaggtgtgagtgaccgcacttggcctatggttgtctttgttctagccgtgcactgtgccaacaacttattaatgattttaatctaatagggaatatatcttttaaatttggattttaggatggagtacatattattaaggagactaaggaagaagtaaccccagaacaactaaagctgatgagaactcaggacgtcaaatatatagaaatgaagagggttgcagaagctaaggtaattcactctttgttctgattggttttattggttaagaagggaaacttaaattcatcaatctcaagttattcattaatttcttctggcatttacaatctcacttgattgtaataatgatttagaagtatagttagcatggtagagtggaaagagttcaggtttgggaatgagacagacctagggtttgagttctggcactgccataaattactagccccatgacaatgggcaaattcaactccctgaggctcttccctcatttctgtctcaggcgactgttgcagggattaagtgcgtcttgggaagtgcctagcccaatacctgatatttgttgggatcctttcctttaaaagaataaagcaagttctttgctggctggcaataatgatgtgaaatggtttaaacttttgcagtttttttttttttttggtaccctagaagaatctaatataaagtgagaccatattctg

SEQ ID NO: 52997 - DNA, 1008 bp, Homo sapiens
agggggacggtcctgactctgctccaggtgagctgtgtgtccttggaccacttcttctctgggcctcatttttctgcgtttgtaaatgacgggtttcgataagatagtctacagggttccttttttaatttttaattttttttttttgagacagagtctcattatgttgcctacgttggtctggaactcctgggctcaagtgaccctccctcctcagcctcccaaagtgctgggattactggcgtgagccactgcgtctggcccagggttcctttcagctccagaatgtgatgttcctaaaatgggcaacgttattgttaccacgttatgttgattctggtgaaagaagggagttgatgaaactatgcagttggcttaaatggattaagaaacagtttcttactcatttttgtcctgttcattgttcactgagaatgtgtgtgtttcttctccagcgaatagctaaagaaaggcaaaagcagtataactgcctgacacagcggattgaacgagagaagaaattgttcgttattgctcagaaaattcaaacacgcaaagatcttatggtgaggagagagagccttaggcctctttttttttttttcccccttttctttcttgtaaaggtcttaactcagactagatttcagctgtgtgtaaatcaaccccagtgaaaatgtctgctcctcaggggcagtggtttgagccagtgtctgttactctgacagtgttgaaatgcgccttgattaaggaggtaataagggggttattagtcagtgctttggaacagcaaagggtaggatcgggtagcatatgaactttatagcttatgagcagctcccgtaacatttaaacaggttaacaaaacagtgcatgtcactcattggtgtttaaaaatagacaacattgtgtagttaaatagcagagctgaggaatataagatgcctctttcatattcttatcattcctctaaatgtcaaattctttagctttgtagatcatttaggt

SEQ ID NO: 52998 - DNA, 1315 bp, Homo sapiens
ggacgatgtatacgcgcctggggagctagggcctggcgggggcggcgcatcgccaccctccgcgcccccaccgcccccgccggcggcgctgcaccaccaccaccaccacacactgcccggctcagtgcagtgaccccgcgggccgggcccccgccggcgcgctgcagggcgcgggcgcgcagcccgcccgcgcggcctggactctttttgttcggttgctttggattttacaaaaaaaaaaaaaagcccagaaactttcgaacaaaaccaaacacccggacgaccctctccggtgagcggcgaagacagcccggtaggctgcgtcgcccgagccccgggagagaggagcgaagatccggaactcgccaactcaccccgggcatcctgcccgccgcctgctctctgcccccatcccctcgacgacccccgcccctgcccccccgggctgttcggggccggatcccggcagcggcctccccaaagcgacaggtaacgcagtgcggggttagggattccccgggagagaggacgaagcgaggagagttctccatcccctctccccgcgtggactcctgagcctgcgggtccagggtggggggctgtcactttattcgctacacgcctcttctctcctataaggatgcgccccaccccgctttcccctttctccgggcttggttttttacggtttttatttattcgtggagcctctcggctcctggggtccttctaactccgcccgcgcccttaatttaaatcgcagtatactgtatttatcggggccccggaggggaggtcgcgagagccgcgtctgtgtataaaagcaggaaatagccaaagctttaatctagcctaatttatttttccccttatatttccctaccctaccctccccccaaaaaaaagcaaaaaaaaaaaaaaaaaactaacaaaaaaaattcgagtgttcatttttcgtttcgtttcatccgagccccggcttggttcccggccacgccggaggggtctgcgctcccacacacccagacgggaaggggcttctgccctgctgcagaccgaccgccgcatagcgcggcccctgctccccgcggggccctgccctcctggccacaccaaacgaaacttggaaaagttagagagattgttttttaaccagctgtagaaataagccgttccctgagaaccctccgcctgattccctgcagcttccctctgctccctttccagcccgccgggatgcgggatgccaggggaggccgggagagaaattccccaagtttggggtgaggtgggaaccatgtaaatatgtgagata

SEQ ID NO: 52999 - DNA, 1036 bp, Homo sapiens
ggagggtgccagggtcatcttattgatccactgccttggcgagggtgggtgccatctagacagatttgtagtgcttgccaccatcctaaagctctccccgcataggatgagctcacccttctgagccctcaaagcccctacgtctctccctctaagctcagccccttcaggtgtccagttcttctgtccttcctgtaatctttagagcccaaggcagaagagaggagtagtagtagggccgtcgctgcctttggcagaagagaaaggagcgatctaacttatttaatctcaggtcttggtgaagggaaggagggacagaaggtgaaatatctctttgggaagaatctttccttgtatttttgttttcctgcctcagcccctaggctgtgggtgtgggtaggggtcctcccagagtgtcagtagaatattcaaattaggggtggtcaattgctcttgaaatttactttcatttttagcagaatgtcagcctttgagctggtgttaatgcccacaatccggttatgcagaacacgctctctgcaaatcggtaaatcattagtggggattaatcaactctgaaaggctggggctaggctttagtttctttctttctttctttcttttttttaaaacatactttttatccggatggctgcaaaattcaccatcacaggatagggtgggagcaggggatgataatttaagtccttgtcaccatcattagaaaagtgagatacctttctgggccttgggttgactttgtagtccaattgaagggtgggagtaggcagtttgggtggggtgggaggaagggagggcagttcccttgtgattatatgtgttatgatgtttataatagtgtgtaggtggcttggtgtgcttgtatatatggtgactttatgttagcatgcttgcatgaattcatacgtttctactttagagatgcccatttatgtgcttgtgttagggtgcttttgcttggtttgtattagtgtcagacacttggtttgtaattgtgtcagacagtacttccgtt

SEQ ID NO: 53000 - DNA, 1029 bp, Homo sapiens
ggagtctgatatcctgctaagggtgaatttctacctcttagggttctcatgagggttcaatgagatatgcatgtttgggtttccccagaagcagatcccaagataaggatttgaacacatgcaggaaagtgattccaggaaatgctggtagggagtgggcctgtgagactgggaggggaggaagcccacagagagagcctcttggagcaagttgcaagttacactatgggtaactggaccactgaggatcactgggcgcctgtgttgaacacacttctgagagttaccccacttgctagatgaggaagccaggtcatttatctactgtcatgtcagtcattctgggggttggggtgaaggttaattctctagcactctgagcctgccttgggagggcagagcaggctcctggagaccagaagaagccctcaggcaaggatgcagctgcaggcaatttgaagtcaggctagagtacactgaaatggtagggcctggaggaatgggggtggagcgccagcactgtctgctactcatggagagcttgtggcataggaagcaccctatcgatgatagtaattattgctgataatattaatggtagttttactaatgattattgtcattgtgagggttaaattggaggatattaatcatagctcacatatattgggttcttataggtgccagcagtaagcacttctaagcactttacatgctatctcatttcatacctgtagtagctagtatgtaggagaatgcatgatgtgtggcaggcagtcagtaaatcgctgtttcttcaaacttggaagttctagaacttcaggtgatgaatttgggactgttcaatggacccctagatgctgagggttcttgtcccaaacctcctgagctacaggcagcctccctggtgccttgagatgctgactcagcagagaaagatgtaaattcctaccttggtttgcatacaatttacacatatttatttatgagtgtctttgattaatgtcaaagtgcctgtgtgatttttct

SEQ ID NO: 53001 - DNA, 1051 bp, Homo sapiens
ataaacatgagttactttccaatcagaaaaaaggttgtgttagaaaaataaatttgtcattacattgatgaataacaatcatcatgacagtccgaatagaccaatcttttaataccagtcatgaaaatcagctgagcatataccaagtgatgtgtaacacagatcctgaacaaaaccaagaatgtggctgagaagtgggttgaaagacatttacattgtccccaaattgcctttccctctccccaccctacgagggacagccatctttctgcttgacacctcctctgggggatgggaagcagggtcactgctccatccatccaaggcctgtggcttagtgattttgcccatgagatttaggacactttcaccataatatttattcagttttatggctttaaatataaccctaactcctaataatcaatattgatttagctataatatcttatttatagacatagtcttctggtttgcatatgggctcaaactgtaatgcagtagaaataagccactcactgccctggccctgggccaccaatgaagagactatcagcccctgatggatggctcggaggcccagacagagtttgggtttctgatgcccacttctccccaccccctccaaaatggctgctttgggcaaggcagaaaaccacagagccatcctgggactgagaatgccttttcacctcatgcaacataattgtcattcttaaggagacaagccttccacctggccttattggagggcagttataaccagtagaaatgctaatagaaataggaccccgagggaaagagaaatagctagaagtacaaaagtttaagggtatggcttaagaaaatagagacttgcctccaacttaccccaagtgggcctgactgtgatggtatggatttctagagatattattttgctataattagtgttgaagaggtgtccaggcagcacggcccctcataggggtggccactggcctggccaccatgatcctgtgtgattaagatctacgaggaagggtagaagaagccagaactgtctatccta

SEQ ID NO: 53002 - DNA, 1050 bp, Homo sapiens
cttttagcatttggaacatagacacagggactaaatcagtaagatggtattgggcactagaatggaatagtcatgtagagttggggccaaagtagatgctccaacttatccacctgctcctgggacacactccccttcacatgcaagtcagagttatgggggaatgcagagaaacagacataataaatatatgaataatgttttggttgtctcttgctgtataacagaccagcccaaaacttagtggcttataacaacaatttattattatctctcatgttctgtgggttgactagaattggctaggtccttctcatttgtggtcactcatactgttacaatcagactatggctggggctggtgtcatctgcaagcccagctgggatggatgccaatcatagcaattgacactgtctatagtcagggaactctgctagggctgtttccagagtagctacaaatggcctctccacgtggcttgggcttcttaccgcatggtagttgggttctaagtagaagtgtcctaacagcaagtgtctgaagagaaggggagcaaaaatggccagtcttcttaagggctaggcctggaactggcataatatcaattctaccctgttctgtttgtccaagcagtcatagactaccctagacttaaggggtgggaaacatagactccacctctcggtggggaaaatggcagtgttacaggcagggaaggaattgatggtggccatcttggacctcagctagcacaaataataatgatttctaagggtaactggtgaagcttgttaacaattgtgcaaggcactttatatacaccatttcctttaaggtgctttatatacaccatttcctttaatccttagaacaattttattattacacattttacagttgaggactttaaagcatggagaggatgaaataaaatatggaggatattgtagtgtcaaggagcagaattaggctgggcgcggtggctcacgcctgtgatcccagcactctgggaggccgaggcaggcgatcacttgaggtcaggagttcga

SEQ ID NO: 53003 - DNA, 1040 bp, Homo sapiens
cacacaccgtgccaccatacatccctatacatacatctgtgcaaatgtttctgtagaattgattcccagaagtgagagtgcagatctgagcatgtgacctacaagtgttttccacgttgtttcaggcatcccaattatcacttttagtatctgcagaaccaccttttgaatccaacttagctgactcgcatagcggaagggaaaacaaatctgtttaaagctctcctatctgcaacttccttcctatagaaaaaaaaataacttggcgagcccctgagggtgtaaatataaagtgtccactctaggaagtggtctggaaagagacggcaaaactaagagagggttgaattgtgtgtagaatgtggagtttcctgaaagatctgggagaaatggatgtgtggggagtttatggaaagagaataccagcaatatggcagaaaacttagggtcctatgaaagaattccaacagcaggaacttccccagcatgggttttggctgaggggtttttatatagggcccggatataggatcttcacttaagaaatgtgatttgaactgcgcataatcaatggtgttctggtgggggttgaagaaccaactctagggaaggggctgaaagaccttgatgtgcagcatttgctgatttccgtgatataaatactcatcccatggcacgagtctgctggagggtactgaatgccccaccactgtcctataaaccattgataaaagtctactcaacccaacatccctggaccagtggactccccgagcagaggaaatcaggtagggtccagcttggagtgaagagatcagcaagtgaggacaggtgctacaggatccagaagggagctgggcagccagctgcagtgaagactgagaaaaggatgggaagcctcccttgagaatacttaggggcttccactgtgtggaaagggcttgagttacctctttcaaatgtgaaggaattaccccaaaggcctggaagatgtggggacccctggtgtcccatttggggcgactctagtgttgcacact

SEQ ID NO: 53004 - DNA, 1080 bp, Homo sapiens
ttaattgctcatttatgtgtctctttccctgctctccactgagagctccttgaggtcagggcagcatccccagcccccagcccagggcctggcttggagtgggacccgtaagggtgagctgatgtcctgattactattcctgtgtgtatctgtctgctcaggctgcagtaacacagtacaacatactggtggcttaaacaacatcaatctatttctcacagttctggaggctggaagtcggagatggaggtgttggcagggttggttccttctcaggcctctgtccttggcttgtagatggccaccttctccctgtgtctcacagggtcttccctctggatgtgtctgtatccaaatttcctcttcttttggggataccagtcatgttagattaggtcccactcatacgacctcattttactttaagcacctctttaaaggctctatctccaaacacagtcaccttctgaggtatcgggggtcaggacttcaacatataaatttgaggagggggcataactcagtgtcacacataacactgggtaacgagattacccctctcccccaatttagcaggttttatcatgcaggaggttttataattcacatgaattctgtgggtcgggacattgcagggatgtcttggctctgccccacgatgtctggagcatcagctgggaacattcaaaggctggggctggagtcctctgaaggctcatttgctcacaagtctcacatgtgggctgggatgacacagagactagattgcagttgaaatgcttttccacgtggcttcacttcctcacagcatggtggcctcagggtagctgggcttcttactcagtggctcagggctccacgagcaaatgttctagtgaacaaagcagggctgcatgaacttagtgacagcatctctgtcattctctgttgggtgaagccttccagctgtctttgtgctgctataacaaaatgccatagactgggtcatttagaaagagcagaaatttatttctcacagttctggaggctgggaagtccaaaatcaaggtgccagtagattccttgtctggtgaggatcct

SEQ ID NO: 53005 - DNA, 1033 bp, Homo sapiens
cacattaattcactaattctaataaacagctggataacagtagtgcagagcagcacaggagtaaataatcttgaaggagagctacaggttggggagaccgtggagagagggatgcctgtgaaatggactttgagaagaggagaattccagtaggaaatagaatggaagaaaaatttactgaattttttagaatgggaaaaagaacaattacacattattctcatcagcaaaggatggtgtttgacactgtgatggagtgagaaaatgaaggcatgacccctacctttgaggacaggagaagggagaaagggacaatggcatagtatctggccagccatgctggttctataatcatggcacaaaggaaatattttgggactatggagaagagagatgatcacctgtcaaaaaatagttggcacttggttgtatttttcttttgagtttctgcttagtttgtgatttcctggaaaatgccatctccttccctttcccagcctccatgccaccatctttctacaaatgaattggaaggcagttagtccatctcctgctaatgataacagctaccatgcatgtatggactagctatggcacatggtaccttattaaattctcaacgttaccgtattagttatctattgctgcataacaaattatccccaaacttagtggtttcaaacaatagccacttattatctcaaagtttctgtgactcaggaatttgcatgtagcatagctggatcctctgtctcagggtctctcgtaagctgcaatcaaagggttgcttgtgctatatcgtcttaagcctcgacttgggggaggatctgtttctgagctccttcatggggttgttgggaggattcagctccttgtgggctgttggctggaggcggtgcttagttctttgccacatggtcctctccattggacagctcacagcaaggtagcctgttcatcagagcagcagggggaaagggccaagagggaatgcaagcaagatataagtcatagtcttatgtctgagtcttag

SEQ ID NO: 53006 - DNA, 1801 bp, Homo sapiens
ggtcttgatctcctgaccttgtgatctgcccgcctcggcctcccaaagtgctggggttacaggcgtgagccactgcacctgaccgatgaccagctgttcttacgattgaagaagttgctatctagtttggaggcttaagaatttccaaccagtgtttatccgagttatttttggctgcaaacccaaatataaaatttcacaattgacaattcaggaggcattcttttctttttccttcctgcaggtttaatagactacaacttccactgtttccgaaaagctattcatgaggtttttgaggtgggtgtgacttctcacaggagctgtggtcaccagactagtgcctccagtctgaaagcgctgacacacaatggcacgccacgaaacgccatctagtctgaatcccagcgtcggggctctgtgccagcttactcttcactccagggtcggatgccacgtgctacaggacatgggagctgctgcttgtgggaatctggtgcctgttccactagagacaaggggtagagtttctcatttggatgaaaaccccttcaactggtggtgtacaactgaagctactatatcttttttgaaaatggcaaaaaaaaaaaaaaaaaattctggagaccacagaactcaagtgtgtgtttctcctcttttgggtcccctttaagtagttgggatattttggacctggagataacaccagttacccatccttaccagggaatgttgccatcaattccagttgaaaataatagaaaagactgaatttttatatgcttcacttaggctttcatttgagtagactctaaaaattctgccttgcttaagttctaacactgcctctcagatttcagttttggacattgcacaactaagaccttttaaatgcatttgcttgctaactcggaagacacatagtctgcagcaagacattcctatattgaagaaatgagagaaaattttatgctgcatcaggtggagagcaaggctcaacggtggttgcattagttccctcggaagtattgaaaaaactttgaaatggaagaaaatttttgcacctatgttctgagtaccagatgtctgggttctttcttctgcattagataaatgatcatgctcagtgtaacaaagggaattaaaagttttcccacagtccccttctaggggagaaactcattgtgtcactgaaatgtttagcttactttaatcttgatatcagcctctacagaccttttattctaagctatcgagcttcttgattgcatttggttgaccacgagtgaccctaaggcattgggggactgtccactgggagttggagtgagcacgtggtgctgcaacaggcattgttttacatactttgtctctagtattctgacaccaagtgtcaactgtggtactttctttgcctaggatatgaattcataattgttgcttttgttgatggttgataccctttccattgatttaaacctaacacattatttctattccacatgcccagtagacatatattccaaagccactggaccacttgagtacataagtgccactgtttaatgcaatatgtatattcaggtctgtaaagctaacagtgtgacttggagtgcttcctgcaggtgattctgacttgagtatttacatggaccatggtgatatccaaaagaaaaatgctttttatatttatagattatttcattgaactatatatgaaatgggtatcaataaatgtatttactccaaaatcagcgtttctccttgcctgaggtatggagggtggtggcggaacgttggg

SEQ ID NO: 53007 - DNA, 1104 bp, Homo sapiens
ttgttttcccgaccacctctcctgtttcttctgttttttttttttttttcctcagtcctgtttgtcagagccaagtctttctgcttgcgtattttctaggtcagctcatcaaatacatggcttcagttaatcttctctatgtgattgaaaaattcacatctccagctatgacttgggatcatgctctcgtcccatgtttggagctattagtaagacgttctctcttaaatattgtgaatgttaccttcaacgtcatgtcaatcattggttgatgagtatttcccctgttttgtgactctcgtggctgtcatacttctgtcactagttacgcgagtttctcctgtccaagtgtagataccttgtagttaggtaattgtgtggtgtgattgctgaaggggcccttgcagattggttcacagaggagatttcgtgatctcctttttctattcttctatgttgtttatattgaattttcaccaaatctgatcatttgtttcttgtaactgttacttgggtttcctttccattttcactgtcagtgattccactccaggttctcattgcttcaggccagtggtgctgcagtagtctcttacttgataatattcatgtagttgacatatatgtggagggtgtagtatgtgtcatcttttatcccaaaggcagattagttttcagaaaatttattttatattatttaactactcaaggatctacagtagctctgttatttactgcaacaagtccttcctcttctacctgagttttttttttttttttgagacagtctcgctctgttgcctaggctggagtgcagtggcgcaatctcggctcactgcaagctccgcctcccgggttcacatcattctcctgcctcaccctcccgagtagctgggactacacatgcctgccaccacgcccggctacttttttgtatttttagtagaggcggggtttcactgcgttagccaggatggtctcaatctcctgacctcgtgatctgcctgcctcggcctcccaaagtgctgggattgcaggagtgagccactgcgcccggcctgaatttttaatggaatagttcagatatacacaaatttttgggta

SEQ ID NO: 53008 - DNA, 1158 bp, Homo sapiens
ctaagtattttcttgcttttgtgaggaagcaaaaaatatgttttctgtgaaaatgtgattgacctggcaaatagaatatgcctcgaaggagctcatctaagtgaggcggcaggtcccagaggtccctgttaccttagggcagtaaagagaggagacacctcagctgggtttacagaacacagtctagggggtgagtagccccacctggtgagatgttggtaacgttgtcatttccctggttaagatatacatatgtttgcacctttttctccaaatgtctgattatctatattaaaggatgtgtatggagttgttgtttttaataggtatccctgaaattctgtgtttaggaacactataccttaacaacactctctcccaatatgtttaagccagtattctttcccagagacatttgggaaactgggtggatgtcattgtgcagattaaatgtggcagatgcctagatgggaaacctgtaatgaatagtactttcttttaaaataggttaaaggaagatggaagtggaagtgcttatgacaaagaatctatggcaattatcaagctgaataatacaactgtcctttatttaaaggaggtgactaaatttttggcactggtctgcattctaagggaagaaagctttgaaagaaaaggtaatagcattttaaaaagctgtttttatgttaatttctttgccataacttctcaggttcttgaaaacaagtgaaaataataattgcagtgttagacaaatagctatcagaaaaaaaaagctcaaactgcttttgtccctttccttccatgtatagtccagactttctcttttctttttttgatctttcattttaaatcaagattttaattctagcttttctgcgttcaaatgctttcattacctgtttaactgaatgcagtttggcttccatctgaacaagtctactgaaactagacttttatttatttattgtttatactttaagttctgggatacatgtgcacaacgcacgggtttgctacataggtatatatgtgccatggtggtttgctgcactcatcaacccgtcatctacattaggtatttctcctaatgttatccctcccccagccacccacccctgacaggccctggtgtgtgatgtcccccttcctgtgtcc

SEQ ID NO: 53009 - DNA, 4081 bp, Homo sapiens
cgactatataatgaagattgtactccctgagttataaagcagatagaattgttgacagtgtttaaattgttaaaggcttccctctcaaatacgtgttttattgaatctacatgtgttacttctccaccgtaagtccttttaggcctccagactcctgtagattcctccattctctgtagagtcccgactcccatcctgtttaatatgctctttacataaattgtaaacaccaattgtattcatttgtttattcagcagatacttatgagcactgttcagggaagtgggcttgctgctaggagcgagactgacaaagtctctttcccctggaacttaacattttcagtgacacagctcagaagcacctaaatgaatgtatagtatcgttttaagtacttaccagtggtgtgaagaaaaacaaattaggggaaaggggttgaaagccttgggtacacgagtgctattttaggtaggctggtctggaaagaactttttgaggtgacattttagtagaaacctgaattatgttcttatttaataaatgtcacataactcttctagttttctcggttttagtcttatttttggtctcagttatgtgcttaaaaaaagctttttggatcagattgcaaagacttcggtgaatattggagtttatgtacctgaaaatccttttctcagtactacttcagttgccccctgtgtaaatgcagtaaagagatgaagccaggtgggaaagtgtatttgtcatcttgagtgatgggtatggtagacaagataaagaggctttattgaactcactgaaatcaaatgttaagaaacttaaaattttatgtattataatagttgtcatagaacataaggtatttttcaaattaatcaagctatgttgtgtttttcagcttttatctgactagtatctatgaccattcaatatttgaagcctttagtaaggtggtgcagaaactcattccacaactgccgaccttggaaaacctattaaatatctttatatcagtaagtgagcaatttatatttaattcactgcagcttctgattccatttttgggaatatatttgtgttttcaaattttccaaaaaagtcttgaattaatctgtatcaagtacaaagactagtgacccacttaacatgtaaaataaatgataacatattattcaagttattttctgaattcttaaatagatgttgatgtcaacgtgtaattcttttatggtttgtaaattgccacataacgcctttcttgatagcaaagtaattcaaatcagagatggtttatattaataagaggattattgaaaatgtagcattgcttgatttttagagatttttgttaaattttttgtgatgtcttagaaaacaattcatttgagtaaagaggaagaagaagatttgacttaggaaattgtgtcagtaaatcagagtagagaaataattcctctttcattctttggataatagaagagtctctcaagcaagtgctatttgttttttggtattgggttatataattaaaaatgaccttggatgttattcagtaattctagatcttcgataagttgtaaattgtgattcttaaaaaatactgaacagtttcccatttgtttttccaagaattcaggtattgaaaaagcttttctctttgatgttgtcagcaaaatctacattgcaacagacagttcccctgtggatatgcaatcttatgaactttgctgtgacatgatcgatgttgtaattgatgtgtcttgtatatatgggtaagttatgtatatattcctgcaatatctcagacaggcggaaaactattaacttgatttgttcagaagactaatttctgaggcccctggcaagtggtactacatgaactgggattgttctgaccatagtgctttaacttggagcatgatttctctggaagttggctgctgggtcttactccttcggagaatggctaagaaaagttggaaagcatgactagaactggacttgtttatcactgcaagtttctcccactgttgtggggatgggggagggttgcactgtgtcttctcactactggaacttagttagattgaaaaactagattaatttaaaatggtctgaataacaaagtaagttctggttcctgatttaacctcaggctttgtggaattagggattcttaatctttcagagagcaaagaaagtaattagaattttggatgttggaagaacttataaaaatctgacccatatatacaagtttccaaaataaatctctaaaatttgagctcctcctttatgtaaatttgccaaactcgctatagaaatttatgaaagccagccagcaagtgattttgtagaataggccagaggactggtgaaaactttggagaattactggcttttcaaaagctgataatggccaggtgtggtggcttgtgcccataatcccagatgtttggaagcctggggtgagaggatcgcttggggccaggagttggagaccagtctgggcaacatagacctcagctttaccaaaaaaaaacaacaaaaaaagagttaataacattctctgtaccctctgacttcctagattcccctggtatattaacatcagcactctcaagttgcttttcagatgttttagcattatctttgctttctactacctgtgtcttctctctgctccatctagtctaaatatctctttcacctctgactctgcccttcattttggtcttttgcttaatttctccagctgcctctgagtaggagagtacatttgtcttacctattctatatctgtctattcctttaacttttatgattatatgctctcttttgttatttatttatttatttatttatttatttattaaacggagtcttgctccgtcgcccaggctggagtgtggtggcgcgatcttggctcactgcaagctccacctcccaggttcacgccactttcctgcctcagcctcctgagtagctgggactacaggtgcccgccacaacgcctggctaattttttgtatttttagtagagacgggattccaccatgttaaccaggatggtctcgatcgatttcctgaccttgtgatccacccgcctcggcctcccaaagtgctgggattacaggtgtgagccaccgcacctggccttttttgttttgttttgttttttgaaaaagagtctcgctctgttgcccagactggagtgcagtggtgagatctcagctcactgcaatctccgcctcctgggttcaaacgattctcctgcgtcagcctcccgagtagctgggattataggtgcctgccaccatacccggctaattttttatatttttggtagagattgggtttcaccatgttggccaggctggtctcgaactcctgacctcgtgatccacccgccgtggcctcccaaagcgctgggattacaggcatgagccaccatgcctggcttgttttaattctttacataatcaaaatgagacattgtcagtttattatatattttaggatagtttcatatttcccacttctaatttaaacaatggatgagtagaacgtttgctttttctttaaaacaaatcaaaatttcataaaccaactttttcataatacaaaaatcaaatttaactgtaaaatttattttcaatgttagatacatgttatttattttatttatttatttttttgagacagagtctcactcttgtcgcccaggctggagtgcagtggtgtgatctgggctcactgcaacctctgcctcccggattcaagcagttctcctgcctcagcctcccgagtagctgggattacaggggtgcaccaccacgcctggctgattttgtatttttagtagagacagggttttaccatgttggccaggctggtctcgaactcctggcctcaggtaatccacctgccttggcctctcaaagtgctgggattacaggcgtgagctaccactcccagccaatacattttaaaataccttatacataataaagtacattatattagctggatgtggtagtgtccacctgtagtcctagctaaatttgggggattaag

SEQ ID NO: 53010 - DNA, 1585 bp, Homo sapiens
tagaaacacagagggacattcatcaaagggccaatgatgaccttgcagatgctgggctagaaaaactccatcttaggtaacaacatgtgtgtttgatatgaaagccctgaacaaggtgtaaatgtattcccatctctgtcattacaaacaccatagctttctgctacctgtgtgccctttgccacatcttttatgtttttgatcttgttgttgaattccaggctgtctggggagcctgatattgagaaattacccactttttgcgttttcctggagattgaagtcatgtgaagtgtttccactggtgcttttccaaattcatctcaagagactggagtcaggctgtttcttcatggcataaatctgctttgggactccttcctcttggtttcattacttttccccgccttgcatcagtgaagtgaatctgtcacatttgttgtggaagtctttagcttgagtcttagacagtatctttctcagtaggaacagccttatacagagagtgcactttcaaatctggactgactctttttatttttcatttttatttttcctgctggctcccttccacctcccccctggactgactgtaatatatcttagcttttaaaacactttatacttttatgaaactctataaagtttggcttaggtgggtttatcttataaatgtgcataaggctgctattaaatttagaggactattggtttgtaactactgttaagaaattattattaaataatacctacttgataggattgatttgtgtatttgcattctaaaagtgtatgaggaatatttttgtacatcttattttatttggtgatataggtagaaatgagtattaaaaagtacccaagaaaatattctcttgacgatagaagtagcttaaagagggagaaggggagagagacagcaagttatttctctgtccccgttctattgttgtgacttctttatgggctcaagctaactgctatccctccccctaaaattctctgggtctcaggctccaagatctttcagttattcttctaggaaaccatgtcgaaaagtctcattgacctctagtttgcctggattaaatttctaaataatttgaaaataattcatgttaaaaaaataaaaattcagcaatgtttgtaggagaaaatgtaagtggctctccacaaaaattcagtcttatttttttgggaatccactgctaatagttttttacctggattttgagccgttcttgtcctgtgttccccagtgctccatggggatccttctgattctctttactccgtgtctgtgttcctttccagggcatcccaccctagtggtacatgccatccctttcctcagtaccatgtagggtcctagaccttgttaacttcagtagaatgttgcatcaagcttttatttaggccaggcatagtggcttatgcctataatcccagcactttgggaggccgaggcaggcagatcacttgaggccaggagtttgagaccagcctggccaacatggcgaaactccgtctctactaaaaatacaaaaaattagccgggcattgtggtgtgtgcctgtagtcccag

SEQ ID NO: 53011 - DNA, 1802 bp, Homo sapiens
gggtttcaccatattggtcaggctggtctcgaactcctgacctcaagtgatccgcccgcctcggccgcctaaagtgctgggattgaaggcgtgagccaccgcacccgggccgattattgtgactcttaacaattgcctttacgtttcttttctcatgagagctatcttttccctgtcagtccccgtggcctccccctggacgttttcactttctacttggtatagttactgcccttcttagactgcaaagtcagtgagggcagagtccagtctgtttcactttttaaattactcctcagagcctgaggtaggcattcaagtaatttttgaataaaccagacttcttaagctttagctgtaagacttttataatcttaaagcagattttggtagaattaatgttagctttcccccagaaaaactaatggaggtgatagagattgctactattagtactgagtatggtgcatagaacataggagaaaagatttagctccaaaatagatttaatggaaattaatttggtgtcttcttttgtcaaaaataaagggatagtgaataccaatggattcaccattcagtttctacttttcaaaaaaaatttttttttgtgggatcaaatgtttaaatgttaaaccagggtggaattttaaatttaaattctgaagtttaatagtcataaaattgcctgttttcttttaacaggtggtgtttcataagatgtcacccaacgagaccctctttttggaaagtaccaacaagatttataaggatgacatttccaatagctcctttgtgaatttccagatatgggattttcctgggcaaatggacttttttgacccaacctttgactatgagatgatcttcaggggaacaggagcattgatatacgtcattgacgcacaggtagtcagtaatgtgtttactcctctttcctggtgggaaaaagatgtagaaacaaaggaaagttgtttatcttctttgtcatgtggttgcagcttatctctttggcagtagattccctaacagtgtaagagatgcagttgcagagtgctttgggagcagacatgcattgtgcaggtacagaatatcagatgattaggagatatggtttacatccttgagtcctagttgatgagcagctaacattggctttccacttttattggttgccatattttataataattttataataatagtgatgttattccctgaaaatatcccatcccataacataaagaggaatatgagaactgagtcagtagatattagagtgaatagtttacttaattgtcaaaattgagtttagctcaacaaacatttatggagggcctagcatgtggcagtcagtgagatgaatggggcaagtccctatcctttaagaagcttactttttataagcttaagcattagttaagaatgctttctgagtgataggctctacagagggtgccttcacgtacaggacctaattaatttaagcttcacaatattgttaggtaggtattgtaattctgatcttacagatgagaaaactgagatcagagtttaagcagcttgcttaaagtgacacactgaataaatggcagagctgggattacttaaaaaaattatgttgggaaaaaatgttcatatcatttttttctttcttaaattaatattaaaaattacaagcattaacttggtaattgaatttttttatcttgagacaattgaagagttatttagtagtatagtatatttgaatgtttgaatattgatgataattaggatagtatttttctgtggttggggaa

SEQ ID NO: 53012 - DNA, 1215 bp, Homo sapiens
tcatgggactccggcgcagcggcaagtcctccatccagaaggtgagcagggctgcgcccagtcccccgccccctccccggttctcaggtggccggtagcggggacgcccgggagggcggcggccggggcccgcctgcgctccgtccctccgcactttctcttccactcttgcgagcgcacaggcgcggcccgcgcggggaccccgacctctgtgtccacgcccaagtcagctgaagccaagtggagcgctgaaggcgaaactggttgccgggaggcaggtgcccggtggcaccgcccaagacctccgccccctgggacccagctcctgtgtcatttacgaaactgagacgtactctccagttctcacttggagaacttcgtggactccctcccctggcccgttttgatttgttctcacttcaggtgacctgagtgtttcgggattcccagcagagccccagggagcagcgtcaggaagagttgtgactaagacactgggcgttgtaattctcgctactgatgtgaaggagacttcgctgtagcattactgggaattgggtagtgagattgcacccatttcagtagttgtggcctggtgaatgtaattactggtgctgttccccctgtaggggtgtgtttttaaaaatctgagactttgagaatattttgcagacctagtctgtttgttttcacttttgggccttcatgaacaaatggagggctgtacacgtttgtttgtttatgtttttgagacggagtctctcgctctgtcgcccaggctggagaatgcagtggtgcaatctcggctcactgcaacctccacctccctggttcaagtaattctcccgcctcagcctcccgaatagctgggattacaggcgcgcgccaccacgcccggctaattattgtatttttagtagagacggggtttcaccatgttggccagggtcatctcgaactgctgacctcaagtgatcatccgccttggcctcccaaagtgctgggattacaggtgtgagtcaccacgctggcctacactgtttagtgagggttaaatagaggcaaggttgacttcctccatcagccaaacccattatacgcggagtgagctggtaataaaactagtatcagcaggcacctggtcttttcacctctccactctgttgcaaaggcctatccaaaataaatctgtgatttttttttctttctgaatct

SEQ ID NO: 53013 - DNA, 1003 bp, Homo sapiens
attaatacaaatcactcactaactgtagagccttgggcattatcagtgaactactctgagatttactgtcttcatctgtttaatgagtagaatgtccgtgatgcctacctcacagggttgttgtgagggtcaaatgagaatgtatgtgaaagatttgtaaatggtaaagcactatattcttgtttgttagtcctttttcctttctttgggtagacctacagtcagatgttttgttttatggatcacttattttccttactggtagactgtcgttttatagacatattcctatttcatatattctctccctgttgttagagaacctatctttgtttttggtcaaaacacacatagaaaacaaaatgatccaatgaaaactggtttaactagcaaaagccttggcacctgttggagactatgaccaagccaataaaaagggcatttaaatcagccctgttagtaggaatgtggctatggctggtgcctcttctagtcacaagtttgtttttggagggggtccagaagatcattcccttgcatagatttctcttttaccaatttgagtgcctcctacatgggcagcagtggactaagtgctgggtgtgataaagaggaatgacttaattatgagactgtatataatcaaatacagtgtgggttaggacctgtggcagaccattataataaagcatggccccgtgagggttttgaaagagagagagacttggcttccttagttggtatgatagtttcttggtagatacaggttgaaaattttttgtggcagccaatcctcatgggctttttactcatttgattagtattaatatttatgtcagtaagccaggtgactgtgactgtctttggtaccatcctttttgaacagaaaggcaacatgtgggttggataatcacacttttaggtgaaactgacttgcttaaactgtaacagtcagtgctatttaagaattcaggataagcttagcctctagaggtcctcttca

SEQ ID NO: 53014 - DNA, 1044 bp, Homo sapiens
aggtaatgagttagatggctgtgtttaggttttgttcaggatttactttggattctcctgctttaagacccaaagaaagttatattgagtttttattgatgattctatgtgtttttaacagagtgtgataggtgaattaaacatattaaaagagttctatagcatctgttcagaaaagattatatactatacaaactattcaagtcatacaaaaccatttttcattgtctttcaaactgagaagaatcctattcagcacgcttctcctcctgaggtggttcatactgagcaagctatggggcaaagacagaggaatttaggtgaattttattctaaattgagtaaaaaatagtaaaacaaggtaactgttatattcaacttagttactgtcagtaaattgtattaatatcagtttctataactatccattttaaatcattcagtgatttaagatttaatacaatcaaatctaatgaaagccctttttatataaacctttaaaattgctttgaaactaaaatttcattccagttcatgactgcactgttcaaatacttgatatgcaataaactatatcttcccaaagattcatttgcttataaggaactttcttcctctccagcaaaagtttactgaaaatacccactgaaaagtagataaagagttaagtgacatgtcttaacttaaccagccaataaacaactactaatgtctttgagttaaaaggttccaaagagttaactagcactacacattgtggaatcttggataatttaaaataactgcattttcttttatgctaagtgtggttccttgcaagaacactaggctaacattagggttctgccaactacctgttggagttgagaagcttattagacttcactgtgctttcgtttcctcacctataaagtggcttgtgtacttgtttcacttatctcacaaagttgttgagaagataaaatatattatgagaaatacttagagtaatgtaaaatacattatgtgattaagaatgtggtaagacctgaaagacttaagagt

SEQ ID NO: 53015 - DNA, 1022 bp, Homo sapiens
gctacgggggccggaagaggaagaggtgcggctccgacagccagaggggcgggcatacgcagcctccctcggctcagcctgctactggggatgcagagcgtcctggtcgccatgaaaacaggccacacctcggcgatcccggccggtggtttgcaagtgcgcaggcgcgcgcccccttccgcgcatgagcagtgctgctcccaacccgccagtcgcggtctccggcgccagctacgccgctgccgctgtcactatggcccattacaaagtgaggggggcgcggcgtggctgggggcatgcgggcggtagcaagccgctggtcggctctgggtgggagtggggtcgcgcgcgcaggtttgggcgggagggccccgaggtagtgaggcggaggcggggttgccggactcccagcgccttcttcctgctcggctcccgggctctggccactgacccccggtgtctcttcaggccgccgactcgaagcgtgagcagttccggaggtacttggagaagtcgggggtgctggacacgctgaccaagggtgagcctgggctaggagagggtacctcgtgccctcgtcgtgctccccggcgctgccccgttccccagcgggccgtagcgtggggaaggaggggaaacagatggggcccgtccggggtccagcgaggtgggcctcggggttcagcagggacctggctgctggacgccgcccgggtggggtagcctagctccgctacccttctccgcaccgggagtgaaactcttgcagctgttgcaaagtctcttcaacttccgttgctttgcctccagcagccgcagtggacatgtttgccaaggaccttcagatcccaattcctcccaccttacggtttttatggagtcctcagaatcttgttaagaaagtttccctccaacaaagagcaactggaaaaatgaccgaatttccaagtgggctatgaagtagctgagtgagcctaatccccaaagtaggagattcatagcgaatttggctgtggcttttc

SEQ ID NO: 53016 - DNA, 1049 bp, Homo sapiens
atgcccttgatgacctttaacaatcacccttttatcatggggacaagagcggcctagaaggaggtttttggagtcaccagacccccatggcccctcaccaggccccttcaagctctcccctcccccacgcccgcgcagcgcaggtgcgaaaaccttaggggccacccgggcgcgacagccccaaagcgggggggatgggaccctgggaggggcgggggtgggggtgggggccttcccggtgttgcttggtgaccacgctctccgcccagaccgttccatttcttcagcagggggcgccccgggccgggccggcactgaccagcctcgcagagccaccctcttccggcctgcccccctctgccgggcgatggtgtgcgcccgtgacgtcacagaaggcggggccagcgccgctgccgggtgctggaggcgccattggagccggcttggctggcgagcccggctgaggagcctcttgggccgcacttaccgccgcgtccgctcccggtccctggcccctcagcggcatggcgtgcggggcgacgctgaagcggcccatggagttcgaggcggcgctgctgagccccggctccccgaagcggcggcgctgcgcccctctgcccggccccactccgggcctcaggcccccggacgccgagccgccgccgccgtttcagacgcagaccccaccgcagagtctgcagcagcccgccccgcccggcagcgagcggcgccttccaactccgggtaacctgccctgctctgggtttggcaggaagccaggcccaggcattttttggggggggtggtgggggagggttgggaataccaggccagtttacccagggaccccttctttgccttgagaaaagggaactgggatgccgctgggcctggttgcttccggtgatgggaggcatccgggaggggtaatggggccacagggtcggttttaggttttcctgggggaggagagcctggaggggtggacaccaagaggaagatgggaatacctctggccgctccgggccctccctgtcgctgaagcccct

SEQ ID NO: 53017 - DNA, 1022 bp, Homo sapiens
aggttgtgaaattgcgaaatttaaaggagattaaaaaataatccctgttaggtaaacagaggtttcttttactgtaaattgtactagttaaccatccagctaactgcagatcttgtgttctttgccacaggaaaacaagtaaagggaactctgtctggtttatgccaaagtagctattcttttatgcattgttgaaatagtggcaataagaacatactgtctttgaagccactggggagtgcttggtacggtataaacgttttgcttgtttatgtcgggggagggggagattgagacctacatgccaaagggagtatctaaagtctagtcagaagatctttgtctcttcccacttctgaagaaagtttgaagaaatgagacaataaagtgaaagctcaagtttgtttcttttttattagagcaaatttttcagaacataaaacaagaatatagtcgttatcagaggtggagacatttagaagttgttcttaatcagagtgaagcttgtgcttcggaaagtcaacctcactcctcagcactcacagcacctagctctccaggtaagcccactttgatctgcaaaattcgcattaagagtttgtaaatggtacttataatgatgaatctagaattggcctcctctaatgtaatagaattgctaacggggatgtattaatatttacagatatttttaaaactatacagtcatgaaattggaagaaacctcacattgatttgatgtgcttccatccacccaatacaagaatatcttcctgtataactgcaatgtgtaatattgtagccagggtgcaataaatagccacatgtgggctatttaattttaaactaattaaaattagataaaattttggccggctgaggtggctcatgcctgtaatcctagcactttgggaggctgaggcaggcggatctcctgaggtcaagagttcaagaccggcctggccaacatggcaaaacctcatctctactaaaaatacaaaaaaattagccaggcatggtgg

SEQ ID NO: 53018 - DNA, 1220 bp, Homo sapiens
gtgagtcatcgttcatgctatttctcacatttactgttagtgaaaatttttaaagcatgacactacagtttttagtattcttaccctttttgttttttattcttaatttacagatgtgtcatgaagctttgtcacatatctgggtaccaggtttgacctcaagagatggctgctgtacactttttgcaactggtttgatgtcacatttcagctccaactttgcatcctgagaacacttaaacgtttctgcaggtccattttatacaacttgaaagaccgtaaaactttctggttgccacaagcatatctttcttttctgctcatccaataaacagctgtgccctactgtgatagattttccaaacaaaaatacctggagcagcagtttagcaaaatatgccttcagtggcattcaacaaatggagtttccccaagcacagttctgtaagaagtgcgtgtgagagtgtgtgtatatgtgtgtatgtgtattttaagttattatttgtattgtgcaaaaatttttttttgatcttggggattctggctgtgaatttggtgcacgacaattatggtaaaaaaacatttgcttggtctaaagaagatcattaatgttttgtgaccatacaagttgtaacagtggattgtttttatgtgtaggtattgttaaatacagggactgtttccaggcacagaatatgaatcgtaagttaggatggacattagatgtgattatgatgataaagcgaaggtctgcggtcctatatctacagacacgtggtgagaaattagaacaaactggagacgggccattgacacatggactctgcctgggcatgttaggttaattctttgactccaagccttaaaatactcacatggagtcagcgctcacctcattcacacaattatcatagagctccctggacactgaacctctaaagggaaaaggtctaccctggagccaggagcatcagggttggcttgggagcatgagaggtgagcccagggctaggcctgggccaggccccggcagcactgctacttgggaggagccacttcacctttgtattagttattaaaaaatataatttgggctgggcgcagtggctcacgcctgtaatcccagcactttgggagtccgaggcatgcggatcacttgaggtcaggagttcgagaccaccctggccaatatggtgaaaccccatctctactaaaaatac

SEQ ID NO: 53019 - DNA, 1038 bp, Homo sapiens
agacggctgagggaaggtcggcttccggcgtcgcgctgcaaacgtctcgctgaggtcatcctttacggcaggcgtccgcgtcgctagctagtcgttctgaagcggcggccagagaagagtcaagggcacgagcatcgggtaggtaggggctgcttatgtccgcgcggcagcttagcttaaggaccttccttccgaggtctctttaacagatttcctcttggcttgctgtgtgtccccttctcccagacctgaactcagggcgtgttccctgccctcccaggccgcttcacctccacagctaatggcaccgaagcctggagattgccgctctctccactttccacatttgtttaggtttttgccggactaatgttttggctttctgtttcttaacctaaagtctacgatccttatcccagctttccaggctctgcgtgatttcggccccgccggcctcctgagctcatttcattcttttcaccgtcatgcacgctgcgctccattgtcccccaaacatagccagcacttccggctgtaactccgggctgttgcccaactggaacactctgcccactgatcttcacttggcgaactcgcaagccatgttaaaggcattttcaagtctccgggcagagttcgtgcttcctccttcgagctcttacccactcgtgttccttgcagtgtattcgcaattccgagtgtgtgtctctggtgcttacgttggagctgctttcccccgcatctgagtgcctggaacgtaactactcagtaaatgatgactgagggatgggaaggaacttaagaagttaaattcacctttttgttgagatggagtttcgctcttgttgcccaggctggagtgcagagtggcgcgatctcggctcactgcagcctctgcctcccggattcaagcgattctcctccctgagactcccgagtagctgggattacaggcatgcgcccccacgcccggctaattttgtatttttttagtagagagagggtttcgccatgttggtcaggctggtcttgaactcg

SEQ ID NO: 53020 - DNA, 1111 bp, Homo sapiens
agaggaatgggcggttctgggatgaagcaggtggtctgagaggaggggcatttttcctgcccccgagctgagggtagggatggaagcttggcctgagtttcccagaggttgaggctgtcacttcagcacctgccctggcactagaaggtaatgggaggaggggtaagtgctaagataaagggcaaagctgtgccaggacctgggtcctttcctttctgcttcctgtggctagatcccttctagatgttctttgggaagagggctcacacgctgctggcacaaggggtgccctggcagggaggctctgctgcccgaggctgcctacaggcctcctacaccatttttatgtttcttttgttatctctttgaattctgtgcctatggtggggatctgccaatgacccaggaggctgtctctgccccttgctgcctctaggctcagattcgagaatcctggaggagctgtggccacagacccattgtgtccagccatgtaggctacctcgctgtctctacacagccctgtgagccggtattccctataagggaaaatcaacagctcttgccctccctggaccctacagccaaagtcaaagctgggtacccaggttggctttgcggcctgtaggaaggctggtagctgaaggcacataccatttgtgctctgatggagcccttggggtggtgggccatgtgtagcagatggttctgggaagtgagcttgacctggctgagggaaggctgcccagtctggctggtggagcccagctggccttagagcaattgtattttcactcaactctctccactagctaaactgaccagaaaaaatgggctttctgtcccatccccccaccccatcctcatgctgtgccacgtattcccacaacagcccttggaataagcaaatgaacatttaatctaatgcctgctgggtgccatgcatggcatcaaccagtactacatttgcatttgacaatgttcttaaaacatcctctgaggtggaatattacccccattttgcagatgaagaaactgagtctcagagaggtgaagtgacttgcccaagatcacagcaattgtaagtggccaaaccagaatatatacccag

SEQ ID NO: 53021 - DNA, 1103 bp, Homo sapiens
agtaaatggagtagaatttaaacccacagcattctgtcatgggatctgtgagcttaatcctccaaatgtgccaaatagcaataataatagttcctaggaataggagctaacttttacatgatgctttaagatttatagacatcatcacatataatatcccccaaacctcatgaattagttttgggatgtattgtcttcatcccattttccaggtgaagaaactgaggtacagataggcaggactagaacctctgcttcccaagtcccagtgttccttatgggaccccttttgtctgctcacattcacccctttctccttcagatcacttctccctgggctcccaggccctcctgcagcagcccccgcctgggccatgtcttcctcagatgaagagacgctcagtgagcggtcatgtcggagtgagcggtcttgtcggagtgagcgatcttacaggagcgagcggtcggggagcctgtctccctgtcccccaggggacaccttgccctggaacctgccactgcatgagcagaaaaagcggaaaagccaggattcggtgctggaccctgcagagcgtgctgtggtcagagtcgctggtaagagaggtcccccagcaggctggacgctgtgggtgtgagggaggaatgggccagggcacagcagctgtgtggggagccgaggggtcctcaccagggcctctgacaaagcagccatcatctgatttgttattattattcttggaaagacgttgaaataacattaacgaaaaactcaaaagaggaaaatctgccaccccttgctcacgtgagacctgttttcatttctgcaccttcttccctgtctttgtccccattcagttatattttctatgcagttgccttcatggcttaggtaccattctgcatctgactcttttcagttaatcttatattaaaaagattttccatattgcactttagactttatggttaccatttctaaaagctgtctatttcatgactttctaaatcctactcttttttcactttttggctatattagacaatgctgctgagaacatggttaagaatgatttgacttctgttatttccttataatgaaatcc

SEQ ID NO: 53022 - DNA, 1080 bp, Homo sapiens
tggagctctttctagtgggcaacgaggagtccttggaggaagtccttctcaaaacctttgggcctgcagcatcagccagtaacagaattttagagctgtccctagggtgcaggaaggggtttacttgtccccagtcttgaagggccataactcagggccctgatgactcataaacctctttctcctgaagagagagtgggctgtctcattcttccttctttatgccctctgcctccatccttcatcactcatgcatacttagatcgttttgtgatgatttccacttccagtcttctctgaggaggcccacgggatgatttgcttgctgcttcagatttggagtctagaatagaagtggagtggactcaaggaggcttaattttacacaggcaaggctcctaaggaccctgctgggtcaactgagcaaagggatggtgggtgctgcgctgtgctgtgtttctggcatagatgctgatctcctttgcatcctgacactgctgaatgcctcttttgaggagggggctgggccagtgaggctgaaaatggggagactgccatggttaaaaataacttgtgcactgcagttgggcgtgtttctttagcaggagaggagagaggcagcagagacgaggcgggactgcgactttagggtcttgctgaaatcttcatgtgattttagaatgctgtgggggctccaccagagtaatggaaaaggcagccttagctctgcagggactccttcacaggaggtgcaggggggcatgtctgggagaccctggatgctctgaagctctctgaagcagaactttaattgtgggaggaaatgaagtcagtcttacgctggaagccagctgtggcctgtgcaattttctcctccccctggatcttgcttatgaagccaagtgggggtgtctgaatcactctcaccaaatagagatcttccctttccctggcccactccgtgtcctgagctggtcttagggcctcgcccttgcttgagaggcctgatggggcaagcctggtggtcacacatgtcagagtagagagggatgtcggggctgagaaacctgctgatttcag

SEQ ID NO: 53023 - DNA, 2041 bp, Homo sapiens
tccccgtatgtgttgtgaaaaaggggagtgcagtgactcagagctaaggattggatccctctctggttgttcatttattcattccttcaactaaaaaaggggttaagctatgtgccagtagaaagcatctatgggattcattcctaggagtatcagcaaatgctgctgaaataatcattcccaacatctgctccattgtggccttctagtcagacgacaattgtctctctgcacagcccttgtttcagttggctttatattcacgttcattgttcccaggttcatttccctcaccagctctggaggtctctgtagtcaggagtcccatcttaccctttttgccctgggacagagagccatgagagcactacctggtcagaagctggagcttactcctctgggcccatgtgtctctcctccaagttgggagctctgagaagacatctcacaggcacctctctgcttcattcattcattcaataaaaaaaatggattaagctcctgccatgtgccaggcactgcggagataactgaatctggagttacaagacttaggcaaatgacctcacttcttggatcctcagtttccttatctataaaagggagatggtgataaagggtgtaaaagggaaatgaacgagaatcagaatgtgctggaaaaacacaggttcacatggcccgttactgcacttaacagtgtcattccttgtaacctccctggcagccagatgaggcagtggagactcaggaggccagcagtttcccaggccagcaaagaaggagcccaagcctcttatttctgtccccttcttttgttctttaggcctttgtcagggagcagatggaagtggcttattctggccaagccgtgagtgggaagaagggaatgcagggatgggaaatggaaccctaaagacaatctcattgggaatccttactcctcagctgccaaacttccttgccctgaggctcttcgagttttgtatccaggaaggctcctcctccttcccagcttctctacttcttcctggcagtgtcctcagagtctctggccctgtcctggagcttggtttcagtagcagcagagaagagcagaggagagtgccctgaaagtggggcagaatgaattgtagctacacaccaccagctcagctccagctctttgaaagtaaatctgggtcacattagctgtgggctggaacatgaccacgtgggcagaattctgtgcaggcagcagaaaagacagccaatctgtcctttctctgaggtgcagggcccctgtgggaccccagttggtgagggaaggtggtttctggattgcaaggtgtaatgccatcttaatgccatcatgcttttctaatgacatcctaggtgacatagagaaaggtatggaatggcagtttggctcatgcctttctgtttgttatgggagaagcctaggctgaaggtaggaatgcagaggaaggactggttactttggggactgtggaaggccatcatttctcagtctcatgggctcaggggttagatgccaccagagtagctgacactgcagcaggatctagggctgcacttgttctttatttcagcagtcctccccttgaggaaaggtctgtgaacagatccatcatcactaaagtgttatatggagcctggctggcctcctttttctggttgctgtggctagggcctgccatgatttggcccggccactgcttgttgccacatgtcagttacaagcctgccagcctgaaagccctgtcttggctttcctgtaggagcagaataggtgtcccttgctggaatctctgcctggatctgggatactgctacagggaaggtctgaagcccctataacttgaagggtgatgattatgagctgaagcttctgtcttaagctgtgccccacccctaccccagaagataccaggcttttgccttgtggtcaggggaggattctgcctggggcctcagtggatgtctctgggatgccctcccccactcattcacacatttcttcatgtgctcactcttccattca

SEQ ID NO: 53024 - DNA, 1043 bp, Homo sapiens
agaccctgtcctgcctcagagcaggaagagagattgggtatggttcagcagggctcacattagcctgattccttcaagagtgaagataaaaacagttttactgacaaagaagctgggagacagcagaggggccaataccttttataactactattgttaggttctgaatgccagccttggcgctcagcatcttacatgctgtatttgacctaatcctcaaaacaactttaggaggcagatgtgctacagcagaggaagcagaagcccagagagtttggtaacttgctcaaggtctcccagccagtaaggggccaagcttggaatggtgctagctctgcctagggcaacccactgcctcccccattacaaggaacagtagtttaataacagctaacatctgtgtagcacttcaaggttcacggagtgccttaacatccattatctctactgtgccttgggaagccggtgcggtgaggccttccacgcccctttgggatagctgcctgtcaggggtccagcctctgctcatttcttccaggaagcactggagattatttggagttggctctgacgagccacgggagaggcctagggagaggctgaggtggagcgacttggccagttgctatggtaacccagatggctgagtaaccattttgagggttgctatggtgatgggctgctggtggcagggatcttgtcttcctgggtggctggcaccctccaggcctcttaaattgagatgttgcactttctgaacagaagagggcagcatgagagcaggcaaaggcttcttaccccagagcggatttgggaacttgaggcaaagcttagaaaaggtttctaggagctgggcagaaagggagctttggctggtgcccaagaggctggtggagcttcacttctgagactagaactaggtaattttcttccaagagctggtcaaaggataatgcttggggctgccccttcagtgcctggcatcagctactattggggaatataaaagttacagcagacagctacccttgcaaggaggaatg

SEQ ID NO: 53025 - DNA, 1054 bp, Homo sapiens
agtctcacccatcaggagcaaaagaaaatcaaagaccaaaaggagaaagcctcagagcttttgcgactgtgtggtctggctataaatttagactgttgcttgaaagaagcgaaaaacctccccttcatagacttccttcttcccatcccccctggcagccgctttgttcctctagccttgtaaaattttctctgtataaaacaggaacatcagccaaacatgtggacttccccactttccattcattagaagaatgcattatttcaaaatctcctgggagcatttaaatgcaaattttgtcaagaaagcaatttgagtcttagagaagctctctagccacaacctaaagcagaagtttcttctttgatttgtgtgtttcttaaaaggaatctcaaccccttgccttctccctgcaacgcccccaggtcttctctgattctcacagcggactcttcccctttttgcccctgttctttcttcacctttggcaagcatcagtcacacatcttgaggaacctgctcacaaagtggcgcgtgtagcagccccaggtgggaatggagggacttttctatgtagtgtaatggacataaggaggcagatgtctgtgtgggggtgagatgtctgtgtggaggtgtttgtatgcgtgatttctgtctgggccttcttaggcctgctggtataaaataatatgggaaatgcagatgactcagcactgacacagtcaagatccccagagttagcatttctatattctctgctgtttacgaaaaatgtgcttgtgccatcaatcagcaactcatcctgcattttccgctaaaagccttttactgaaaaatgcatatacttcaaacttattccccttctttttgtaaactgagctcattagcagctgacaccaaactgagaactagttttgtttgtttgtttgttttagcacggaggattaaactggaaggaaatgagcatttgtctaaggatcctccctgtcctctttcaggcccttccctgcatgatcttcatgcccacaacttgggcaggccagcaaaacttgat

SEQ ID NO: 53026 - DNA, 1051 bp, Homo sapiens
gacactgagcccacaaagaagcccgggaacaaagggttttccagaaacagaagaagctgaacaagaagtgacggggcagatccagcaccatgaagtaaaccaggccaaggagccagagcctgagaaatgacaacccagggaggcacgaaaacgggattctgaatgcaccatggggtgaataagaggagagacagggagacataaatctgtaggggatagaccctccagaattattaaactgtgacagccatctgaacagagagacagagatcaaaagggagaaatgtgggaacctgagacggaaccaggactgttagggaacaaagaaaggactctggagcatagctggtcagggaagaaaaggggaagccaattattctttgtcatcaggggaaaggaaagagtaaagaaaggaaactggaaaatatgggtagggatttattaggggccattttgaggacagagctcccaacatcatttgatccaacattcggttgtgtatcattcaatcccaatattcatggagtgcgctggagccatgagcagtgaatgaagaactctggtcaatgtaggtgacacgttgtgcccgccaccccccatttagcagttatcctcccctgttagcttgatttttcaggaggtctggagaggtggttgtgggtaagaagttacactggctgatctcacaataagggcacattagcaagtaaaaaaagaattcatgcaacactgagcaaccaaaattgggacttgggcttccattccagttcccattctcaagagtttgaaggagaaacttcttaaccccaggctagggaaggtgtctttgtaccttgtgagtagtgccaagtattttggtcaatgctcagcacattggtaacaagtaaaacaaatgacgcttttcgctaataggtgcatgctggttgtttccacaccacaccctgatcagaaatcaggtgagcaagtcattaatcatatcttttcccatcaagttttgctggcctgcccaagttgtgggcatgaagatcatgcagggaagggcctgaaagag

SEQ ID NO: 53027 - DNA, 2249 bp, Homo sapiens
gagaaaccctcctttgtcccgctcccggcggcgtaggtcagcgctgactggggctcccgctcgccctgtggagccggcccgggtctccctgccgttcggccggcccagcctttcatcctgacgcgcggggcctcccacccagcgggactcccgcgtgggccggcctctcgcgcccctcggctcgggccccagtccgggccgggcgggggtcggcagcccctgggggacccgtgtgggcagcccgggcccagccggccgcagcctggggccgaggactcgccgggacccggaggcggcggggagagggggcggggaacgggccgggcctggcgctcctgacaggaggagccgccgccgccgcccgccgctgcagccgcgccggggcgggctgagggaggagcggagccgaggggtgaggacgcggaaacgcgagccgggaccggcggagcgcgagcgggccgggtgcgagcggactgaggagcggagcgcgactgccgggccgggcgaggcgggcggacggcggagagcgagggcgccgtcgccgtctctgagacgcacaaagggtcgaggctggggccgccgccgcctcagcgcgcgggcctggaaccggcagcccccggggctcggcgagaaggcggtgcgggcggccatggccggctacgtgccgggtcagcagccggccaaccgcagccaggagaaggagttcgtgcaggcgtacgaggatgtgctggagcggtacaaaggtagggccggggactggccggcgctgaggcccgcgggccggcgcagcgtggccttcggagccggtcggctcggcggctgcaggtggggcggccgggcggggtcgcacccaccgcgcggggcttggccctgagctgctgcttctcggggccagtttatttacagagttgagataagccttcggaaaccgcccccggggcagtcggcgcgctcagagcgccagttacatgatttgccctattatccggccccagctggaagaaggcgagacaaggcgctggcctggagaccggccgccgtggggagttgctggggaggaggaggaggaggagttgggcgcgggagaaaccacccgctctgctctgggtgcgagcttcctcccagaggggctcggacctctgtgtgcccgcggagagtccctccctcgcccccttttgtctctttgagtctcggatgagtcgcgtggaagccgaggttggaaagcaccttggtgtcttcggggtggggtgggcagcggtgtgggtgagtgtgcagtttttggtggcgagaccttaccccctccatctccccgggggtctgggcctgctggaggtaggggtctgtttttttcctcccacataaagatttgccttggagctcggatttcagccctgaaggctctcttgcgagacacttctgcaagttaatgcctaatctgcgccttgggtgtatggggagaaagttttgacagacaagagggcctgtggactgcatttccctaactgctgtaggtgcccctgaatggaagccagggatgcgtggccttgggaggcccttgccttgatctttaacatccggttctgggagtttgctttggctggcagttatgctttccacagacggggagattttcccagaaacgacacaggcagcacttttccccattttattcagctcgggcccttgtgactaggcccttagtttctttttatctgaaggagaggaaacttcagcccctatgactgagtccagcgtacttgtttacagcacctatccagtgaagggaaactaatgaagaagctgtaaaacgccccccctctcccccctcccccccactttttttttcttgtggcattggaactctgcttgggaatgcagcaggaaaaaagtagagatgaaatgcgaaaaaagacctactagggtttttgcttgttccctctgcatcagctcctgtaaactgtccagcttttcctgcctgcagcaagttttctgtcaaccccctgtggtctttctttttaagaaatgtggttcatttcagagcacaaagaggttagattgtgctgctgaacttcattgaaaaaatgctgctcagtgaatggttgcattaagtttcctttgcaggcttttgagtaacactgctctcttcagagagaggagatacattaggaccgtcccgggctgtgacagcttcaaaccagcagaattaagacccaaaataggtgaagaaatctcagcacctcactggatgg

SEQ ID NO: 53028 - DNA, 1840 bp, Homo sapiens
ttccattttattttactttactttattttgaggtggaatcttgctctgttgctcaggctgggatgcagtggcacgatctcacctcactgcaacctctgcctcccaggttcaagcaattctcctgcctcagcctcctgaatagctgggattacaggtgcacgccaccatgcctggctaattttttctatatttttttttagtagagatggggtttcaccatgttggccaggctggtcttgaactcctgaccttgtggtctgcctgcctcagcctcccaaagtgctgggattacaggcgtgagccattgcacctggcctattttattttttaactcttttctctccttttttttttttctatctcctaccagaaggaacctttaatgtttagaaaaacgttgatttatatcttatttaagctttataatatcctgaaggatagtattacacagatgaataaatttaggcacagagacttaaaattactgtctaagagccaggctccagatttctgggtgaaggtttcacattgtatcacagaagggagttttaaaatcacagtagatgacttgggctaagtgagaaattgtgaaaatgctttaattgttagtatcattattgttgttagttttagtttctgaagtatagtcacacactttaagtgacatacatttccagatctctgaactgtggagaatttcttttccccttattatgggagaagttttacgatatataaatcacattgaaattttcatacaaaaataatacaaaataaaataaaatacaaaaaatacaagaaataaatacaaaaataatttttaaaatagtacaaaatgatgaaattttgttaacacagtgattggaaaatatgggttgaggatttgggattgtttacctaagtgacgctctgaagcaaccttttggttatatgtagattcagcttatttatcctttttagtggatgttgttcttttttttttttttttttttttgagacagggtcttgctttgttgcccaggctagagtgcagtgtggtgagatcagggctaactgcagccttcacctctcaggctcaagtgatcttcctacctcagcctcccaagtagctgggactaacaggcatgtgccaccatgcctggctaatttttaagtattttgaagagaaaaggtctcactatgttgcccaggctggtctcaaccccctggcctcaagtgatcatcctgccttggcctcacaaactgctgagattacaggcttgagccaccgtgcctggcctacactcagtttttaagttcctttttagatcaaagtcctagagttggagtggatagtttttagccagaacaaaagagtaagtgctacttctggacatgaacactgttaattcagaaagtgagtcaagtcagtctgctgggaaatcacaagttttggccacattcatgctgttgaaataataaaatgtgtccatgtgctaacagtgcttatgggagctactgccttgtcttgggcttgttggcaaatgacgtaatacaaaccagggaaatgcaccagcgtaagcctattatactggtatttttcagtgccaattccaggtttaagagatcatggtggaaagaatacttcagagtgcatatctgagaacagaaacatcccaagatcaaaagtcacaaatgaacaattatagattgtaaggagtctgttgtgttttctcagtgttcttgaaaacacccagtctttactcctttttctaagtaaggttggccctttcagcttctgataattatatattgagccatgttgtgactaggttgtatggaatgctagagctcctgtttt

SEQ ID NO: 53029 - DNA, 1033 bp, Homo sapiens
cggagtctcactctgtcacccaggctggagtacagtggcacaatctgggctctctacaacctccacctcctgggttcaagcgattctcttgcttcagcctcccaagtagctgggactacaggcatgtaccaccatgcctggctaatttttgtatttttggtagagatggggtttcgccaagttggccaggctggtctcaaacttctgacctcaggtgatccacccacctcggcctcccaaagtgctgggattacaggtgtgagccaccgtacctggccaaggatgggatcttttttgcttgcctgggatctgatatcctccacttgctgtggctacctaaaattgtgttatagtggaagtctgctttcatttggcacaagcttttatttttctctgtttaaaattgctttcttctgtatgaccatgtgtcaaccatcaggaatgttccaattatcagggatgatttgagtagtcacctaagactaattaaataattggtcagtcagcatctttcttttagacaagagcattgccagatgtactgttggattccctcttaccatggcaaatttccatagtgatttttattcagaacgataaacacaattcgtttgtgttgatgaaaggaaagggcttgcttgaagtgttttttggagtttatagttttcaacctgcaggaacatgttggattgagacatataggaagtgatttttttttctgtgctttttagtcagtcaacaaccatgaataagctcactgtgtgcactatattctactagtacctacaagcagatactatgatggggaaagtggtattagggagatgggtgagccacttagaagcactgaaagaatgatattgagattaggggtagggagaggagggtctggaatgccagtaggaagaatttgagttttatgtgatgggcaggattaatgaagaggttatgtaaatgatgggtgacagtagaaatctactctctgggaagccgcattgtaattgagtcatgaggttagattaagggatgatgt

SEQ ID NO: 53030 - DNA, 2822 bp, Homo sapiens
tgatcttactgttaaatggaggaaacatattggcaaactgacagttactgtctattgtagggagggctatcatatagataaatgctgatgctgtggtagtgaagaggagtacccagtatagccagagtgagaaagtgtccaggaaggcatccaagagtaagtgaaacctgaactgttacctaaaggatgtgggaccctgagcaaaaagtttggggaaagagcattctgggcagcatgaacagaagtaaggggatgagcaagcttgagagggggaatattgggcattgataaggttggagcataggatgtgagggaaggagagatgagatgagatagggagagtgggcaggacaaaaatgttgactggctttgtatgtcatattgtatagagcttggactttatcctaaaggcttttgggagccattgaataaaagtaggcaaggaagactatgcttagatttacattttaggagtacttttcctctggcagcagtgccaaggaaggtaggggcgaggaggaaagactagtggcagacaagttaggaagctgtcacaggaatttaggcagggagtgaaactaaggttgtgaaaatagtaatgtaataaagcaggcaaatcaagaaatgtgaaggggtaacatccatgtgttttgatgactaattgtatgtggtatatgagggggagagggaagaacctaggatgacttggaggtttctggcttgagtatttgtgtgggtgggtcgtgtcatgaactaaaatagagaatataagaggaggaaggttattttctgtgaagtggtggcagtgatggtccacgagaagatactgagtttaatttaggttacattgcggtcgaggcttctgagggatgctaggtagagatgtccaggaggtagttggttgtaatgaacatgaaacttaggagagtgataggtgagagggtgagagagtcatcagcttatcaaaccacagccataggaggggagaaggagctggctttaggagtgtatgtatattgagacaaaaactctggggaactccaacaggagagtggtgtcagaagcagagaaagaggatctcctgaaggaaattgtccacagaaagggagtggccagaaaggtaagaggaacaggagagaagtgagtttcaaggagagtgtgacacacattgtagattatgcagaggtcaaataaggcaaagactacagatgtccaaaataaaggttactgctactggaacattttcagtggagttgtgggaagtgaatggaaagtgcagaagaggagtcagtgacctttggaacttggactttgaaggaagagagaggaggaagacaggtgaagaagggtggggagagttttgtttatgtattgtaacacaggagagacttgagcatgtttattttaagtgctgttttgaaagagccagtagagaaggaagatataatacaattcaaagacggggagaaaaattgatggagcatgggctctagagtcaaaagttgtgtcttttagaaagatcagagggttaaaaataagaatgcaggtgattaagttggttggttagaggtgtaggaacttgagggaatttctcctgatgctcatactctctctatgaagtaggaggtgaagttatttgctgagagtcaggaggaaggaaagaaggggtgagtgtgtatgtgtgtgtgtgtgtgtgcacgtgtgtgtgtgtatgtgtgtgtgttttccctctagccctagaagcactcaacaacctgattgtaatagattccaaggcagacaggtagattgatctaggatcagaattttccagcatagttttgacggaagaatatggggtccttgtagtttgtcttaaaatgtagcatcagtttgattattgattgtttgtactgttgttctctggctggcttgtattttggctccccagtgaaattgtctactcctctgggaagaagcatatatgtaacttttgcattcctgcctgtcatttagctaaatactatgcagaaattaattcttaagtttttgttgagataatttgacttttggacaggacatcttgactcttgacatagagagaggctttcctcacttgtggtctttaatccccatctcattatctgacatggatagtggaggattcactcactctccatgagtgaactccaggcctagcttcttcattagtcttaacaggttagctttactactctccccagggcagttgagctttgctttccatgaaggttatgtagttaatttgtactaggcttgtgaagacctgggtgtttacaagactggacagagaggctgttgtggaaaatgcagcctccttcttgtttattttggcaggcaggcaatgaaggagatagatttgttctcatgactcagagccctacctgctttaccttaacaggttcaatataaccaccacctttcagatgtgatagtgtccttcagagtttatctgacctttatatctaaaaagagtattagttaccctttgccctctacttgcttggttttttttcacttttattccagtgtagaggatatttcctaatgtgttagggccagctcagaattgatgtagttctttcccattggcacattccgcatctttgtttgtttattgccatgttcgccacagtgtgccttgttttgcgctccttgttttgtgaagctggactcttatcagataaacttgccatgagtcacactggggagtggaagtatgtctccactaatttggagaatctttgatcttgtttcactccctggtttggcttgtccagtgcaatttgtctctcaacctgcaa

SEQ ID NO: 53031 - DNA, 3986 bp, Homo sapiens
agcatttatctttgtgttgcaaacaatctaattacactctaagttattttaaaatgtatagttaagttattattgactatagtcacccttttgtgctatcaaatagtaggtcttattctaactattttttaaaaatgtggaacacttcacgaatttgtgtgtcatccttgtgcaggggcctccctaacctctctgttgttccaattttagtatatgtgttgcttaagtgagcactagaatgcaaacttcttaagaatagaggtttttatttgtgtattaactaatttccctagcacctagaagagtttctggtataaagtagctgctccaatcaatattgaatgaatgaattggaaatgttaagttagttcactcttgttccccataaggaaaagaggcatggaaaggcacaataacttgctcaagctaacgccatatctccttaccaggtaagtgggttttaaaaaagtttaaataaaacgatgcttaatcacagttcctttatgtgatttggtactaatgtgtattatggacttaactgtattatctctatgaaaaggggtgggggaagcaaaagggaagaagctaatatatattgagtccttactatatgccgggtattttgttttattttatttatttatttatttatttatttgagacagagtcttgctttgttgcctggtctggagtgcggtggcactatctcggctcactacaacttcgcctcccgggttcaagtgattcttgtgcctcagcctgctgagtagctgggactaggcgcgtgccaccactccgggctaactttttatatttttagtagagacggggtttcgccattttggccaggctagtctcaaactcctgacctcaggtagtccgctcgtcttggcctcccaaagtgctaggattataggcgtgagccaccgcgccaggccagtcttatttaattgtcataaatgatatcctatgatagtccagtaaccttactagattttacagatgagagaactgaggcttaaggaacctaaatcacttcccagagggtcacacagctagtaagtgactgaactgggttttgaacccaggcccgattaactccatttggccctcttttaccttaaggcacaggaaaattttggatttgtggtctgggttgctttaagattcccagatcagactactcttgaaaatggtctgatttgaactactcaagtagagttacaaaaattgtttaccttaagacagccccatggagcagtggggttgtgtctgtagcgctcttgagtaaaaaaaaattctgtgttgcacatactcccactcagttgtatcgtatataattcacatttcagactttctttttaaccagggatccagaataactacagaaaggtgattatgtaacatacttgtacagtgcagccacttctgtgtttggtaatattctttttttttttttttttgagatggagtcttgttctgtcactcaggctggagtacagtggcgcgatgtcggctcactacaacctctgcctcctggattcaagcaattctgtacctcagcctcccgagtagctgtgattacaggtgcccaccatcatgcctggctaattttttgtatttttagtagagatggggtttcaccatcttggccaggctagtcttgaactcctgacctcatgatccacctgcctcagcctcccaaagtgctgggattacaggcgtgagccactgtgctcggctggtagtactgttaagcgctaagagcacaaacaaaaactatgtctaaaatgtagggcaggtagagcaggtgaggattaaacccagttgaaatcagcggtttcagtagtaagtgggcagatcataattacctgtgttgctcagagacctaagctgagagtgggggtggggaaaggtcacacccattatctttggagaaatgatgagagtaaataacccatagtttccagtttattccagaagcattctcgccagagtcacaatgttgaagtgggttttgagttagaccttgttaccccagatcatccaaggttaacatagtttccttagataccacagccattcattgtgaacgctgttagcttcctcttaggtagctttatgtagcctaccttagaaaggagggtggggtctgggaggggagaggagggaatagcaaaagtagcagagaaacaaaggactaattaggaggttcctcagtcatttgggagtagatctttttcattagctgatcactgagatcaaggatggaggtggtgatccaggaggaggaggagttgtagtaatcagaagcagaatagcataacttggcagtcagtggtggtccaaggaccagcagcatctgatagcttgttagatacatatatatataaattttttttttttttttttttttttgagagagtctcgctctgttgcccaggctggagtgcagtggtgcgatcttggctcactgcaacctctatctcccaggttgaagcgattctcgtgcctcagcctcctgagtagctgtgaccacaggtgcatgccatcacacccggctaatttttgtatttttagtggagatggggttttaccatgttgaacagactggtctcgaactgctgacctcagatgatccacccgcctcggcatcccaaagtgttgggattacaggtgtgagccactgtgcctggcctgaatcaattttaattttatcaagattcccaggtgattttttttttcttgaggcagagtcttactctgtcacccagcctggagtgcagtggtgtgatgacagctcactgcagcctcaatctccccgggctcaggtgatcctcccacctcagcctcccaaatagctgggactacaggctcgtgccaccatgcccggctaattcttgttttgttttttttttttttttttttgtccgaggcagagtcttgttctgtcacccaggctgaagtgcagtggcatgatcttggctcactgcaacctctgcctcctgggttcaagcaattctcctgcctcagcctcctgagtagctggggattataggcgcatgctaccatgcctggctaattttttttgtatttttagtggagatggggtttcactgtgttggccaggctggtctcaaactggctggtctcaaactcctgacctcatgatccgcctgccttggcctctcaaagtgcgggattacaggcgtgagctactgcacccgaccaattcttgtatttttttttttttttttgtagagatggggctttgccatgttgcccaggctggtctcaagctcctgagctcaagtgatccgcccaccttggcctcccaaagtgctaggattacaggcatgagccaccatgccaggcccccaggtggttttttaattcgattctgtgcccgttaaagtttgagaagcaccaagtttgtgattaggtggttagtgcaaggggctttggagttggacagacctgggattgaaacctggtttggccacttactacctgtgtgactttagataaattatttgaactctctgtgacagtttctcatatgtgtaataggggaactctctatttcatagggttgtgggggagagtaaatgacatggtgcattttgcaactgacactatcttagatttaatgaaatttagtaatgtctgtatcatattaagcactgagtctagcacagcctagcatactcaataagtgttattactaataattaaattaggcaaatttacaggaataaagaggctttctcctcttcctctttttctctttatctctcaatgagtacgtttgtctgcagttttataaagctgtattgtgtgtgtacactctttggtgttttgcctagcattatttaatggtagttatagcagcagcattaacacatcttgtacttattaatgtgccaggcataatttttatgtactttatgcatatattatttcattcagtccttagagcaaccatg

SEQ ID NO: 53032 - DNA, 1368 bp, Homo sapiens
ctgccttacttttgagtctccctttgatacttaagagttctgccatagggccaggcacggtggctcacgcctgtaatcccagtactttgggatgctgatggatcacaaggtcaggagatcaagaccatcctggctagcacggtgaaacctcgtctctactaaaaatacaaaaaaaaattagccaggcgtggtggcgggcgcctgtagtcctagctactcgggaggctaaggcaggagaatggcgtgaacccaggaggtggagcttgcagtgagccgagatcacgccactgctctccagcctgggtgacagggtgagactccgtctcaaaaaaaaaaaaagatttctgctattgcacccttttctgtagtctttccctcacctcctggtaaaattttacttacctttgaagctcagttcaagtcctcccttttacattaatccactggaaagctaacccatgataactcattctgcttcataactcatagcattaatttctaccactcatttgccagttgaccatgaaatgccgtgtatcgtcacttgtattttattatttgttatttaacttatcacacatttgcccagttagattgtgctgcttgggctcatggtgatttattctttctagtcccaattttgcctaacacaatgtcctacatttagcaagtactcagtaaatgttgatgtgattggattttgttagtacttcacacccttctaaagatcaggtgcttagagccggaagcctaagggaacacttacctggctgacatcatcttggctgcctgtcaagatggggtgtgtgcctgagagaactgcccgtaaatgaaatacttgtgcaacaggttatgttttctcctttagtgggtgggattcaagacttcacattgggaaaaagagatagtaagtgtaggaagagggctgaaaaggggatggatgggaggatgctaccttgtgagaggtggggatatggctttattaaaaacataaatattaaaggctggcgtattgcagagagaagcttcttggaaccagcaggctaattaggcaaactggcttctctggtgcaaaccagttgttaattgccatttattttctttgctataaaactgtaccagccatctacttactttctcattagagtgaatctggagaaaaggcttaggttagatttaggaaatccaggagaaaaatgcaggacagtcagagtaagaccagggatgggcataatcctttctctcacttgtcttaccagccctagaccttaagggtggccaggacctccttgcatttgccagtagaggttgctattgaagtagtgtaaaacctcttgtttctattcctgctaactccttttgccccat

SEQ ID NO: 53033 - DNA, 3451 bp, Homo sapiens
attattggttagttatcattcccatctctgaggttcacatatgcagtggaccaccctgcctttagctgtccagactttgactgcaacctgtctttctattccactcctcctcccctcccccaaatgatttgaaatggagaggaaaggaaatggagtttgatggttttaactcttctgtggctgtggcttagggagcagaatgttttgattgcttgatttaggggtcttgaggtctcctaatacaatattctttttgttaatagaaaggccccactccattttttttttctctgagtattttggactcaaagtcttgtgttgaaatgtcggtacctgcccccgaaggggaaaagatccctttcagagtttatttttcccccccattcatggggaattcttctcattatcagaagatgaagattactggtcctttgaacagagtataaatatagccaacaccctaatatatttctaatgattgggctttagctttaaaaacattaggctagatgcctccctattttttgtggcatgatttagctgtaactagcctggaggcaataacaatactaaatgaccttttgtagtcacattaaacattgaaatggtactgagactgccttggtggggagttttggcctatgggaatgatgtgagttttggtttctactcctttctctgttttcagataaatcctcctacatgtcccattctctggctctgggaagtactgacagtagggaaaagttagtacactcatctcattgttcagatcaagtttcctgggtgcggttttgcagaacttcctacaagagctgactcaagagttctcttctattgtggagatgttcctgctcttatatgtcatactaatttatatccttgaaattttgagcagcatcatttggatgtgttaagttgggaatgaagaaagtgaaaatattttcagagattccttgagaaaagggttccttttgctgggtaaatcaacgttccctagatgctgtggctaagaagtgaagaattctaagccaacttttttttaccccttttcttttctttacttttttttttttcgagatggagtttgctcttgttgcccaaggctggagtgcaatggtgtgatctcggctcactgcaacctccgcctcccgggttcaagcaattctcctgcctcagcctcccgaggagctgggattacaggcattacagacgtgtgccaccatgcctggctaattttttgcatttccagtagaaacggggtttcaccatgttagccaggctggtctctaactcctgacctcaggtgaaccacccacctcagcctcccaaagtgctgggattacaggtgtgagccactgcgcccggccttttttttttttttttttttttttttttaagagacagagtcttgttctttcacccaggctggggtgcagtgacatgatcataactcactgtaaccttgaactcctgggctaaagcgatcctcctgcctccatctcctgagtaagctaggaatacaggcacatgccatcatgcccagctcagttttattattttttttttttttgtagagacagggtctcactatgttgccaaggctggtcttgaactcctggcctcaagctatcctcccacctaagcctcccaaagtgttggattataggtgtgagacaccttgtccagcacctgtttttcctttttgatgtcagatccctctgaataacaagttatttgcctttttttccctccataagactgtgagcaccttgagagctgcgagaacatctcacttatctttgtatctctgatgtttaggacagtgtccagctcaaagtgtctataaatgtatgttgcattgaatagtggagggaagctttaaatacatttactgcagacagatgtatgcttagcatatttaattgggagacattattagaaagtggagatggataaagaaaggaatttttgtggatatgatatagagaatttttgtttcctaaggatttaaaatttttgtttgtttatttatttgtttattttttagagatggggtcttgcagtgttgcctaggcttgtcttgaactgctgccttcaagtgatcctcctgcctcagcctcctgagtatgtggaattacaggcatgagccactgcacccaacttgcctaacaatttttagagtaacagttattttgcggttcctttacgtggagaacctttagaagtgttccatctgactaccttggacaaggcactgtgaccttctttgtagcagagactaaagacacctgcccatttccctcaaatggagggatatccctcagtaaaggaaggagctcagaattagattgggggtagagaaaggaagcattgagtccctcctagccctgcactgtggaaatgtaaagctattattatgataattgctgttggcaaacaagaaaattctcagcctctggtttgtacctacacccagtcacaacctcaggttgggtggatgcagactttaaatattggggtcacctgtagctgttggaaaaggtccctgtggtttctctgggtgttgtgcaagcattacttttttggctcttttccctgtatccatcagtaaaaagtaggaagtttgaggagctgtgctttcggttggcattaggcattggagtgcctttatttcctacatttaactggtaaatatccaacactccataacaggatggccctgcttggaaattcttacctagggagtgactgaagcctaagaggaactgcacagccccctgtattgaaaacggagtagtcatttcctagagcatggcttggatcctgatcagctgatttcctgtctctacagggatgtgatgtgattcctcccccttccttctggaagaaatggatattttttttcatttcctgtttgatagcatattttctgagtaccaggagacacttgatgactataaaacatttgatgtgtggggggtgggaaggaaggaggcttttgttttcagcagaatggctttcatttgaggaattcaaagcacatacatgaacccaagctgttttgttcccatgggagagacacaggctctaagaagattgtttcgaatccctttcctgggctgtgtctacttgacctgcactggtagagccccttctcccccataggttagaaaagctcggtccctcatggagctctgcatgctgtggattctgctcttgccacatccgctactcagccctttttgtgcctaaatccgctggagagcaactattagtccctgggggaagtgacaccacccttggaatggaacctggctggatgccccttgatccctgactgagtgacacagactgggacaggaatctggctgtccagatttcctgtcctctgtcctcactagccgacttggctgcttccaccctggggctgggggtatggggtgtggtg

SEQ ID NO: 53034 - DNA, 2348 bp, Homo sapiens
acatagatgcctaataaacatttattgaatttaattgtaaaatggatcaaagaccatagttaataagagcttatagggcacttaataagtgccgggcaactgggcacggtggctcacgcctgtgatccctgcactttgggaggctgaggcaggcggatcacgaggtcaggagatcaagactatcctggccaacatggtgaaaccccgtctctactaaaaatacgaaaattagcagggcttggtggcacacgtctgtaatcccagctacttgggaggctgaagcaggagaatctcttgaacccaggaggcggaggttgcagtgagccgagattgcaccactgcactccagcctgggtgacagagtgagactctgtctcaaaaaaaaaaaaaaaaaaaaaaaaaaaaagtgccagtcactgttataaatgctttatgtcaaattaactaatttaatccttagaacctatctccattttacactggagtaaactgaagaacaggagggcatagtgatttgcccagggacacacagctgttaagcagcagagttaggtttcacaatttgctctagaattctcatgtactcaaacattatgctataatcagttgttcataatattttcacgctgttaaattcctcctgaatgcctgtctgtcttgggtgtagctcaaagaatgaaaagcagaagcagcataacttgttgaatatactcttgagcctgcgtcagaatcacctgcagggcatgttaaaacacagattgctgggtcccatcctcagttctgattcagtaggtctggggtggggcttgagaaattatatttctaacaagttcccaggagatgctgatgctgctggtctggggaccacttggtgtagcatataggtgttaagagcatggactcaagctgctgaggtttgaatctcagctctgccatttattaactgaacttgggcaagttcttgaacctttctgtgcttcagttctcatctgtaaagtgttttactgttaccacatatatcataggattctgacggagattgaatgaaataacatgtaaagtgcttaaaatggtgcttggtttgtagtaagcatgcagtcttagctacagtaatggggataggacatgtttcttgccttgtagattttagagtctagttattagacttaaatctaataattttaaaaagtacaaattcaggtattagtttacatggttctgattctaccttagatttggaaagatgaaatgcgtgtatcttgggggatatggtgggtagtgggagaccaggaggaggaaaggtacatgaaactagaagataatggaaagttatatagtcagaatttagaaaggttggaattgccagtggttttggtattattacctgagaacttgagggagatagaggaaggtgcctgtgctctctgtttgccaaagagataactgactccttttcccatttctctttcttagagctggtatctggtctgcaggcagttccggcagcatttgctttttgtggggaacagtggctaaggaagtgatttgctactggcttcagaagttgggctctgctgcctttatcctccacagctgcctcacatagttttgattcttcctgagaaaggcagttgttaggtttggaagtcttcagattccagagacagctggacagctgaccctctggtagctatttcccaaactgccagcctcctgttgcctcatctccctgggccccttcttttttgctttgaagcaatatcctatatttagtgaactaaccaatttgaggttagaggaaatttgatgggggagtctctcccaccttaaaatcctggatggatggagtatttgggcccaggaacaagatgtatcctgttaaaaaaaatttaacaccttcatcaagtatactccaaatgacagcttacagtgctatgaatgtacctctagctcatgggtaaggagcagtgtttatttttgggtgccctgaagaaaatatttgggggaaggagtggggagaagctcaggcagctccatttatggttgagcaatgcttggtattctacagaagggaccatatggacagtggaagagagtttagcattctgattgttcacctcttgctccttccattctgatggctaattagggacacctcattagctatcagagtggaacaagtatttgccaggctgacatgagcctcagccctgcatcctgcatcttctgctttcccaacctgctgagtcaccacctaggaatggcagtagccaggttaccacctggagcacctggagcactcttggcataatgcactgttgactggttttggtctcctagacacagct

SEQ ID NO: 53035 - DNA, 3142 bp, Homo sapiens
gggtcttagctctccttccagcttgttccacaaggcgctgacctacttttcagggacaattaagtgtttgtgagcaaaggaaggcggtgacccgagtgaaggtgaaccagagctgcattaaacaaacatttggagtcactttttctatcttacacaggagggcccatctcagtccaaatggaatggcagatcaggctgattgtggtagccacattctagatgcttatcaagatagtcaactaacccttgaatttttattctttctatcaatgtaccttaatatcagaagttacttttcataatcattgtaccccttgtctgtgggctatacgaaaagatttggaagcaagttggggctcttagagtgaattattgatacaagctagcttttgatataccttttggtgtatcaaagatacactttctggtggcaatgtctggttcatttgtaacatcttggagaggattggaatctcttttcctttttgtatcaggccaggataataggatagaggagaggccagatctgtagagaatgagcaagtggcttgtttagggtttcctgcccttgtgaggtaagggctcaaggattagattcagtctttccatttgcagtgaaaggaagtaaactcactttcccaccctcatcctggaggttacttatgttatttgcagaccccaacttctgcctctctgttaagtatacttcttatgcaggttgcccttactgttacatcttaccactgggggaaagatccaaggctctgggaaggacagtgacagttgtcctacattggctagtttcaagaccctgagggaattgccaagccagcaattaggcaatttctttttcttttcttttctttccttttttgagatggagtcttgctctgtcgcccaggctggagtgcagtggcgcgatcttcactcactgcaagctccgcctcctgggttcacaccattctcctgcctcagcctcctgcctcagcctctggagtagctgggactacaggcaccagccaccatgcctagctaattttttttcatttttagtagagatgggctttcactgtgttagccaggatgatcttgatctcctgacctcgtgatccgcccgcctcggccaccaaggtgctgggattacaggtgtgagccacggcgcttttttttttttttttttgagacggagtcttgctctgttgcctaggctggagtgcaatggcacgatctcggctcactgcaacttccgcctcccaggttcaagcgattctcctgcctcagcctcccaagtagttgggattacaggtgcctgccaccacccccagctaatttttgtatttttaggagaagcggggtttcaccatgttggccaggctggtcccgaactcctgacctcaggtgatccacctgcctcggcctcccaaagtgctgggattataggggtaagccaccgcccccagctggaaatttcttaaacttttatttttagcaactccatattcatgagaactctcataatcttctagtcagtaaaaagaaaagttattgaagttattgatactgcacccagagatccagatcaaatcttaaggaaggaagaagcttagaggagaacttcaccctgccactctctcattggaattcccttctaacaacgtgtgaggtgtcagccccatttgaagaactagtttatatatcagagcatggcctggaaatcagcgtggcatcaattttggtcttttttttttttcaaatagagacaaggtctcactatgttgcccaggctggtctcaaactcctgggcttaaatgatcctctctccttggccacccaaagtgctgggattacaggtgtgaaccactgtgcctcaccagttttggtcttacagatgactaagttttttgggggagggtattttaggtgacgtgcaattgctccattcctcctagacatcccagaatctggtcacaacctccttttttccacttatcctttcctttatgcacattaaacctgttctctgctgtttcccagtctgtcagcccctttatggtgtcagtgcttcctgacctatcatgtacaatagggctcgtactggcattctcagatctcttttttttcttccacgccttttctatccccagtgctggacctgtgttcattttctccactgagctactgagtgccactgcataacagtgtgctgactgactctattacagatttatgagctctagccacagcctggctctcaatcctatcctgaaacctttttattctcttctggttgactgccattcatttttttctgcagcagccattccagtctttcaccattctcttcaaacttgttgctccaccccaccttataaactctcaataagtaatttagtcttttacgtctcaatttatctgtaggctttaccagtccttaccacattccctcctatttcagaggcaggtctctgggcatatacatatatattttgtgttcttagttcctcccttcctagtgactctttgtaaagatattcaggttttctccatcctaagataaaaattcctttaagcttatctcttcttcagactaactctctgtgctttttttttctttaccaccaaactacctcaacagcctttcttctacttctttagtcatcgtgagccactatagccaaggtttgtgcccaccatcccaatgaaaggctcttgtttgtgatgacttgcttgcagaactcagcagcctctttttgttctcacgctgtttcatcttgtcacagcatctgacaccatttggacctctttccttccctgactgtgtgctatctctggatgagttgacctactctggtgatttcatttaggaatttcatctgtgtgtacagtgatgactctcttgtcagaatctgtaactacctattgtatgagcttttcccccaggtccaaacttgtatttccaaatgactactctccttttccactttgtagcctacagaaatttgcatgtaatgtatccaaaattcagcttatacaaccactatggagaatggtttggagaactaaaaatagagctaccatacagtccagtaaccccactccttaggtttatacccaaaagaaaggaaatcagtatattgaagag

SEQ ID NO: 53036 - DNA, 3373 bp, Homo sapiens
tgcccaccaccatgctcagctaatttttgtatttttagtagaaatggggtttcaccatgttggccaggatggtctggatctcctgactttgtgatccgcccaccttggcctcccaaagtgctgggattacaggcatgcaacactgtgcccggcgtgcacagtgtatatctttaggtaaaattcttaaatgtgaattgctgtttcaaaaggtatgtgtacttgtaaatttgatggataatttgattcattgctttaatttttttttcttttttaaactccatggaatatttctagtcacattgctgtaattgttaattttgtatatttcaagcatatagacaagtacagaaaatgtatagcagatacatatgtacccactactttttaaacagatgttgacaccctcattgacgttctccctgttaggtgcttttagcacttcctcaacattgtgatgttctcccacagaattttatcttagacgtcacagtaaaaaagttcctcagaattcatacactaccattctggaggtgccaccatacattctatcttggactttctttttaaatatagcctcattgttagcaaaaggcagcttcagaggaaaattccgttatgttatttttggtgtctggaatctgacttttgaaaaatgtttattttgccttcttcctctactcaaaagcaacaaaagaatgctaccagaactttatcacaaaccaagtgacttaaacaaattaaaaaaaaaaaggcagttggtggcctatgtttctagagacttgtttgatttgctggcagaacagcccaggtgagttgagccagtaagcacttttcttccactaggtttttcagaataaccaaatgtagttctcctaagcaggcactgatctttagctgacttagtggtgcagctgtatcctctgggttttgatggagttgatgagagaaactgttcttgcgggtggtaggaagctgttgacctgacctctgttacacctgactgtttcaatatgcctttgtggaaatcaatttcctacccttccatctctctgctagagatctataaccttgttccagtggaaggtgactcttacctctgatcttttcctaggtcctcagaatgcctggcagtgaggcttttaggttattttgggattttataaactgagaggggaaccttagtctcaggtggggctagaatctgaggtcctataggtacagatttatcctaaaagcaagtgtttttgccttctctctcagttgctcagtgcttcttacctcatttgatctcttagtattacataagcaccttagggaggaaaggactcaaaggagccaaccatttctccttggacccacagccaaaaagaaaaggctcaacgagagtgagcttattcgagggtctgtagcctaaagcatgggctcttttaaagcctcttgttgggccgtgaagcataggtctaatccacgtgaagtaattacccaggcctggggtggccacagggtgagcagagctcttcgtaccctttttgccagacctacacttaatttcctttaaagcctcacttggtcttgccatttcagccctttccttcgaagtatgaagcctgactttttttgtcttcctttcttcagccctgcagaggcagctgtggccctggggacagccctttcttcaaatggcaaactcattttctgtccagcagaccagaaggacaaggtgtaattcaacgcttctctccaccagacactgctgccagggggagacaatgaagaaagtgatctttgttgctccctgaataggtccctgaacctggcacctgcttttgttactggctccttaagtcactggagacatttttgctgtttcctgggttagcagctgctttgggataatagtagcaactggttgtcaggatgtcagttctgcctcaaagaaaatcagtgtatttatatgaggagagttaccttttctgttcttaaatttcttcagggtttgtctgaagagtgagcagttggaagtcagctgtgcccttagtttgatgaccccatgaccctcatctttgaatctgaggagacactgccatttctactatccaagtactaaccaggcctggccctgctcagcttccaaaatcagacgagatcaggcgtgttcagggtggtatggccgtggacgagacactgccatatttttttcgtcctgctctccctctggtgagactctgagttctgggttctagcatgtaggtcagtgcctcctacctggtaagcattcaacagatatatgtgggatgaatgattgaatgaattccttgatcttgctgtccaggttcagtttctctgacactgatacgtgggtgctctatgggagggggacctttgtttttaggagaaagattgcttcaaaggaattatggaaggtgttgatttctagggggctttgggggaactatgggaactctaagatatgattcgttctcgcctcattggtctagatctttctcctcgatagtaactgtctgctgacagacttgccctgtttcaggagcagtatcctgaacctgactcatctgggctctgtccttgagcagggtaagggattttttttttttaacagccatcctgtcactgtagattcagaagccctcaggaccacatctcaggcactgtagtcttggacttcctgatctggctgcattcagtcaagttccactcagctcttaggtgtctgtgcctttgtaagggctgttggagacagaagggctttttttccgctttgtcagcagctggccagagaatgcctattagtctgccagatcctaagtctttcacgtttccctgtctgtgtctggaacttagggcagaatctcttaccacctgaggttacatctcactatttgcctttgtgggacccattggaggataaaagatgaatagccatgaaaggcatgcagagttattgaactatggttctttgaaatgctgtgactctgaggaaagatccctggtctccaagaatacaactggagccagaccattgcaccaccaccctcctttcccaagagcctctttggaaccatcactcattccatagttccaaacatccttgtttttgtttaatttttatctgataaatgttatgaaacaattttaatggtgaaacacacagaggaaatgacaaactagcatgtgttgtcttttaaatgcacttagttcaagtggttaagtcagttgttcctgttgttagattgctgttgtgtagtcgactttccttctttaggtgggaagagtctctgaatagactttaaaaaagcaaaaggaaccagctcttctttagctgattgatcattcctttacatctgactctttt

SEQ ID NO: 53037 - DNA, 1028 bp, Homo sapiens
cctgttaatcttgcctatcaagttgcattttgagaaaaatgaaccatgtatttgtgtttctccataactcctaatactcacatctgcacaaagtagtaccttgctggttctgttgactgactagtagcattggaaggcacaaaagcttgggttggttattactttccctttccattatcttttttttttttttttcctctaagttggggtcttgctctgtcacccaggctggagtgcagtggcgcaatcacagctcactgtagcctcaacttcctgggctcaagtgatcctcccaccttagcctccccagtagccaggactacagtcatgggacagcacacctagttaacatttttagtttttgtagagatgaggtctcactatattgcccaggcaggtctcaaacttctgagctcaagcagtccgcccaccttaccctcccaaagtattgggattacaggtgtgagccaccacacccagcccctttccattatcttagcagctgtcacaattatttagcctgatctttttaggtgggcatactcccttttctctctgtttttacaatgctacttacacagtttctccacctgcatccaatctgtaattgggagttttgcagagcagtgtatttggtatgctgtgaactcttccctaggtcacccaatggcatcttgtgagccaggttgtctgaaaaacttcaaatcttggtggcagtgtggtgggtgtatctcccatatgagggattgttccagggatctgactcaattgacagctcctgaatttctaatatgccaaggcttttgtggtaagatgagcaagaatttttcaagctcagatttggggaacatagcttcttgccatgctatctcattggcatgatgtgtgacttttgggcagattacttaacctctgtctatttactttttctttttttgagacagggcctcactttgtcaccaaggctagagtgcagtggtgtgatcttggctcactgcagcctcaacttcccaggttcaagcgatcct

SEQ ID NO: 53038 - DNA, 1123 bp, Homo sapiens
tctaggtatccatggagagggtcctgtctccctgaatggttgtgctttcaacagttagggaatgagcttgacagtttctgcttcttccctccccttgccttgaactgccttgatatgcagtgcctcctctgttgtgtggctgtattccagtccgtaaacatgactgctgtaaggagagtacagagtattgtttattttgtaaaacttgtctcattgccatgtaatatttgctcaagagctcctgttgtggtgatattcttgtggtgagcatggccctttaaagattttgttctcaaatgttaaatgagcccctgactggtgtcctgaaaagcatttaagcttctctccctagagtttaagcaagaggagcagtaatcccagtggagcctgggctggggtctagagagaaggtggcagatgaggtggcagatgacaggcaggggcggttgtggtcccgtagctcatttgcacaaaggaggggctggcctctcctggggaggtatttccgctcactggaacaaatgagggcgctcaaaaggctgtaatgtaatgaggcttctctggtgacgtcacttgtaaatgtggtcaaagtccagttcttgggggctagtagaagcgggagtagagatcattcggtttgcatgctttcacttctcagctgtcactgtgccatggtgcctactttcagccagtgaaccaactcaactgggccgggcatgaacgcttacaagtatcagaagttcctggagggactcaacaaccttagaggtattacaaggcttcaggctccctaccctttgtccttgctgatcgtgtgagcacttattatggtgtgtattgtatagggtctgtaaaaccctcctgctctgagctggccctattttttatgcgtttaggcaattaaacagaagggatagagtttgtaaatgcaatcctaagtgagtaggagagaatctccttaggtacttcagcaacagcctgttgtcttgcttgaacggacaagtaagaaatgtcccctgtattcttgagctcagagggctcagggcactccctgttttctttgaggtggccagacagtgtgggtggagggctcttgccatagggccctgcagcctcacctagg

SEQ ID NO: 53039 - DNA, 1412 bp, Homo sapiens
atggagagctttgtatgctataaagggatatacaggtcgggcatggtggctcgcactcgtaatcccaacactttgggaggctgagatgggaggatcgcttgaacccaggagttctagaccagcctgggcaacataatgagacccccatctctacagaaatgttaaaaaattagctgggcatggtgatatgcacctgtacccttaactacttgggaagctgaggtggaaggatcactctgagttcatcttagaggtacagaacccaaataacacagcaaagagccccagagtctggagtgagaagagtgctgctctctggtgctagagaccatgtgaagaagggaagaatacccacatctgactaagcatatgtgtaaatgcaccttcctctctgagacaaagagctgtagtatggggctttagagtgaaggtaatagatcttttctctccacactactactcaccttgaatggagttctgttttctaatctttcattcactattgtttgcttcattcacttatatacactgtataatagtctttatagcataaaacatacaatatatagcagtttctcttgttgacccaaagaaaggatcagatttaaactcttctttgctcctgcaacctgagtctttttcaggtgggagaagttcctggaaagaggacatgtagtttttttggtttagtccttatcattttttggaatgttgctataggtcttagacaactattcccccaattctgggctgccaggcagagagttagatacaaaccattgcctttgtcaaatcctcctgtgggttgagtttcacccactgtgccccctgattaaggtgaatggttacttcccttcttcttttcacttaatatctttgtgtattccagaagggctgatggaaagaggtaattggctcccctcttcatttagttactgactgttgcttttcttggcatggttcagcttgtagacattcctccatctagtgggtaactgttgaagggaatccagtgggagaatagagacattgtacaagtttttgaagttctgatccccaaattcctatgaatttttggtgttttgatccagaattggggtgcaatattttccactgctcgtgctttttctggagggctttaacttatatttctcaagcctgtcaaaaaccttagttattggggtgatttctggccagatggacctctctcatgggtatgacaggctgaactattggcccgagtcctgatttttggcagagtccagacctgtgccatgactgggataagtaggtaattagggattaattagggaagcagagaggtaggtgaagtagagtggtgagaaagtggttcactagcctttactaagaaaaatttatgataggactatgagataactgacttttaaaac

SEQ ID NO: 53040 - DNA, 1258 bp, Homo sapiens
tgctttactctgaagcttttctcacagcaactctaggcatttaaatagcttcattgatccttccaaccctagtacccttttctcttgtagtggtaagggacccattaatgttgattgggaaactgcagtagcaagaatgaccatcaatattgtacaggaatcccacattggaaccctggattggtaccagattgagattctctttgttttcttgctgttactgagctagcaccgaggtaataaattgggccagcttaatttgataaaataggttgacaaactttactgtgtcaacacacccctgctttggtagatttctgcctctggaagaactagaactggtgctgtgttttaaatcaatgtattacagccaagtgcaaatcagcttctgttatgtgggactgatagccttagagtagaattatagacttgatgagagtacatccttgtttctgacttggagtggacatcctggagcagataacgtgaggttttgtagctgatgatagactggggatatttggaggttagctggagaactgaaagaaggcacatgtgtaggactttgtgtgtagggggccaataagaaagtctctgcagcagttaggatagtggaaaatggcttgagtcactgacaggcttgcgtcctgcatccttcatagtgagaactgtgtgcctttcccattcccagagcccttaagcaaagctgtcataaaagggcgattctctccactgcagggaatctggaagtctgcatgcttctggggtgaggcctgtcaacaccttttacagcactaggcacctagtagaccatgtgcttatttggatagttgatagttttgtcctgttaaagttttttctctccttaattgtatactttttaggcttactgcatgtcactgggctagagagggtcatcagcacaaactcactttggggttggtttcagttgctgctgtttttgcaatgtgtattttttttgttacaactggagatggttgttatacgatccctatttctcaaagagtgagcctgtatagctaacaagcatacaataccattttcccctcatccttgattttgttttcttgtcatgtaggcattagtattgaaaggttaaggccttcatcctcactatgctgctgtggtttctattggttgttggagaaaccccaggctgataatactacttttatgttgattactcattgtaacaactgtggggatggtactttcaatgaataccagttgttaaata

SEQ ID NO: 53041 - DNA, 2020 bp, Homo sapiens
gttagccaggatgttctcgatctcctgaccttgtgatccgcccgcctctgcctcccaaagtgctgagattacaggcgtgagccaccgtgcccagcctctccttgccctttagttctctttacctggaatgcccttgttctttatacttaactgaaatctgtctattccttcaagtttcacttcaggtctttcttctgatgaagacttctctgattatcgtagtccaagttgatgtatcactttcccaagctagttttatctatctattgaaatggtaagcttttttgagagaactgttttatagacatttctattattcccacggtgcctcgctcatgcctagccaagtttaaatgctccttacagagcacttataaaatgtggtgaccaaagccaatcactctttcattcgacaaatgtgtatgagcacctaccatgtgtgctgtgctctgcactgggatcccagcaataaacaacacagaaacaagacaggttatactgtagagaaggagacactagacaaatatttgttggtcaacagaatttgtggaagccaggcaggactctaagtgaggacaaatgacaagaagagggagaatttagaaaataagatatcagtgaaacgactattataggaaaaaggtgtttaatggattcattcagcaggtaatttattgaatatccactgatacaaatgtattcccaggtattagggatataccagtaaataaagcaaagtcctttcccttgtagagcttatattctatcatttagaggcatttttgaaaagcaaagcacctaatattggatgaagcccatctgtgggaggacagcagtgaaggagttaaaatgcttctagggctccaggctttgttgaaacagatggtttctttgcactagggaatgtttttaagagggattagaggactgggctgaggaaggcctgagacctctttccctcacgccatagcacacacacctgctgttctggcgcctggtagctatgtaacttgtcccccacttggtaggcacttgtttgcaggcttgtgattgtgactgtagggctggctctaagcttctgacatttttattttcctttcgtgatttttatttgtggtccaacagcaatgaagtcccatttgaatttaacagacgttgggacttgtctgcgttcctttctggtccatatttacttttacataattgtaatctttctgtttgtgtgtgtgtgtgtgtgtgtgtgtatgtgtgtgtgtatttttctcccgatccagttttattgtggtaaaatacacatgacaaaaaattgatcattgtaagtactttaaagtgtacagttcattgacattaagtacattcacaatattgtacaaacaccatgactattgaattgcagaactttttcatgatcccaaatggaaatcccatatccattaagcagtaattccccttctccccaacccctggcaaccactaatcagctttgtgacttgcctgccctggatttgctcattctggatattttatataaatttagtcatgtggccttttgtctctggcttctttcacttagcatatgcacatatttacatgccttttccatgtaacattataaggattttttaagtgtttcgttacagacattataattttcttttttggacacagtctcgctctgtcgcccaagctggagtgcagtggtgctatcgcggctcactgcaacctctgcctctcgggttcacgccattctcctgcctcagcttcccgagtagctgggactacaggcacccgccaccacgcccggctaatttttttgtatttttagtagagacggggtttcaccatgttagctaggatggtctcgatctcctgacctcgtgatccgcccgcctcagcctctcaaagtgctgggattataggcgtgagccaccacgcccggcccagacattataattttaagttatcttgttgataatggcttcatttagccattcatttattgttgaatatttggattgtt

SEQ ID NO: 53042 - DNA, 2718 bp, Homo sapiens
tacttgggttagtgctgctggggccttcttgccttctggcagacagccctcctcccttttttgtccttgctgacccatttaacagaatacttttaatttctctctaccttgctaggaaaataaagaccacttaggaccattcagggccacacactgcttacaaaacccagtgtggagtagaaaaagcactggaggccgggcgcggtggctttgcctataatcccagcactttgggaggccgaagcgggtggatcacaaggtcaggagatcgagagcatcctggccaacatggtgaaatcccgtctctactaaaatgcaaaaaattaactggatgtggtggcgcatgcctgtagtcccagctattcgggaggctgaggcaggggaatcacttgaacctgggaggcggaggttgcggtgaccagagattgcaccactgaactccagcctggtgatggagccagactccatctcaaaaaaaaaaaaaaaagaaagaaagaaagaaaaagcactggaaacaattgctagatcttaaacattcacttaggaaatgccaaacctgtagatttggagtaagaagcagagaggctagtgagagagttcagggtttaggcctgatttctatcctcttccacctaccacttgttgcatttccttcactgtcagaatttgattgttctgtgtctgtatcttcagatgtgtttttcctagtgtatttgaaaaactgttgaacagtcccctctgggcagggagggaagagggttagacaatcaggagtagagactctgttatttctctctccagacctagaccctggagttaactgaaggtccagagttactgaggggcggctgtgtttgtttttcagtaggctggctttactgagtgggatacaagagcccaaagcacaggccattcccagaagcctaacattttcatatttctttctctgccaaagaatctttggttagggttaagaataactagtctgtctgtggaaataccaaggccttttgtttgccagaagaaaagcgcttttgattaaggctgccttttctctctctcttttttttttcttaagctgttgtgggaagacttcagagcctctgaaggtgccgtatttaaggggtgtaggggaaggaatgatagctaaatagaactaagggagacttaatcgtgctttaccgcacatttgtgcagagattaacaacagcaacaaaatctacccagtttttggtcattgcttctactagcctttctttcttcctgtcttttatgaaatctacccaaaacagtagttcccaaaggacctgctgtactgatctgaccttgaatcatactctatcacttagtgtgatttggggcatgttacttaacttttctctttaggctagagttttgcaactataaaatggggattatagtagaccattttcatagggttataatgagaattgaatgagttaatatgtggaaaatacttaggacagtgcctggcacatagtaagagcttatcccagtaaatattactgctactgtgtatggcaaatgctgagtgtagctttattttttcgattagtaattccaaatgtggctttctagggttagcaaagtcagggctttttttttatagaatgaaaaggaagcagacattcccattaggcattaactttttatcagtcagaggcaaagggaaagatttattctctgtgtggacgcatcatagaggctcagtgtcttcttagttgaatgtcaacaagggaatcaatttcatcatgaagaactactctttggcaaaagcaagggcgagggttgggttgtgtactttcgtagtctttgtctgagagtagtgatgtttcttgtgccccaggaaagcttgaaccaaggtatagagaaagggcccctgatcctccaaatttacagtagtaagagaagcaagaaatatcttagtaggaaaaggggaaaccctcagggctgggtctcgtcccagtgactctactaccaggtctggagaatgtcactagtggaggctctgggcaagtgcctggccactgcatttccctggccatagtaagagatgtgcagaatgacctgccctaagtctctgggctgtttgttttataaactgctaccttcttccccaaattgctgggagtggctaaggaagtggcacagaaatttagatttttgtgtctttcttgcccttttctgtattgtctttagtttttagaaggactttcttggctgccttctccctcccccaccttgctccatcctctcttgcaaagtaaaatctcatcttcctgcaggaggttaggttgtaaagtttacacataaagtgaggattccaaataatcaaaattatcatggaaaatatctcaaatgacccagaaattaaagtatataaacatggttttgtgtatatgccagaacaaagttggaataccatatgaaatagttggcctgtaattaggagacattttatatgaaaaaataagtattctcaaaaactagaatcatgtacagcattcagaatgctcacaatgtgaagaggcacaccggacttagacatgctaaagtctcagattcaagtcctctcatctcatgctcatgttcatcctggtaaataacttcactttggtgtaaaacctcattgagtggaattgtgagcaaacttttgtactgtttatttttctcttcctggtcaagtttgcatagtta

SEQ ID NO: 53043 - DNA, 1009 bp, Homo sapiens
gatttttatttatttatttttgagacctagtttcgctcttgttgcccaggctggagtgcaatggcgcaatcttggttcgccacaacccccgcctcccaggttcaagcgattctcctgcctcagcctcctgagtagcatgtgccaccacgcccagctaattttgtatttttagtagagacggagtttctccgtgttggtcaggccggtttcaaactcctgacctcatgtgatccacccgcctcggcctcccaaagtgctggcattacaggcgtgagccacctttcccggcctaactactgtttctatagaaggagttttccagattgatgcctaatgtacaaataactgcatcatcagtccctggctgtcatcattttgctgtgcaaaaagggaacatcagagaggggtccaggagccactccacatatcattcgtaaatgttattgctaatggagagagggatgatggtgggggcaggcgtatttgtgttcatagaggaaggtaggactgtaatctccatgcctagtttctgattggcattgataatataaccatctttcagagagtcagctccaagaggtaactgggaaacatctcagttttgctccgggcactatttcctttgccatctataccagaagctgtggtgaatgggaaagccattgctttctgaagtgcccttaggcctttctcagtgactcttaagttttaagaatcatttgggtgagcataatgctgaaatcctgtagctatgaaagctgcactgccatggcaataaaactccccattgaataagtaaaatggcaatttccaggaatctgggtggtagttatttcaatcaagttgagaaatgggatcaccgagagggggatttccgcagaatctgggctgtcagggaaatctttaggctgtcagggaaatctttattccccattgtcttctccttacaaattccaggagaggagtatgaggttatatttgtgtcctcagtaagcccataaaggtcagc

SEQ ID NO: 53044 - DNA, 1695 bp, Homo sapiens
attcgtttatgtactgaacataatcttagtacctcacagacagtgcacatgtactaacacctttcctgaaaccttaaaatataagaaatatagaaatacaggtagtttgtaagtctttgctcttggggaagccaattttggatttcctttgtctttttgtcctatcatactccttgaaaggggtagtaaaagcatttttctctttttccctctctgtagttcaccccagtggggcacatagttgctggattcagcaacgttctttcccaaatgattcttaaggcatgcgggtcactgaggtttatttttaaatccataacccagggttcagcagttgtccttactgaattcccgtgtggaggctttcagctgcccagacacccccacgtctttactgggcacattccagcagtcctaaagtcctgaccctcaggagtgaaattctggtctggtgtctcactcctggaattccttcatgaggcatggctatggcatgaatcaggtgtcagattggaaagccaagagatcaggtggcttgtgatcataatataaaaaatttctaactggtaaaatggttttggagacttaatgcgtattgaaagtttctttctgctttattgtcagccttagccgcctcttgatggtctctttagttcctttcctggattgtctaggagcatgctggaggcagtcagaacataaggagttaaattgcagtgaacttatggagaatgattaaacagtgattaagtgatattttaacttctgtttacaggggagaaatggatgtcatcaggaaaagggtttgtttgcagttttgactgaagtcatcttatcttagccagggctgcctgcccttattcaatttcatttttagctgcaaggtgaactcccccacacacttattttctgatgtccatctttgtctttgctcatattccaccccttcctttctttccccagaccccgtgttgctctaggaaaacttgctccactcagaacagagttggggtgggacttagctgcccttctgcatcttctgtttctggaagtctttgggatgaaccatacatgggagagtcaggatactggaatgccattgaactagtggaaaaagcactagataggcaattgaagaggcctgggtttgaattccagctctgctacttattagctatgtgatcttggacaaattacttaatctctgtaagtcttagtttcctgttctgtaaaatggaggtgataatttctacctgaaagaataggaattagagaggattagagttatatatgtaaagagcattgcctgacacacacacagtaggcattcaattatgtgtgatcaaagaggtcagagttgatggtagaatttagactgtctcggttagccttttgcctgtttttcccagtgctaattgtatagtttatatattatagtttaaagttatgctgccaggcgcggtggctcatgtctgtaatcccagccctttgggaggccgaggcaggtggatcacttgaggtcaggagttcgagaccagcctggccaacatggtgaaaccccgtctctactaaaaatacaaaaattagccaggtgtggtggcacacacttgtaatcccagctactcacgaggctgaggcaggagaatcacttgaacctgggaggtggaggttacagtgagctgagatcacaccact

SEQ ID NO: 53045 - DNA, 1043 bp, Homo sapiens
gaggtttctgaaagggagctaaatgtgcttattaaatttgtgatggataccccaaagttggcagaagttaatcttcccaatttacttacctctctctgagcctcctcaaccccaacccaaatacacaaaccctgtggttcattctagtgtcacttgtactttctgtttttcattctcttcctcatgctatctctcctcctggagtgtttactcttcttatttcagactgttgaaatcctatacattcttctagtcccaggttatatttcttatctatggaagccttttttttgacttccccaacaggaaatgaccatttcattgactgaatttctgaagttccattcactgagttcttatagtcttgccctcctgacacagcctgtactgctttatgttaagactatctgtatacatatttctccagttagattgtaagctcttaaaggatagtagcataagactggctttgtaattttttttgttattgataacaatcaacatagtacctaggcaactaaatatttcacagaaccacagaattttagagctggaaaagaatttagagatctagaatgtgaactcattttatgaatgagtaaacagatccagtgtagttaaacgatcctgaagtcatttaataagccaagaacagaactggacctataatcgtctctagttctgtaatgtctaaatgcattgataaaatctgatatgtgcttatttagatattctggtttatcaaaggttaaccagagagtgctttttgtttcattcttgttgaaaatttttgtcaatatctttttggttttagtaattaggtatgccataggtaatttcttttcttttctccctccttcgctgcctctctctcttctttctttcttttttcctcccctccccgcccctctcctctctcttcctttctcttttcttgtcttttctttctttctttctcttcttttgtgtgtgtgtgtgtgtgtgtgtttgtttttgttttttttttttttttttgatggaatcttgctttgtcacccaggttg

SEQ ID NO: 53046 - DNA, 1054 bp, Homo sapiens
cactttgggaggccgaagcaggtggatcacttgaggccaggagttcgagaccagcctggccaacatggtgaaactccgtttctattaaacatacaaaaattagctgggtgtggtggtgtatgcctgtaatcccagctactcaggagactgaggcacaagaattgcttgaacctgggaagtggagattgcagtgagccgatatctcaccactgcactccagcctgggcgacacagcaagactctgtctcaaaaaaagaaaaaaacaaaaaacttaaaaatggttacccagatttccttttatgacttgttcagtcagaggcagctgggaggatgcacgctggggaaagcattactcaccaggcacacatagtggccctgactgctggcaagtagtctgggctgtgttaagagtgagtcacctcggggaatggaaaaattgcaaggtactgaggggtaggagttgtgtgccagtgactgctccttttctgtctgctattttctctataaggactcatcacaaaaccataaatactgacgatcctgttgaggcagccgtgaagccaaccaactttatggtgataatgtttcccataaaaggaatgagctgactggacatagcattgttgccttctatgttacaggtgtatatagattttgacacaagcttgaacttgtataatgaaagttccatgtgtgagaatttcatcagaataaaagcaacacagttttctttgttgtttaaaaacttagtcttctgtgtctatctatctttgtccagtaggggtcactgagggttaggctctcaataagagaaacactaatctagtgataaatgagctggattccttgtctattgtgacatctttgtatattcagtactatgttttttaaaatattagagcagaaacaaaaggcgtgaacttgtattaagaactttatgggcgaagcgcagtggctcatgcctgtaacccgaggcgggtggatatcacctgaggtcaggagttcgagaccagcctggccaacatggtgaaaccccgtctctaccaaaaataca

SEQ ID NO: 53047 - DNA, 1089 bp, Homo sapiens
ctggagcctcaagtgcttgatttataaaatggggtaataatatatagttcccagggatattacagggatcaaatgaaataacagatgtaaagatgctttatagtagctgcttaataaattttagtttcccttccaagcaagtccatcttcttcgaccatcacagcccaggagcttcttcacttctccacagcaaggggtgtgtcatagtcatcttggtgtccatggtatctggcacaatgctctgcatcttttaatgaaatgaatgaagtgctttgtttcagaagagagggagctccagcttagtctccactggactatgtcatcaatttttcctttctaattcttattcccttcagcaaacactattacatttcacatatcaagaattctctattgaccctacattgctctctctgctcctgtttacagcaaagttccttgaaggagttgtttttccctgtccttgattattcttctcccattcattagttcttgaatcgctccagtcaggctttttctctaccatgccatcaaaactgcacttgttagagtcaccagtgacctccagaatgctaaattcaatggtcagttctcaatcctcaacttgacatattaatagctcttgcatggttaattgctactttttagaacgctttcacctggcttctgggatagcttactcttttgggtctccctctaatccactgaatcctcttttttagccccttttggttgttcttgctcttccctagataatgttgaaaggcttccaggacttagtccttgaacttgatctcttctctatgtttactcactaaataatgccatctagtctcctggctttaaaattccagcctgggccaggcacagtggctcacacctgtaatcccagcactttgggaggccgaggcaggtggatcacctgagatcaggagttcgagaccagcctgcccaacatggcaaaaccgtgtctctactaaaaatacaaaaattagccgggcgtggtggtgggcacctgtaatcccagcttcttgggaggctgaggcaggagaatcacttgaacccggtaggtggaggttgcagtgagc

SEQ ID NO: 53048 - DNA, 3051 bp, Homo sapiens
cccttgagaagtaccccctaaatgagcagtttgctctcctcgctgatcttcatcacacctagatgtcaggtctgcttcatgggagcttgctctgtatgtatcctccctggactgatgttcaggctccttgcttctcctcccgggttgtgggtatggagggtttgccctctgacaactccagggtacttgtggtgctcatacatcctcatgtactttgctttctccccgcaagaggttccctaatgcttctgtgacttttttcttctggctacatcctgaagtctggccttgcaggcaggctgggaatggaaagttaagagtgtgacgtcctctgacaccctcccttcttgtagaagggtctgaggtttgtttatttaagctgagcagaggatgccaaagatagaggtttgagtcagcttgacactggcttaggcgctccttttcactctccttgttccttcttccctttcccctcccccgctggccagttgtttcctgggctttgtctgagatacactgtacagttttagtcccagtctactagcgcctgctgaaaaacagtcagaagtgagatggaggagaagctgccaggaagtttctgacaacactaagctccggcctctgcctctgctgatagtacaggacaacagtaacctcaggagaaaggcatccagaggcctgcgctgagcttgtggctaactcaagggaggagaaaggacgggcctggaaatgcccctcttagattcatcttatttaccaccaaccatctttattttgactcacgttcttggagttgctggtgttctatactggaagaggcatgccagaggtagagcaggtaactaactggtacccagttattctttaaatctactgtggggcttttgagggtggggtgaatgatggaggtcttcccagttgctttccttaaagggccagtacgtccttcagctggggtgctgtcagacttaagagtgtgtgtgtgtgagtataatgaagaagctggtctgccctggggccactttgggatgggggtggtgctcttttctgttctgtgagtctgtctggagagtgctggttagatgaggtgatgactgggctcaaaactgaagggaagtggctgctgtgctgacttagtctttcctcagagaactgagctctttctttctcaatctcagagtggtttcttggaaccttgtttttaactgaaaacatacagtaactcttttaccctcctccaggtatagatttgggttggagaagtttctgttaacttggtgtgttttggggtgagaaaaggcagaggaggaagggtcagtcagtggaaggggtcgtgcgatgtccttgccgaggggcatcctggaacactgggtgtctgtgttctctttgatatcattgatactgttcctacacagtttggctatgtgtatccaaatcatcttgttcaatgcaaggaagttaatccctctcttccctagggaatcaggctttgataattaaaaaaaaaatttttttttgtaatggcaccagaaccctcattcttcccatattgctattagttatattctgttgacttctaaacactcagagcagggatcagccctgagtttggctgattctgagtctccatggttgaggattcatatggtctaacttttactggagtgtatacccttgggtctcattgccttcagtactctcattgtgatgggctcactaccttcaaacttaggtatgtagacactttttatagtgtatcttacaagttaaggtggggatttgatggcttattatttagctttctattaaaagttcacaaacgcctgacagaattagaattagattcaatcattccccagtgtcctttccagtacgtcccagaaaagcttttgactaaatattcagatcctagtgtgcatctatagcagcggaaacaaagacagacattttagaagtgtgtttgattgtgtggtggtgtttttaaaaaagccacctcaaagtggctttcctgtatttgaacttagaaagaaagagataggcaggcttaagttgtttggtcctatttactatttcacatgtaatgagaaaataaatacaatatcatttaggtagaggctgctgcttttctttccttgtgcattatggtaatgtcatttttaaacattaaataactaattagttgttaatatttttaaagtttatcttcagtataggactttaatggaacttaagagctatcactgtattttaagtgctttcttttttatgtttagaaatgttaatttcataaacagccataaagtaattgaaataaaaagatacattgtaaaagctttttatttctatgaaacaactttgattctaataccaaatagttatatcgggaatgtgctacgtttgctttatctgtaaaatgagagatgtcatttttcaattggaggctatggattccaaatcttccatggagttacttacgagattctgtacccattttattataattgcaattttaagatgcatttcatttatttaaaaatgtatttttaaaaataatatgtacactctaattacctgccagttggacatcacagaataaagtttttccaccatctctgtgtatatatttgtactattaataaatgtacacttgattaaaaacacaaagatcgcttcttctgatgtagtcttttttttttttttaattggagttacatacagtattgcagaacaaactatagcacataggtcttgtgcctaataatagtaataataatgattcaggcagagctcagttgtatgagctcaggtgttaactgaactattataatagtgaagtgggtaattaattcatctctatgtagtaatactgtattactggtttagtatgtgtaccagaagtttctgttcttttgtctcacttttctatttgtgtttacatattatgaggaatgttcatagttgtttttttctttctttctttctttctttcttttttttttttggagacggagttttgctcttgttatccaggctggagtacaatggagcaca

SEQ ID NO: 53049 - DNA, 1683 bp, Homo sapiens
ctctggaaacttgctttcctaggtgctgcccctcctccctccctgccttcaggaacaggattgaaagcagcattagcctgaagaagtcgttctatttagggagctagagcagagggccagtgattaggcccttatctgcagcggggcctttttgagtggtgtggggcagggctgcagtgtctgtcctgacacccacagaggctggacttttctgtcccctggttgggttagaactgtgaagaaccaatagaagggctgggccagctgaatgaaaaagcccttcattgtgtttcttcaacattccagtgtctggtacaattagccaagactcggaaaacaagttggacaaacaagcaggcagccttctactgatggatgaaaggatttctggcacagctgagttaagtgcactgactgtaaagacagagtaggaggatctgggaagaagaaggggactttggaatgccattcctggctgtgaggggaaagaatggagcaacaagcaaacggtatttttgaagctgataaaatttgctgtgataatctacctgggaggctggctgaggcgaggctggctgaggtggggctactctgtaaagtaggtggaatcactggggagttactgactcttcccttttggcagctgtaagtgcggggaagggaaactttctttggaatctagggatctgttcacagtggacggtgagtgtatgagcttgctccattatagtctctcccatcatgagaccttctcatttggttaacactatatgtacttctgcctgagaagaggcacacctgaggagcaagttgttgggcaatggatgcactgttcctgacttggcagtaaaccacttagctcaccagctctcctgcaactaagattcaccacattacaagcttctgctctgcaaatggagggtaactcaaagaccagtttcttcctactcaggtttactcacttcataccttgactggacttttgcatatggagctctcccctctgtacgctctattggtctggaaacacagagttggtgctacttttgaacagcatgcagcatgctatatgcctgagacatggacccagtttttggaagtgccctagggaggagcttcctctctgacctcaagggaagaaggaggtcagtaggaagtggtgggtggagccacttctctgttctgctgtctcctctctacacctcacagccctttttgaggagctgcgaagggtgcacaggccagtagctggaggttctttggtaccccctccttttaggtggggtcagcagacacaggggcgccatgtggccgagttaccaagatgaacacgagttcaacgcccacctggtttgtcgcatgtgctgtatgggttagtatgtgaagttttttttttttttgcttgtccgggcctgaggatcccaaatagcccttgctctcattgactcataggaatgcatggacttcgaagccttgtggtgttacaacctttaggcttgttaaaatgtgcagtggaatagattggggtgccctacttcctggggaacttcttaagcttgcagtaactggcagttaagagcccaagctttgggtgtagaactttttttatagagactgaattcatgctcatgcttctgcctgtatcaggaaaccacttttaaggtatgttgcatagtgctgaaa

SEQ ID NO: 53050 - DNA, 1027 bp, Homo sapiens
acagtgggcctgatatcgtgtgaaaatgtaatggacacaactttagttagctctgatttttccaccctgccttcttatctcagcacacaagtgatactggcgtgttgtgattttgttttttcaggcagggtctcagtctgttgtccctgctagagtgcagtggcacaatgatagcttgctgcagcctcaaactcccaggctcaagtgatccttctgcctcggcctcccaaagtgctaggattacaggcataagccaccttgcctggcatggttttgaggtttttagatattgaactggattcttgtaggtaactcagttctgatttcattttgtgtgtttcttttaccaatcttctaatcatacttggccaattgagaacgctctccggtggttttatgttttagttcttactatgtagaactttaggtgttgcaagttgtgggaaatacaaaaaagtaaatcatgttctcttcaaggagttaatgatctccctggtaatataagaataagcatattaaaagttcagaacactatataattatataagtgctgattgagtgattagcccagtaagtaacatagatatttggaggacacagagactgttgagaactggagttgtcagaaaaggcagccaaaatttttcttaaacacaaatctgagcatgtcattctccaatttaaaatctttcaatgcttccccttacctataggataaagttcgggttccttaagcttgtcatgaaaggtcttgatttggcccataccatcctatctcgccactacctagttgtctttcagctattcctaattatgtgcagttctttgaacataagctttttcttgtctccatgaatttgcattagctataactttatgtagcaactttattccttcccttctctttctggcttatactcatcttttaaggttagatagagtcactcctccttgaaacttcattaagtcccccatatttcctgtccctacccaggtaggcttaacctcttatgttcatgagcactct

SEQ ID NO: 53051 - DNA, 1026 bp, Homo sapiens
ctcctgggttcaagcgactctcctgcctcagcctcctgagtagctggaactacaagcatgtgccaccaaagcctggctaatttttgtatttttagtagagacagggttataccatattggccaggctgctctcctgggcttgtgatctgcctgcctcggccttccaaagtgatgagattacaggcatgagccaccgcgtccagccgtgatttccttttgtaaatttcttccatggctactagttgcctctagagtttgatgtcacctaactctttcctgatgtagagcactttgcagcgtttccaacccacctgtctagcttcatttctaagcactctgttttttgtagcttgcgctatagccacatgagacaactcactgccccctaaacactgtgtactttcacacctccttgcttatttatttctctccctagaatgcacgtcccagcctcctctgcctgaccatcacccacttcaccttctaggcccagctccagtatcaccttcctgagattctgacctctgttcctcagattaaatcaattgcaactccatctgtatttcatactgccttgaagagatgcctgtgtgttcactcatcgatgttctctgttacagtactcattgaggactgggattgtattatgctactttctctgttaagtgctgcacatagcacatgagaagtatccaataagtacttgttaccttgagtaactaatatttcaatagtgttatagcgtatgaagcacattcttatctgtcttaatccttaaaataaccctgaagtaagtaaaggtgttttatccccttaattttaacagctagggaaaatgagaattagaggagtgaagtgactttgccaaaacgatacagctagtgagggatggagctaaggatcaatcaatcatgaatcttctgatcaaaattacttgttcttcctgctaactatgcccccagctgattctttttttttttttagacaatactgatattaattaaacgtaaggtaaactccaggcat

SEQ ID NO: 53052 - DNA, 1037 bp, Homo sapiens
gaccataacatctcagaacctcagcttccttggtttctttgatggaatggtggtaataagtaaacttcacaaggtaattgtttggattaaataaatagaatgagatgatggctgattataaagcatagtagttaatggcaaagactaaaatcagatgaaactgaggccggtttttccacttggtgaccttgggcaatttacttaacctctttgtgccttatttcctcatgtgtaaaatagaaataataatactacttaccttagagatgtgagagatagataacatattaaacatttagtaccatgtttgatattaaccacactttctcccaaagtgagatctgtttttccatagttccaattttaaagttaattggaatttcccacaaagaaaattattctgaaattcgctattagaaatatttggtgtaagagaagggttaaattggaaatacaccccaggaaacactgggtgcctagcatttagtttcctttgcagcactctagaaggcttttctgactctggctggactcatctacccatcattcgccatgctattacattttggctcatagtaactcctaagatgtctcaggataattaagactccccatcttcttgtccaaactttctaggacgttgttgcatgttggttagagtgtgtaatagatctggcatcaatttaaaaaacacacacgtttctggtaaagtattatcatttcacatgtattttattccaatctgaaacttcctgaattttattatttaattgttgcttccacttttaaattctttaatttgtgtttacctagaaccagagatttttatgtggatagtataataattcaatatcaaataaaaatctgtctgtttcactctcattcacaggtccgcaagcacatcaatgatctttatgaagatctgcgggatggccataacctgatctctctgttggaggtcctctcaggcatcaaactggtgagcttctcctaatgaatggcctcacaattgtggccctacaaatgacatattggtc

SEQ ID NO: 53053 - DNA, 2508 bp, Homo sapiens
gatattcagctccttctaggattggggcttggcttccctgggtcctttgttttggtttcgtatctttttttttgccttgcaatagaattaattatatattttttaatggcctaaaattgacagaagcttttattagcatagccggcacatttaatttctagttcttgctctctggctcgtgtttataagtctaataagtaatcagaattttactttcattgtgctggactttattcttcaccactcacacagttacattttgggcaatgtgtctggtacatttaatgaatttgtaatgattttatattgaaaagtgatcttttttggttgtattgcttacgtaataagttgaaactatgtcaatctaatttcttttcctaacctttgaaaacctttaagtgtttgtggagatactgataggatatcatctcttcaccaaaaaccatccagatatctctttgacagttattctcaccatgttttttccccatagttgacttagaaaagcagagagggtaggaggctaaggagaattgaagatgtgtttcatcataagaagtgttcaatgtaaccatctgctctggttttgatttagttttgtatctttttcggaggtgggagggtattttcatatttgtttttccttttttttaagtgttgcattcatttcctttccatctttttattgtgaatttcttgttcctctattgtgtctttgccttggttggtggccaaaggagccagcagggctgaagaccctccgtctggtgagcatgccctcctggtgccatacaaacaacgaggagcaggcggaggaagatgatgatgatgtagtaggtcctcctggggatgccagcatcccagctggcactgctggcactgcagggccatcagagtctgaggttctccaggtctcgaagtagttcagttactatttgccaccttctcatttcaactgggaatttgggtcccaaagaaagtagttaaaactaattgtgccttttgtcactgttaggtgctcatggactgggaattgtttttcttagctgagaagggttggcacaaaaagaataatggtttttggaggtgtcaagttctcttctgacctggagacccatagctttctggtggccttgctgtgttttctgagtccagattgcagaattgtggaaaatttagttgacagcatgacaattaattgctcacaactccacagtctagactaactggtactctccacctctctggcctctaggttatcatcatacaccccgtcatttgttttcaaaacagcctgtttgcaaactcactgcatggagatactctggctttgctcaataatatctagttgctatagaggacagagatttaacttgcatgttcttagggtatttatttttggtgaggggtacatatgagtaaagattagagtataagaggagtgtattctgcctgcaggccctaaattatagtccaaaatctttttccagaaacaaggattaggcaatatcctcattctctgtcctcttaaaatcattttaaaaatatcatttgtctcccttctcattgccttagaatcttccattttataggcactatcatcttctaagccatattcacaattaatttagctgaaatgactgagaaaaggttcttgctaaaaagatttttcctaaacctttgactgaagaagttatcctgtgcccagagaggccttgacatctctgtgaacagattctcctatttgagaagtgttgcttagaagtgttggagagtgcccagaagatgcttccatccttatctctccatgtgttagggtactttttgcccattttaatttggagcaatgttgttctctgcagacacccgcaacagagctaccttatattttatcagcctttaattagtgtcaatttgacacttacaaaagaagtgggtataatctagtgagagtgatatttctctccaaattttagtaaaatataagcaacgttagaaagtaagcagaagaaaatgttctaggggtagatatccctttctgtgatactcagtaggcaaagagactgcattcactttccaactggtaatagttgagccttggacggggtaccagaggcactgggtagagatggggttctctccagtgggttgtatgacatctgggattgagtgactggcataactttctcaggagtaattatgttgacagccctacactatcaaagttttgtttgctgtgggtatttcatgctggagtaaagggtgcccttccttcagtggcagctatgttcctgggaaactggttgcttcctaatttttgcctcccattttggattttttcacttgtttcttgagcatatgtaacttctcatttcctatggttaaaaatcagctatctgtattttttttttttttttttttttgaggtggagtctcactccatctcccaggctggtgtacggtggcatgatcttggctcactgcaacttccacctcctagatttaagc

SEQ ID NO: 53054 - DNA, 1311 bp, Homo sapiens
ttagcagagacggggtttcaccgtgttagccaggatggtctcgatctcctgacctcgtgatccgcctgtctcagcctcccaaagtgctgggattacaggcgtgagccatcgcgtctggccggcagtttcaaaatcttgcatgctgcatgatcccatttatccaacactctggaaaaagcaaaacaaggaatcaggatcagatcagtggttgtcaggaattaggggtgagagtagggtttgattacaaggagggggccagcacaagggacctttttggggtgatgaaactgttttgtggtggtagttgcatgaatctatacatgtgttaaaactcatagaactgtacaccaaaaaagaaatcagtttaactgtaaatcaataatgaagtgatgcaaaaatttaatcaaaacaaaaagtcctagagctctgagccgtgcttttatttctttttcaggtgaaactagtgaatattcgcaatgatgacatcacagatggcaaccccaagttgaccctgggtctgatctggaccattattttgcatttccaggtagggcatgtgaagtttggaattcctgttgctttgtttggacatggcctagaaagttgcactgccttccacagacagcattgagccttccttctctctatttgtcagtgaacaaaggtggatgggagttggaaaggaaaattaagattgatctgcagacaagctgttgtatcgtaaacgcaaaacttcctaattatttgcttaattaaatggagggatttttttacccatttgtggtttggccctgtcctcagcagtctggttattagaggtctgtttgctcagctgaatcaaaatgaggctcttgaaggactcagaatatgagggttgagaaaagctgttggtgttgatgctttagaatggtggagtgaaggttcatagtcctgctctaatgtagactttttctcatctctaataacctttaaacaagcctcgttaattagaatactttagtatctgggtttgtatatgtgctggcaagcacaaccttgcagcggccatcacacccaagagcatcttgaagaatattcacatggtcacatggccttcctcttcctaagaaggcaaatcctttttagatctgaattgctattggaaaagtacagccctatttttataaaaaggctgttcttttacatcccttttaggtcagccaaacaaagctatttctcagacagctctctctgatacacagttgctgcacatgaggctgatggattagaggctgatagctagtgggaatagaaggcagggtgccgacttca

SEQ ID NO: 53055 - DNA, 1248 bp, Homo sapiens
gctggagtgcagtggcgcgatttcagctcactgcaagctccacctcccaggttcatgccattcttctgcctcagcctcccgagtagctggggctacaggcgcccgccaccacacccggctaattttttgtatttttagtagagatggggtttcaccgtgttagccaggatggtcttgatcttctgacctcatgatccgcccacctcagcctcccaaagtactgggattacaggcatgagccactgtgcccagcatgatttgttcattttaactaatttaatgtaagtggtgacccctgcagctgtgtaacacatctattatttgtaacgtattatttaattgtatgaataaaacattcattgctacagtgaacatctgtgtatatgcatccttgtgcctatagcaaagagggttttgggattgatacctggactggaattgctgggttatatactttccttcagtttgcctatattttgccaaattgctctcaaaggtactgtatgacttacagtattgtattgggtaacatttactactatttgacatattacatgtttacttgtttatttgctgcctggatgcctgcattagtatgtaagcttaacaatggcagggatttttgtctcttgttcttttctttgcctggcatagaataggcagtcagtaaatatttattaaatgaatggattgtttcatgaatttgatcttctcaaagctttggagtaggtagaccaaataaataggctgtaatgtctgttttcttatgcccatttctcagataaggaaactgaaacacagagaccgactgacttttttgggttacacacccagataggatttcttttttttttttttttttttttgagacggagtctcgctctgtcgcccaggccggactgcggactgcagtggcacaatctcggctcactgcaagctccgcttcccgggttcacgccattctcctgcctcagcctccccagtagctgggactacaggcgcccgccaccgcgcccggctaattttttgtattttttagtagagacggggtttcaccttgttagccaggatggtctcgatctcctgacctcatgatccacccgcctcggcctcccaaagtgctgggattacaggcgtgagccaccgcgcccggccaggatttcttgtcttttggctttgtccaagcttgttttaaggtataggttaagatttatagttcttctaaaagatactataaactctttatag

SEQ ID NO: 53056 - DNA, 1179 bp, Homo sapiens
gcattttgaaattttcaaaaaatgggaggtcttagctggctagacttgaggtttacagttttgtgcactttatggcacttggtgcttggcatatagatgaggcaccatttgtgtttttggaatgaatgaatgaatgagttcttttgctttggagtctttcactctggctgtctctgtgggagacctgtgggcagtaaacagttatctacaaaaagccaaaggagaaggcataaagaatgtataggcctcaaagtgtgctttcccagaaggcagcaagtcttgtgttaagagaccaggttagatgagaaaaggtcttggggaaaggtctcgtaatcagaattaacttagttgaaaatacatctgatatacctactgaaaactatagtttagcctatcttaaatgtattccgaacacttatattagctaaccgttgagcatttggccaaaatcatgtaacacaaagcctgtttgatagtaaagtgttgactagctcatgtaatttattgagtgctgtactgaaagtgaaaaacggaatggttgtgtgagtacttgaagtacagtttctactgaatgcatatggatttctcaccactggaaagtcgaaaaataagctggaccattttaagtcagggaccatctatatcttaggatccccccgggggctggggatgtctcataacttttagttccagtaataaatgggaagaaaagaaatttactgtaggtcaagtactgagccaagtactttatggacattatctcattaaccttgtctacaatcccagtaagtaggtggtagtatgcacattttacaagtaaggaaactgaaccatctaataaactagttaggttacttaacttatgagctgggaagttgaacctaggtccaccttactgaaatctctgctccttccctagaccagtttttctctggagcagaaggaaatgaaggtctgattggtctgacatatgcagaaattttaaaaaaagaataggctcacagaagtaaattctcagagaaactctacagcagtagtagtcatattaagcagctatttctcttgcctctaagtttattagtttcaggattttggtttgcttgtatgtcattcataaaattcaagtgcatcttaaagttcccatagttccaggtttcttcactggaggagtgaaggcct

SEQ ID NO: 53057 - DNA, 3020 bp, Homo sapiens
cttcaccaggcttggttcttcttggcccgggcccttcccttcccttgctggttagtaccagccgagctggtttgctttttccctttttggtactattctcctcctccttcctccacgttaccttctgccacggcctctcttctttttccctccattttcaatttacacttacattttccctcctcctcctggccctccctagtttttcccctcccctggtttctagctcctttttgctttctgtttgtgttactgagggcagtgctccaattacctcatatttggagagaggaagctgcagccaatccggtttctgtctgcttttaggtcaagtgatttctgaactgcagtgagatgctttgaatttgtcttgttgcagctctgagcctgtaagatggctgtctgaatcggcagcggctggaagagacagagagaggcggggagggagggagaaagaattggagggattgccggcatagtgcatgtttttaaatgtgcatcgaatccgatgaggccaaggttgggatttctgtgggatcccaggactggcttagctgcgtttttgctgagattaggagaggaaggaaatgggaaattcactgggctgttttaaggagccgaaagagtcaatagctattcctgagaaggctcccatatctcctaagaaaagggttcggttcaaaaggaggtggagagggaagaaaatccctactccagaggcatctcaccaggaagaaacctcagaaggaactggagtcattgaagagactgaaaccctaacgaagttaacagagagtctccaaaaggaagacggagtgggaggggtagagcatacccccccagatattttgctgcctggggactcagcccccaactcacgggtagtcgatcgggggatgatagtacaggtaaaggagagattccaaggggaggtccagaccgcccaccttttgttagagaatgagtcatcagttgctggaggggtctgggattccctggaagaggggatgactgtcattgctcacctgcttgataacccagcagaaaggaactgcgagaagtcagtgagccaactggtggaatttcctaggacagcatcctgcagcagcagggctgtgttgctgcctttgcaaggagagactgcagtggagaaaggaaatattcagcgtgggtttcggagctgtgctttgcctaggacagactaccccactgataaaggaaatcaagaacaattttcagagggctggagtgtggaggaaggaaccaagagtgtttcaggtgcccctcagacagcttcctggattatagaatgttctgtttcttcattactactggaccagcctggaggccaaagacgcacggagccttcccatgtgggtcaagtgcccccccaggattccagactgcctacttctcagagtgatttgtccatcagtggtgtgactgtgagcattttgccctcctcctctggctatggcagtgatgggccacacatacatgggatccagcctaaagatacagaacctgaaaagagctctacttccttctcagaagaggatggcactctttctctggaggcaagccacaccccatcatggggtctggaagaggtaggtgggcatgttcaagagataatcaaactgctgtttggattcttggccctcaaacatattaaagctgagtgtggtgagcagtgaggatgttggtgcctctcaaacttacccccatgtgggttagtatctgctggagctcagcaagcagaatctatttcaggtctgccccttgatgcttgaaaccaagacttgtctctggggaatccctgattctgagtagccaagtggcgtaattgctcaagctatctggtgggatgatctctcaaggtgcaatgctagatagtacttactctcaggcaggtctgtttaccagcttccctgctacgagaagttgtaatgtagcacaagagacgatggggaagggcctaactgaatctctggaatgaatctctggaataaatgtggaaggggtcaggcagctgttgtcagtgtacttgctcttcctcacaggagagtgatattcttactagagctgatgcaatcccatccctgttgggaaatttctgacggcagcactcattcagtatttgtataggtggagagggctcatccttctttggttcctaattccaggattagaggagagggacagagttatctggggattagttgagagagagagagggaggttagggcaatttgaaggtttaaggctagaaaagtttgttttgtgactggatgtatttagggctttaacatgattttgttttgaggaatatattgaggcatggatggtgctgctggtggtggtggtaatggcagtttctgtgaatgttttaaaggtcaaggagcaagtgagaattcagagatgtgaacactgagataaggactcagcaagaccatgggtagcacagcatctggcatgtaggtgtgtgattgtgtgggtgattgaagttataattcaccaatggctaaagaacttttactgggatgttggcctctgcagcagaagaaataaaaacattaggacttcaaagtgcaaaatttataaaatgaggtagggcactttccttgcctagatgggggccactgatactgtacaggggccctgatgtttgcagagcagggatatggtctacctactggtgccctgcctatcactagcagcataaggctgaggatagatacaaattctgagcaatctgtgcctagaatttcctctttggggatacattttccccacagacagccccatcttagtgccctctgttattagagtttggagactcccaacaggttgaagaaaaagtggccattgaaaaaatatctattttatggatgggcaagaggtttcttgggcctcatataaacatggatatgtgtggtggggagtgtgatagttgtgttatggtaggaaggaaggcagtgaaactactgggatatggggcgcatgaatgtattaagcta

SEQ ID NO: 53058 - DNA, 1104 bp, Homo sapiens
ccaccaggtcccacttccagtattagggattacaattcaacatgagatttggtagggacacagattgaaaccatatcaacaagtatttgggtttcatcagataaaaaagaatgtcaaagtcaacttttatcttgtaaaagttggaacagatagagtagttgggggtaaaaccagctgtggaactgattgttgtacaactggcattaaaattgaaattgtgtagtcatcataacattataggacacatgcttgtaactgagtgtgagattttcagaaatttggcatataaagttttaggaactcctagtaaaatcaatcctagataatagaccatagatagcaatggcacctttgtatgggctggatctccacactggcaagggaatgttctgcatgagtctgtgaggagtcttaaagaaaagattgttaggagaaacctttggaccatgatctgtagtgtgaccatattggcaacagtatgattcctttgctgttcagtatgattcaaattggtgtgtggcattttctgggtagccaacctctgcatctattccttctaccttttcactgcagacacagtcatactacttatgtatagccaaggctgaaaaactaagtgaccgagtctcagctcagacacctggcatatttccaggttttgtgtccatcatgtgatacagggaccacagactcaccatcctatatgacagataagaagtaacttatcaagataagtgtgacattccttcagaatgaaagtccttaaggccaagaggctgcaactctcactggtccctgaaggaactgtcttcagggagctgctcccctccctaacaggctgttcacaggcttgaggacagtagcagccagagaaacagagagggcaacgcatactgaaaccgataggcagggcaagagcatctctgctaaagtgggaaagctgggagggcaagggtcagaagagcagctgctgctgttcacacaccaactcctgtctaaacaggagacagctggcagtccaattgagttgttttttgcttgcttttttggtggtggttttgtttttaatatgtcagagtagtaactatcctcagaaaataattt

SEQ ID NO: 53059 - DNA, 1060 bp, Homo sapiens
catttcttgttattaggcttccagggagcttatagtcagttcatgaaaaagggtgaataaatctatgtcaccatctgctagttcaatcactatcatttttttgtagagatcaactgacataattgattaaacaaaaaagaggaatgaaaaatctaagaaagttttagttattgttcctgggaatataatctcctaatttgaagtgttgaaagtaattgtatacaagccttaacattaaaatttttttttgaatcactcacattgcatatgaaacatacacatacattatggggatcacaaataaacacagcagaatgaatgaaaaaaaaaaaaaaccctaatccagtgttatgtaactggactcttgtggtttgaaatgaaatacccagagacaatgtagattcagaaaagtgctgttattaactttaaaatcttagaaaagtagacagtattttctagaaaattcactaaaaagatagctttattgaaggaaaaaacattgatgttaaagatgcatgtgaagtttgaataatacagttttttgaaattacaaaggcagaaaatacattaatactaaatgcttaaatatactgcttaattttaaatatgtgtatatgtgtaaataaatttctaaaagtttgggtattcaggaggactacagagcttcccttcctgtattcctgttttaccttcatacatctgttgttatctgggaaaatatttgggataatcatatgttagttatggcatgtctcaactaagttcttgcaggccaagcatgtcttctttttttgttttccacctttttacctggccaacttctacttattaaaactcagcacagatgttgttgttgctgagcaatcctctggcattgctagtttggattacttgcttacctctgtcacaacattgatctctttgtatagtaaattgtctccctgattaaattgcttgaacttgaggcctgaggctgtgtttttttattttgagatatcaagaatttaagcacagctcctagaatataatggttgctcaaaaaatattaacagtataagta

SEQ ID NO: 53060 - DNA, 1033 bp, Homo sapiens
gggatccaaacatctatctcattacaactatgtttaaaatctgaagtaaagctgttcattgaagtagttttagtgcaatatacagaaatactaagaaatgagagatgttattagaaagattatggctgtaatgaacatacaatatcaattaactaactggaatttcatttttgggtgaagaacccaaatactcagattttgttttgcttattcaagttctgtcttgttttacatcaacaaatctatttcctgttcccaataatgttttactttaatatgtacgtgaagcagctacagtgaaggcagtgggatatatcaatgttgcatttagccagtgaaataggtagctagaaatgttaaggggaactgaaatagaattggtactaggaagaagctgtttataggaagagccgtgatccattattgtgtccttggctctgcagctccatagcttctctccccactaccgcccctcccccagccccaggtagatctggagttgattaatagttttagtaaactgactcacactgatcacatttgcttgagattggtctatgtgaatttattaatttacaaaataaattttaactgccaagtgattcaagaatttgaattggccacttactgcttttgttgctttagaatatctatatgggaagcaaataataatctgaaggttgtcaggtgaacatgcagtcagagcagagaggtggtgagtagaggaatgatttgtaggatgggcttattagctggcatcatcaaagtagaatagtctgatttcttctgtagaaatgtacctgtcaagggcataagatcctatgtcccttgaatctgctgggtagggtacagtttcaccttcacaggcatggaggcagtacttcctggcttcccttttctgtactcaatgcaagcttcccatactcttctattctcacggtctttcttcagacatcttagtaatatttagtagcctgcagctttcttttattctaaatatagtgttaaagttcctggcccttttttttttcca

SEQ ID NO: 53061 - DNA, 2278 bp, Homo sapiens
ttcttaagcacttatggtatactcatggtatcaaactatatatccagtatctttatcatacatggacattatccttggccctggaaatgagtctagatattgctaattttgtaacaattagcatagactatttggtgctaaatgccagcaaagaatgtctctttcatccccagctgtaattcaagatgaggaagtgttttatcagtcacttatgtatcagcttgattaggtagatcatggctcttttcagaatatttttagtagcttggtttgtagcctttcttagtgtcaggaaattgaaccccatcctgagagcccttgaggagctttgaagctagtactgtgagcattaaactgagcagcatctaggcaattaaaggaaatggattttatatagtttggagtggcctgagctactttctcttgtgcttgttttggatattgctaatcaggtgtgtgatgtttaccttctggcaataggaagtggactccaggtggcaagaataccaaagccgagtggactccctcattccctggatcaaacagcatacaatactgatgtcagataaaacttttccccaaaaccctgttgaactaaaggtaaagtcaaggacttaaatttttttggtaaaatctttctagggagtaagtctccaagcttatcactgctggcttctaggtgaggtggtatgaaaaattgggtcctatagtttgtgtccatttattcaccaaatattaattttataggcactttataaccaatatatacacttcaaagaaacagaaattctggccaaggagagagaaaaaggaagaattgaggaattatataaattactagaggtaagtgagcttatcctttgctgagacttggggtttgctggtctgtactgttgttgcttcttgattatagattccttgtattcttttcccaaactgcattaatagaagtactctcctggtgacaaataatagcaccactctcaggctggtcttaaaatgttgtggtaaaggggcaatgtcagccatctctgttttttaaagggcttattgaaaaatgacatgtatttattcagaaatcttgagttttgtggacaaatttttctgcttctcagagggaagctaaatctttccctagggtggaaagaagagagacttctattcagaatttgattcccagagaatttgaagttgtagaaatgagaatttaaccttgccagaataaaagttattgaggggaaaggaggatttatagaaagtgtaaaaggaatggaatgacttagagtaggtagtccctacattctagaggtgacttttctgctctttaactcaagggtgaagaacctgatacatatttgattgtttttccatgttagacaataggaaaaactgctgaatggctgggtaaagaagcaagaagtgatgtgcaaataataaatcaaaactgggacaagagggcatggctgtgtttttggactgaaagagtatctgtttcaggtgtggattgaatttggccgaattaaactgcctcaaggttatcaccctaatgatgtggaagaagagtggggaaagctcatcatagagatgctggaacgagagaaatcacttcggccggctgtggagaggtgggtccagatcctgagagtggtctgacattatttattgagctgctgtgaaccttgcacatgactatggttttatcttatttcaggctggaattgctgctacagattgcaaacaaaatccagaatggtgctttgaactgtgaagaaaaactgacactagctaagaatacactgcaggctgtaagtctctgactgttttgtccaacatctgtgtcacatgtttcctgcttctcaccctctgctctaattgttgaagttagcaatcgaggaatccagatgtattatttccctttttttttttttttggaattgcagtagacttcttggctccctctgtcctagtgagtggggcaatggaagttttcccactgttattctctcttcctgtctcaggatgctgctcacctggaatcaggacaaccggtacaatgtgagtcagatgtcattatgtacattcaggagtgtgaaggtctcatcaggcagctgcaggtggatctccagatcctgcgggatgagaattactaccagctagaagagctggcttttaggtgaggaacaagggactcaaatggagggcttgcttgcttactgctgaggctcatggatcaagagtagagcaagagtcaggcacttaatcttttaacctggacatt

SEQ ID NO: 53062 - DNA, 1137 bp, Homo sapiens
tgttcataatatcaccttgtattcatataacactttctaaacacttttccttctatgatctcatttttatttttatttttatttttatttttttgagacaaggtcttgctctgtcacccaggctgggacgcagtggtgtgatctcggctcactgcaacctccgcctcctgagttcaagcaattctcctacctcagcctcctgagtagctgggactacaggcatgtgccaccacacccggctaatttttgtatttttagtagagacggggtttcaccatgttgtctaggctggctcatttttatttttatcatatctttgtcaaatggataaggaagattttatttttaaaaactatactatagatttaaatcctttccttttttctcttcttccatttcagggtcatgcgtcttcaggatgagctggtcaccttgcgtctagagtgtacaaacctgtaccggaagggtcatttcacttcacttgaattggttccaccctctactttaaccaccactcatctgaaagcagaacccttaaccaaggcaacccattcttcttctacctcctggttccgaaagcctatgactcgggctgaacttgtggccatcagctcctctgaagatgaaggcaatctccgatttgtgtatgaactactgtcttgggtagaagagatgcaggtgggtgcatatccaaaagcttatgcagtacactgatgtttactggatctggaagcttatctaagaggaccaaattgctttgtgttccctgtgcagattcccttaattattattattcttttatttgagtgatggggtcttgctatgttgcccaggctggactggaactcctgggctgaagtgatcctcctgcctcagtctcttgagtagctgggacaataggtatatgccaccatacctggcttgactttcttaattattgatgctgcctgagacccaagcccccttctccttaaatcttgcatggatgaggttggcacaaattctcacagtcccgtactgaatagcatacagttttctcatttgaaaccctttggaatcttttccctcagctaactgtactctgagtgagagcttggtgaaaattgcaatgtctttacatctgttaccttttttttt

SEQ ID NO: 53063 - DNA, 1048 bp, Homo sapiens
gtcaaggaggccaggttgtatgaggtgcgtagccttcagaatccacattacaggagggacgtggttggaacggatgaaaggacagtacacacaataaagctgtattgaaggaggagggtgctctggaaaagaataatgatgatgaagagcggtttatgacaaattcccttttcacatgaagtgtatctgttaatctttgaaataaacttgtgagaaaagtatttttattaacccctttttactaaaatgaaaagtgatactggaagctgaggtcagaattagtaagtagtggatgcagcatccaaactcaggccctctgcctctataaattcaggcactttttacttccccatctgcctgcagttgagcgctggtttagagaaactattcacacagtttcctctctccttcagtcactgttctatcttcccagtttatatttcaactcttcccttcaaaaaagcagttgagtgggaatcaggcattggttttgcttagaagcctaccagaattgctggaaacacaggatagtgaggtctgttgtttgtaattaccctgctcaactgttgctcacttagtgctgctccaagttataaaatatgactcagaaatttgttgtctaagcttctgttttcttagagcaaccaatccatatctctatctagacataatatttgcatagttgcaaccataacacgtagtttacttactctttctctaatgtatttttatttcattcttttttaatcagggaaagatgtcccagaatttccataccagctatgctgaaactcttggaaagctggagacacagtattgtaaattgaaggtgagtttctgccgattctcttacattctgctcatagagtctggttccccccaatcaactctcttccgtaattcagaaatctcctggtttggccctgttttggttttctgcttattaggttatatcatttactatgcacttattcatatctattataacattttcccaattttctaaatgggtcagaaactactgttcttgaacgttttaaataaatag

SEQ ID NO: 53064 - DNA, 1069 bp, Homo sapiens
attcttctactaactagctctataaccttgggaagtcatttaatctctctggacctccataaaatgagataatagcaccacttcaaagctaccccctcccctaatagcacgtattccccaacggttgcataaaagattaagatttaataagctaatctagacaaagcatttagtctagtattgttcaactgggatatactctggactttccacaaatttctgaattctccttaattcatttattaacttttttgtttcaatctcttcgtttgtaaaaatgggaagggaaatttaacattggacaataggacactgctttttattcttttcaatgaaagatgtagacaagttaggattagtttttgctacttttagtattttcacactcagaagatttttaaagattttgtaaactatgcaaatagggagtttcttgtttttgtttttaacatgcactttagacagtttaattctattgatttagggttcttaaaaaatataggcttcttctgattggagaatggcatatgattctactgaattaaagaaggaagattggatactataatacaataaacaggctgtgtgagaactgaaattaggctataacagagatataaagaaagtgctctgaaagcatagtaaggatcagtatccagcttcacagaagagctatttaaattgagtcctgcagttaatagaatttagagtcagtggaggacattgtaggctgaatagtctaagcaaagccaaccagtcattgatacccatgtcctggtgtgtcatgtactggtgtgggtactgacgtgcaggaactgtccactccagccaagttatctcttgtctctggtccaatgcttattctgtgttcccccattttactcacatctgggtcaggtcccatgtcctttgtgaatcattttccaataattccagtgtttgtgcccttctctgcaatcctctggcatgcactgtttatacatctcattttgccaccaattctatattgtaggttcctttaaaatagggaacacagcttttatttatgctatccgctccccactgccaa

SEQ ID NO: 53065 - DNA, 1023 bp, Homo sapiens
acaatagaaggggcattggctcacagctttcagaggaaaagtgacttggaccatatttcttcaaataactatccagacagatcctgacttgactcttgttggtgtggtgcctttgccaaaagaagagaaacagtggaagaattccagaggaatttatttatgcctgggttttgctgcctagatcatttacttacaactgagtgtggaagagaccttttctatgtaaccccctctaacaaaaccattttggattaaaggaacacctcttactcgtgggaagcattgagcagatgccagtcaagtatctccacatcttttctgttggcttctctatcattagcagagttgtacttggaaaatagtattgcgcatatatattgagtctgttaaactcaagcccttctgtctgtgtgcttgtttattgcaggcttacagtgctgctgtccagtcccagttgcagtggatgaagcagctgtgcctgtgtgttgagcagcatgtgaaagagaatactgcttattttcaggtgtgatggatttctgtgtttgtgtgtgtgtgtacatatgtatgttaaaggtgaggttacaaacacatctgcgttagtgtgcttttgttgtataaaccaccaccttaaaatttagttgcttaaaacaatagtcatttagatagctcatgattcagtaggtgagcagtttgggcagggctcagctaagtggttcatcttatcttgcctgtcttactcatggctgcagacaggctgggggctggttggtcccaaatggcattgctcatgtctgagagttggctaggtgctgaagcaccaacccatgtgtctctagcatccagcagctttcttcacaaagtggctgtgtttcataagcagcaagagagagcgagtcctagagcacaagtcctttttttctgcttgtgtcacatttattaatgtgcctttggttaaagccagacatgtggctgtgcctggcttcaaggtgaggagaaatagactccacctcttgatgggagtag

SEQ ID NO: 53066 - DNA, 1056 bp, Homo sapiens
ttgtattcccatagttcttcagtgatgcacgagagctggagtcattcttgaggaacctccaagattccattaaacgaaaatattcctgtgaccacaacaccagcttatcccgccttgaagacctgctccaggactccatggtgggtgttgcctcagtggggatgattacttctgagaaagagagtaaaccatatcagctgctgctgtttatatccttgaaagctccagggcaatgggccattgttgtaataaagtttggcttacattcaaatagagtttaatcgatgttgttctgtctctttcctttttttccttttcttttcttaaataagttgctaataagatttctttgggtatgttattgaagtaaaggcctagtcttctcctctgagccactttgagctcattgtactttctttgcatttttcttattttaatgtaatagttggagccaaggatgaggtgttgagcatgaagaaaaggttgaaggggattagttgatatcaaattcttttttactctcttatgcaaaaaaaaaaccaacaacaacaacaaagaaatacacctgagtcaaaattttcctccttggtagttttcttttggatgataattaaaattgattttaattcaaagaaacattaaaatcttatttagatgtaatatttgtgcagttatttatgaagcaatattaatttttaagaaatagttttacatttagtatttagttcaaatcaattttatattctttttctccaatgaattatttcttcaggagtgctggtaattaaattagcagaaagactacttatatttagtgaatgtatattacacagagttggcaagacaaggctcaagctacatctcaaattaaaatagaaatgtatatgcaatagggaacttacttttcctttgtgagaagtaaggggaatctcgcatttcaatagaaaagtctgaataagagaactagaataacccaaaacagttcattttttttgtcggtaaaatttgagcatttgtgaatttaagtttttttatttttatttttttacactttca

SEQ ID NO: 53067 - DNA, 3376 bp, Homo sapiens
ctctgagggagtggagtattcagttttctttgttgacttagtcaccctgagtagcagcattaatgtcattttgtttttcttatcattttgtaggatgaaaaggagcagcttatacagtccaagagttccgttgccagtctcgttgggagatcaaaaaccatcgttcagctaaaaccacgcagtccagaccatgtgttaaagaacaccatttctgtcaaggctgtctgtgactacaggcagatcgaggtgaggaggtagaaagggtacctctgggccacagggggaaggaagaaagaagggaagccttcagttagggttatgatgataaaagatcaaattacagcgtttttaaaattagaatttaaacatgctgaagtctctcctatcatttaaaaaaaaaaactaaactaaaaacttcaacactataatcttgacctgctccctgcctcagtgattggcatcattatctactcagttgcctaagtgttgacagagatggtactttgtagcacttgggagatatccttgactcccccacccctcttatcctccacagctaataggaccatcaagtttgtactaatttgtaaatatcccttaaacgtactttttctatccctgctaatattaccctaagagcataagtggctgggtggagaggctcatgcctgtaatcccagcactttaggaggctgaggcacatggatcacttgagctcaggagttcaagaccagcttgcgtctctgcaaaatatacaaaaattagccaggtacagtgacttgcagctatagtctactcgggaggctgagacaggagaatcgcttgagccgaggaagtggaggttgcagtgagccaagatcgcactgtttgcactctagcctgagtgaaactctgtctcaaaaaaaataaaaggcataagtttctttcacttggattattgtgtcagcctccccatttagtgcacaaaggatcctaccaccagcatgttctttttttaattttaattttatttatttatttatttatttgagatgaagtctcgccctgtcgcccaggctggagtgcagtggcacgatctcagctcactgcaagctccgcctcccgggttcatgccattctcctgcctcagcctcccaagtagcggggactacatgtgcccgccaccatgcccgcctaagtttttgtatttttagtagagatggggtttcactgtgttagccaggatggtctcgatctcctgacctcttgatccacccaccttggcctcccaaagtgctgggattacaggcgtgagccaccgcgcccagcctattttattttattttttgagacggagtctcgctctgtggcccaggctggaatgcagtggcgccatctcagctcactgcaacctctgccccctgggttcaagtgattatcctgcctcagcctcccaagtagcagggactacaggtgtatgccatcacgcccagctaattttttgtatttttagtagagacggggtttcactgtgttagccaggatgttctcgatctcctgacctcatgatctgcctgcctcagactcccaaagtgctgggattacaggcataagccactgcgcccagcgtttgtttgttttttttttcctttaaataacaatcctatgcttaaatcttataataattactcattgctcttgggaaaaagccgaaactccttaatgtggctttaagttcttgagtaatctgtctttacctctctagccaagactgggtcatatcctttattgcctggtaaattgcatttgtcacacagtattataactacatacaccaccagaatatgtggaaatacagactatgcttgtctgcttaccactgtacctatttatttatttatttatttatttatgttttgtgacagggtctgactctgtggcccaggctggagtgcagtggcactatcatggcttactgcagccttgacctccctgggctcaggtgaccctcccacctcagcctcccgagtggctgggactacaggcatgcactactatacccggctaatttttgttattttttgtagagatgaggttttactatgttgcctaggctggtcttgaactcctgggctcaagcagcctgcctaccttagccttcagaagtgctgggattataggtgtgagctgctgtgcctggccaattgtactgtttttatctccagtgtcctagcacatagtagacactcaagaaatatgtattatacaaaagaatgaatgaattaagaaatggaaaaaaaatttaaaaatgggactgtgcttttgtgtgtctcgatatttctgcctgtaagttagggataatagtcttgatcacttgcctctaagagaaagacttgataattccaaaatgcttaaacattttcaggggtttgggtgggatgataggaagtagggagaggaaatatcataaaaacaatgttttgattattcaccttccattagtttttactctagtagatttttgtgctgagatcgctcttgagcctttatagtcttattataactttcatagtctgggttacttgacatgtaacaggtatttaatacatacttatttccttgatttatttggtgtcacagtttttcctgtgttgtagatttatacccattatcttttggcaaaaatcagaagccctcactaagtgatagcagatcttttcttaagcagatttttttcttaaggatttgatagctttgggatgaggcaccaggaaataatgggttgttggtttatccattagcaatcactggtaaatttatctcttcagattactatttgcaaaaatgatgaatgtgtgctagaagataattctcagcggaccaaatggaaagtgatcagccccacagggaacgaggcaatggtgccgtcagtctgcttcctcatccccccacccaataaggatgccattgagatggccagcaggtaacttggctcagctgccactggtacacccacctctgctgttggcctcggtgaaccagtggagggatgagtgtgcatttgtgatgtttttgaacacagtggtaaagttcctcctgggagaggcttctcattggagatatcaagtctcctactaccagccacatagtagatcttcaataaatacttctgttcagctggagtatcttcagtgatatttcttttttaaagaactcctggttataaatagtttactctcagaagattgatttttttaccagcctggtcaacatggtaaaacctcatctatactaaaaatacaaaaattagctggatgtggtggtgcacgcctgtagtcccagctacttgggaggcttaggcatgagaattgcttgaccaaggaggcggagtttgcag

SEQ ID NO: 53068 - DNA, 1007 bp, Homo sapiens
tttttgtttaagttgctatttttgttttattagtacatgtgttgtttaaagctgagccacatcttactctaggggactattgtgaggcgactgtgccttacctctctgaactcatcctctgctactctccttgcttgtacttagctgcagtcactctggtctttcctctgtttctcacacacagacagcatattcttgcctcagggcctttggacttcctgcttgcctctgatatttacatgtttcactccctcactttgttcagtttatcttagaaccctcatggaccaccatccccactaactgcatgccactctctgtcttctttactcattttatttttcttcagaactcttaatactgcctaacagattgtgtgtttgtttattctctcctattagagatttttgtccattttgtttacctctgtatctttagcacttagaaccattcctagcacatagcaggtattcaataaatggttattgaatgaaagaatgaatgagtaggtgagtgaatatatttatgaataaattattttatttactttctttacttttttttttttttggtttgagacggagtctccctctgtcgcccaggctggagtgcagtggtgcaatctgggctcattgcaacctttgcctcccgagtaagtgggattacaggtgtgtgccaccacgactggctaatttttgtatttttagtagagacggggtttcaccatgttggccaggctggtctcgaactcctgacctcaagtgatccacccacctcggcctctcaaagtgttgggattacaggcgtgagccactgcacctggcccctgttttatttactttcttatataatttttgtttccttggagtgggtaattgttttgttttttagtttgcttagttgtctccaaactctcctacattactgtaaaaggattcccaatatggccaaacaccacaggcaattttcatttttcttttggaaacatttattctggaccattctat

SEQ ID NO: 53069 - DNA, 1637 bp, Homo sapiens
acccaaatggagtaaagtggactcaggaataccattttagagttcgagacctgaggttcttacaagctagaagcagcaatttgaatggtaaaggaaattcctaattagaataagtaacatctttggtcttcttggcaagggtagaaggttgcaggctttttctcactctgtaagacaatcatgtcttttgcataagaatatgtagtaggtgaatacttgtgaacaattattaagagttatgtccagtggggcacaaagggtggttctggggtgctggtaatgttctgcttcttaatctgaatgctgactaaatggaggaattcaaattataaaaatcaacatgtttacgattatggtttatgcactgttttgtatatatgttacttcagtaaaatggaggaaaagaggaagtgttacatttttattctgttgcaatttcttctggctttttctttctagcttcgatcctcagcaccaggggagtgccatcagattatgaagaaccttcaggcccactatgaagactttctgcaggatagtcgtgactctgtgctgttctcagtggctgatcgcttgcgcttggaagaggaggtggaagcttgtaaagcccgcttccagcacctgatgaagtccatggagaatggtgtgtgcactgggaagagggaaagagaatagtagaatgagagcctttcaaggggttgctgtgaaacccttcatataaatgagagagtaacatcaccacttttttccatttgagtagctacgaacttgagatagagaagaacttatagatgaattctcaaaatcagatcatggaagaagtctgttgatatttcagtcattactgctcatcaacctatcacattttcttgtggctgtaacatgtttggactctcaaagattagtatacagtatgtgaaatttaggatcaggtaggattaggcagaagattccctaaataaagccttgctttcattagtaggatatcaggtctgcttatctctgatgtcgagcttactggtcttttgtgtttgttcattcacagaggacaaagaggagactgtggccaagatgtacatttcagagttgaagaacatccggctacgcctggaggagtatgaacagagggtggtcaaacgaattcagtctctagccagctctaggactgacagagatgcctggcaggacaatgcattaaggattgcagagcaagaggtaagccctaagagccatgtggatgctggttgtggagtgaatgctttcagagttcattggatggcaagagtatggcacctaagaaatgaggcaatagactcaagacagtccttctcaggagttcttcttgcagtctataaatgtcttttacccgtggagaagtgtgatttcagctccatgtgtattgctaaatgttgattagtttcctacagagttgagaaggcaaacagactagtaaatttttctaagcagtatatttgggctatgtattttgaaactgcttagtagagatgctactcttttattctatcccttatgtgcctgtgttactttaaatgacttggttaccttcagtcatatgaccaataaatataaggaatgactctgatttgaatgtgggctctgatacatgctctgtctgt

SEQ ID NO: 53070 - DNA, 1501 bp, Homo sapiens
ctaccttttttgttcaattctgtctccctctttatgtgtgtcttgttcctggcagcacacccaggaggatttacagcaattgaggtcagacttggatgcagtttctatgaaatgtgacagctttctccatcagtctccatctagttcaagtgtcccaactctgcgctcagaactgaatctgctggtggagaagatggaccatgtctatggtctctctactgtatatctgaataagtgagtgagctgaggttttgggtccaagagcaatattttccattgggataagaaagagaaaggcttaaagtatttcatgaataatacagagagattatagatcctgaagagcatatactgataatgagaggtcttggcttcagttcctagtaacattaagtaggttcatttggactgcagtgaagaagtgccagtgatatgaaaggggaattaatttgcagtgttgggactatgatttacctcacttctgtttgattaaatatttctgaaaataatacttaatggcataaagacaaaggaagagacactaaagaataaaaagaaaagtttttagttacactaggtattagactttgaaggtcttccctcttcccacccatctctacctatgaccttgaagagtagcgcatcttaaactcttcatagtgtaaaatgggtttctggcttcatgcctttcttccatgagtccaccacatgtatgcatgttccaatgccacttagaactttattttgaattggcttaaattggcagcataaaaaccacatttacttgttttcacaaaaccctgtcaacatctaaaaatggtgacattgattttggttattatgttttatgaacctctctatagcactccaggtatataaccctggctcctaaaattcatgtgttaatgaaggaatgtgtatttgtccccacaggttaaagacagttgatgttatagtacgtagcatacaggatgctgaactcttggtcaaaggttatgagattaagctgagtcaagaagaagtagtactggcagatctctcagctctggaggcccattggtcgacattacgggtgagttgctctgagtttcttaggaggttgacctaacatattcattgctttgggttagcagagaaatgcaattttggatggcatgacactgatttaaatttgcatttgaataaggcagaatgtcattaaatatattttaatatgtattcaaagaagaagggactgagaagtatgtctagctagaaagggaagagaaaggactaggtttttctatttattttttcccttttcaccttaataaaatcatggattaattggatacagtcagtggttgtgccataagtttataaatcacttagctgttatctaatttgattctcacaagccactctgtgaggtggacaagaagagatttttctctccatttacagatgagaaaaccaacacttactctggctaaatgacttattttggtttcatatgttataa

SEQ ID NO: 53071 - DNA, 1136 bp, Homo sapiens
ttgaagtcttatcacaaagctggttagactagagaagtgatatgacttattggaagtagcaggaaataatgactatttttcacttctctcccctctctccttgagaaattatagtgattcataaatcatagctgtgctgtactgacaggtactctgtcatcagggaatagaactgtacagccaatactaccttattggtcaccctggtaattcttggcaacctaggtgaaaaatttgacaaggattattgtgggatgctagaccacaaggcagcatccagggctagcaggtcacaactggtttctactcacttttttgaccatagggcactggtacatgcataggtctcactcagccttgcatcgctgttccccgtagataaagatggatcgtttgtggtcaagcccagctggatacatgggttaaagagggaattacctcatttactttattgtatttgtaccaaggtatctgatagcagtttccctttgttcttctagccaatctgagctagaaagtatccaggaagttctgggagattaccgagcctgccatggaactctcatcaagtggattgaggaaaccactgcccagcaggaaatgatgaagccaggccaggcagaggatagcagagtgctttcggagcagctcagccagcagacggtgagtgtggtagtagctctggcgagaagagttagaaatttaaattttctttatcataaaagaaaatgatgtactggcaattaaagcttcctccaaatggaagatatccaaattcccttttctttgagtggtttgagcaggatcgtcccaagatactggttttgcatttagactagagaacctgtaaggtaccttcagttctgagtttctgtaactgtattgaaaccactagatggacagattaaaattatctttattttgtttttttttatattacattttattttactaggattagatatggggttttgaaaaccaagggaaaattgtaagtagaagaaaatgattcttttttttttgaaaatgatttattttaagcattttttttttgttggtattttgttttgttttgttttgtttagcattatggttaagagtatgagatctggagttgtattgcctggattccaatt

SEQ ID NO: 53072 - DNA, 1313 bp, Homo sapiens
ctctctgggtttcactttccccacaggtgagatgaaagggttggtcagactgcaactaaggcgtgagcaaactatgacccacaggccaaatcttgtccacacacctgtttttgtatggcccatgagaaaaggttgaaaagaaaatcaaaagaataatattttatgatgtgaaaataatatgaacttcagtttttagtgttcataaataaagttttattctaacaaccacaccctttcatctatatattgcctatggctgctttcacttataatgagagagatagtatggcctgatattttctgtctggccttttacaggaaaagtttgctaacctccagcatgagtggtcaccaaaacgcttccagcaataaaaagctatgatttattacatgatgtatgtgaattataaaaccctgagtaactgtagcgaaattcatcctttcctaggactatgaattgcaactgatgacatacaaggcctttgtggaatcgcagcagaaatcccctggcaagcgccgtcgcatgctttcctcttcagatgccatcactcaagaggtgagagggtgggggaaggaaatacaccactgtcttcccttaaggaaagattcatttgcctgggccttacattttgatttagggctcacttttctggtgaacatgtgactgcatgaacatttcctcttattttgaactatttaaatttcattttctggcagacgatttatttaaattgttcttttgaaccacagttcatggacttaaggactcgctacacggcattggtgactttaacaactcagcacgtgaaatacatcagtgatgcactccggcgtctggaggaggaggaggtgaggacagttgggtccaaagtcatcttgaaagtacagtaaaacatcttagccagcacggtggtgtgtgcctgtagtctctggtacccaggtggctgagttgggaggattacttgagtctaggagtttgaatccagcatgggtgacatagggaaatcccctctctacaaaaaatatttaaaaattagctgggcatggtggcacacacctgtggtcccagttacttgggaggctgaggtggaaggatcacttgggcctgggaagttgaggctgcagtgaccatgattgtgccactgcactccagcctgggcaataggctgtctcaaaaaaaagcccaaaatatcccacataccccgtaaatatatacacctactatgtacccacaaaaattaaaaaaattttttaaaccagcaaaatatatgctatatatgtaacatataattaaattattatataatatatat

SEQ ID NO: 53073 - DNA, 1115 bp, Homo sapiens
tctgcatattcagcctctcttataaaaaaaaagctgttaaaacattaaccataccatcttttgctttttaaattagcaagactttctttatatccatacctacataatgtaatctcagtaggcttcagtctcttctcttcttacagattcacctgtaaacctaagaattatgaaaatgagtaagatgctatatgtgaagagatttttttaaaaagcatcaaataattattgagtgcctattatatataaaacagtggtttgtatttttcagaaaggtattaaacctaggtataataaatttagctcacaaacacctgtgagcaatactgtaggctgggctaaattatacttggggttattttcacagcccacttatttaggtaactgtatctgtttttaggaagacttcatttaagaaaatctgaagtcgtgccagcctaataaaagacattgctagcatattgattttctatttcctattctagaaagtggtagaagaggagaaacaagaacatgtggagaaggttaaagaacttttgggctgggtgtctaccctagcgaggaatacacaaggaaaagctacctcatccgagaccaaagaatcaacagacattgaaaaagctattttggaacagcaggtgagaagaaggtccatctctgtttacctgggtagaataatatgtgataatacattaggtggaatagtagaagtcacatgtgggccattccagaagtgattgctacctgagtaaatgttaaagaaacttaagaagccatcttgtttgttcttgtacctttttatcagctgtagctcattggtgataataatttgacctaagctgcatattttctctaggatttaaaaaaataattttaaataatttttgactcttaattcttgggttttgaagctttttctctttatttctaccatgtaggttctgtcagaagagctgacaacaaagaaagaacaagtctctgaagctattaaaacatcacagatcttcttggccaagcatggtcataagtgagtattaaatgagagattatggcacatctggggcacctggtctatcagtctaaaacttacagccataatgagatttcagaatgga

SEQ ID NO: 53074 - DNA, 2498 bp, Homo sapiens
gctttaattatatctgtaatgtcttatttctaagaaagggtctaaagcggccaggtgcggtggctcacgcctataatcccagtactttgggaggctgaggcgggcaaatcacctgaggtcaggagttcgagaccagcctggccagcatggtgaaacccagtttgtactaaaattacaaaaattagctgggtgtggtggcgggcacgtgtaatcccagctactcgggaggctgaggcaggagaatcacttgaacctgggaagtggaggttgcagtaagccaagatcgcaccactgcacttcaacctgggtgacagagcgagactccatctcaaaaaaaaaaaaaaaaaaaaagagagaagaaaaagaaaaggccctaaagcaaatatgtaaaatagtaaattgtgaaatgaaagctggatagctagacaacaggtaaataagaatgtgttacattcttctgcctgtttaaaatattttattttaaaaagaaaataggtatagaaggagtaaagaaagataaaactgaaaggtagagttataatcatatagtggattcttgaagtctaagatttcagaagcagaataatttcagatgataggatctaagtttgacatttgggggtggggctaaagtggagatgaggtcatttgaactacaagcataggggtgacatagcattgacatcatcaagaaccatgacttgatttgagataaacagaagaactgactgaaatgccaaagtctccgatgaatatggaagaagatcatccatccaagatgaagaagtagcaattttgaagcaatagagcagagtttggagattgtttttttttctcctaaaaaagctttaatgcttcatcttccaggctctcagaaaaagagaagaaacaaatatctgagcaattgaatgccctaaacaaggcttaccatgacctttgtgatggttctgcaaatcagcttcagcagcttcagagccagttggctcaccagacagaacaaaaggtacttttagttttcatctccaaatattgggtggataccttttgaatggtatgaaggcagctttgctgattcagagtcatgatcactagctttccatgaccaatgtgacttaatttttaacctcaccttagcagccatttgtcttgtgtttctttactggggttccatgatgtgttggtcagtcaaaagcactagaagacacttacaactaaccctttagacctggttcaccttttttgtcttatgccattttgtggcagacagcagtctaggagaacataaattctgtattatatgtgatcacagggcagtaacatactcccttgtggcattgtcactcaaaagttgatagccaaaagttctggatattgggaagaaaaacctgtgaacctcttccctctatactaaggcagtaagaaatattaagttccaaagcaaactggtagagtagtttcactgactaagacgctggttcccctcacccatagtcatctcatcatgtggcatcttgaccagttcccctccatattcatttcctggaccatgtgaaagtcatcatagttcctactggttgtcctaagttcttcctggatacttgtgcgtgtgtgtacacttaccatattatatacatgtgtctctgggatatatatgtgtgtttgcctgcttatttcctatgttgtgaagcaatggccaacttatgtggggcaggccaaaattaagctcacgtgatagtcaaatttggtccagatgatgctcaaaatgatattcagacaaagcatgtcttgattctgatccttggatataaattttgtgcaacaggagctagagttgtaaaaaccacaagacaaaaccagctatgatttgatggtgtatttccaaaaacaaagtgctggtgtaacattctccatttaaggtagcccacttccagtggcttgttgcttcaccatataagggagtatgtgaaaagttttaacaattgcttgctgagaacatccggttctcattttgaaaggttaaaaaagaggggggaaaaggaaaaaaagaaaaaaagaaagacaggacaggctgctgagcaccactacattgagcatgatgtgtctcctgtatgtgtgtttcatgtgaagtattgttctgattaactgacatccttgcttacaagtttcactaaccctttggagtttaagcacaaatgcacaaagggaaaagaggacgacctgtttggggttcttttttgcaaaaacaaacagtcgcatgctggacgctaacaccaagcttacactgtgtgtgtgatacggctgagctgctccataaggctctatcttttatctgcccaaggcgtgccctgcaactctggtaagtagaagccttttatgttttctttcctcctctccttctatctcttaatgcttgtttaggtcagaatgtccatgtttggtaggacagaaatgagtttctctggattttttcccagctgagtatttcctgcctatccttc

SEQ ID NO: 53075 - DNA, 7207 bp, Homo sapiens
agagaagtctgtcagttattccattgattgaacacatatgtagaaatggagatgagaaccaaatatactgttctttcatttgctatccattctgtattcttattgtatgcacctcatcaagcttgaaatcctcagtgcgtgtttctaacacctgaggggaaatggcttaatgattttaagggtttccttattatttatccatattcatcccatatttattaaatgacagctactgttcctagaccttcatggacaatggatcagctcttacagaacttactcactgagataaaatgaaatgccattatttaggaggcagggaaataattggaaattgcttccacaagatcctctatcaataagatagagagttaaataagtaatcagaaagtagcactgaccaaagagggacagataaaattatatacagaaaatgaaaataatgaacatgaaaagaagagctgaaaagttggagagtaataaaaatgatgaagtgttgtaagtggttaaacacttaaataatttaaaatctgaatgtattattctgtgataaaagatctcaaaaatgagaattctttaggagctgtttctaggatttgcaagggtaattttgacagcgtatatgccttattcactgaccttcggacctaactcctgtgttaagatgtgactctactgtacttgtcttttacagttttctgggtctgactctgggaggacaaacaagatttagaatcagaccttgatttgtttctggaactcactagttttgtgaccttggacaagttacctaaactctgtgcctcattttcatttcttcaaactaaagattcaaacaattgttttcataggattactgtgagaattaaatgtcagtgttcagtagatctagtaataagtgatagctgtagtcatggttattgtactacccattctagcctggatcagaagaaaagttactagtggttccataggcaagggtccccaatctgtttcttccttgacttgctacttccaagacctagaactaacttaatttagagccattgccttgggagaagctagcattgtccaagaatatgagtatcccacttgctaaatagttgcttgagtagtatacacaggcctgtttactgggatgcacaattgttctggagcttctgggctgcataaatctctcttattctatggaccagtcctgctgtgctcatcagcagggaattgctacttctagagtcttctgtgtggtttgcaacaccaaaaacttgttgtatggcgttgaattctcactttgggggaactgttacgtgtctttaagaacatttatgatgatttagtcttagaaataagattaaatcctatcattttcactgcttaccaccctgtagagcttgtcactcagatatgcttaatgccactatctctcaagtaatctaggaacttctgacctattaaacattctgcagtttagaaaaactcttttttagtcttaacaccgggtggcttgcttcagaatatttcctacatgttggggcttatcccatgctgggttttccttgtggtcagaattttatatactgtagtactttttttttttttttttgagacagagtctcgctctgttgcccaggctggagtgcagtgatgcaatctcagctcactacaacctccacctcccgggttcaagccattctcctgcttcagcctcctgagtagctgggattacaggtgcgcaccacacccagctaatattttgtatttttagtagagacgggtttttcaccatgttggtcaggctggtctcagactcctgacctcatgatttgcctgccttgggcagattataggcgtgagccactgtgcctggcctgtatactatagttctttgaatgactcctttcaatagttgtgctttgccattggctctgattcagttttctttttcttctcttttccttttttttttttttttttttttttttttaggaatgcagagcagttgctggggtgattgacctaggcacagtggagatatttcccatcttcaaagccatgcaaaagggcctccttgaccaagacacaggcctagtgcttctggaatctcaggttatcatgtctggcctcattgcccctgagacgggtgaaaacctctctttggaggagggcatagccagaaacctcattaatccccagatgtaccagcagctccgggagctacaggatgccctggccttaataagcaggcttactgagagcagaggccctctttctgtggtggaagcaattgaaaagagaataatcagtgagacagttggactgaaaatcttagaagctcacctggcaactggaggtttcagtctttcccctagtgagaactgtattaacctggaagaggcttttcatcaaggcctcatttctgcatggcttcattcagtattagagtcttatcttagaacatccaagaatttgatagaccctaacacagctgagaaaattggtttgctggatctgatgcagcgatgtattgtccaccaggaatcaggattcaaattactgcctgtcaaacaattggcaggggggatggtgagcttgaaatcaggccggaaggttagcattttccgtgcagttcaggaagggctaatagataggcaggtcactgtccggttgctggaagctcagctttttgctggtggcatagtagatccaagaacaggacacagacttacagtggaagaggctgtaagacataatctgattgaccaagatatggcctgtgctatcctcataaggcagcttcagacaggaggcatcatagacactgtcacggggcaaaggctaacaatagatgaagcagtgagcaatgatctagtagctgctaagatcgcccttgtgattctggagtccctctggtcattcatggggttgctgtggcctgaatctggagagatcctcccaattacagatgccctagaacaaggtattgtgtctactgaactagcacataaaatccttagtaaccgacagcatattaaggctctgtttctaccagcaaccacagagattttgtcctggaagaaagcaatagaaagtggtatcctggatagagatcttgccaataacttaaaatcgatttgtatacctgatgtgatgccccacatgcaactagcagactctgcagaacaaaatattaatcctggagcagcagttctaccgtgcagcaagagccaccctaaggccacagcaagccagagtgagaatctgttgttccagctgatgactcacagctatattaatgtgcaaaatggacagaggctgcttctgttagataaagagctgatggagacactaacatccagagatgagtatcaaacaagtcctccaaaagtggttgaaattgggcatcaaaggcaaaaaactcctgagggattgcaagaatcagctaatgtgaaaatctcaggaactttcagcagtgggtggactgtgaggctgcctgagttccagttttcttctcagaacaaagaatatcccgatcgggaagattgcactacagaaaaaggcaaaaagaccactgtagaaacagaagattcttctgtagagaaccctgaacaggatctgtttgtagaacaaaaagagagaaatccaaacattgatgctttgaaggtaataaataaagtcaaattagaggtacaaaggcagttgataggtacccaaagggaagaccaaacagcagtgtctgtcagagaaaatgccagcaggggacacctcctgaccatacctcctgctgaggcggaaggtgtgccgttggtggttgacaaagatgttttttctgttgaaacaccaaagaaagaacatcaacctctaagaaacacttcctttacatgtcagaatgaacaagcacacactcttgagactgaatatattcatgatgaaactggaggatctcacataaaaccccaaagcaaaaagttacaagttcaggtaaagaaaactctaggtataaagttagaactaaagtctgaaactgatgggaatgttcatcctctggacaaaaaggaaatgttaaagaaaacatttctggctaaggatgaccataaagaaagtcaagaagcacagaacatcgcaggtggtagtatgatgatgtcagaaaagaccgatgaggaagatagtggcagggaaatttttctgtcatgcagtcatccattagaattgcttgaagaagctaccttaaatgtattatctgcacagttactagatggtggtatctttcatgaacaaacaggtcaaaagctcttactaaatgaagcaatatcccgaggcattgtgccaagtcacactgccgtgaagcttatggagaagctgaacatgtttcaggggttctttgactctcagacttgtgagtctttgacaactgaagaagtcattaatgaaggtctgatggatgagaaattattacataatgtcctcatggcagacaaagctataagtggtgtcttagacccccgtacccagacactgtgctctgtaaaggatgcagttacagttggacttcttgacaaggaaacagccaccagaattttagagaggcaggtggtgactggtggaattattgatctgaaacgaggcaaaaaagtttcagtaactttggcctcaactcttggcttggtggacgttgctgaccagccagaacttataaatctggagaaagcttccaaaggtagagatgctgaaaaaacagttagggagagattaattagtttacaaatggaaacaacaggacttatagaccctgatagtaaagcacctttaacagttgtgcagtccattgacagaggtcttttggagagagaggaggccgttcgtttgttgactaagcaagtggtagatggaggtatcattcaccatatatctgggatgagactttctgttgataatgccttcagacatggcttaattggtgaagatttagccgagaaactcaaaagagttgagaacttaaacatccatcagatttttaatcctgaaacgaaggaaaatatttccctccctaaagccataaaattagatcttattacctcagacctgaaaagagaaatccaggaggttcaggcctttactggaaactttgtggatctcatttctggtcagagattgaccttggcagaagctaaaaaagaaggactgttaactaatgaagcagtattgtctccaggaatgatgcatggcattgtagatcccgagaactgcagaattgtcccctactcagaattagtcaagaaatgtaagattgatattgaatctggacagagatatctagaagtaattcccttctcagacattaaagatggggtgagcgacaaagtgcttacattgtctcaagcaattcagcttggaaaagtagactttgcatctacgctgaaggttctagaagcccaggcaaatactggtggaatcatagatactgctactggaaaaagactgacattggcatcagctttggaagagaaactggtggatgaaaacatggtcagaattattgcatctcatcaggtgttaaatggaggaattgttgacatatttagtgatcagagagtgactttagtagaagctattgagaaaagactgatcagccctgaactggcaaatatgatccaaatagatagttcagagttcagcgatcacagggctcagattgaaaagcaagaagggattgaagtgtgtgcattacaaaatgaatttctaggaaaggatatgttaattgcttgtaatcagactgctgaaatgagttgtaataaagtagaagagagtgagagattatttcaagttgaaaatcagtctgcacaagaaaaggttaaagtgagagtttctgatggggagcaggcaaaaaagagcagggaaatttccttaaaggaatttgggtgcaaggatcaacgtaagccaagaatgtcttcagatgctaaagaatttatcagtatcataaatcctcataatcttaaaggtaaatccttgggccaagtgtcattgacacacccttactctgaatgtgattttaaacttaaagaagtggctagaaataacatgggaaatgatacaaatgaagagcaggaaaaagcagtgacaaaaatagaaattatttctcatatgaagcagtctacctcatgtctagattctgaagaaataagagaaaatcaaggggaagtgattttggaagtacaagaaacatattgtgaaacgtcaggcaaattgccgagtgagcaggttttgcagcaaccaatgaatgctcgggtgaaaagtaagagagagaagagggaggtgattgtagaagaaagtatcagaacatgcaaaccagcatttctttctgaagaaaagttgtatcaggaaactgccattagagatgagcatgactcccatataaagagccaacctagggaaatgacctcaagtgaaaaagggaaagaagctgatacagaaatgggattttctattacttttaaaattgaagagtcctcttcccaagtggtacctcaaggaatttctgtaaaacatttagatgctttaacactcttcagctctaaacaggccaatgaaggaaaagtaaacaatttaagtctctgcttgactttaaaaccagaagaaaacttatctcgagaaattgcctgtggggcccagagtgaaccattcccttgtatgaccccaagacctgaaggattgcactaccaggaatcagatggaaaagcccaagtgacaggcccatcccaaatttccaaaacagacaagtctttccaaggaaccaccagacaggagaccaactatcaagattcctgggttacttcgaaaactaaggaaaccaaacatcaaatttcctcatctaatgaatgtaaagaaaagtcataccaagaagtatcttttgacccagcaagaggtcttaaattggaagaaatcacagtttctagaccagattcaaaagaagtcaggtatctagaattctcagacagaaaagaccttcatcatcagggcagcaaaagtgatgataaactttgtggaactctcaaatctgaaatagcaacacaggaactaactggagagaaatttctagaaatggcaaaccctaatgttgcaggtctagaagcaggatccattgaggacatagtgactcagagaggttccagagtcttgggatcctttcttccagagaaactgttcaaaggag

SEQ ID NO: 53076 - DNA, 1023 bp, Homo sapiens
cctaaagatacaattagtttaatgctaaaattcttaactgggtacagagtttacatatgtgtaattgtatgcctctatacattttaaggcactagatgattctctaagatataacttagtttatcatcatctgtttgtagcaaagttgttggaaaattaggcattggctctgaatgtctttctgaaatctgcaagggttttaaatagaaacgagctaatagaaatactaggatgatgctacctgaaatcagaatagcttttggaaattttggtaaaatgatgcttgtagattgatagctctgagcttctgctctctgaggaaattggtaaaatcacctttgtctattgatttgaaatgacttaaacaaagtgttttattttatcccactctatgtgcagtaaaaattgcttctatttgtctaacaaaaacccctgcctgctttaaagctgacttacaggagaacgtcagaactgagtcagctttctttttggctccacagaatgtatttacccggcaactctgtttagaacatgatgaaaagctagtatcctatctgtctctgttacggaacattgaaatgaggaccaaacagattcaacctttggagctaaacctggcagaactacaggatctgctgtgtcaggccaaggtaggttcccagagacttccaccacagacaccagcttcaagatagctgcctccatcttccttgaagatttcaagacttactagaacctgcttgcactctattctagggtaaacaatctcagacccttgtcagataattatgggatgggctacatttggatagaccggataaaatttatacaggataaacttgaacagaccttggatttggctatcaatgtaattactaccatttttttttttttttttttttgagatagagtcttgctctgtcacccagggtggagtgcagtagcggtgatctcggctcactgcaacctccgcctcccgggttcaagcaattcccctgcctcagcctcccgaatagctgcgac

SEQ ID NO: 53077 - DNA, 2365 bp, Homo sapiens
ggccagtcacagtggctcatgcctataatcccagcactttggtaggccaagacaagaggattgcttgagcccaggagtttgagatcatcctgggcaacacagtaagaaattagccaagcctggtggtatacaccctagtcccagccactcaggaagctgaggcaggaggatttgcctgagcccaggagtttgaggttgtattgagctatgaatgcatcactgcactccagtctgggagacggagtgagaccctgtcttaaaaaaaagaaagaaaaatatattcaaaagcactgccatttaaaggaccaacaaagaaacaacaacaacaaaaatagattgaaaaagtctaactggagatctctgaagaagacctggaaacactcgtctcacagaaaccaaaggaggaggagtcagccctagtaactgccacagggagattgagtacaatgaggactgaaggggagattcagctcctgaaagttattggtgactttgaacagtttcagtggagtgacgggatataaactaacttgcagctggaagaaatgggaggttggaaagtagagacaattaatatagatccttctttccagaagtcttaggtacaggcaaggaatgaggtgggacactacttgaaggagatggattgaaaggaatgttttgaatgggttttggactgaggagaaagaaccaattaaaagggagaacttgaagttagaagagagaggaagtgataactgatagaaccagtcccctaaaaacgtagaaagacagccttgagagggaggaagagtggctatttcactgaaattggaggttaagagttgtcataggattggagtcaccatgaagacagattgtagtggtttactggttctctcaatatctagtgtgtggccttgggtagggtggctgaaccggggctgaggatgatgccccaaagaactatgtcaagttcttccacagcttatttccggcttatctgttgaggaccagaatattacagactagatgagtggaaaagctggttggggttagctttgtattctttggttccatgaccctggaatttagagtggaagagtcatccgttcggtttattttgtagcacattaattctgcacagctgctccttggggaaaggcataatgacactctcagagaggcagcaagttacagtggagggagcacactgcactgagtgagaaaacctgaatccaagtcctggctgtactgcttaccagctgggtgaccttggacaccattcacattttttttttaagcaatgaggcatctcttctgtaaatccagaacagtaacatctaccttgcctacttcatgaattagtgattgtgagaaccaagtaaactaatgaatgtacataaaaacattttctaagccctaaagtgtgtgtagacatggggtgagagagaaatgtgttcacagctgattcccagagggtttctagtcttgcttttataggtaactccactttattccctcaggtattagaaagggagttaaaggatctgaccaccttggtcagtcaggagctggagtgtgtgaatcagattatcatcagccagcctcaagaagttcctgctcaactgttgaaggctctagagaaagatgccaagaatcttcagaagtctctcagctctgtgagtgacacttggaattccaggctactccacttccagaatgctgtggaaatagaaaaggtagcattttgcttttattcataaaggctcacaaagtctgggtggctgggagattttcataatgtgattttccatttatttcttagactaaagtgttaaatcagcacacacagctagaaggccgacttcaagatctgagagcctgggttggcaataaaaatcttattctgaacagcaagggatctaacagtgaaatagatgttgacagcctgaacctctgcctccaacagtatgaggtaaactcaagcacattttctttgtcctttgagttgtatcaattttatttccctgctaggcaaaccaatatccatatttatcttttttttttttttttgagacggagtcttgctctgtcacccaagctggagtgcagtggcacaatcccagctcactgcaacctccgcctcctgggttcaagcgattctcctgcctcagcctcctgagtagctgggactataggcgcctacctccacgcccggctcatttttgtatttttagtggagacggggtttcaccatgttggccaggctggtttcgaactcctgatctcaggtgatccgcccacctcggcctcccaaagtgctgggattataggtgtgagccaccacacccggccatttatctttcttagaaagtctgatttt

SEQ ID NO: 53078 - DNA, 1011 bp, Homo sapiens
taatttatgaggagtttggagagactgaaagtgagagagacttttttttttttttttgagatggagtctcgctctgtcacccaggctggagtgcagtagtgcagtctcggctcaccgcaacctctgcctcccgggttcacgccattctcctgcctcagcctcccaagtagctgggactacaggcgcctgccactacgcctggctaattttttgtatttttagtagagacggggtttcaccgtgttagccaggatggtctccatctcctgaccttgtgatccgcccaccttggcctcccaaagtgctgggattacaggcatgagccaccgcacctggccaagagagactttaattctaatttggccctagaatcattagtgccagttatgaaaatacaggaaattagcctctctgattctgttggttttcttcatgaactgagaaatggaagtatcatggttttttgtgttttgtttcctttttccatttaccttaggatttgaaacagcccatggctgaaaggaaagctcagctggatgctcttgcttttgatattcagttctttatctcagaacatgcccaggacttgtcccctcagcagaatcgacagatgctgaggcttctgaatgaactgcagaggtccttccaggacattttggaacagactgccgctcaggtggatgccttgcagggccatcttcaacaaatggagcaggaagccctggtgaaggtcagactgaaccagcagctgggctcagtttgtctttggggatgtcctctgtcattgggttttctggccagactctgtgtatcatgattgcaggagcctgggtttaccaattttgaaatttcatgtcatgcaggccagtatggttctagtccaggaggcacttgttctggctgttgttcttgccatgtctttggttttatgtatgtgtgagagaatgtatgtgttgacatgtgtatacatatgcaagtgttttcttttagtgagacttttccttcgctgta

SEQ ID NO: 53079 - DNA, 2416 bp, Homo sapiens
gggttctgaaatcagtttcattctatttaatctatttcaaatgatttaccataaggttccttgacaatccttaagtggctgacaaggaaattttattagaatcgtattaatttttggctctttaagaattaatattattttcttgcacctttcctcacagtatagtgcccagtgcttattcgcttattcaatcatggaaaacagtatgtagaagcaggatgatactaaaacaaacaaacaaacaaacaaaaaactaaccatcctaccatcttccatcacaactctcttcttgcaaagctcaactcaacataattacattaatagtaacatcaaaaccttagaatacccagaatgatgttcatgccatttctgctatttgaatagtaagttggcatatagcaagatgatattagaattgtcattatcaccataaaatttgtctcaagggctcctttattaaatgttgtgcaaaaaattgagcttttgagtcagactttaagggaattagggtagttggtgccatatgtcctgtattactgtctcattttttcaactatattgaaattgagatatattaatggaaagctttaggttacctttgaaaactgagcatgtgcaatgctcgcattcaggagtttatatagcatgatataacctttggataattaatgaagtaaaattcatctgagccacattaagacaagacccagcccagattcagggtagactcctgagctgcagcaggtgatagaactgcatgtgaacattctccctgagcatgtaattaattccacaatgcttattaaccttgttattgtcagaaatgctctgcttctctcaatatttgccttggatgtgtgtgtatgtctctgtgttaacttgtttgctttgcttttttcagattcagtctgcacccatcctaacccatgaagatcctgttttacagctgaagagctcttaggagttctcttccagagcccttctatttgtcctaaagagggggagagagggccaatttgggcacctgtttgtaagtgcaggtgactaaagcgccatcagaaggtagaaactggtggaaaatggttttagaaggatggtcaggagaacacatcatgctcaattgctcagtcaggtgcttcaatgtcatacaactgagataaaatctagagaaaggatcaggcacagaaacatattccctctctctccttgggcctggcctgttcctttgatattagtgtagacacctaaaggactgagccagttgctattcttgggcactttccttctcaaaatagccaaatctagcccttcatgcctggcgtgtaatcattttatttaatgagtctctggattgatgagacatttgatttataaagtcagctcaattattaagaagctcgattaacttatgaattatccaggtctttgatttttctttctactccaattcttctacttttgcatattatgtagcaaatctctggttctagtggagggattgatcagaaccactaaattattatcatcaccattatcatgtgtggatttcaagcatctgggctctttcttctccatttccaaagataataacagcagtctggtgaaggagctctcaaaccaaaacctgaactagaaacattctcataattatcctgattatccaatccatagacccagatcaatggactgtccaaatgaggggagctttccgaatatgatttctatgtcttttcctattctagtctcccaccaacttttccatccttgagatataaccttcctgttttacatttcagggagtttcttgtatttgcaaaatgtgaattacgaaatgtctcttgacccctttgcattttaattagaccctgcagaaacaacaaaatacctgtcaccagcaactggaggatctttgcagttgggtaggacaggcagaaagagcactggcaggccaccaaggcagaaccacccagcaggatctctctgctttgcagaagaaccaaagtgacttgaaggtcagtgtgaatctgtcaattttgacacaaagtctcgctctatcgcttaggctggagtacagtggtgttatcttggctcactgcagcttcgatctcctgggctcaggcaatcctcccacctcagcctccccaggagctgggacaaagtcatgagccaccatgtcctaattttttaatttttttgtagagatggggtatcactatgttgccaaagctggtctcgaactctgggctcaagcaatcctcctgccgtggccttggcctctcaaagtgttaggataacaggcttgagccaccatgcctggtgattttttcattccttcgacaaatatttagtgctcaagggttagcaataatggtaaacagacatcatccctggccttgtgaagcacacagtctagcag

SEQ ID NO: 53080 - DNA, 1052 bp, Homo sapiens
ggccacattaaggataaggagtgatacccaagagagtataagggcccatcaggcctcgactctgctaagatcatgttgtcaacacttctttatggaaagaatgatctctttgaggataatgcattgcaaaatgaaaaatctctcatgttcatgtttatggacaacctccttttttggcttcactaaatatttgcttagaaaacaaaatcaaatttctttgcattgatttaagcctaaacctgaagcaaattgtagttagggactatatacaggactatatgtcatcctagccattccatctttataccattagaggacttagaagcactaaagtcgaaggctctgccattcctattttcttgtgttaaggatttacaggatgacattcagaatcgtgccacctcatttgccactgttgtcaaggacattgaggggttcatggaagagaatcagaccaagctgagcccacgtgagttgacagctcttcgggaaaagcttcatcaggctaaggagcaatatgaggcgctccaggaagagacacgtgtggcccagaaggaactggaggaagcagtgacctccgccttacagcaggagactgaaaaggtaatagactgctatgacgcttgatatttttcaaaaaagaaaattttggtaccaacacaaataaaagacagtgaggggaaaacaggcttatagcatgcacagaatcatgaggaagggctacttcaggagctagtctggtttttgttttttgagacggaatctctgtcacccaggctggagtgcagtggcatgatctcggcttactgcaacctctgcctgccaggttcaagtgattctcctgcctcagcttcagcctcccaagtagctgggattacaggtgcctgtcaccacacctagctaatttttgtatttttagtagagatgaggtttcaccaggttggccaggctggctagtctgtgtttttacaagaatctttatttttacaagaaatgtccaggaggagtttaagtcaggacagttggtaaaaagtacatattcctattcctcc

SEQ ID NO: 53081 - DNA, 1313 bp, Homo sapiens
tttgagacagagtattgccgtgtcaccgaagctggagtgcagtggcacgatcttggcttactgcaacctccacctcccaggttcaaacgatactcgtgtctcagcctcctgagtagctgggtctacaggcatgcaccaccacacccagataattttttgtatttttagtagagatggggtttcaccgtgttgaccaggcttgtctcaaactcctgatcctgaagtgagccactgtgtcctgcctctttttttttttttaaagcagtaagatataatgaaatgtagagatatttttaataatttttcaaaagattttaaaagatatgaattctcttttgtatgtgcaaagactgtttatacccagtcttagaattagcataaaattatctcctcccctttaccccattacttaacctgtggttgtatgattgagtatgtaaagccttctcactagactacctcggtggctttcagagtaaagcagcaaaggaactggcagagaacaagaagaagatcgatgctctcctggattgggtaacttcagtaggatcatctggtggacagctgctgaccaaccttccaggaatggagcagctctcgggagctagcttggagaaaggagccttggacaccactgatggttacatgggggtgaatcaagccccagagaaactggacaagcaatgtgagatgatgaaggtaagggtgttagcttatcctcactatgctagagaaatctctcctgccctgagcaagtaaccacaatcaccttgcccctaaatccagtgagcacttctcagtttgtatcttctttgatgtctcagcagctttgacactgttggccactcctcttgaaatactttctcccttggtttccataatactactctgccctgaccatctttcttactttcctctggccaggttttcaaatactgatgtttccaggtgtatcctaggccctctttttatctttcagaacatactttccttgggcagtctcatctactcacaacactgtaattgccatttgcactaatgaattctgtgtatgcatttccttccagccctgatttctgtcccgagcttcaaaacggtatataaatctgtctgcctatttgcaacttgggcccataagcacatcagcctgaaaatggaactcctatttcctatgatactcctcccacaattaaacattctctttcctttattcccacttcattgtctgaactggacatcatcctagattccattctctctctcactctcctatgtcaaatcagtcatcaaatcttatggtaattatatttctt

SEQ ID NO: 53082 - DNA, 1906 bp, Homo sapiens
ttctagcttataggtagatggtccttgaagattataagtacaacttaagagtcagcatctaaattaaagggctatacctaaaacaaggggctgaactgaataaaatgaagttaacagggaaaaatgtgagatgcagcaaaactgagagaggtgtatgacttgacagcaatgtgggtgaaaagaccaaggctgaatgtaagcagacctcacatggagtatgaagtccagtcttgtatacctcaaattattgtggattgcctactgattgtcctttgtttggggggatttttttttaccaggcccgtcaccaagaattgctgtcccagcagcaaaatttcattctggccacccagtcagctcaggccttcttggatcagcatggccacaatctcacacctgaggagcaacagatgctgcaacagaagctgggagagctaaaggaacaatactctacttccctggcccaatcagaggcagaactgaagcaggtgcagacacttcaggatgagttgcagaaatttctgcaggatcataaagagtttgaaagctggttggaacgatccgagaaagagctggagaacatgcataagggaggcagcagccccgagacccttccctccctgctaaagcggcaaggaagcttctcagaggatgtcatttcccacaaaggagacttgagatttgtgactatctcaggacagaaagtcttggacatggaaaacagttttaaggaaggcaaagaaccatcagaaattggaaacttagtaaaggacaagttgaaggatgcaacagaaagatacactgctctccactcaaaggtaagggggcagttcctggcatccttggtgaaacaatcatggcagccttcacacaatgtaggtagtgtctggggctcagaataagaactccaggacacagtaggagagctgatttatacttggaccatgggcagaaggtcttcacaaacaatgcacaaaatgtaaaatacataggtactagcccaaaggcctgatagctagctaatacctaatacctagcactggcaggagtatatcacactgatggtgaaggtggaagtattccccttcctgtatcctgaccagcagacttggactcccaagagacatagcacacaggggaaatttaaaccaattgcacagtctttatttctgtctttatttcacagagcatctagggtgaatccttaccttccttcctatctaaagaacttgctcgctcttctaaagtttagaatccagtcagctcttcttacctgtcttatgccttctgccaacacttctaatccccaagaaagaatactttttgcacttcttaacccctacctttgtctgcaaccttatgttcatttctttggaagcttgtcatacatctcattaaattttcctgggaatgtaagaaggtcaaggtgaatagtatggagcaaacaatggggacccacacttagagatcattgctacccatctatccatgggttctggcaatacccttatctgaagttacagtgagttgtctgtaacaaagccaggcctctttctttgggcagctgctgcctttggcctgaccttgcttaagtctgcttacctttctttctctggcacagtgtacacgattaggatctcacctgaatatgctgttaggccagtatcatcaattccaaaacagtgctgacagcctgcaggcctggatgcaggcttgtgaggccaacgtggagaagctcctctcagatactgttgcctctgaccctggagttctccaggagcagcttgcaacaacaaaggtaagtcaggacacaggctgtgttgtggtgtcaagaccttgtattccatggcgtaaagtaccccaaaataaagcaaatgcttacataaaataaaggcagtggttggga

SEQ ID NO: 53083 - DNA, 1036 bp, Homo sapiens
agtgctaaacacttgcttctaatatttatggctatggttaaacttacaattattctgtaaagctgttcagtagctccggattcctagaatcatctttgattacttagatgtttttcttttgtttttttcatggacaagcagcagttgcaggaggaattggctgagcaccaagtacctgtggaaaaactccaaaaagtagctcgtgacataatggaaattgaaggggagccagccccagaccacaggcatgttcaagaaactacaggtataaagcagcaacagtataatagtactcccttaattcctagtatgtacctctattctgcaatatgtcacattgtgttgtgcaaatatctgtggtgccaggctagaggctgagaatataaacatgaatagacatagattgtcatcaaagagcttatcctctaatgaactttattcttgcaccattgaaggaccttcacaatctggcttcagtcccttttccccagacatctatcttctagccacatctacttttctttcccaagtaaaccacttacattgtattacccctgaagtttttcctattgcttagctgataacatttattgaatgcttaccaagcgtggtgaaatcttgcccatgcttcaagatgtagccaagagtatatcatggtgactatagttaataacaatatatcgtatacaggccgggcgtggtggctcacatctgtaatcccagcactttgggaggccgaggcgggcagatcacgaggtcaggagatcgagaccatcctggccaagaagatgaaaccccgtctctactaaaaatacaaaacaaacaaacaaacaaaaaaatagccaggcatggtggcaggcgcctgtaatcccagctactctggaggctgaggcaggagaatggcatcaacctgggaggcggagcttgcagtgagctgagatcgtgccactgcactccagcctgggcgacacagcaagactccgtctcaaaaaaaaaaaaaaaaaaaaaaaaaaatatatatatatatatatatata

SEQ ID NO: 53084 - DNA, 1094 bp, Homo sapiens
caggaaagcctggagagcctgttgcagtctattggggaagttgaacaaaacctggaagggaagcaggtgtcatcactctcatcaggagtcatccaggaagccttagccacaaatatggtaagatctgtgtcccaagagctagcatagagggtatgtttgctatgtgccatcattacataatgttgaaaaagtaacaagagggaacctaatatctgtgaatcatctaataagatttagaaatgataactaatctatgtaaagatatttctacccagttgagctggaatgaaagtggagatagcaaagtcatgtggtagaaggggtggagaactaaggtgatgagatgtgtggtattctggaggctcggttgcagtcctccagtcccccttgtgagatagcatatagttattagtttgtggctcagatgtcctggaataagtgaaccaggagctgacagacgtgttcttcatgacagaaattgaagcaggacattgctcggcaaaagagcagcttggaggccacccgtgagatggtgacccgattcatggagacagcagacagtactacagcagcagtgctgcagggcaaactggcagaggtgagccagcggttcgaacagctctgtctacagcagcaagaaaaggagagctccctaaagaagcttctaccccaggcagagatgtttgaacacctctctggtaagctgcagcagttcatggaaaacaaaagtcggatgctggcctctggaaatcagccagatcaagatattacacatttcttccaacagatccaggtgaggatatatctgccatgttagcagaataaagggaagagaagggcagggagagaaccagcatttgctgagcgcatactacatcagtcagtatactggaaactacctgcattatctttgggaattattacagtgatcccgtaaactaggtatcatttgtccattttttaagcaacacagtcaatatttatttttcactcttattacatgttcaacccaaatcagcagggccactcagttcatcatagtcactcaagggatgcagattgatggagatttcatcctgatataagctttcatg

SEQ ID NO: 53085 - DNA, 1212 bp, Homo sapiens
ccatttccaaaactttccttttgatttagtttattcattggcatcattaatctagaactaatcacctaacttctgtgagcctcagtttcggcaccttccttgctaaagcaatcagcacttgaattggtccttgaaagagtcaaatagctaaaatgtagcagggccggaattgagatccaaagcctgcattctttccattgtatcacagtacctaaatagcagcctccctttagtttttctcactttcactttagcctagagtaagattgaagacctctttccccagaaatgtccaaacaagggcaatatattcctgagtttggtacgcttcaatgttatatgcggttgttcagccaaacctgctatggaaaagattatgagaaagaaaggccatgttaggtaactgatgtctggagtcacagaatgaactactcttagctcaagttgactttataaaacttagtctggcaagtaacaaaactgcttcattgacagagagaaagatgcatcatcttgccaggaacagttggatgaattccggaagctggtcaggaccttccagaaatggttgaaagaaactgaagggagtattccacctacggaaacttctatgagtgctaaagagttagaaaagcagattgaacacctgaaggtaggtgaacaaagggactccaagaattgggctaggcactggtttgaatacttgtattaactggtctccagctgtggtggggaaatgtatgagaaatccaagttgtcagtctgcatcagaacagaaattcctacgttttcttcatatgataaccatctacccatacagtccttgagaagcatacactctctttgtatgtttgagaattagacaaatatatttgagcaagtaaccagataatatgatcaggaaattgaggatagaagaactagtactacttcagctagtaaaggaaaagctagaatcagatggttggaaggtaccttcaaggatgggaccaaccttcctcccattccctgcaaaatcccttctgtactgtctttgatccgtaattatccagcctctgcttacacctctaacctatgtcttccttttgttgaaataagccaaatatgcctctgactaactgtcatgcacttatccttattttctcagtaaagcatacttcatcctgagcagatgaaagaaaagcgtttgattgctttcacagagtgagtgcc

SEQ ID NO: 53086 - DNA, 1352 bp, Homo sapiens
cctgccaccacgcccggctaattttttttttgtatttttagtagagacggggtttcaccatgtcggccagtctggtcttgtactcctgacctcaagtgatctgcccgcctcagcctcccaaagtgctgggattacaggtgtgaaccaccatgcccagccattatcttaattcagagctttccttcctctaggcagaattagatagaactcctcttatgctcttggaattcacagactgtccataatactgtaatagcatttatcacattataatgcaattgataatctgagcttctggttttagaaattgtatcataattctattttgtaccccagtgtttggcatggtgccagtcatatagtaaatgttcaatagatatttgataaatgaataaataaatcagaaggatggtctcttaatgcttttcaaaacactagggagtatatacagaacagatgtccctacttatgaggaaaaagccccagatactacatttggccattttcttctttaaacagagtctactagatgactgggcaagtaagggaactctggtggaagaaatcaattgcaaaggtacttctttagaaaatctcatcatggaaatcacagcacctgattcccaaggcaagacaggtgagtacaggctcttcaaaatatagtgaataaaaattgctctttgcttttggcctttggagatgcctccttatataattaaagtgaaaatcaaggttggatatgaaaacaaagggcatgcccaaagcagtcttcccctgcaacctgacctgtcaccccttttgctatataacattgctccattttgcaaaattccttcccatgatggaaaaagtaaatgaactagttgtcccacttagaactatcaaatgaacactgaataattaaaatgagattttcatcttgagaatttcccttttttgaatgtgtaaatgggatgggtaagcatcatctttaaacttgggcactggccagccacgaagtcagaagatcaaaaccagcctggccaacatggtgaaaccccatctctactaaaaatacaaaaattaggccaggtgcggcagctcacacctgtaatcccagcactttgggaggccaaggcaggcggatcacgaagtcaggagattgagaccatcctggctaacacggtgaaaccccatctctactaaaaatacaaaaaattagccaggcatggtggcgggtgcctgtagtcccagctactcaggaggctgaggcaggagaatggtgcggagcttgcagtgagccgagatcacgccactgcactccaacttgggcaacagacagagcgagactctgtctcaaaaaaaaaaaaaaa

SEQ ID NO: 53087 - DNA, 3631 bp, Homo sapiens
aggctggtctcgaacctcctgagctcaggcaatccacccacctcagcctcccaaagtgctaggattacaggtgtgagccaccgcgcccggccaactattttgtaatataaccttgcacatgactttttgtacagtgaagtcagtgcatatgagagttttctgtccttttaaagtatcattatgaatatttttcagatttctgtataatatttatcattacctcacctgatttttacctatcttgggaaacttctgaaatataaggaatcagtttggggagaatgtatgtgaaattatggtgattagaaacagaaccaaaggcccaaagcacaatttataagaatgttgatgagccagatttattggcacttaggatttctgttttttcttggggaaaggtgagcaagaagaggttatgaaagaaaaggcaaataatcttcctttaaaaacaatataagaagggctcattttaatgtctttattagaagaaggctgctttttaggccaggcacggtgactcatgcctataatcccagcactttgggaggccgaggcaggcagatcacctgaggtcgggagtttgagaccagcctgaccaacatagtgaaaccccgtctctactaaaaatacaaaaattagccgggcctggtggcaggcgcctgtaatcccagctgtttgagaggctgagatgggagaattgcttgaacctgggaagtggaagttgcagtgagccgagatcatgccaccgcacttcagtctgggcaacagagtgagactctgtctcaaaaaagaaaaaaaaaaaggctgctttttctgtccttaatggtattttcatttttattatattgaaagatattgatataaaaggtgaaactttctggctttattataaaagcttattccaaaatatggcaagtaccattctagactgaataattttaccagtacttgcttcacaaaattagggcggcatccagagaattcaagttggagatttaataaaaagggaatacgaatttcctctagaagggattaagaatcattcctgctaagaaccttgagtgacgttttgttgcctggcagctaaaataatttgtctctttccatgagtatgttgtcttgtgctgtgttaacttcctgatacctaagcttaaagtgagggccaaaggacaaattcagtgcctatatgtattcctaacacgttggtcttgccctgtttgtctccctgtccttctgctcaggttccatactgccctctgtaggaagctctgtaggcagtgtaaacggataccacacctgcaaaggtgagaatgccatttcaacagtgcttctttgttggatgtgttaggacagtgtctatgtttgcatctgtgtatgttgcaatatgtggtggaagaactgctgccagaatgggtgtgaggataaaaatctggggagaagcaactgtggtttgctggctatagaccataaacaggttggcagcccctgaagctaaaggtattgtagaaatacaatagattggatcactagataaggcaaatagggaaggaactcaaagaaaatatatgttaatctttgaattataaagaagttatactagagataatctagtctagctctcagcctcccagctaggtgacttctctgtagtttggagaagaaggaatggaagaatgctccaagtcccttaatcccaatagtaaactaaggttaatttcttactttgctcccttcacttttgttgttcccatgtttagcattttaaggtatacatctgagtatataatgccaaaaccagaaagcagattaatgagaatgcttttgttttgtgtatataaatgggaacttttgtatgatttagcaggaagataatctctaattcactagaaggagtaagagagatgcaagtaatttaggagtgaggagtcaaggagcatactcgaagagctgtctccaatctgatttctgtttctatgatactagatctgacggagatccagtgtgacatgtcagatgtaaacttgaagtatgagaaactagggggagtacttcatgaacgccaggaaagccttcaggctatcctcaacagaatggaggaggttcacaaggaggcaaactctgtgctgcagtggctggaatcaaaagaggaagtcctgaaatccatggatgccatgtcatctccaaccaagacagaaacagtgaaagcccaagctgaatctaacaaggtactgtgtttacattagttgcctcccaacaccaagaggaagagacagctgtaccagtgttcctgcccaagcccaggtatctgagagagagacatgggcaacaatctaggctgtgatgggcagtatgtttgacattctaaatgattaatatgccttaactctcctagagaattttcttatgaaattagaaattgttataagttagattcagaaacaaaaccaggtatgtttgcagaaaaagaatagccctccccagaatcgttagctcattgagaatgggatctcattttctatatgatgctgtaagcaagacaaaccattcttatcaaagtatctttccaattcttagagggatctaaataacagtgattacagttcattcttaagattgacatgtgagactaggaaaaatgtcagaagatataagaccacagaaaatcctgtaggcaagtttcaccaaaacttttaatattcccattgagcgtagcatctcatctccttcaagatatgttatcatcatatcttggtatttttagtttattttgattaataattccttcttattgagttctactgatgtattatacataaaagaaactcagatcctgccatttagattttcattttaaaataaaaattgaagtagaagggttaagtatcttaacaccactaaacaagtcattgataggatcctagtagagtctataataactgcccagttttccaatcatttctaccacacacacaactttgtttcctgtccagaatctcatggcatgcatggcattctttctcctaggccttcctggctgagttggaacagaattctccaaaaattcaaaaagtaaaggaagccctggctggattactggtgacatatcccaactcacaggaagcagaaaattggaagaaaattcaggaagaactcagtaagttttcacaagagtgttacaaatttgctaagttacttgtcttcaaagcaagtagagaatttcagcacatcctataaaacaggaattatttttagttaatttttataaataagcaattaggatccagatagggccagagcatgagcctgaattgggaagaaaattagaaattccactcaaaaagtcagaagtttggctttcttgggcaagtcaaactggtaatctactgtgatcaagaaccaaagagaggccaggaacagtgcctcacacctgtaatctcagcactttgggaatctgagacaggaggattgcttgaagctaggggttcaaaccagtctgggcaacatagcaagatcctgtctctacaaaaagcaaggaaaaacaaattagccaggtgtggtggcatgagcctggagtcctagctactggggaggctgaggcgagacgattgcttgagcccaggagttcaaggct

SEQ ID NO: 53088 - DNA, 1495 bp, Homo sapiens
aagtaagtttttattaagcaattgttaagtgatactgcctcagcctaatagcctggtcctttagttttctggcttatagttttaaagtagttggcactatttggcacaatccaacatcagtttttgttttgacactgctttttcttttttggagacaaggtctcactctgttgcccaggctggagtgcagtggtgctgcctcagctcactgcaacctcggcctcctgggttcaagcaattctcgtgcctcagcctcccgagtagctgggactacaggtgttcaccagcacgccccactaatttttgtatttttagtagagacggggtttcgccacgttggccaggctagtcttgaactcctgacctcaagtgatcctcccacctcggcctcccaaagtgctgcgattacaggcatgagccactgtgcctggcctgacactgcttttagatagatctgtttttttcctgtctaaacatcttggtgtcatttctatttcagtttatgctaaaggaatttgaagcacgcaggcaacagcatgagcaactgaatgaggcagctcagggcatcctaacaggccctggagatgtctctctgtccaccagccaagtacagaaagaactccagagcatcaatcagaaatgggttgagctgactgacaaactcaactcccgttccagccaaattgaccaagctattgttaagagcacccagtaccaggaactgctccaggacttatcagagaaggtgagggcagttggacaacggctgagtgtccagtcagctatcagcacccaaccagaggctgtaaagcagcaattggaagagaccagtgaaattcgatctgacttggagcagttagaccacgaggttaaggaggctcagacactgtgcgatgaactctcagtgctcattggtgagcagtacctcaaggatgaactgaagaagcgtttggagacagttgccctgcctctccaaggtttagaagaccttgcaggtaagttggggtgaagaacatacttctgccattattagaggcaagcagaaagaaggaatgggttaggagtagtcccaagattctaggattcccttacgtaatttgtagactcagaatggtgttaaaccaattccttctcctagttgcagtgagaactgttgtagttgttacacagtgaacacttaaaaatgtgaaggtttacatagcatagtcctaaagataaaagctctaataaaatttcagtcagcaagtagagattcatccccatagatgtactgataaatggagttccacatatactctcattgatacccactttttttttttttttaatattatgcataccacacacacacggtctcgctctgtcacccaggctggagtacagtagtgcgatcatggctcactgcaccctcaatctcctgggctcaagtgaacctcccacctcagcctcccaagtagctgggactatagacacacgccaccatgcccagctgatt

SEQ ID NO: 53089 - DNA, 2466 bp, Homo sapiens
cccaaagtgctgggattacaggcgtgagccaccgcacccagtgattatttttatttttagtagagacgaggtcttgctttgttgcccaagctagtcttgaactcctgggctcaactgatcctcccacctcagcctccccaagtgctgggattacaggcatgagccactgcacccggctgcttctggacttcttatgataacttggtagaagaaaaattgtgccattaatttattatttatttttctggaactgtttatgactttcacgtttaccagctagaagtcaaagtttacttctgttacttagatcaccttacaaggttgatacgaggattaaataagatagtgtacatgaaggagcctaattatatgcctctttttggtaggccctcaagtaacattagttcccttcccccaagattagaccgtatactctcagcaaacattttaaatgccagggttcaggctttattgatttcaattttattttctcatttcagccgatcgcattaacagactccaggcagctcttgccagcacccagcagttccagcaaatgtttgatgagttgaggacctggttggatgataaacaaagccagcaagcaaaaaactgcccaatttctgcaaaattggagcggctacagtctcagctacaggagaatgaagagtttcagaaaagtcttaatcaacacagtggctcctatgaggtgattgtggctgaaggggaatctctacttctttctgtacctcctggagaagagaaaaggactctacaaaaccagttggttgagctcaaaaaccattgggaagagcttagtaaaaaaactgcagacagacaatccaggctcaaggattgtatgcagaaagctcagaaatatcagtggcatgtggaagaccttgtgccatggatagaagattgtaaagctaagatgtctgagttgcgagtcactctggatccagtgcagctagagtccagtctcctaagatcaaaggctatgctgaatgaggtggagaagcgccgctccctgctggaaatattgaatagtgctgctgacattctgatcaattcttcagaagcagatgaggatggaatccgggatgagaaggctgggatcaaccagaacatggatgctgttacagaagagctgcaggccaaaacagggtcactcgaagaaatgactcagaggctcagggagttccaggaaagctttaagaatattgaaaagaaggttgaaggagccaaacaccaacttgagatctttgatgctctgggttctcaagcctgtagcaacaagaacctggagaagctaagagctcaacaggaagtgctgcaggccctagagcctcaggtagactatctgaggaactttactcagggtctggtagaagatgccccagatggatctgatgcttctcaacttctccaccaagctgaggtcgcccagcaagagttcctcgaagttaagcaaagagtgaacagtggttgtgtgatgatggaaaacaagctggaggggattggccagtttcactgccgggtccgagagatgttctctcaattggcagacctggatgatgagctagatggcatgggtgctattggcagagacactgatagcctccagtcccaaatcgaggatgtccggctattccttaacaaaattcacgtcctcaaattagacatagaggcctctgaagcagagtgtcgacatatgctagaagaagaggggactctggatttgttaggtctcaaaagggagctagaagccctgaacaaacagtgtggcaaactgacagagagggggaaagctcgtcaggaacagctggaactgacactaggccgtgtagaggacttctacaggaaattgaaaggactcaatgacgcgaccacagcagcagaggaggcagaggccctccagtgggtagtggggaccgaagtggaaatcatcaaccaacaattagcagattttaaagtaagtctgaaccttgtttttctttttcttttacatgtatttatttgcttgtaacttggaaaccagtcaagtatacattttaacttctgtccctagttttattattgtcacttccatcaccatgaaagcacactgtctgaagactaaatagtctctcggacttctgagcaaactggtttgagcatttttctttttctttttcttcttcttcttcttttttttttttttttttttttttgagacagggtctctctctctcacccaggctggagtgcagtggtgcgatctcggctcactgcagactcgacctcataggctcaagcgatcctcccacttcagtctcccaaggagctgggaccacaggcgccaccatacccggctaattttttgtattttttgtagagacgaggtttcaccatgtctcccaggctggtctcaaactcctgagctcaggcaatccgcccacctcagcctaccaaagtgttgggattaca

SEQ ID NO: 53090 - DNA, 1047 bp, Homo sapiens
caggctggtctcgatctcctgacctcaagtgatccacccgccctagcctcccaaagtgctgggattacaggcattagtcaccgcactcagccccctgtttttcaaattgaggtatgaaaagccgtaagttaaacatagtctcatcttcctaaagggtttattttacatagattttaggggaggatattgatgtatatttgatatattatggaataaaacataaaattatcattaattgttaagataaaacatgacacttcaaataaatctcccatttatatagtaagcagcttaataatacatcccagactcctcaagagtacaagttctttgcctataggaaagaagtttgagaagtactgccttaattgcaaaaatactttaattctttgcctgagccaaaatctccattcctgagattgtgtgagtataaattaaagtaacaggagatgattacatgacccaaaagtgtggatttactgggttaggagcacatctgttggatcttggttctcactatattaacctgttgcccctagagttttccttgtggtaaatacgtaaaagtctctcactctgccactgtacatggaatagatttggaaaggatactttcagcactttgtttccatcactagagttaattattcctgcttacacagttaacactcctgccattaaagtaaaattgtgatctcagagaccctgcttgccagcgttatttatcttaaaaacatggatgcagaggtaatgttgacaccagctcagagccacgtagtcctagagacgtcacagttttgtagacaggatccaagtgcaaaaatgtggctgtttcagaagggcccctctaggagcttgggagaaattcagcactaaagtgggacattggctgaaggccttcttaccatgtttggagatagtacaattttgagcaagaggagtcatcgtatttgggtttcttgaggcacccagataaggaaagggtaggtagagaaaacgtaaacccgtgaagcagtgcattcctcttagaaacttcctttctagtgg

SEQ ID NO: 53091 - DNA, 1575 bp, Homo sapiens
aattactgtgcactttgatttctatattgaagttattgtttagggcctctatagtattatactggttggattggctgtgcatgtgtgtgtggagaggaggaggtaattttgggatttctgcccaccaccatgatattggttattatttcctactgctatcacttttcactgctgtcatttggtctgtgtagtctattcctcccttctaatcttcactgagctagaaaatgagataaacaggcctgttaaaattgcattagatatgagctaaaatgtacaaaagagtccacatgcaggcataaatagtgtttggatttgaggacaagtcatcttttccttttcatttaatccttggtttctagagacattctgacttttgatgttgctggaagatttcaaaaaattactgggcattactttatcttatttctatcctagtatgttgcctaatagtgctcagagttcaatagcacttagttgcttgtcatagccaaattcgtttcactgatttctaaaaataagccttccacctcagatactctggatgtgaaggctgggactggacactgatcggctgggctcttgcagagtgtgttcatcaacagtggactggtgttgacaaggcaagcctggaagaagagtgggagaagggagaagggtggtggagtgtcctgtgtgtagtccattgtcaagtcagtaggtagttaccataaaatgatcagtatccaccctcaagttggggatgcaaatcaaaagccctgttccacctgtccaccttgtagggaagtcaaaagctttggaaagagtttttgccttctcccagcaaaaatctttggtcaggaggggaggagcatattcttggctgaactcatgctgagctcatcggaagtgaaaacaatgagaggagaaaaattctgtgtgtcagttccatagtccccaggaggccgcataaagggaaggtctttttggacccattctgaggactgagtcattttcatgatttgagtgtggagttcctgggttaatgtattatagtccagccatagattaatctttccttactccagcagcagaccagatttataaagtatgactctgttttcagattcaaattatttttaataaggtaaaaacaaagatgaagataaatatttttaaaaacagcattagctgtaagttttcagctctttttttaatggaatcatacttttagcacagaatctgcacaagagaagaggatatgaatctgggagacggaaactctgctttaacccagctaactccatgggagctagaatagacagatgagttaggcctgtgaagaaccccccagtcttacttgggactgtacagtcttgctgatagatccatggatctgcagtctgtggggaaaattatttcttccttaaatgaatgtggaatactaaaatacattattcctaggaaaggctttccctcagttgcttctgaatgattagtaggtcctcactggcagaccagattctatcacatgggagtggaagagagttcctttccactcaaaccaggcagagatctcaggcttcctgagttagg

SEQ ID NO: 53092 - DNA, 1022 bp, Homo sapiens
agaattttctctatgcctgaccagtccccaccccacactgccacaaggctcctgctgtggaaatcaatcagctgtgtatctcaggctgcttcctgtagggtgtgttatggaatggcatcagcccttgcaccagctgggagtactgatctcagtgtgattttatcagactatgtttcttttgagccttactgtttggaacaaaggaccctctgttaagaatgcagagagctggtgtgattggatagctagcatatacatacatggttcctatgggaaaaaaacagacataaattatgctatagccctctaaaattttcatctccaaaatgatttcctgaccttctgtctgtattcacagttctttctgtaagtgcttatccttcccccaaagcaattcgaaggccatctgatctgataaatggttgtatccttcagaactagcctatttctgtgtctccagtcttggatgtatttgatccccactatctttccagtgttatttcctatatagaccatacactacatccagttaccccagacactccttatacattttaggtatttgatttctgaagtcatagctcaagtccacttctttataaagctttttttttttttttttttttgagatggattctggctctgtcacccaggctggagtgcagtggtgcgatctcggctcactgcaatttctgactcccaggttcaagcgattctcttgcctcagcctcccaagtatctgggattacaggcacgcaccatcttgcctggctaatttttttgtatttttagtagagacagggtttcgccacgttggccaggctggtctcgaactcctgacctcaggtgatccacccacctcggcctcccaaagtgctgggattataggcgtgagccaccatgcccggccttataaaggcttttgatctccccagctcactactcctgatctcttaatcatttacaatgtataactcacttggcttttatcacataccacctaattttgacattttctgatt

SEQ ID NO: 53093 - DNA, 1116 bp, Homo sapiens
taattcatttatgcatttctatcagaatcctacaaccagcaggtttttctgagaccattttggccttggcttgtatgctctacaaattcatattattttcaaatcattaaccagaattaaccagaagacattaccagctcagtgacttccccagccactcagttgcccattagatcagctctaatgatctcagggattttggcctaattagcttttatcatagaccatgttatcttcctctgttaccgtacaatggcaactactaagtcagcatctttaggaaagacatctcttaatattaatcaatctttaattaaaacattgagggctgagccaaaaaatatcggcagagtttcagaagcaagcagcttaaaatacagatataattcatctgtctgccaatctcataccagattgagatgttttacagaaagtctttaattctttacagtttcagcaaatatgtgtttttaatgtttttaacatttggtcatgtgtatatatgagtcaaggaaagaagataattcaaagaaattatatgtgccttagattttctccatcttgaattaattgtatttatcaagtgaaccatttaatatctctgtcatcttgcaattcattcccaaaggataagctctggttttggtctaattctttaaattcatacctaagctgtttgtttctttgtcatcaatgataagaattttccttagtaacgaaatgaaagagatggtttttagaaatctcttctctctgtattatttattctgccttcttttctaatattgaggagcaggggctggacgcagtggctcacgcccgtaatcccagcactttgggaggccaaggcaggcagatcacttgaggtcaggagttcaaaactagcctggccaacatggtaaaaccccgtctctactaaaaatacaaaaattagccaggcttggtggtgggtgcctataattccagctacataggaggctgaggcaggagaatcgcttgaacctgggaggtagaggttgcagtgagccaagatcgcaccattgcactccacctgggtgacagagtgagactgtgtctcaaaaaagagggggtgattcaacccagagacctctttca

SEQ ID NO: 53094 - DNA, 3186 bp, Homo sapiens
caggctagagtgcaatgacacaattacagctcattgtaaccttgaactcctgggctgaacgattttctcagctcaacctcccaagtagctaggactacagatgcacatgcctggccaattttttaactttttgtagagacgagtgtcttgcaatgttgcttcggctagtcttgaactcctggcctcaagggatacccctgcctcagcttctcaaagtattggaattacaggtgtgagccattgagcccagccagaatttgcttctttagagtcctgccttcagctctctacttagaaatatttgtctttgccatctctgtatatctgaaatcctaatgagtaaatgtgattccctccataaagccttctctgatacctcctgccttccttcttcccacccttctgtcaggtcttttctaacttgcaaagccccatgattttgtcatcaccatggttttggtgaccattagtctaaaaagagggattaatacactgtcttttggaaagtctacaggcaggaaagggcttacaggggtcatgagagttcctgcagagtgtgtggaaagttttctcatgggttcacgagtacatgagagctcaaatagcatcaaaatccttagtatcccacttaaagcaaacttcgtgtcatgctatgttgctttatgagccactccgtagccatgtttataataataaaagtaccaaaggatggcagtgactgatgcccaacaggtacagactaatactgtggagtttctacttgctactaaataatgcttgtaaaatctaaagatcctaagatgaaaggcattgtgtagatttaaaatgagcaagatccaaccagtcctctgtatcctcttctactcagaattagtcttccaagagagagcacccatcaaggtgggtgataaggcatcatagaatctagggaagtgtgaatctggggtctccagattgtcccagagggctggcattttaggtctggagcagacaagggcaggatgccaggtccaaaacttggaaagggagctatgttagggtgtgaggagactccacccggctgtctttcattaggaagactgcaggaaggagctggaagggccaggatttttctttcttctaagttcactgaaggaaaatctaacaccaaattctgtacttgggaatttcaaaatgagtagagaattctttgaactctgtaatcaattaaccggaaactcatttgaaatttggcttcagtgcatatgtttgtggttacaggggtgggggaaatatctgaagagggtctctggagctccctgtatttctcttttaaaaagtttatacacagcatgtgaaatgaacagatgcttttttttttttgtagctatcagggcaacaagaggtggaaagctgtatcaggtatttatttcagtccctgagatggctattggcagagtttcacatacctaaactaaggagaaactcatgaacagataaaaattaagacatggaggagaacttgtgcttcctctcttgatttatttctaaacacatactgatgattttttaaaaagagcaaagcactcagaaagtattctttggctttgggttctggggtttttttggaggtgcggtgggaggattagattactatatgtaatttctctttaggttgtatttaaatttgttttcctaacaccctaattagagagagtgtgactgcagataataagtaattcgaatctgaatttcatagtcgtaggaatgctccatttatttatttatatggatcactgatgagagtagtaagaatattggtagatagacatgggagggaattatttaagaaaagtctggattggttgatacctgacttggtgaggaaacagtaaaggaatttctgttcatgaagtttgtgattccacatcaagataattctttatggctgggaacagtagctacgcctgtaatcccagcactttgggaggctgaggtgagtggatcacctgaggtcaggtcaccagcctggccaacaaggggtgaaacccatctctactaaaaatacaaaaaattaactgggtgcggtggcgcatgcctgtaatcccagctattggggaggctgaggcaggagaatcgcttgaacccaggaggcaaagattgcagtgagccaagattgcgccactgcactccagtctaggcgacagagtgagacagagtctcactcaaaaaaaaaaaaaaaaaaaacattctttataatagaataaccacccatgtttcatccagagccagaattcctcagattcttccaaccagaggggccctggcatgctaaacagtctgttatgatatctgaacacttaagtgaatgtatttggccagggatatttgctagtaaaattgatctttccttccctgagtttttccagttgtgctgaataattaaaggaaaattaaaacctggattccctaaactgttaagtatcagatctgtaagctgtcagtccttaggattacagtgtatcagagttagaaaggactttaaaattcatctgaacaaactgcagaagatttgtaaatctgttttcccaaatctctgccaagtgattgcttgaatttctgctcaaacacctccagggtcaggaaagtcaccagtttaggggacactctattctttgaatagctgtgagaagctctttgttggttttaaatctcacatcttagtgtgccagcttaaggagatacccagaacaagtttccttcctcccacgtctcagcccttcagatacttcatgctaattacatctcctagaactttctctaggtcagacattattgggtcttgcactgtttgttcttcataggacagggtttctagtgtcttggcagtatacgaccaagaggacacaggattctggggcagtgcctttaaaagttttagaactaaaaaatattaaaactagaaagggtgtcaagacacaacctagtcggcctccccacccctttcagtttacagatgggcagagtcttttggatttgagtgggtagaattgatcagcagccgttgttgaagtgagaaatgaagtgtaaagcattttaccagagaaaggtcttttagttgcctaattccgattacaggcttcagcgcacttctcatttttgccaaggaccagtctgattccctaagtaagcctaaggctcagctca

SEQ ID NO: 53095 - DNA, 3803 bp, Homo sapiens
ccccgcccgaccctagcggagccttttgttcccagccagaagtttgcatgccgggaccgtgacagctgcgggcggggaggacggcggggccgcggggccagcggcgtggtggagaatagaggcggctgcttgtcatgcagcccacggcgtggcggctgcgggccggggactggcggcggcgggcgaggcggcgcccacagcactcgggactcagctgccggagggacaaactaacttcctgagcgcgggacctgaggctggcgcggccgggagccacctgcagcctgcggtgaggcgaccctggccctcggggcgcgcggcatggcgcggggaagcgggccgtgctgagcgagcccctccgacagacccgcggccgctgctgctgcccgcccgcccgcctgcctttccgaaggcctggcgcggggctccgctcgccttgttttgcagctacagcgcagggttggcctgggagccacaacaatgccatgatgttttggagacaggaagccccaagctggccccgaatgaaggacttcctgtgtttaaagttgcaggaatatccgccgaccagcccagttcaaatgcaaacaccccagctagggaggacgaatggctaattcagaccagctggactctccagggctggaactgaggataaaatgaaaggaattcttaggagcttgggccatacttgaagactagagaggctgtgccattgttattaaaggatacaatcggcataaatttgctgctcccaactctgcttcggtgagaagtgagtggaactagatatcgaaaaagactcgtcaatatcagatgatttttgttgactgtatttgaaagagcagtgctcttaaaaaaaattaaaccataagccatacaaggaattattttaaattatatcgtctgtcaaccatgaggctgctagcctgtgaggaaaaagctgtttgtcttagagcttctcccagaatggtttcaaaacggaacttccaggcctttctggagggcagatgcaattggtggtttggggtatgaacagctaaaaggatttataacttatgtagaatgcatttggggggaacctgtgaaaaatacttttgaaagattgatggttcatcttgattgaaaaaggatgggtaagccactcagcagaccagactgtttaaggcggaaccccagctgcctggggaaaggagaggaggaggatggctacatagaggactgctatgttccacaacggtctatatatgatacgatgaggataaatgagcaaattgaccaggggtcaaagcttaaccagacttcaaaaagcaccatggaaaagatggaaggaagtactatatccagcaatggtacattaggagcagcatctaatgtttttgaatctagagcaccagaaggtaagaagctggatgagaggataatatttgatgcactaaagctaagcagtgatgtgcagaagtcagcacctgtgccacccagaaggcggccaaatgcagaacgcaaagacaatgttaacaggagatcgtggaagtccttcatgccacccaacttcccagaatttgcagagaggatagaagcttctctcagtgaggtttcagaagctggtgcttcaaatccttccttgcaagagaagaaggagtccagttctgcattaacagaaagttctggtcatttggaccacagggaacctcagtcagagtcagtaactctggaacatgtgtccaaatccataggtattccagaggtgcaagattttaaaaacttaagtggagactgccaggactttagatttcagcagcacagtgcaaaccctcctcatgaattccagcctgtagaatcagaagctgtagcaacaagtggtaacacagatgtaatgcaggaatccagattctcaagtgcaacctggccgagggccacaaaaagtttagctaagggaggcttcagtgagaagcagcacccccttggggacacagcctgcactgtggaaatgccacctctctccccttgcctgagtgaagagctgttagatccagaattgcatgttctcataacccccagcctgagagagaaaacagagtctgagctaaagtttgaggaggatgagcgatggattatgatggaggctgagggagagtgggaggaagagaaactgtcagacagggaaaagacttttctgatggcagatgagaagaacagcctggcagatatttttgaagaaagagaacaagcaaacacagcagtggtggaggatggatccgattgcttagctgctgtcttgaggacttttggccacctatctcttggtcagatttgttgccctgatgacccacagccagccaaggaccagttggctactgttcccaaggatatacccctggattgcgattgtgttcttacaggtgaggatattctcggtgaggtggcaaacagaactgctcaggggttagagggacttgtttcagattcagcatgtactgtgggtactattgatgcagaacagctctctgacacagactcagtgcagatgtttcttgaacttgaaaaggagtgtttatgtgaagaaggagtaactcctctagttgagctacagaatcaaatctcttctgaagggctggctgcatcccaggatgcagaaaatttactcgtaattagtcatttttcaggggctgccttagaaaaggaacagcatttaggccttttacatgtaagggcaaaagattatgatactagattggattgtggatattttaataccctggattcttctcaggtgcctaatgctgtggaacttattgcccacgttgatatcatgagagacacttccactgttagcaaggaggaatgtgaaaaagtgccttttagccccaggactgcagaatttaagtccagacagccagctgatctggattcactggaaaagctggacccaggaggactgctgaactctgatcacagggtttctcatgaagaaaaattatcaggcttcattgcttctgagctggccaaagacaatggcagtttgtcccagggagactgcagtcaaactgaggggaatggtgaggagtgcattgagagggtcaccttcagttttgcttttaatcatgaactaacagatgttacctcaggacctgaagtagaggtgttatatgaatcaaatttactaacagatgaaattcatttggaaagtgggaatgtaactgttaatcaagaaaataacagtctgacatcaatgggaaatgtggtcacttgtgaattgtctgtggagaaagtttgtgatgaggatggtgaggcaaaagagctggattatcaagccacacttttggaggatcaagctccagcacatttccacagaaacttcccagagcaggtcttccaggatctccagaggaagtccccagagtcagagattctgagtctgcacctgctggttgaagaactgagacttaatccagatggagtggaaactgtgaatgatacaaagcctgagctgaatgtggcatcatcagagggaggggagatggaaaggagagattcagattcattcctaaatatttttccagagaaacaagttaccaaggctggtaatactgaaccagttttagaggaatggatacccgtcctccagagaccttcccggactgctgcagtacccactgtcaaagatgccctagatgctgcactgcccagcccagaggagggtacctcaattgctgcagtgcctgccccagagggaactgctgtagttgctgctttagtgccctttccacatgaggacatcctagttgcttcaatagtctcct

SEQ ID NO: 53096 - DNA, 1225 bp, Homo sapiens
atttttagtagagacagggtttcactgtgttggccaggctggtctcgaactcctgacctcaggtgatccgcctgcctcggcgtcccaaagtgctgggattacaggcatgagccaccacacccggcctgagtaaatattatgagtacctactctgtgccaggtactaggctcctgcagtaaatagaattgacatggtccttggccttgtggaacttatactgagtggaggaggcagatattaagaaaaccacacataaataaatataaaataaatacatagttagaaattttggcaaattctttgaataaaatgatgtcaatggatttgaagacaatagggtggattgaagatatattttggaggtaaaatcaacaagatctgattgtggcttctgtgttggggctgagggagttatcaagggtgacttttaggttctggtttgtacagtggagtggatagtataaattattgatttaaggaagaggtaagggaaagtgggagacactgtttcatttttgaactgttaggcttgggatgcctgtggttcatttttttgcatggagatattaaaaaagcagttggatacgtagctttgaaactcagagagacaaattgagagtcataagcatttattgtggttagtatttaaacccacagaaattgatggaattgcctaggaagaatatagaaagagaagagagtccaggactgacgtcgttctctcactcccacccccaaagatcatttagagatctagaagaggagaaagaaaacaaaggacaacagaaaagaatcagtcaggataaaactggaaaaatgcaataacaaggctggatgccgtggctcatgcctgtaatcctagcactttggaaggctcaggcaggcagatcacttgaggtcaggagttcaagaccagcctggccaacatggtgaaaccctgtctctaccaaaaaatacaaaattagctgggtgtggtggcgcatgcctgtagtccccgttacttgagagactgaggtgagagaatcacttgaacctgggaggcagaggttgcagtgagctgagattatgtcactgcactccagcctgggcaacagtgtgagaccctgtctcaaaaaaaaaaaaatgcagtaacaaagataaaagtgttttaaggagttctttgggaaattttctattttgtgtcctagttgcatcttacaaccttgcaacaatttttactagtgt

SEQ ID NO: 53097 - DNA, 1054 bp, Homo sapiens
aggctggtctcaaactcctgagctctggcaatctgtctgccttggcctcccaaagtgccaggattacaggcatgagccacttgcctagcctattttacttttctgtgtcatttaaagtgctgtccagtaggacttgctgccaagatggatttgttctctatcaatagtccagtagagtaaccactggccatatgtggctttgactatgtgaaacgtggctagtgggtctgaggaactggattttaaatttaatttaaatgtcaatagctatatgtagctgctggctgtcatgttggaaagcacagaaagaatttaaatgtcagttgtagagtgagataggatttggttattgagtaaaagagggccctgtaatgtggacttgacatcttccctccataccttggctttctgccttctttgccttttcattccttcaccttcaccaccaccattttattgtaccaaaagcagctttaaacttgggatgtttttcctgcctctatctgatttttcttcagcagaaacatctttaatgctacaaaatggaattatagcagttgttttttctgggaaccatgttgttggagaaatagtcattttaactgaactgctttgtaatgttgcctaagaaaatatggtataatcaaattatagtaaaaaaatgaagtgcactcataattacttttataaccttcctttttcagtgttccctggggctttccctccctggtaatcttagccagccatagaccattctttctagaatcagtttcctaatcctagtgtggtctgtagtctcatattgaccaaaattggtcttactcaaacttatcattttcttttatatttatttttgtcctcttccattttctgtcatcctctggccttaattgactcacctggctcatggaagaaaaaggaagggaaataaatccaggctagtgaaatatagctggttctatccctctgataactgagagaaacccaatttttttttttttttttttgagatggagtcttgctctgttgcccaggctggagtgcagtggctcag

SEQ ID NO: 53098 - DNA, 1575 bp, Homo sapiens
cctgtctccactaaaaatgcaaaaaaattagctgggcatggtggcgggcgtctgtagtcccagctgctcagaagactgaggcaggagaatggcatgaacccgagaggcggagcttgcagtgagccgagatcacgccactgcactccagcctgggcgacagagcgagactctgtctccaaaaaaaacaaaaaaaaattaagcaacagattttaaaaaaaagaacaaaggaaagagtcattgggttaaagacctaagtagtgtcataactctctgtaattacatgtccataggagaatgtattgaaatacaaaaccacatgttttcttgatgcttcacgtgcaaatgcttgttctttctttttattcctggtcgtctttcattaagtcataaatgccccaagaataaccagtctctgcgtggtatagagagtctaatagcctttgtattaaatcttctttggcttgtaattatctagatgtttcagaaagaacaagtggatcctcttcagatgaaattgcagcaggtgaatggacttggccagggattaattcagagtgcaggaaaagactgtgatgtacagggtttagaacatgacatggaagagatcaatgctcgatggaatacattgaataaaaaggtgagtgacaatggggtagcaagtgtactggaaacggaaggcatagaaaagagacatctgaatctaaggtttcccgaaacctgaatggaaataaaaatttagcagttgcaatctataattactaaaagaggtcagtagtaatttgaaaactactttctccgttctcataatgaacctacatgttcatgatacaggtcgcacaaagaattgcacagctacaggaagctttgttgcattgtgggaagtttcaagatgccttggagccattgctcagctggttggcagataccgaggagctcatagccaatcagaaacctccatctgctgagtataaagtggtgaaagcacagatccaagaacagaaggtaagtgagaatgttgggacagtgaactgtaacagccgtagggagtagtagacaacacatttgcttatagtttaagaagcagttcaggagttttagtagaatcctaaactactttgtgtcgtcctgaaaagaaaggtggaaattgattttcattatcttacttaaatctggtttactgtggcatatattagactgaataattttacctgttcatgtatcctatttcagtgttcatctacaattttgtgttaagaggtttttggtgttttcagggtcagcaatattctaaatagtgttgtatatcatgtacaaagttttatctatattttttgttggtttaatttctattttagtgcagttttttctttttaaaaaaaatttatcccaaaggaaattttatttttttctcagctttattggtatatagttgacaaataaaaattgtatatgtttggctgggtgtggtggttcacgcctgtaatcccagcactttgggaggccgaggcaggcggatcacaaggtcaggagatcgagaccatcctggctaacacggtgaaaccccatctctactaa

SEQ ID NO: 53099 - DNA, 1545 bp, Homo sapiens
gggaggcggagcttgcagtgagccgagatcgagccagtgcactccagcctgggagacagagcgagactctgtctcaaaaaaaaaaaaaaaaaatgtttataatatacaatgtgatggtttgatatacatatacgttgtgaaatgtttaccgtagtcaagataattaacatattcatcacttcaaatgttaaccattttttacggcacttttctcttggttcaaaggaagttccctgttagtcacataatgacagtcactgctccatttaaaaatttaagtgtgtgaaaagtatacgagtggtgagaactgtgctatatctcctgtttttgccccaaggatgaaaaaaacttcttttactcaatgaagcttaggatttggcgggttggtttcttttgttttttttctttcttcctagttcagatttcaaaatgatcctgtgttacagcttttcattctctttataatagttgctccagcggctcctagatgatcgaaaggccacagtagacatgcttcaagcagaaggaggcagaatagcccagtcagcagagctggctgatagagagaaaatcactggacagctggagagtcttgaaagtagatggactgaactactcagtaaggcagcagccaggtaagatcaaaggaattttgaggagtgggtcagaggtttgttttgttcttcttcgacttattatcactataagttcttggatgattcatatagatttttggaaggtgtttaatggcttttatttgaaatgggataagattttagagatgatcctcataatcagaatcacactcaggaaatggtctccagcatcttcataaatttccgagagctggaaaactcattgctctgtgtggttgttctgctgtagtataatcatagttccaaatgacagacacagactcctacagtccagccgagttattttctgagtttttcaaacagatttccccctcttatatttataaataatgcttttgatacttggaattgaaatgtgtcatatttcttttctattagcttatagtaatattagatttttttgcctttaggagctagtctgtggttctgttaaatatctgggaattcaagagatgcatgaacttacctcaataaatggtcaaaaagacaggcaacaaatcctccttcaaggaaatattccctttctcttttcatagctataagttatcctgtgacttgagcttaataagtcacatagatgtctttacttttatacagtcctcagttttaaaattaaataccagctaatgagaaatcaataagagagctgatcatttgttattgtatcctttacatttcctaggtagcctatggcagtcttcaaataattccctcttcagtctttttatgtccacctgcccatgacttggcttattccttacctgagttgcaaagtatggcttgcctatgttagtggaagaaacaaaatggaaagaatttaacttacttgtatttccagatttgtactgcttattttcttttctctctgtccatttccagtaatggtacc

SEQ ID NO: 53100 - DNA, 5296 bp, Homo sapiens
aaaatatgtttttctttatattcaaacataattgaatttccagtaatcaaaatgccaactttttttatttaaaccacttcttattaaaataactttgtcagggcataactagcataggacctggcgtaaattaggtcttcagtaaaggtttgctgaacttaagtgcatcatatactcccaggcctcttcaaatgccatatcttagtctgtttttagtaattcaaagacaacattatgacctttcattattaatctgcatgctaatacagttctgtggttgttttcttgtctgttccttgtcaggctatctccaatatccagacttcctcctcactttgtaatttgctgcttttattttatagagtaaaacaaaccacaggtactttggaaagtacatctcttagcacttctctggtctcagtgacagtcatgtatcccaggaaaagccaagcttagttatggatcttatattaaataagagttaagattccaagtgagctataaagtctgtagttttttttgtttggtttttttttggggggggtgctttttgtgttggcaaattcagccagcgtgaggttttttgtttgtttcttttttgtttttttgccttaaatctggattcaaagttatgttctggggcttgaaattaccagaagcctgactggattttggggagttggggagggagttctagttcataggcaatatacagtctttactcttcagatatcttcactcataaatgaaggtagtagtgacagagagaatgaaaacagacaactttttgcctcctttaaaccttattttggtcagatgttcaggtgatatatatactacattctgttttgatttgtgttaaataaggagaacattagaagatttgattctactgttgctactcaccaggtgattggacaaatctttctttaagccttctgactgaactttctcttttataatagggggataattattcttttataatgggggataattattctgtccaccttacaaggttatgacagaatgagaataaggttaatggtgtgaaatcctttaaaacatcgaaatgctacataacgtgtgttctgtttactattggtatttaaactatacctggaaaagactattcttttactgagtatagtactattaccagttttaatgtgacttttcttcctgagcagcttgttctatatatttgtgtaggcaaaaacagctggaagacatcctggttctggccaaacagttccatgagacagctgagcctatttctgacttcttatctgtcacagagaaaaagcttgctaactcagaacctgttggcactcagactgccaaaatacagcagcagatcattcggcacaaggtagggagtggttacagtaaatgaaaatagaaaactggaattagaaatcctagaaatgagtaaactgcctgcagcattctagaggatgtgtgttttgtgggtttaacttaaaatatggtcagattattaattggaaaagtcacattcttgaaatacaaatagaaattgactgataggctaccaccggaataaacagcttttgttcccaatttttatattatttttgcctttcagtcggtgagttttttaattgtttaatttgttgtatcatttgttattcatcattttgtgtttacttttcatttattttgtttctgttattcattttttccatctggatttccaggctctggaagaagacatagaaaaccatgcaacagatgtgcaccaggcagtcaaaattgggcagtccctctcctccctgacatctcctgcagaacagggtgtgctgtcagaaaagatagactcattgcaggcccgatacagtgaaattcaagaccgctgttgtcggaaggcagccctacttgaccaagctctgtctaatgctaggctgtttggggaggatgaggtggaggtgctcaactggctggctgaggttgaggacaagctcagttcagtgttcgtaaaggatttcaaacaggatgtcctgcacaggcagcatgctgaccacctggtattcatgtttccatttttattggttatgttattctgttattttgttattttgattcatgtttctcttcatttatttttttttcttcattacaaacacttcaactttattttatacacaagtgcatagttagtggacttgatgctgactgctaatctgtttttggatgagtccatggaaatacttatatttaacaagttaaatcagtaattctagaagatggtacagggtatatagtcaggggccatctgaactccaactcatgatttacattattaggtgatgggtcactaagattctatttgagcagttttatgaaagataatgtgctttaacaaaaccagatctatctgtgtagtgcccaggatttgatcatacagttaaaaaacttttaggatatttctggatttgttcaaattccggggattctgtgtcatcttaatagaagagtttgcctttttcatttcatttttatgaaatctgtttgggagagtaaaaataggtaatttttctaatagtctgattcttttgcttcgtcaactttaaatatgaagagagtttttaaccaggattctgatttaagtcagtctgttcttactgaatttcttctcttgaactttctgtttattccttattttggacacagtagacaattttgctcaatttcacttctgcctttcttgggttcaggtttggtaccaataattggtaaagctgatgtaattctaagtttttctcatccagcgcataggaaagcttgcctataggtatctgatttaattattttgaatagtcaatgggctaaccaaggagaagatgaggggatcaaatatctgatgtttaaattaaactagtattcatctctttactttaaatttgatctcttaaaggtctcgcattttgtttcatttgtagtgccacagtttcaggattaatggtattctttcctttcaggctttaaatgaagaaattgttaatagaaagaagaatgtagatcaagctattaaaaatggtcaggctcttctaaaacaaaccacaggtactttgaaaagtgtgtctcttagcacccctatggtctcaaagacaattatgtacccaaggaaaggagttccctgccttagcctcttctttatgtatatatgagaagcttagtattcactgattgtattccctactgtgctccagaaggttgtttcctgctaaatcttttgaaaactaagttatctcacatctggttatagatgatgatttctcctctccttcagtatcttgaatgccaacatgcactgaaaggtgctggaaacatctagaaacacttgacgctgaactcagattttaataattcagaagtggcttcttttatccagtggaaagtttattttatttcccatttgcccttagtatgggataggtgaaatcattaccacagagagagagagagcgtctatgaaattaaagctctgatttgaagaaaggggatcagagactcctcattcctaggtctcttaaatatgagtaattgtgtgctatcttccataggtgaggaggtgttacttatccaggaaaaactagatggtataaagactcgttacgcagacatcacagttactagctccaaggccctcagaactttagagcaagcccggcagctggccaccaagttccagtctacttatgaggaactgaccgggtggctgagggaggtggaggaggagctggcaaccagtggaggacagtctcccacaggggaacagataccccagtttcagcagagacagaaggtgagctgttactttaccataaaaagaaaaaaaggcttcctctttgtcagaatccttaagttttatcaacctttaccttaaatataaactaaaaatatgtgccccctttcttgtttactcatggacagtaagatttgacataaagacatatacgttacacatatgttatgaagaagaaagaagttgaatcaagtttactttgtaacattttaacctctattatttattctctaaagagtgcttcatggttttatttgatttctctgcaggatctagtatagttctagatgcatagaaatattgtataggtacttgttaggttaaatactgagcctttggttaaagcattatttatcatttctgttgaagtaaggagatgaaagaagtattagttgttttacccagagacaatgtggctcaaaaagtcttacaggcagttctaagcaagcaacaatgaagtctaaagtcaggcttcagaatgattgaaaaatctgagatgagaaaaaaataactgaaggaaggaggtcagagtcctgctgggatgtgtggtagagatagcaatttccacccagcacagttgctgatgtgctttatttagcaaggtatggcctgaaaactcttttccctccttaggaattaaagaaggaggtcatggagcacaggctggtgttggacacagtgaatgaggtgagccgtgctctcttagagctggtgccctggagagccagagaagggctggataaacttgtgtccgatgctaacgagcagtacaaactagtcagtgacactattggacaaagggtggatgaaattgatgctgctattcagagatcacaacaggtaatgcttataatacctctgcattaatattttagacagtattgatgtgtgagatacagtactatgacccacataaatacagactcagaaataagaatgggctcaagctaaatctggtggaataaatatgtttcattgatgggaaatgattgggtagaagtttgtgaggatggatccagaatttgaccaaaatacttgacccctttgagtagagaagtacttggagaagagtctacatgaggccttttcttagctaatgccctgctaagaaggctgatggtgatgggagtagataatatctagattcaaaaggtccaaatgcaccacaatcttagtttgacataattaactctcttagcattagatggaagagggggaaggaattactatcaaatatgcaaaccaaaatagcagagctatctaaaatagaaccttctcagtaaacacaggtgtcatatttcccttgatcttttttccttcctactttctggaaaaaaatcatttgttcttttgtgtagctggatacacacctcttaatgtgccgtagtacaaaaaataagttaatataactccttaggatcatagtgatgaacatatgctttttgaatcacacagaaatttgctctgagt

SEQ ID NO: 53101 - DNA, 1028 bp, Homo sapiens
tttaaaaatgtgttgttcttttggggtcttatgctgcttcagctaagcgggcacttccgagttaacttgactcatccgtctactgccatattaggtttatatttaaacatctgactaaacctactactgttccatgtctgggtaggaaagagcaatggcaggaagagtgtagtctcataaaaacactgattagaggcatctttcttttgaaggggattgatatctgttatttctagctgtagaaactgagttctgtaacttactttaaagaaattgaaatgtggtcagttttaacttgtttgcatcttgatttgtgattttatgaaattcttcccagttttgactctactttgtgagatataaactgtattactgaaaatccaggccttgctttgttgaataaattgcagttatgtggagacttggctgtatataatttgtttatttttctttaatacgtctattagtatgagcaagctgccgatgcagaactagcttgggttgctgaaacaaaacggaaactgatggctctgggtccaattcgcctggaacaggaccagaccacagctcagcttcaggtacagaaggtacgtgcccactctttcctgagctaatagaatcatcagtaacttagagtgactaggagagtttctgactatcccatgtcaagtggaataatttagtggcatgatggtaaatagaaattaattttctatgtatttggttgagatgaggaagaatttttttttttgctttgtgagaaaggaaaaataggcccattaatccataattagcaatttccttgatagaaatttttgtaagctactaaaaagataagctagagaagatgttggataggcaaagtgtcaaactgtataagaacaatttttgatgtggctttttcatagattttgtcttaacctttagtaataacaggaaaagggtctttttacttcttaactacagtttacttttcaaaggctttctccattgacattattcgacacaaagattcaatggatgaactc

SEQ ID NO: 53102 - DNA, 4533 bp, Homo sapiens
tggcagtgggaacctgtaatcccagctacttgggaagctgaggcaggagaatcccttgaacccaggaggcggaggttacagtgagctgagatcgcgccagtgcactccagcctaggtgacagagtgagactctgtctcaaaaacatatataataataataatgctatatctaaggttgtgtatcattactgaaaggttaattttgctgtgtttttcttatactattttactgctttttaaacttttatcttttaaaaattatagaaataaaatatatgtatgataggaaaattagaaaatttcagataagtatgaagaagaaaataaaaatcacttgtaatctttactgatattttaaaataatttagttatgtattcttttagactttttaatgtatatatacctactttttttcttaagagtttataatagtaatacttatcctttttttttttttttttgctcacataggaaaagacagagtctctaatacagcaatatgaagccattagcctactcaattcagagcgttatgcccgcctagagcgggcccaggtcttagtaaaccagttttgggaaacttatgaagagctcagcccctggattgaggaaactcgggcactaatagcacagttaccctctccagccattgatcatgagcagctcaggcagcaacaagaggaaatgagggtaaggagcatgccaagtttcattttattgttctaaaatggtctctataatttatttaaaaacaacatttgttagtgtctataggtgcaagttctgtgttacgaagttaattcttaatcagttagaattcctttcataatacataatctgaattatttccttggttgtttaatatcaattgattaaacactaagattatagagatgtcgagaaccttagaatgacagaactaaagaaagaactcactaaaaatcaatggaatttaaaatatttccggggataatagggtgttgttacactcaaggtatggttggacagtactttctacttagttaggcaccaactggagtgaaagccatgaggtaatgtcaaaaaacatttgctctgtatagttaatgacacttcaaaatgtttatttctggtttatggcttgtgcttattgctattcttataagtggaagtgtataaactggacgtagtcagcagtaaagtcaaggagtggttggattgccaaaaatgttgctattcatagcttatccagcttggtatctcagtctggggaggtagacaattattaaaccatgtagagtaaaatagagtacatagaagtacttatgattacagaagagtgtggagtagacttgtatgacacagctggtaggggaagagaagagaggatgtttccaggaaggctgctagggtgatgagacatcagaactgactttcaaaaattaaattgggtaatgtcagaacctaagacttaggtgtttttctgttcccacacaaatggtgagatgctgggccttgctggtttttaacaattttgtttgttcctcttaaagttgatattagctctgatcaaagtatctaaatacataaactggtataaaagtactcattatggtttaattctttttttacctagcaattaagggaatctattgctgaacacaaacctcatattgacaaactactaaagataggcccacaactaaaggaattaaaccctgaggaaggggaaatggtggaagaaaaataccagaaagcagaaaacatgtatgcccaaataaaggaggaggtgcgccagcgagccctggctctggatgaagccgtgtcccagtccacacaggtatgtgtgtgtctgacactcataaccttgaattgtctactgttctaaacaagaggtctctgtatcaggtatgtctctgtgctcaggaatgtccagagcagcatgttaatacgtgatcggtagatagaacagaaagcttagcctatcttcatttttattccaaggaacattggcatactgacattctaaggagagtgaaatgagtcttggctggtatatattgtctgttgatggtttctctgaaaactttatgttgtgatgatcctttagcagatgattttggataaatttaccttgcagattcaaaagcagtgactgcctcaaaaaagtacttattgaacctgttacttttttgctttagagcaacagcacattagttttcttaagcaaccagctaactcatagtttaagatgcttgagtaaggagtagtaagagccaaagagaagcataaaccagcagagggatttaaagcatgtaactacatactttcaactaatatattactcttagtggtactgttgtcatgtctgggtattttattcctatgtttagtcaatattcttggttaatatttgtacttactcaagtttctccccccaccttccgtcccatctctcactcacattgtggaatgtgttactttgtgttgttgctgcctgctcctgtcttccccacatcgtcacatttcattgttgtgttgaccgcgcccaccattacagattacagaggtaaggtacccatccccattgggactagggtgttcttataatgctgaaaattgaggtcattacctgtaagggaatttcccttaactttagtggaataaatttaattagtgcagtttattatgccagtttcatttggggtggaacctagaagtgagagagtgatgggaagtgatgttgttaaggaatcccaccatgttttttctataggacacttgaaattgataagcctttctttaactaaaaccagagttggtttgagatagatttttcttaggaggcatgcttatctgttttgctcttttctctcctctctgcatcaaattttaatgagaacttttcagttgtagtcatgttattcaaagtaacagaaaagtgggaaggtaataattcttcaagaataaggttagatttggtcttccttaattacctttcattattccaacgttttttctctcttattgttccataaggtgggtcgttaaactgcatgccatgttacttttaaactacaagtcgtgtagcatattaagtttcccatccatttacacagctggtggagggcatctaacttgttggtctagtctgttgcatgcaactgtcatctcagatgttgacatactgactctcagcagtttcatagtcttgtcccttttttgttacattagttggaataggagaaatattgtggcagcactaaagatttgaattggtttctagtatattcatatatttagattcttaaaataaatattggctttttttttttttaatgggccagctctgtatatgcccaaaacagttttgttgttgtttttttctttttcttttttttttcttttagacaaagtcttactctgtcgcccaggctggagtgcagtggtgctatctcagctcactgcaacctctgcctctcgggttcaagtgattgtcatgcctcagcctccctagtagctgggactacgggcgtgcgccaccacacccggctaattttttgtatttttagtagggacggcgtttcaccatgttggccaggctggtcttgaactcctgacctcaggtgatccacacacctcagcctcccaaagtgctgggattacaggtgtgagccaccacccctggcccaaaacagtttcttaaccaaactcaacacttaatagccattgggctaaactgagcacaggttatcctaaacagtagtaggataatatcttgtccttattccctaacacttctccaagaagagtgatgaggtatgctgtgatggtaatgttccaacatttgtttagtttcatgataaaattgagcctatgttggagacactggagaatctttcctctcgcctgcgtatgccaccactgatccctgctgaagtagacaagatcagagagtgcatcagtgacaataagagtgccaccgtggagctagaaaaactgcagccatcctttgaggccttgaagcgccgtggagaggagcttattggacgatctcagggagcagacaaggatctggctgcaaaaggtgcttgatgattgtcattatttttaaaaatcaacagaataaattctaggctgtggttatcttcagcatcccaccagatttatttatttctttgaatgtaaaggcagtccccagtaatgagtattccagaaagtcactggaaaatcatttggaattcagaacacatttcgccattgaaacaaggttacaattggtagttagattcccaggccaggaaacaaaagctcctttaacccctaacgtgagtaaactacagtatcaatagtgggtagaacatagctaccttttgtaacactttccatgggaaacatacaagtttaacacagaacactggaaacaagagttctcatcttagcccttttgtaagttaggggttttgtatcttagcactacctttatagtagatgatagctcatttctggattacttctgtgatccctgtatgtgggataccaatgtaagagga

SEQ ID NO: 53103 - DNA, 1168 bp, Homo sapiens
tccctctctctaaaaaaagaaataaataataggccgggtgtggtggctcatgctgataatccaagcactttgggaggccgaggcgggtggatcacctgaggtcaggagttcgagaccagcctggccaacatggtgaaaccccgactctaccaaaaatacaaaaattagccaggcatggtggcacatgcctgttatcctagctacttgggaggctgaggcaggagaatctctggaacctgggaggcagaggttgcagtgagccaagattgcgccactgcactccagcctgggcaacaggagcaagactctgtctccaaaaaaaaaaaaaagaaaaagaaataatagtaaaactaaaatagaaaattatcctttagttataaatgcttagcatttttttaaaaaatagtttcattgaaaaggtcagagttacatggaatttctgaatagaccaatttcaggctcttcagaaagtcctattcatatctctttttttaacctcctcagaaatccaggataaattggatcaaatggtattcttctgggaggacatcaaagctcgggctgaagaacgagaaatcaaatttcttgatgtccttgaattagcagagaagttctggtatgacatggcagctctcctgaccaccatcaaagacacccaggatattgtccatgacttggaaagcccaggcattgatccttccatcatcaaacaacaggttgaagctgctgaggtaagaaggaaacaaaaccctttttcttaggtgtctgtcctctagaaaaagcactttatcaaatcaaagtgaggtatgttaactgcttagccaggctgagtaccttaaaggtttttgtttttgtttttgttttttgctcttgtccccaaggctggagtgcaatggcatgatcttgactcactgcaacctccgccttccaggttcaagtggttctcctgcctcagcctcttgaatagctgggattacaggcatgtgccaccatgcctggctaatttttgtatttttagtagagacagggtttccccatgttgaccagagtggttctgaactcctgacctcaggtgatccacccaccttggcctcccaaagtgctgggattacaggcgtgagccaccactccaggcctaaagtttctttttaagtgagacattctccaa

SEQ ID NO: 53104 - DNA, 4086 bp, Homo sapiens
atagatggtagaaaataaaaatcaattttggactcattatctagagataacagttgttacattgacatacttttttctagtttttggtgctatttttcttttcttttcttttcttttcttttcttttcttttttttttttttttttggagacagggtctcactgggtcacccaggctggattgcagtggcatgatcttggttcactgcagcatccacctcccgggctcaagcaatccagccacctcagcttccctagtagctgggtcatatgccaccatgcctggctaatttttttatgttttatagagatggggtttcaccatgttgcccaggcttgtccagaactcctgggctcaagcaatcctccagcctcggcctcccaaagtcctgggattacaggcgtgagacactgcacctggcccaggagtctcttttttaccaacaacatttcttacctcatattgtccatttagcataagccaagcctatcttgatattatttctctaatttcttacttttatttcagctattttttcatagagaaattctttccctccccaccttgggtcaataccaatacatgagccaatttttaggatctggcacagagtttttttcaagatcatagaccccagcacttctgttatactctattgtcagcacttaaatttgtgacttgtactgtgttattttacccttgatatgtttctctgtaatagacttctagctgttgattataatttctttggaggcaggaaggggtgaacctttggtaaattattgaacctcaccataccttttctatagtattttatatatacatatacctatatgtaatatatattttgtatatatgaaaaataaccatgtagagtctgaagctttagtgtccagataagtgaaactgacagttatgttgagcatctgctattgatggggtataaatcacatttgcaaagtttggtaagttctgttctgttttctattttggcttatattctattcgtttacatgtagactattaaggaagagacagatggtctgcatgaagagctggagtttattcggatccttggagcagatttgatttttgcctgtggagaaactgagaagcctgaagtgaggaagagcattgatgaggtgtggagaaatggatgaggcactcagttagaacattagtgggcccagactgaagagtggtattgattgaagaatctgattgaatgtttttcccctagatgaataatgcttgggagaacttaaacaaaacatggaaagagaggctagaaaaacttgaggatgctatgcaagctgctgtgcagtatcaggacactcttcaggtgagaggccaggaggtgaccaccaaggaaatacaggttctgttttttgccatttttgtcatttttggaattaagcacaaaagtggatcaccttcacaggactgcagacctaagatagtggtgtttccacaaatttagccaaagttccccacttgtagtgaaaaaagtagcgacatctgtctgaattcttactcttcctgccatgtttatcattgcctgctcatcatagattcattcagctacgttgtgaagctggccttactgtgaaagtcattgcttgccagaggttccaaacccaggttatcttcaagcacagtttggcacagttgcttcagaacatcatgagcttgctagctgggattgaaaaatcttcacttttattcaaatttagtatttccaaattgtagtttattttgaacattatcttgataatgttggctccattattaaatcaccatattattaatataaagatcattattctttatctgtgccccttacctgaaatcacaaacagcacaaggtgctttgattgatttatgtcttcttatgttagcagagataatgctaattctctcccaaattcttctggttgtttttgactgtttacttgtcttttgttctaggctatgtttgactggctagataacactgtgattaaactctgcaccatgccccctgttggcactgacctcaatactgttaaagatcagttaaatgaaatgaaggtttgtatctgggtatggcttttgaagaagaattgttttattatagtttttaaaggcttgatttgatgttaacattgagtgtgtctttgacaggagttcaaagtagaagtttaccaacagcaaattgagatggagaagcttaatcaccagggtgaactgatgttaaagaaagctactgatgagacggacagagacattatacgagaaccactgacagaactcaaacacctctgggagaacctgggtgagaaaattgcccaccgacaggtaaggcaggtggtagatgacatcagtgaactactctccgctcttttctaatttcgtattgaatattccctttctgtcttttcctgagtagcacaaactagaaggggctctgttggcccttggtcagttccagcatgccttagaggaactaatgagttggctgactcataccgaagagttgttagatgctcagagaccaataagtggagacccaaaagtcattgaagttgagctcgcaaagcaccatgtaagtattttcattttttcatctctaaccctattgatttgagaccagatgctgccaccagcagcctttgaatgttgtgtatatcttaagagaaccaagttagatgatatccatagagataaattatgttgttcaacatgttttaggtcctaaaaaatgatgttttggctcatcaagccacagtggaaacagtcaacaaagctggcaatgagcttcttgaatccagtgctggagatgatgccagcagcttaaggagccgtttggaagccatgaaccaatgctgggagtcagtgttacagaaaacagaggagagggagcagcagcttcagtcaactctgcagcaggtacatgtgacatccaagtaaggtaggaagagctatacagataacagaaagcctatctaagtcagagagaagagatcaatttgaaaagcaaagaatcccttatgtcttgaggggaaggttaatactgtgctgtaacttatctagaaagagcagcttttgattgggtagttcttttctgaattcatttctagctcagtctctttattcacattcaaagttagcagatcttcactataacagattccctttttttcttggatcaagtcaggtctcttcctattcaacagtaccttaatcaatagtcaattcatctgatcgtatcaggcatttataatatgttatagtgaggtctgaaggattctgctagattctagcaataatattggccccatgctaatctagcaacagaacagctttgccagagagcagccgaaaattccttcctcaagataaactcctcatatcatttggaaagttgacttttaaagctgagaaatgactactgacatggttgatatatctttttctcaaaaggcccagggcttccacagtgaaattgaagatttcctcttggaacttactagaatggagagccagctttctgcatctaagcccacaggaggacttcctgaaactgctagggaacagcttgatacacatatggtaatagcaattttttgaaattgagcataagcatcccatattcactagctcctttccaagttcacagtcataattaatatgtatctggaaatctacaaagtagtgcatttttatcaaacatatagtataacctttggggattgctgcctgttacaggcttctaataccttacagtaggcagcagtagtgacagggaaggtcagctggaaattttgagttaatcagctttactggcacacatatattgacttgaagatgacagcatcaagaagacaaatatacaacacagatgtgctttcacttaagaaggaaactacttaaggggggtttagggaaatcaaatagttacccgacagtatttcaagaatgcatgctagaacaaaaagcaacataatttctaggcaaatttttcatgaaaaggggaaatagattattggagtcttttgagggatctctaatccttaaaaaatgtttttcttggccgagcgcagtggc

SEQ ID NO: 53105 - DNA, 1024 bp, Homo sapiens
gtaagccgagatcactgccactgcactccagcctgggtgacagagtgagactccatctcaaaaaaaaaaaagtttttcttctatgggtgataaaattattttaatattttaatttgccacttgttatttagtaaaatatgttaatacttacattttaatacaaatgaattctaagtaatcagtatttagttattacaattaattttattattaagtatggtgggtttcattcccttatggctcagcacttgaactgaatccaaaagaatggcttgtaatcaagatgagcccttcctggactttcccagactctgctacagaatctatatgtaggtgtcttccagagaattcgtagaattgatatctttcctgccttttcttgtaggaactctattcccagctgaaagccaaggaagagacttataatcaactacttgacaagggcagactcatgcttctaagccgtgacgactctgggtctggctccaagacagaacagagtgtagcacttttggagcagaagtggcatgtggtcagcagtaagatggaagaaagaaaggtacagtgtatgatccccatgtttgagtaatttgctgagtgattgcatgtataataattgccatcttatttatatgaagattttttgaagaccagggtattgtaacagaagttgcagaactgattccatctgtgttgagttgcattgatggtataagtttctgttgttatttgcttttataattattcattccttacctgttaagacattactgccattatcgcttcgtgatgggctttatgtcctatattaatcaccaatttgtgttctacttaaaaacaaggttttgctggagttggtatcttggggttgagagattggggacagggcatatagggactgacgaataattctccacaaggaatttggttcctaacgtaaatgtagtgtgcaaggaaatttactagaaatcaggagagaagtaaattatatgacctcttcccactcatcctcaaaaatcaaatt

SEQ ID NO: 53106 - DNA, 2420 bp, Homo sapiens
aatctacatctagtgttgtcagatttttgcctagaatgtcttggcttctttcgttacctcttcttcttatagcataagcataatttttagactcatattttcatatgccatattttctgaaaacatgtatttaaacaaagagtactacattgaacatcatcttcatagtaaattgcttttcatttagctgtttttataccacaaaaagtacattaaaggaaactgaaacattacccaaagcaggttgtagatcctgcagctgtcaccactaaagggtctgttcacttacagttattgaatagtcttattcccgttcaaggaagtggagagtagcagagaaaggaacttagctgcttattgtgctctatttccttttccatgtacacagttcttgcccatttgtttcagacactaacattaaaatgtccccttctttacaaataaagcatgtttggacgttgattaaatgaggcttcctttttagaggtcatttcatttgttgtacaattcatgcctttgtcgctgagcctataattcctgaaattggcgctttttctttctgtgtgtgtgtgttttacttgaaattcagtcaaagctggaagaggccctcaacttggcaacagaattccagaattccctacaagaatttatcaactggctcactctagcagagcagagtttaaacatcgcttctccaccaagcctgattctaaatactgtcctttcccagatagaagagcacaaggtaagtatgatattatgatgctgcattctttttgaaagcactaattgaaagaaatgcccctttatcttatcttaagctaaaaaagagcactattgttccctcaggtttttgctaatgaagtaaatgctcatcgagaccagatcattgagctggatcaaactgggaatcaattaaagttccttagccaaaagcaggatgttgttctgatcaagaatttgttggtgagcgtgcagtctcgatgggagaaggttgtccagcgatctattgaaagagggcgatcactagatgatgccaggaagcgggcaaaacaagtaagttggggaagaaagatactaattcactgaagagtcttgggctgcatgtattgagtctctgggatgattctcaaacgtgctgtatagtgtgtatattcattcctgttaacttatttcttatgtaattttagttccatgaagcttggaaaaaactgattgactggctagaagatgcagagagtcacctggactcagaactagagatatccaatgacccagacaaaattaaacttcagctttctaagcataaggtaaagcagttaattgctcttaggtcccaagccatagtattcgctaaagcttgtatcttgccaaaaataaaaatcagagctagtaaaaagaaaaccaattggttaatgtttaaaagtcaaaatgatgaagccagggttccattttatatctagatggtctaatcatgatatttgctcatttaaataacagtttaaggaaagtagttatgggagtaactagttaaaactgtaggctttcacaaattgtcaggcacttctatatatggtataaacaaaaaattataaatttcttaaggataagctatggttaattttagttcaaaaaaagtggtgatattcatactttatttggtttctagcctgaaaactcaaattcttttgttccaaatcaagatgtcgtctgacttttaacacttttttcttttctttctggaaacataggagtttcagaagactcttggtggcaagcagcctgtgtatgataccacaattagaactggcagagcactgaaagaaaagactttgcttcccgaagatagtcagaaacttgacaatttcctaggagaagtcagagacaaatgggatactgtttgtggcaagtctgtggagcggtgagcatgaatgtccccttcaggggtctaaccgggatcccaaaagcaagaggttcttaccagattctataaaatggtgataaagctaatgcatcagtaagaggttttgtaccatcttaacaccaccagttagttcaaagactgttataatttaaataaaatgtgtaaaaattctcattttaaacttgaaccttattgtattagagagaggcctataaaatcaaaccaacaataatagatcagtaactcaaaagtatttgtaaatcatcaatttgtaataccaacaactgtcttattgactgctcttggacactccaaagcctctacatgcattacctcatttaaccataatgatacctgacctttgctgggcaattactactgaatatgtaccaaacagtagctgataatcatttaatcctcataaccactgaggtgggtaccatttttattccattgtacagatgagaaaatgaccataaagaggttcttaactccc

SEQ ID NO: 53107 - DNA, 1044 bp, Homo sapiens
attttacagatgaagaaactgggccttaagcaacttttcaaaattatgtatctcctaaatgcctgagctagcatttacagccacattttctggttgtttttttctttcttttttctttttttccccttgagattgggtctcgccatgttgcccagactggtcttgaactcctgggctcaagcagtcctctcatctcggcttcccaaaatgctgggattacaggcatgagccactgcgcccggcctggttgttttttcttatgcattgctctgcctccctctatgcataaaagacacatgattagaacctaccaagaaaattattatttcccagtggtttcttggactcaaaacattccttgaacaaacaaattctcctattttcttttctaggttttccagaaggaactgggaaagcgaacaggaaccgttcaggtcctgaagcggtcaggccgagagctgattgagaatagtcgagatgacaccacttgggtaaaaggacagctccaggaactgagcactcgctgggacactgtctgtaaactctctgtttccaaacaaagccggcttgagcaggccttaaaacaagtaagggatatttgctgtcccaacccaagggatagatctgagtgggtttatttggtttttcttttactagaatctgttccagtcagtcttgaaataagtataacagagttgaaaattgatattctgaatgttctataaaattttaatattcattttgagaaataatgaattcagttgattttcaaagatctacaaatgaaagataacctttgtggagttttgatgaggccatgaaatgtctgaatgaacactggaccctttccctagcatgtcccagtatctaggtccttggctgcagagagaggttgaatcttttgtgcttggttatttcaggcggaagtgtttcgagacacagtccacatgctgttggagtggctttctgaagcagagcaaacgcttcgctttcggggagcacttcctgatgacacagaggccctgcagtctctcattgacaccc

SEQ ID NO: 53108 - DNA, 1018 bp, Homo sapiens
tgtctggggtctcagtctgtcctaatgaggtgggaaatgtttccctttttaaatttttatgttatccactcagagattttaatcatggatttgttattatattctgttatgggtattttttaaaatcatggtttttacaactataattatatttttccaatacaaatatgtttaccaacatgaaatgaaataggatataaatgagagtaaatgaaaaatgggactaaaaaagagagaaactaactcgaatgggaaaaggggggcatacctctgtgtgtcctattctttgttgtcatctccaccagagaaagtcattcttgtgtaaacccctcaccttcccacatcttttagaatgaaaatgccataaataactatacaggcttttagaggtctgcgttaacacatggaggaaaaagaaaacattgaaatttatcccccctcagtgtaaactaacagtgctgctaatgtagactttttacgtttttgttttcaaatcttttttgtttaggaattcatgaagaaagtagaagaaaagcgagtggacgttaactcagcagtagccatgggagaagtcatcctggctgtctgccaccccgattgcatcacaaccatcaaacactggatcaccatcatccgagctcgcttcgaggaggtgagtccctggttcagaggaggactgcacacgcccagtaaactatcactatagtatagtatagtatttttcccccaggtaaggaatctttcactcactgtgaataactcagcaaaaattaagttaacattttagtaaagactgttttcttggtaatgtgtggcaacctggaggagtagtgttggcatagtgctatgttaatgtgacttccagtggacatgttgtgtagtgtctgctccttcctgggaaatcctgtgttaacaggatgtacagctgacccttgaacaatgtgtatttcaactgcacaggtccacttatatgcggttattgttcagtaaatacagtcagccctccatgttggtgggg

SEQ ID NO: 53109 - DNA, 1815 bp, Homo sapiens
ttctggtgagggcttcaggaagcttagaatcatggtggaaggcaaaggggagccagcgtgttacatggcaagagagggagagagagaaagaggaggagatagcaggctccttttaaacagccagttctcatgtgaactaacagcaagaactcactcattaccatggggagggcaccaaggccattcatgaggaatttgcccccataactcaatcacatcccgttagaccccacctccagcattggaaatcacatttcaacatgagatttggaggggacaaatatccaaactacatccctcagtaactcaactcaggcaccagcctccacacagcctttcctgccaccacaggccgtaaagtacccatcctagctcttcctttgcccccataagagtaaaaatacaatatttaactctttttcctattttttgtgtttaacagacatttatggaggagatgactcgcaaacagcctgacgtggaccgggtcaccaagacatacaaaaggaaaaacatagagcctactcacgcgcctttcatagagaaatcccgcagcggaggcagtatgtttccagccccctgtgttaggatgcttcattcctgctaattgaggatgagcactttccaaatgcctatcaaaaaaaattatattccattttcaaaaaccgtgttggttttgaaccaaaatctctcatttttgaaactcacttttcttacattgacagacagtagctgtactccatattctttggtatgattggtatgaaattacgaggtggttaagcttattttttaacagtggcctttccattgttttggttatcagccctagctgtttacatttggcttgtactaatttaatcaacacaacagcttctacagaatatgttgcttttttagttgagttaacgtgtcatcagctcactaaggtaggacagaattgcttggagatatgtaggcagcaggtaagtatgtgctgggaggatcagtacttttggaattagtacacctccgtatctaaatattgccaagtcccgtatttcttttctcagttattgactggatattattataaagatcttctaggtttatacatacagctatttctctttgtatactaaccagctgttctaatcttgtgattatttttccttttagggaaatccctaagtcagccaacccctcctcccatgccaatcctttcacagtctgaagcaaaaaacccacggatcaaccagctttctgcccgctggcagcaggtgtggctgttagcactggagcggcaaaggaaactgaatgatgccttggatcggctggaggaggtaatgccctgctgagtggccttccctgaaacaaagtgcttttttcaatcaaaacacagcccttctgaggctctcttaatgtgaaccttgtgtcttaatttactttttcacaatagaaacagacctataccaagccagtactcattctttgaggcccctgaatgagaaaagacacatgtgtaagaaaaccgtttgtgacagagtaggctaaagcttctaggtgtggaaagcaagaaaacagccagtccataatgagggccaggacctgatctgcctcagcatcttgctgtggttgggaatcaggaacagaactttggaaatttatctccagatatgtagcatagcacaaaaatgacccttgttgagcctttcatgtaaaaacagatgctacagaattatgaaataggagtaatttttaatgattttgttattagtcttcacttgatcatgagaagcaactctattttgaagtgtcattacccagtataaaaaa

SEQ ID NO: 53110 - DNA, 1073 bp, Homo sapiens
ttgaaatctcagaagatagtggtaaacacgagcctcctgatatgagccctatgtgtgattataatgcctttcaaaacaacataatcgaggagtgctaaggacctcccttctgggttagaatccatttccttgcatctaagagagtgatcctttgaaaagcccaaagggaaagcaaggctggcttcacccattctcattctgtgtgctccatattttccatggtgattcagttattgtttctcttgctattccattataccatagctcgtgtaaatagtcatggctttaagtgaaagagccagattgtgccttcacaaaagaagcaaacacatagatttcattgttgatggcccctggaagcatggctttactgaatgtctgaaagtttgggtatgctctgggcagcttttgagggcccaaaaaataaatcttattgacacttctgatttctgtgtagttgaaagaatttgccaactttgactttgatgtctggaggaaaaagtatatgcgttggatgaatcacaaaaagtctcgagtgatggatttcttccggcgcattgataaggaccaggatgggaagataacacgtcaggagtttatcgatggcattttagcatccagtgagtctagtcatcattccaaacatgggtcacacctggattccttgcactttgtagaagctgtgatattctagctaaacagtctttctgaagctggccaggagcttggctcacacctgtaattccagcactttgggaggcaggtggcaaaggcatggtggcacacttgcagtcctagctacttgggaggctgaggtgaatcacctgagcctggggaggtcaaggcctgcagtaagctgtaatcgtgccagtgaactctagcctgggcaacagagtgagactctgtctcaaaaaaaaaaaaaaaaaagacagtggttaaccagaggttttcagctgggaaacaatatgatttggtctgtgttttagtaaatcactgtgactactataaatagtcacacttccctttgtatagcaatttgtttagaatctaagacaataatctaaacataggaa

SEQ ID NO: 53111 - DNA, 1015 bp, Homo sapiens
tcgcgcctgtaatcccagcactttgggaggccaagatgggtggatcacttgaggccaggagttcaagaccagcctggccaacatggcaaaacctcgtctctactaaaaatacaaaaaaaattagccgggcctggtgacaggcgcttgtattcccagctactctggaagctgaggcaggagaatcacttgaaccagggagacggaagttgcagtgagccgagattgcaccactgcactccagcctgggcgacagagcaagaccttgtctcaaaaaaaaaaaaaaaaaaaaaaaaaaatctataaccgccaaccgaacaagtacccctcttaatgtttcaaaatatgattccttttctccagagttccccaccaccaagttagagatgactgctgtggctgacattttcgaccgagatggggatggttacattgattattatgaatttgtggctgctcttcatcccaacaaggatgcgtatcgaccaacaaccgatgcagataaaatcgaagatgaggtaagggaaataattatattttgagtacacttctggctgtaggtttgtaatatcctgaatttggttgggttcagtgatcatattagcctttgacttgtctgttgggagataattatttggagttctattttgagatctctttttggatagcatttcaaagagtcccagaggatctctgacatctgagctctagctcaggctagatggattactcaagtgagtcatgtctgtgtggtgctctgaagtttacagagaacctttgcagggcagcatactcatcctggttcactcgtcctgtgtttgggatggactcatctcactcttgagcatgctgcctggaatctagggaaatggtctaccagtgtagcatttaagggttgaaatggactgggcatggtggcttacatctgtagctctagcactttgggaggccaacacgggaggatcactggagcccaggagttcgagaccagcctgggcaacatagtatgattctgtct

SEQ ID NO: 53112 - DNA, 1532 bp, Homo sapiens
attagttcacttagtaagaagaacatatactaatttggaacagacaataaatgtatatgtcaaaagcctgaaatgcctaaaaagtaaataatgagctgtgcgtggtggctcacgcctgtaatcccagcactttgggaggctgaggcaggcggatcacctgaggtcgggagttcaaggccagcctgaccaacatgaagaaaccccatctctactaaaaaaatacaaaaaattagctgggcctggtggtgcgtgcctataatcccagccacttggggggctgaggtaggagaattgtttgaaccaggaggcggaggttgtggtggagccgagatcgcaccattgccctccagcctgggcaacaagagcgaaactccatctcaaaaaaaaaaaaaaatgtaaataatgaatagcctccctgttaatgtataaaaatctttgtttctctgaataggaagttttgctctaccctttacactttcctttttgttcacacccaataggttacaagacaagtggctcagtgcaaatgtgcaaaaaggtttcaggtggagcagatcggagagaataaataccgggtaaggaagagaaaaagcagtcctttgttgtggtggtttctcatatgtggctgatcccaccttttcctcctgatgcttagaggcccagagcccatcggacttgagatgtggtcactctctgacctcatctctatagatgccaagtgtcaggtaccctgttacatctgaaaactagtcccatatctacctagatagtagtagtttgtatttaagttttaagataggagatatttcagagctgtcacttcacatctgacaaagttcctagggggatgaaggtacctttggaaacaattatatctattgactgaccacttgcccacaaagagatggtcattgtgagcctgagtggctcccaggctagagaggcctggggaaactgtgttgaagccccaacagacactgtgcctgctctgagctgggctacaaatggggcccaggagcactgaggagacatcaggctcagtggtcttccctggaaagccatgctaggtgtggccataactgacagtgaactatacttgtgttttagcttcttttgggaccagggtcagggacatagaaggatctgaaacaggtctcctaaaatatatcaacagctcgtcaagattctctaaagtcctaagaaaaatctatgattggcaaagaggatttagattgcactaagaaacacaggaaggtccatgtttcattagtatatccaaaatgtcctcaaagtacaccaaatctaccccatgctgcagtctcctgaggagtgctgggtgaatctgctttgaatataacctagggcatttagttaataaagctccatataatcttatgcctgcttgttggattttgttttcttgttttttgtttttaattatctatgagagaaatgaattaacaagaacaacatagcatggagagttagttcatagtttataaaaccacatccctggccgggcgtggtggctc

SEQ ID NO: 53113 - DNA, 1094 bp, Homo sapiens
ggccctcaaacatcccaggccttgcaagtcactatagaaatgttctaggcaagtgggaagaacaggggataagagaaaaaaactaaagatgagaacaaactggctttaaaaaaacatcattgcttgagagtgtccaatatgcctatttgctaatgactgtgtgtgaatgctagggtgcctttgaagagtcctgacaccctcttctactgctccattgatcaggagagggtcagatgacttctaatgttgagaacggaattatgaagttcattttatacacaggcaactgaggcctcaaagatcacatgcctactctcacacagctagtgtcagccactgcaagaacccaagtctctgtaagaggttttccttttaaaaggtggaaacaacagttactgacccttaggactcttatttgttctttgcctcactgacaaccttgtcctaccaggtgtgcacaggtctccatttttagagctgccataatccctcctaccacttgtgactctggcctcaacttccccagctacactggctgctggcttggtcaaacctcctttcccccatagcttagcagaaacaagttagaatctttcaaagagagctttagtgtgaaattaaggttgggggggacatgaaatatatggagtgataaattatagtacacagtattccaagaataaagtactcttgtggttccttcctgattcaccctggggtacacacaggtgcatactccctgcctctcacccatccagagaaaaccctttgcagtgactcaggtccaagagcactgctcttgggtggaatcctccatatctctcagaacctcccacagggcttctcattttcacttgtggggcccagcttctgagagggggctctcacagagcctggggggcagcttccttcccaggacaggacgtgtattctctttcaagtctgggttcagtgctgctgctaccacacagtgcttttgctgcagtcactttgtataaacatgtttaaattgtatcagatgaaaggtgtgggacttcttttattttcaaagtaaagggctgggagggaggatacagtatttttcaattgccttg

SEQ ID NO: 53114 - DNA, 2789 bp, Homo sapiens
atggcatgaacccaggaggcggagcttgcaatgagccaagatcgcgccactgcactccagcctaggcgacagaacgagactccatctcaaaaaaaagaaaaagaaaaagaaaatcctaccaactccatacccgaggaacccttgaattgaatgattttaggaattccatttctcctaccagatgtttgtttgttttggaaactctgcatacttctcttttgttgctccttacttcattttggaaagagggtaatttatgccatgagaaactccagatgtttagagctgggaagtaggaatgtttgggcaagaaaaaagggaaaacataaataatcagaaatatgcttgttttagcatctaaaatgattattggatactgttcataatcatcatgggagctacaatttttaattgcttcaactcaattttagtataaatatgacctaatcatttgttcagctgaagaaacttttctgctggtgacactgcaattagcaaatacttcgggttaattcctgaaaacctgatgcagaaaatcagattttcttctaagcttgtaatgatgctttgcaaaggtttccttaaggcttgaaatagtattcactattttccatttagctttaaagcatactgtattcagaagttgatatccacaatctttcttttaggaaaacaaattagcatgccaagaatatgaatttttaattgagcagaatctcttttaaaaaaataaagtgacctaacactttgtctgttttcctacctctccttttggtgcagaggcagtggtgtgaccattaaaagtgatttttatcccaatagaaagtatattggcccggcgcagtgtctcatgcctgtattcccagccctttgggaggccaagactggcggatcacgaggtcaggagttcaagacagcctggcaaacatgttgaaaccccgtctctactaacaatacaaaaattagctgggcgtgatggcacacgcctaataaacccagctactcgggaggctgaggcaggagaattgcttgaacctgggaggcagaggttacagtaagctgagatcacactgttgtactccagcctgggcaacaagagtgaaactctgtctcacaaagaaaaaagtatatcaagacaccagtctttagcttgatatttctgcttttctatttttaaaatccttttgtgaaatatataaaaatgcaaaattgtgagagttaacaattcttctgtagctatcaaattgtcattcctgtctgaatacagtctgctttgggagaaaaacatagatctgctttaagacatatatattaattaagtttcctttgattctacagtttggggattctcagcagttgcggctggtccgtattctgcgcagcaccgtgatggttcgcgttggtggaggatggatggccttggatgaatttttagtgaaaaatgatccctgccgaggtaaggaaccattctaagcatgaattacgtgttaggtatgcccccagcagtgatcttttatgcttacaggaagcattgatggtggggtctgtctgttttttattttgttaagctgcccaggtgtcatcccactagcacagattagaactcaggggtgccagcataggccagggagaaaaagctgaagaggttgatgctatttggggaggtaggtctagaggaatgcagtaatgagaattaagagtgtattggtgttactcgaatgtttgtttggggtattaaattaacactatcctagaaaggagcccagtgaagccctttaggttccctcttagtgcctcagatccctttgcctgtaattcctgtggctgatactcagggagagtgttaggcccttctcatacagggaagaactggtgagccccctggaccaggaggaaggataaagacacctacatgtgagcccattcacttctaagacaggtggccacctaagcaagaccatggggtgtctttctgctaaatgtgaaaaggctggcccaccagcccagaagcataaggagactgtcaatttaatatgagcatgagtggtggcatctgcagctagggggtgtgtggggactgcaacagggaagagatgaccggttccaattgctaaatcctcttcagctatgtccttgcctttttcctgttagcagagctgcatgtgggtgcacaggaggctcccccactgtctgccaatttgtctttcttgactagtttctgcgtttcctgccctgtctgtttctttctgtttacgtattttttattctagttcaccatcctgggagtaaaataaagcgctctgattccagctcttcgatttccagtcagtctcccataggttggcttttaagctttgtccctcttcctcacaccctagcccattgagaatggctttgcttcttaaactgtaacatctcttggttctgtgtatctgctgcattcatgaatgcttgaaatggccaaaccatagcttttctaactactcaagttgatggtgcataaaatactgttgagacagtgtccatggaatttgttttgagtttctatttaacaaatacttatatagttttatgtgccacacactattacaagtactttacaagtaacacatttatgcctcatatgaagtgtagatgctcttatctctgttttacagaataggaaattgaggcatagaaaacgtaaataatttgcccaaagacaaacaactagtaaatggcagagatgagattcaaattcagggcaatctgggtctggagtatgtgcccctagtcagcatgttatatct

SEQ ID NO: 53115 - DNA, 1896 bp, Homo sapiens
gcccaaggcaggaggattgttgaagctcagaagttcaagaccatctttagcaacatagtgaaaccccatctccacaaaaaaaaatttaaaaattagctaagcatggtggtacacacctgtgtagtcctaactactctggaggctgaggtgggagtattgcttgagcccaggagttcaaagctacagtgagccatgatcatgccactgcactccagcctgggcaacaaggcaagactcttgtctacaaaaaagtaattttgaaaacacttaaaaacttgaaagtatttagttttagaatttaaaagctgtcttttattgctttaatgagaaacaatatatgccattttaactttaactcagtaaaacaactttattcctttccaaatctatgaataaggtcctatttttcctgtcatgtatgatcagactaaataaaagagatattgcatgtggcattttggaatccttgattgcctgtttatttgctgcctgctctatttatgataacatcatgctgctggccaaggagaacactgcttgctttgtccttatcttagtatctaaaatttggaaccccaaggaaattggggagggccatctagaagctattttctatgaaagctagtaaccttttttagcatcccttggaacaagcaaggtaagactttcctgtgtctctccaggagtgctctcctggaactcagtaatcatctcaatccattgactgtggagagaactctccagaagttttaaatttcgtaactctgtcagtgatgggcaggatgagctatttttaatcaaataaaaaatggtgctaggcgatgaacacctaaggactaggatggattataataagttagaagggtatgaaggatgagaagagaacaaagttacttgaaactatattggaagttctataaggattaatgtggcttctggaaacagtgcttatggtaggttttgtactcatttatgttgcatatttccttgggtctctggaatgtagagaatgctatactgaggacagtacaagatgtgtgacaaggttcttaacaccagtgtgcactatcatttcttacctccttttacacagctattttaaaaggtagaagatatctcaaactgcatgtagcttttagtcatgtgtaaaaaaatgaaaatattttactagctagatttgccagtctcctggtactgccaaaatcagatatttcagtttctgaatgtatccgtggcacaggaaatcatgatgttttggatagagagaaaaaaagtgctcctgcctaaataatgggtatacttgtacctaaggtactgtgtatgtttttgatcattagacatattagctcccccagataagtgaacatctaggaaatttcatttatgaagatttaaaagacacattttgaaatagaactcattttttttttcagattgttatacagataaaatttaccatcctaaccatttttaagtacaggactaagtatatttgtgtcatactaccgtcaccaccgtccatccacagaactctcttcatcttgtaaaactgaaactctatacccattaaacaatagcttagaactgaattttaacatgcccgcatcagccagtttcaggtggccagcataactcccttagcaaagacagcctctttggtggtcaatgaactgaacttgaggtggctgccgtcatgtctggttctgtaggttcaatggtagatcttttctccagtgaaaagaatggtgagggggaaaatcctatcacagtagtcaaccaagtactaggaatcttctcttttttttaactttaggactataatacccaattttgggaaatatttgaatcaatgtaaatattaagagtacctttactactaaattcaagtgctagtac

SEQ ID NO: 53116 - DNA, 1090 bp, Homo sapiens
gcgtgggtgctgtctccttcagccaagcacagcaccagtgaacactgacctgaggctcacattctagcttctgaatttcttggcctaggcacttgagtttctgtagccttgatttgaatacacatgccagcaattaagcatgttcaagtgcagccattaaagtgcctgaacgcttttggaagagcagtgttttagaaataaaacatggactagtggcttgtctgatagtagtgcagtttgcattccagctcctaccaagaaacattggattcttgtgcctcaagacagtgttgccttcagtcttggaaagccttagccagggaaacaagggatgcacaagaagtcaatggctatgaatgagctgctgttttgaggttcatttcacttcaagctaaaactccagttcagaaatatatctggtttagaatatgatctggggacctactgccactaaactactagactcaccctgcttatcttgcttttcttctttccttaatggctccagtttcataaaaatctcagttctattttaaattttagatgtttaatgatgtacaaattctcatacagttctgataaatcagggcttttgttctgtcttaaggttttattttctgtttcatttcattttgaggcttcatctttccttacttattggtgttctgtagccaggccatctcctgacttggaattctagcccgggttctagctgtggtcttccagcagcagtgcgcaggaaccttagcttctgaaactggtgttcttcctcctatgtggccaggaaattttgtgcttgagtgttaatcactttctatcgcttatgctttttctttataaatttaagaagtacagcaaacaatgagatggattgcttttctcttctgtttgcataaacgtcttaaaggtcctggaaaacaatttacataattgatttcaaagaaaaattagaatggcatgctgtagcatgtggcataagtaatgttttgggggtttttttgtttgtttgtttgtttgttttttcattttttaaaaagcaaagtagagacaaggtcaaataatggatgtttaaaacatttaaggatcagcc

SEQ ID NO: 53117 - DNA, 1080 bp, Homo sapiens
gggaggctgaggcaggagatcacttgaacctgggaggcagaggttgcagtgagccaagattgtgccactgcactccagcctgggcaacagagtgagactgcctcaaaaaaaaaaaaaaaaaaaaaaaaccccacacagatttaaggctggacatggtggctcacccctgtaatcccaacactttgtgaggccgaggtgggcagatcacttgagcccaggagttcaagaccagcctgggcaacatggagaaaccctgtctctacaaaaaatacaaaaataagccagccactagggaggctgaggtgggaggattgcttgagcctgggaggtcgaggctgcaatgagccatgaagtatgccactgtgctccagtctgggtgatggagcaagactctgtctcaaaaaaaaaaaaaaaaaaaaaaaaaacacccacacatttaaaatactctttttcctccagttaagcctactatctaaaaaaccaaaaaaaatcactcaaataggaaacatagcacctattggtagcagtgataataatatgtagctcttttccagtttgggaaatgcttctattcatcatttattcatgcaagtttttattgagttcctcttctgtgctgtgcagaacacaggaagcaggggagagaatagaagtgtacaagcagtgttctgagtagtgagacaagacctctctactaaggtcatcctttcaatagagcccctgcagggaatgagggggtgagccacacgtgtatctggggtaggcttggggtgtggtgattgtgcaacaacagtccaggcaaaatgaacagcaaggggacaagactggtggaccctcactgggccattggtggaacagcaaggaagctagtgtggctgggatggactgatgaggagtgtggtagaaatgaagtcaaagaggcaggatttaatccctgatttcccaagagagaagcaaagacacaggtgttaatttcaatcagtcctggaacccagactcaaacccaggtctcctggttcttcatgcacagacttgttcctgatgtctcagtcccacagtcgtgtgcttctcatagtttat

SEQ ID NO: 53118 - DNA, 2224 bp, Homo sapiens
ctatccatcctgcccatggattagcccggctggcaggctcacccacctgtgctgaggtggttgagcaaccttgcttgcctccactttggggccatggaaggtgacagtgctgctgatagagtggctttctaatccccaggaggcagcttctcaagtagaatcacaaagccagaaaaggcttcagcaacttctgtatggatgaggaaactggggtgcagaaaggctgtgagatttgcttaagatcacacaggatcagaaccctagcttctgctcacttgttcttccaccccatgccatctctattaagtctgctgttttattcttgaattccagaccctaaaaagtctgccagtcgccctgggagtcgggctgggagtcgagccgggagtcgagccagcagccggcgaggaagtgacgcttctgactttgacctcttagagacgcagtctgcttgttccgacacttcagaaagcagcgctgcagggggccaaggcaactccaggagagggctaaacaaaccttccaaaatcccaaccatgtctaagaagaccaccactgcctcccccaggactccaggtcccaagcgataacactgtctaagcacccccaagccactatccactttgaatcctgctccatacattgggtgtatatttattctgaacgggagaagttatattgttaaaagtgtaaaagaataattgtgttatgaagctgccttattttttttctttttgtaagttactattttcatgtgaatatttatgtagataaaatttgcctcctggtaaccctgtaatggatggggcccagaaatgaaatatttgagaaaaacaagtgaaaaggtcaagatacaaatgtgtattaaaaaaaaaaaagcctattaatagggtttctgcgcggtgcagggttgtaaacctgctttatcttttaggattattcctaaatgcatcttctttataaacttgacttgctatctcagcaagataaattatattaaaaaaataagaatcctgcagtgtttaaggaactctttttttgtaaatcacggacacctcaattagcaagaactgaggggagggctttttccattgtttaatgttttgtgatttttagctaaagagagggaacctcatctaagtaacatttgcacatgatacagcaaaaggagttcattgcaatactgtctttggatattgtttcagtactgggtgtttaaaggacaaatagctgctagaattcaggggtaaatgtaagtgttcagaaaacgtcagaacatttggggttttaaactgatttgttgctccctatccagcctagacaccagtaactcttgtgttcaccaggacccagacccttggcaagggataggctcgttggtgacattgtgaatttcagatttgttttatccactttttttgctatttatttaaatggtcgatcaacttcccacaaactgaggaatgaattccacgagcctgttctgaaaatgtggacgtaagacaaacacgtgctcgtcctttaatggagttcaccagcacacttgttaaccagtcctgtttgctttcgtctttttttgtgcgtaataaagtcaactgaccaagtgaccatgaaaaggggctgtctggggctcctgttttttagctgctgttcttcagctccgaccatgttgctgtgtgattatctcaattggttttaattgaggcagaaactgaagctctaccaatgaactgtttagaaacaagacacacttttgtattaaaattgcttgcagtaacaaatattttgtatttcctgattttcttttcaactattaccttatctataaatgttaccctggggtataatcatgttgtaggtacttaaatgcattccgcaaatcaaaatatcttgatggataaattatagagcttaatagatcttgttttatttcatccttgttaattttgtttaatatggctgggcatggtggctcacgcccataatcccagcactatgggaggccaaggcaggaggatcacttgagttcaggagttggagaccagcctgggaaacatagtaagaccttgtatctactaaaactaaagaaacaattaggcatggtggcacatgcctatagccgcaactactagggaacttaaggtgggaggatcacttgagcctgggaagtcaaggctacagtgagccacgattgcaccactgcaccccagcctgggtgacacag

SEQ ID NO: 53119 - DNA, 1081 bp, Homo sapiens
tcctcgcccggaccaaccgccagccacgccgaggtcgcacctcggggtcgccccacccgcaacacctgccgccgcccggggctcctagcgggcgcggcctccgcgcccaggccccgcccccgcgcccccattggtcagtcccgggggtgggcgggcggcacagacggctgagccggggcaaggactcgcgggaatcgcgccgcccgggtcgctgccggagctcgccggtcgcccctgcgctgcgcggaccgcagccacagccggactggtgggaacggcggcgacagacggattggctgacagtcccagccctcagaacagccccggcctcgaagcgttggcgtctgcgtccgcgtcagcgtccgcttgtcccggagccggggcaggtgcgcgcggggggcgctccagggaccgcgctgaggccgcagacgccgcccgccgagccccgccccctgctcgccgaactcagctccccgttcgccgtcggggcgtccccgggcccaggggcggcggcggagctgatgtgcgcccgctgagcgcccccggcccgccatggccgcgcgccccggaccgctctggcttctgggcctgacgttgtgcgcgctgggcgggggcggccccggcctgcgacccccgcccggctgtccccagcgacgtctgggcgcgcgcgagcgccgggacgtgcagcgcgagatcctggcggtgctcgggctacccgggcggccccggccccgcgcgccacccgccgcctcccggctgcccgcgtccgcgccgctcttcatgctggacctgtaccacgccatggctggcgacgacgacgaggacggcgcgcccgcggagcagcgcctgggccgcgccgacctggtcatgagcttcgtcaacatgggtgagtgcggccgcccgcgcggggaccctcggagtaagctggctgcaggggaggggcgcgcatccgcgggcggtgccgggccctggccgaacggggaatcacagacggtggacgcgaaccacaggggagtgggaccgccgtggttagggaaggtctaagggtcatgggggccccctgggctgcggggtggtcagg

SEQ ID NO: 53120 - DNA, 1021 bp, Homo sapiens
ttgtttttttttccttgaaacacactctcattctgtcgcccagctggagtgtggtgacacaatcacacctcactgcagcctcaacctcccaggctcaagcagtcctcccacctcagcttcccgggaagttcaccaccatgcccagctcatttttgtttttatatttttgttgagacagggtctcactatgttgcccaggctggtctcaaatgcctaggttcaagcaatcctcccacctcggcctcccaaagtgctgggattacaagcgtgagccaccttgcctggcctcaaaagtttctttacttaattgcttttacaatagaaaggttattgaaatccaaacaagtacaggatgatacacagttttattggtgaggcttggcatctccagggttagttatcatgttttcagcggcatcctcagtctggaagcggctgtgggggacaatcccgtttacaggcttcactcctcctggggctgaggcccaagtcagatctctgtttcagccttttctttctttcttttctgtccataagcccagctcgtgcataagaactcgggctctggaatgagactgccgcaggctgcaacctgggctctgggacttggttcaatgtttctgctctgcctggcatctcccttgtgggcatcagggagacagttaatgccctgctcttgggctgtgcccagcagaacaagcactcgctcaacctggcagatgctaccacgagctgtctcggtgataagtttgacattcacaccccagaaagtgcgggacggaagacagaacacaggtctcggcgtccttggaccaaggtgggagcgctggttctcggagtcactggcagtaggactctgggtctcctgtgaagtaggagctgcagggtcactgtaaggacccaatgaggtgatccatgggaaaaatcttccaacttgtaaaacacttcacaaatgttattatttgtgacgcagctgtcactaataacaccgcctgcagctcactgagcaccccctcccacc

SEQ ID NO: 53121 - DNA, 1048 bp, Homo sapiens
actttgggagatggaggcaggaggatcacttgaagccaggagttcaagacccaacctgggcaatagtgaggccctgtttctacaaaataataattttttttttttttttgagacagagtcttgctttgttgcccaggctggagtgcagtggcacaatctcggcttgctgcagcctctgcctcctgggttccagtgattcccctgcctcaacctcctgggtagctgggattacaggcgcatgccaccatacctggctaatttttgtatttttagtagagacgggcttttgccatgttggccaggctgctctcgaactcttgacctcaggtgatctgccagcctcagcctcccaaagtgctgggattataggtgtgagccactgtgcctggccaaataataataatttttaaaaaagaaaatgattttaattcttattgccactgtaacaaattactacaaatttagtggcttaaaacaacacaaatttatcttacaattttagaggtcagaaacccaaaaggggtctcactgggctaaaatcaaggtgttgccagggctctgttgcttctgggggctccaaggagaatctgtttccttgcctttcccagcttctagaggctacccacattatttggctcttggccccttccacttcaaaaccagcaatggcgtctcaaatctttctcacactgcatcactttgaaactctctacttctcttttccatatttagatgactcttgtgattacattgggtccatctgaataatcccagataataattttattttaaggttaactagcaaccttacatctgcaaccttacatctgcaaccttaattctttcctgtcatataacataacatagtcacaggttctgagaaataggctgtggacatctttggagagccattctgcctaccacaaaacccttaaatgccccctgccccctgctttttatttttgtgattgatattcatgactaaatatgaaacaaggatgtcatttaatgctagcattccattttttttttaattactgggaataaa

SEQ ID NO: 53122 - DNA, 1112 bp, Homo sapiens
cttgaattcctgacctcgtgatccacccacctcggcctcccaaagtgctgggattacaggcatgagccactgcgcctggccctttgtttttttgagatgaggtctcactacattgctcaagctggtctcaacctcctgagctcaagcagccctcccacctcagccttccaaagtgctgggattacaggcacaagccatcacacccagccagggacaccttatttcttaagtagctggtctcattttgtaggtaatgctggaggatggaagaagcaaagggtttggcttcgtctgcttctcatctcctgaagaagcaaccaaagcagtcactgagatgaatggacgcattgtgggctccaagccactatatgttgccctggcccagaggaaggaagagagaaaggctcacctgaccaaccagtatatgcaacgagtggctggaatgagagcacttcctgccaatgccatcttaaatcagttccagcctgcagcgggtggctactttgtgccagcagtcccacaggtgggtgtgctgtttggtcacagctcttgggaacctgccggctggcagtattctgcagtggttggggagagggatttttcgttattagagttctagaatgtcacaataaggacccttcaagtaaaaatgaaggacttacccatggtcacaaacacacacccacagtggcagtggtagcataaaacagtccccattagctgacccctcagctcttgaatagaaagaacatttaaataattagcttaggtcctggttagtgagatgagatgagatacttctctaggatgggttcagtccttaagggggtgtttgggtattcttctgtcttacaggctcagggaaggcctccatattatacacctaaccagttagcacagatgaggcctaatccacgctggcagcaaggtgggagacctcaaggtaggtggtggggaacagtaattgacagcccaggatatacctgtcctggtctcccctgcctttccttcttccccactctgaggcacagcctaggttctggtccacatcacttctcaatgatgtgcaatttttctcttcaccaggcttccaaggaatgccaagtgctata

SEQ ID NO: 53123 - DNA, 1065 bp, Homo sapiens
tgctcctggtctggggccacccttggggaaccactttcttagggaatatttgtgatatagaagtgtagttaacagtgatctttttccttcagggggtgaatctctacattaagaacttggatgacactattgatgatgagaaattaaggaaagaattttctccttttggatcaattaccagtgctaaggtattatactgcgatctggggattgaaagcagtggtattccattataggcttattggcatttgtcccattgaaggaatagcatttaaattatgttcatttctgaaagtagctactacgtttttctagcaaaatttctggatgcattctggagaatgacatttcattaggttaacattacactgtttcccaagcactggagtctggagaggaatttgacccagcccctccttgccaactcagagcacctgaatctttcccattccttgctgcctcgtgccggtgtggggacagatggtgctacagaatgagcagaggaaatccagacaggttgttttccatttgtcttggggcctgtctctacagctctgccacattttctccttgagaatgaaggtattttgaagattttggaggtgggcttgggaacttctaccctggtcttaaaaagagaggaaaggggagtggaaggtttttctatgtttcgtagtgtgcatcatttgcttgattttctttgataatcatatcaactaagttagcagggtaagtaggaacctcattttaaagataaggaattttagtccttgaacaagagaatgctgactacatggggatggtgtactgcttgtccttggcactttgggagcaggatggaaactggtgccatctgaacattttgagttatggccggatgcagacgccggtcttgctaaacaggtgtaccagatgccacaaaatcctttagttgatgagaagggaagccacgtgggctggtaagggcttagtggccctgccctggctcttagtggactttgctcccaacctgggaatgtggaaagcaatgttatcagttgtagtagggagttggccagaggccaa

SEQ ID NO: 53124 - DNA, 1321 bp, Homo sapiens
ttcctgggttccgcatgttaacttcatgtaggtgtttacaaagcacttggcacatacctgtcacctcagctatcagttgttgaaagaataggacagacgtttgttatgctgcaaaggtgagagaactaaagcccagtgagtgctgatttgataacagcacggcagctacttgtgggcaaagcattgtgccagaccctcaatatttatcacttaaatacccacaaaagcacctgcagaatttactggcagccggaatattatatcgccctaggctcatgtcagcacacttgtgtttatacacctgtactatttctatattatctggatcaataacccatttaaatattaacctcactttacagatgaggaagtttggatttgtgtgacagacttcagaggtggagtgaatttagtttttagtcctatagtagaaagaatattttttgggacttagacctccagaataagaccccatcgctgcaactttattttaaagacatatttttcctctctaggctgtggaagagatgaatggaaaagaaataagtggtaaaatcatatttgtaggccgtgcacaaaagaaagtagaacggcaggcagagttaaaacggaaatttgaacagttgaaacaggagagaattagtcgatatcaggtaaggtggtcttggcccagcctagcaatgggatttgctgtgaaatatttgcagaacacccctatgtttagcgggctttctttttgaggacttggagtgtgttcttcttcccattttacctaaaaagatgaggtttaaaaggatatatacctactacatatgactgattattatagaaccagaaacaagagatgggtttattcatcaagaagctctctattttggaagcctcagcctgttgcttttagccatgtaggttccttttacttaaatgagactcctttgtttggcatggcttcaagaagacccctgctggggtgggtgagtggtcaccagaacagctgtggggagaggtgacaaaaggtgagtgcactgatgatcctgtcagtttcagggcagtagtttcacaactttggacttgcatcagattcatcagcagagcttgttaaaacagatagctgggctccagccccagagtttttcttattcattgggtttggggtctggcctaagaatttcatttctttcttttttttttttttttcttgagacagtctcgctctgtcgcccaggttggagtgcagtggcacaatctcggctcactgcaaactccgcctcccgggttcgcaccattctcctgccttagcctcctgagtagctgggactac

SEQ ID NO: 53125 - DNA, 1159 bp, Homo sapiens
ctgagccgtggcagcccttttgactcgccaaggtgggcttcctgcccaagccatggcctgcctgccgcctctcccttaaaggcatctgtctgtgggttttgtgagcatcaacaactggggctggctggaaagcagctctaagctcactctgagtcggggtcttggccagcggcagagtggagagggccctggactgaccaggagctgtatactagcagtgtgaccttggctttcctgtgattcaggtctgtccatgggtccctcgctagtggttgatgccaaattgtccccgcggttctccattttctaacttatgactcagtgacctaatacaaggctggctccacagtaatacttggtgacaatgaaaaaatcccatccctttgcagaaaaacttcataacagaccttgttgctttgatgtggttgttactgtagaatgcagagagggggaacttaccaaagccatatggggagaagaagagacaataagtcttggctattacaagccaaaataatttttgtcctttgtgtcattcagtatgccagaggatgggttatctttataatgtctgtgtgtgcagtggttgatctacagatatcactaaaaagaaatacaaaaatgtcagtgcatggataaattttcttttaagtataacagaccaaaataaataaatttaaaaagcaaagggtgccccttcactccaacaatctcatatctaggattaaccactgttaacagtttggtttgtatccttccagaccttttctatgcatttacatagttgcacagaaatgaacattttaaaaacatggccatcaggtttcttcatgaaggcagtgtgatgtggtaggaatagccctggtctaagccaggagccctggggctggtcctcacaggatagtcctgcctttttctctttctgctggggacttggggtatctctgagcctccttggtggtggatggggatctcgtgttttaacctctcctgtcagtctttaacctgtattcctttgggtccctggacatcatgttttattcctctgggtaattactgttcttcatggtttcattttagatttgtgggcagattcaagtctcgcaaagagcgggaagctgagcttggagccaaagccaaggaattcaccaatgtttat

SEQ ID NO: 53126 - DNA, 4967 bp, Homo sapiens
tctcgcgtggccgccccgcctcgggcccccgggccgagtgggcgggcacgactgcgcccaggtcgcgaggcgcccttcgaccagcagcgcccggggcgggcgggtataaatggagcggtggctccctcggccgcctctctccgccccgggtcgctgccgcctccgccgctttcgggcttcgcagcctgaggaaaaaaagagaaaaagataaaaaaaatctgaaaacgcttcaaaatcctgaaaaaaaaaaaggaaaagaaaaaacgaatcctcggagaacccgcggggaagtcactttcgtacgcttccggcctgccccgcgcccgccgccgcagcgcttggcgtccgtcggtctccgtccgtcggtccgggggtgagccgcccgcccggcccgccgtgccctccccccgctcgggccccgagccccgcgccccgcgcctgccccggcgcaccacgtgtccgtgctgcccttcgccgcccgcccggggctcgccgagtcggcgcccacaaagatttggtttccctctgccccggcggttgtaatcttaaaccgccggagcccgaggcctatatttatagagaaacgcgtgtccccgaggccgccgtgggcagcgtccggtcgcctcttaaaggatttttacccttcggaaggggattccccgtttaatttttttcctactttgattttttgaaatttggagcttcgcaccaggaccgcggagaagtgcaaagtcgcggggagggccgtattgtgcggagagccttttgtctgcggtgctgcggccgtgggagccggcccccgcctcccgtttccgtcccgtctccaagcccgccgactccagctcgtcctcgccgcgccggtgccacctgtgagccgcggcgcgggcccgggctccgaaggcgcccctttgtcctgcggcgggcccgataagaagtcctcctggcggggctcggggtggtggggggcggggagatgaacgctgcggccagcagctaccccatggcctccctgtacgtgggcgacctgcattcggacgtcaccgaggccatgctgtacgaaaagttcagccccgcggggcctgtgctgtccatccgggtctgccgcgatatgatcacccgccgctccctgggctatgcctacgtcaacttccagcagccggccgacggtgagtagaagctgtgcccacacgtgcgtgggagcccggaggaccccgggagtcgtcttctggcagggccctcctgccgaggagggcggcatcacgacagcatgttgccaccgaagctgggagcagggtgcggagattgagaacgcggacctggcatcagatgactcgagtttcaatcttgtttctaccacttgctaactgggtgaccttgggctacttattagtgttgctggtagtggggttggaaaccaaggagactgtaaaacaggattagagtgaagccactggcattccactgcgtgtggtccttgtcagtggggctgggctgttagagatccttgcttgtgcccctcacaggctggccaaaaaggcgggacgtttgaaacacaattccccgcgaaagttttacattgtaaagctcctgcccgctccgccacctttactaaccttgactacctgatgttgtgctgataaaggatcagtcagggcaggcaggaagcagggggaaggtttctgtgcgttaaactttcgcagagacttaggttagtgccacaaaagctgcgtgtgccaggccacctccttggtctgtgtgtttgccactggagtggagaagtgctttactctggacaaatggtatccaggctctgtgctgtagagtgtcgtggaggtagtttagggaagcgtcacttgaaaatctggtgtcatttgtcacctcagctgtaacagtgctttgcactagtcagagcccttttatttcatctaatctgaagaaaatgggactcctgagaaggagaacgaatgcaaaaagttggaagccaagttaggactcccagcacagtgctctgccacctcagattgtggccttagcgtggagcatggagagaggtatgctgcaggcgtggcaggagggaggccagaggaaacctgatcagaggctgcacgtgactccagattaaaagggaacaactgcagagatcattactgggagaaacaagccattctatggcaaagcatctccaggtccctagttttggggtcccccctttgttttctgtctgaggcccagagttactacctgcccaggttgcggctgagaccagagaattggacatgttgagagggactaggtattgctactgtcaatccagtgtgctccaagctgagttctgtccatggccataggagcgcaaaggtagctgagtgtggtctttttaagggataatgtaccacattagctgttgtctgccttactgacttttgaacaaaagtcgtgtcacttagagatagcagaagctattggtcagtgtgtctgccaacacatacttctgcaggacttctccctgctataaataagtgcagccagatttgtcagactaagccggcttgccttgtgcagtgctgtctggaaatagacgaggagctgttgttgaagtgggctcctttactgctaattaatgaaatagtttgcgatcccagctatctatctctgatagccatcacaagcaaagtcctctttccctggactgttcctgacttggatcggtcttgtcatctccccttttcccaactaccccccacacagatgaggcccaccttctgaagggggtggggaaagttgttggaaataatgagtgaaaataaattctcccggctaatgaaacagttgagcttgtggagcggcagagttggggaattttgtcccccctttaagtgagatgttgtcctgaggcaaggagcaggttccactgctctgaccctgtctaaatcccctcatggaggaggttctgggtgatgtcaccgttaggagatgccatcatagccttaaggaaaagtggccaccagatctgggcatccttgttgcgattagtgatgagaagtgttttggctggcaggtggtgttattttttagcttttggttctttttgttgttgtttgttttgagacactgtttcactcttgctgcccaggctggagtgcaatggcgcgatctcagctcactgcaacctctgactcctgggtccaaacaattttcctgcctcagtctcctgagtagctgggattacaggcacccgccaccatgcccagctaattgtgtatttttagtagagatggggttttcaccatgttggtcaggctggtctcgaactcctgacctcaggtaatccacccgccttggcctcccaaagtgctgggattacaggagtgagccaccatacccagcccagcctttggttctttaaattgtctctggtgtacacacggacttggttgggaagctaaggaagcattccaaggtgttggatggggaagttggttgagcacccagggtagctgaagtcctagaattctacagaacttccattaaggcttcaaaaggtgggtgcagggcctgccatctgcgcactgtctacttaggcagaaggtatggtggttttatccttgtgatagtacagagaacttttccatgtgtgatcagttgtgtccattttgatgactgatgcttttttgtttaagtcaatttctgttctcagaaattgaaaataaactggactgaattctgaattcagggatagcacctttttttttttttccagatcatttgctttacaggttttgtcacttgtctccataggtggattgcagactaaatgacttgataactttgatgcaatacctcactgaaaaataaatcagataatctagtattagtttcgtaattactagctagctgcacagcttagttaccctaaacataagtttgttcattttgtaaaatgtataatttcagctgtcccacctgagtcatggtgggtggtagtctgcaaagtctcttctaagtggtaaagcttagtcaaatgtgaggtattatcactggatcttggtgtcattaaggccatttagattatctttacttgtggcccctttatccaacaagggcacagacccagaagggtgtttagacttctgtcatgaagtagagtcattagctggaacttatgcttcccttactaacagtgcaggctggaggaatctgatgcccttttattttaatagagttgccttttatcaagagtgattaccttgaaaagtcctggagtaatctgttcttaggctgttggcctgtgggagctgacgttttctctccttattgaaatgtgtttctctcttacagctgagcgggctttggacaccatgaactttgatgtgattaagggaaagccaatccgcatcatgtggtctcagagggatccctctttgagaaaatctggtgtgggaaacgtcttcatcaagaacctggacaaatctatagataacaaggcactttatgatactttttctgcttttggaaacatactgtcctgcaaggtaaacattgattaaatgattttagcagaataattaattgattcttgaaaacaagataaataccaaacagagaactatcttggaattggggaacaagatatgggaattttcaaaatgctggacatggaatcctaaaagttcccataggtaatctcagggccatacccagcgtaaccagcacacgctttcatacccttgttctttactcagcctgaaatatccttcctattctttagctttggaaagcccacgtttttcttttgggatgggggaaagtagaggaccagagaagtgtctctagtcttgaggaaacttaatcactttagaagcataaattcactctattccttctacgtatctgttctatgctgagcactttaaaacttaaacggtggtggtgtatatgtttaatgccatactacactgaaaatctgt

SEQ ID NO: 53127 - DNA, 1114 bp, Homo sapiens
tatgcaccaaggcataggtcacgggtcctctgccttcctttatgctggtgagaacaagtcagtcatcccacagatgttcactaaaaccatcacaggaccagccatgaactagacctagtatctgccctcaagggactcccatggagcctctgatcttcaggcttcacctggaaagcttaggaagcatttcccaagagagaaaagaggaagaacaagtggtctggggataagatgatgagctagatcttgggcacattgagtctgaagttggattccctgaagagctggtttaagaggcattctgaggatggtggctaaagccatggaggtgacaagcctctctgcagggagcagcagaatgcgaagtgacacagaagggacagtactgtgttaagagacggcagatcaagaggcatggtgaaaggagagcccagaaacagtggtgtcgtgcaagtcaagggaggagtggtttcaggaaagatgatcggcagctgtacagtggacagatggtctgagaggagaactgaaaagaatgttctagatttggagaacttggccaaagcagaagcccatttgcaggcagcagtggagtgggaggaaggtgagaaaatcgagacagtgagtgctgatgacaccgcacagctacatggtcagctgcaggctccacccttctgtcttctgtacccgcagggctcttccaagctggagaaagccgaggtcttgcagatgacggtggatcacttgaaaatgctccatgccactggtgggacaggtacccatgctcttctctttcaggcgtcattcatacaacaaatattttgaggctgggccctggggatatgctggtgagcaaagtccacacgctgcccactctgaggagctcagtcaatggagggaacatttgcaaagcttctctctctcctttcagcatctccctctccactttcagtgtctccatttgtcgcaaccttttcctcagttcagctccctccagtcttagacctgggaggcgctttcttctgtaacagactgttcctatgggtcccactcttgtccaacccaggacctcattaagaattcacctgaatgagctaattctcactgggatcccaat

SEQ ID NO: 53128 - DNA, 1043 bp, Homo sapiens
tatgtgatgagtgtctcagctctgctcaggtatggatttgtgattatcaactgacagggaggaagctgaggtgcccctcttcacccctcctgatcagtccccctccttcactgaagagtttgccacaagggtcgtggtcttcctattcctgtgctaatggaggggagacagaatagggtagtgtcccttccttcaacctgtacatgggttcagggttctccagtcctacgggaacctgctggggcacttccccctgattctcagcatagtctctgacagttgcttcctgggcgtcccctcctctgagtactttgtgaatgttgtcattcttctgtatttctttcttggctcatggtttctctctcttctctcagctgaaacagtagcagtctatctctagttttatgcagcctctgttatgctgttgatcttcatggtctctttctagtcctgagcttcagatatttctgcctgcaagtctcatgggcagcttaagtttgcctaaaatggattctcccgcttctctaatcctgtcttcctgtgttctcaatcttggctaatttgccaccattcatccacacattgacccacgccagaaatttgaatgcaaatcagaactcataaagtggccatcacagtcagtggagtccccctggatcatcctgtatcctctgcttagtcttacctacttggagcacaatgcaaggcccaacatcttccactgtcttctgagcacttaggcctgagcaagagggctgcccccttgcttccatgtagttagccagtgtatatgcagggccaggcacagagggacgaggtggtacatggatgggtctgcctaactagaggacagtgggtgggctggaactggcatttgaagatactgagagttgtggatcatggaccagaaaagtgctgttctgtgactgtgaagcaagaggaggaagcagatgcatctgagggcaagcatgatgagataacacccccgtgtgtgaggctcaggttagccagtgctgagacctcctgtcgctgggcatccagct

SEQ ID NO: 53129 - DNA, 1051 bp, Homo sapiens
attgggaacaagccggctggccgcatccagatgctcctgcgttctgatgtcgtgcccatgacagcaggtgagcaggacgctgtggtcagaacggcgggacgctggtggctgagcagtgagcctttcccaggttcttactgcttcacttcttgtgtccttgatattgcttctgacctaagttgatttgaggcatctcagatcctgggatctagtaacagataagtcagagcaggtgtttttgaagctttataagtgctggcttactgttttttaatcgttttttaaaaatacaagtaaataatgtattcttttttttaaagaatagcatatacatatattccaataatatttaagacaataaattgaaaattcattttcccctctctacatccagtcctcaattctagaagtaactagtgcttttattgagtattctttgtaatttattaaatattgacttctattctctttttaatctaaattttattatctagacatataaagagtcaattcagtttcacaaagcttgttttgaaaaaacagtcgtcccctggtgctgtccctgtgccctgctgccaacaccatttgctgctcctcagaggagcggatttcaactcttaggtgttttggtttttatttccatgttgataacagttttatatttctacttcctgttttccattttaaacattatcttctgattttctacttcagagaacaaagaattagttttttaaaatccccttccctgccccctcatcttccctgtataggtaccataattttggttaggtcctaagttattttaacaatgtaagcatcatgtgataacctcctttcatgcacagcattttgttttgcctggaattgataattgccttgtttttgcatagttttctgtgtaatcattcctgattttctcccagaccatcctgctgggggttttgcatccaggtgtctgcatcttgttaaggggagatgagggcaaggctgaattcctcaacattcagtatataaactttcacataatctccatttgtcattatggtac

SEQ ID NO: 53130 - DNA, 1062 bp, Homo sapiens
aaaactttatcctcaagcatacgggaccaggtaggagccagttggcatgtggtgacgagggaggctgggcaagggtgggatggccaggcaggatggaaggacaggttgtagttctggctggcggacactaagagtctggaggagacccagccaccagacataggagaaccatgcagccttgctagggtggagttggcttgttgacattcaggtactgttcatcccccaaccgtgtccacaattcctattagccccgcttggattctgtggtctgctgttgcaggctcttatgctctcaaccccactgctctccctgccctcaccatcagatttactcagtaaaatctcggtggttagtcccccagcaactagagaaaaaacacagaattgtactgaacaatcccacttgaaatttataactatagttcttaaggggacccttgccaacctgaccagatttccctacttgatgctcagtcccaaccggagatgatgtgtccatgcccgtcttcacttctgaagccctcatatcatcaccttcccacctcatctaatgcttcacctcctgcatctctccactcgtgcatgctctttcttccaattacaggggatgagctgtctctcctaggccagcctctccacctgtggactggatcctgtccctctcctctacttaggaacatggcttctaaagttgtccccttcttgtaatccatttcccctgctctgctagatcagtccattagcatgaaagcatgcagttatcaacctttaaaaaaaatcttcatccggttgccgggtgcagtggcttagtcctgtaatcccagcattttgggaggcagaggcaggcggatcacctgaggtcaggagttggaggccagcctaactaacatggagaaaccccatctctactaaaaatataaaattagccgggcgtggtggcgcgtgcctgtaatcctagctgctcggaaggctgaggcaggagaatcacttgaacctgggaggcggaggttgtgatgagccaagatcgcaccattgcactccagcctgggcaacaagagc

SEQ ID NO: 53131 - DNA, 1052 bp, Homo sapiens
ccctccagatgctggtcagccaggcggttataaagaatctcatctgctgaaggcttttagcagggactgagtcctgtagctgttggacacctcctgtgggttgggtcactcagaccattcagaatccactgagctgagcttttgcatcttggattgagatctggatgagccaggaggcaggagaggctaggtggtcctcatgaccctaggatagctcttgctgagggatggtggcattctgccctacctctggctcccatgtgccgactggactttgtgagctccagctgctacagttgactgagttcaggctccatgtagctgggatatactacatggttacccctcacccctatggagcttccaaaagagaccctccctcaaagcacagccccttctctgagtgcaaataatggccatcagaggtcagtcacaggtgttaggcaggcatctatgaagctggggatgatagcactgacttcagtgcttggacgagaaccaggagagagtgtgtagaaaaagcacagccagcctcccataaaaggacagactcctgtgacaaccttgtcactctgttcctccctgatactctggggaggtggaggccagtgggcagttctgaaagctcagcaggtttggagccattgggtgtggactcctctcccagtgttcctcctgggtgttcacagatgttattgaatgcacactggaaccctgcacaggtaaactgaggctttattggcgtgactgccaaaggtcacacagggtggtttggcagagctgggattagaagcccagcctgtctctcttcagtagtaatggagtcctgggaggtttactaggctttagcctcaatctgtggcggcagggtccacagccctggggagtgacacagtcatggtccccatgattggccaggacctgtgtggagagacacaggagacaagaccctgctcttccaggccagaagggaggggagccccagagctgggcagtggcatgccccacagcctggccacctgcttcggctacgcaccatgcagcagctgcac

SEQ ID NO: 53132 - DNA, 1084 bp, Homo sapiens
aatcccacttgaaccaactgaagaaaagaagaagattggactcagatgctgtcaacaccatagaaagtcagagtgtttccccagaccataacaaagaacctaaagagaagggatccccagggcagaatgatcaagagctgaaatgcagcgtttaagagacatgtccagtggcctttggaaaggtggtggggatccagttcaggagggaggggtatgtttgtctcccagtctgggcaaaggagtgctatgcggaattctctgcatagcagaaaagctcccaccattttcttttgatgtggttttaaagtctcacgttctctataatagaaacagcaggtcttgtcagctccttgtgtggctgatgtgtctggaaatgatgtagttcaggaaagcattttttttttctttgaaccttaaaggttctattattaaaagcagcacagattccacatttttatacatgaggatcttctttgtggtgaataccaggattgactgcatccctttaaagaagttttatgtccctgactctggctaaaattatctaatttccagatgcttttgtagatgactgaagtatttgtgagccacatattgggagttctagatttgagtgaatggcaggaaagggccatctccattgagatgattaagtgaaccaaactagttctcagaattctacagagaaggagggaatcagactgaggaagctgtgacataggacttgaagaccaaagactttgaaatttgcgagctgctcatgtgtgagttattatcactgctgtctttctattgagttacaaatctatatttttattgaagtttaaataaagaaaaaatttacaagagcctctttgatccttaaaaagatatacaagtccatgcctagtttatacacagtatgctctgttatcaatgtgatagctttttctcaaatttgacactttttgtagatcatgctgtctgttcatttatgtagcgggtgtttatttaacacgttatagtccttgaagacatctagagagggtcttttattggagatctattacttccaattgaagccctctttctggagtgacctgag

SEQ ID NO: 53133 - DNA, 1032 bp, Homo sapiens
gaaaatttcagagaatcagtaactgctcaggatctcaatttccttatctgacagatgaaatggctcaactaggtccatctccaaagcccctgctagcttttaggagcaatggcttatctgctgataccctcctgttcccagccaggactatcaacatggtatcttccaatcaattggcttcaaggaatttcacgagtacctgatcactgagggaaaatgcacactggagactagtaaccagcttctaaagaaaggtgtgaattcttccatctaatctagtcttggacatctttgggtggcagggtactctgctggtatggtctgagaaagagccaaggcttaaagcgtcccaaatagccttcagctcagaactgagatttttgtccaccaagtctgacattgcactgccgtggctgactttttcctgctgggctgggagggcctgcctctctgcagggtaaggagtgcttacctagatgttcttaaatctactgtatctttcaggtattgaggctctgaaacaagtaactaagagatatgcccggaaacaaaaccgatgggttaaaaaccgttttttgagcagtaagtctcatgtttttctttatcctatgggtctgttttcaatagaatatagatgtcctcagctcacccagaaaatgaattttagattctgggcctgttctaagattttggatctgacctaagggaagttctataacataaatgattatccagggatattttcttgggatgtcacaaaaaaaaaaaaaattatttgcattgaggagtctgccttctgccttgaacagatggatactggctgcaaacagctaagaagaacagcagcatcttttttggagagttggtgttcagggctgatttttagcttcagttttgtacctgaagagcagtcagatttctgtagggaagatttcctaattacagtgtttttggggggccagatgagttgtataaaaagacaccttcaccatttctcccagcgtctccacatggtgcttcagattgcttcaa

SEQ ID NO: 53134 - DNA, 1026 bp, Homo sapiens
aagcagtatgccttataattagcttgctagcctgatggtattttgttgctaaagtataattatgtccgtgatagtagtaacttattcatccagcaaacattcagtaagcattcaatgaagtgctgggtattctgtgtggtacttcggtttcagagttgaagagacagtgcctttccttaaggaattcccagtctagtgggacaacagacaaggagatagatactatctgtctgtctattatttatgtgataaatgctgggctagatatattttcagagtgctgtagggccacagagaagggatgacgaatattatcttggggggagtcagagaccagtttgcaaaggtagcctatgataggcctggaaagatgacatcattatgtggacaaacagtagagtgtagcactgaagagcacaggctcttgaggcagactgtctaatagcaaattcctgctccactagcttctagttatgtgaattgttaagacaaattagtttacctttctgtttcccaattctcctgtaaaatagagataatagtaataacacatatttcctagcttcatcaaggattagatgaattaatacatatatagtgctcagaatgtgcctgacacatgacgggtcctcaataaatgcaaactttctaggaaggttactgttgctgtaggccaataaatcacaatgatagagatgtagaagaacataattaaaatggtgacaatctgttgttaaattaatctgccataaattgataaaaaaggtaatttttcaataatgaaattttataaacaaaaacttttactctacaggcagcataaaataatggtatctgattcatagtaaagctgtttgtcacatctgaacaattacgacctctcactctttgctcctttgcttggctcagtagtttagaatgtatctaggatgtcttttttttttgtttgagacagagtctcgccctgttgcccaggctggaatgcagtggtgcgatctcggctcactgcaacctctgcctcccggg

SEQ ID NO: 53135 - DNA, 2003 bp, Homo sapiens
catctttcttcccaccctgccttagccgcttaagggttagtgggattctagtagaaaagaggtggtctgtctctatgcctgcagattggctggcaaggagaaatgtgtaaatgattatttacctggatattgaaagtcttttaaaaaaagttattttcggccaggcacgatggctatcgcctgtaacctcagcactttgggatgctgcagtggatggattgcttgagctcaggagttcaagatcagcctgggcaagtaacatcgtgaaaccttacctctacaaaaaatacaaaaattagccagatgtggtggcatgtgcttgtagtcccagctacttggtggcgggagctgaggtgggaggatgactcgagccctgggaggttgaggctgcagtgaactgttttcgcgccactacactccagtcttggtgacagagtgagaccctgtctcaaaaaaaaaaattattctcaggagcaaaggccgccttaaagcagataattatctgttcaacggagattctaaagagaaaaatttaaagtagcagagatgaaaaaacaatagtggctatagtaaattgagtgcttactattttttaggcattgtgataggggatttctatgaattgtcacatttaaggctcatggggatttttacaggtgagaaaactgaaactcagacaggctgagtaattgtccaagagctgaacctggaaattgaagtctatttatcttcagaacctgtgcatctcacttaatttggtcaagcctcaagtggcaaaatgtgatagtctctccatgatggtagagactgactaagtctaagaaccttagagaaaccagcttgtgttttgccttagaaggcaaagtcatgcaatggatgtcaccttgatggcctcctgagcagctgacacttggttctgtgagagtccttgggcttgtgcttattgaactgatttggaatactaataaaactttgacttttagcagcaagacctagaaagttctagaactggaaggaattaccactatgcatttgtctctggtttctgcaagtccctccagaactgattggacatgattctggaaatttgttggaaacactgagggctggtatcaacgcattttggttcccaccctttctcctctgctctgcagataaatgaatgtggtttcttgctaatggtgtccttccaaagtgagtcaggattctcttgatatcgtgatatctttcttaatgttcacattgaagatatatttgcccgagacaaaattcctattgttgtgggaggaaccaattattacattgaatctctgctctggaaagttcttgtcaataccaaggtaagtttagttcactcgtaactcactgaggaaatggattgctctttcttgctgtctaatttcagtgggagaaaggttgactcttgcctatttcttatacccagcaactataattttcctacttaatattctcaagcaaatgccacctccatgtgtgaagtgtgttcctccaggctggtctatgggaaggggctctgtgtgggaaaaatgttgctgtgtggattaattagcatctccatataaattaacagttcattaggccaggcgtggtggctcacacctgtaatcccagcactttgggaggccaaggtgggtggctcacctgaggtcaggagttcgagaccagcctggccaacatggtgaaaccccatctctactaaaccccgtctctactaaaaatacaaaaattagccaggcatggtggcacgcacctgtaatcccagctactagggaggctgaggtgggaggatcacttgaggcttgaggcggaggttgcagtgagctgagattgcgccactgtactccagcctgggcaacagagcgagaccctgtctcaaaaaaaaaaacagatgcgattcaagaaaaaaatatgtataattctttagaaaaattatattaaaaaaaacccagtacgttagccattagcctgattcagtatttcct

SEQ ID NO: 53136 - DNA, 1046 bp, Homo sapiens
gcagcccaagccaagagagaagttttctttctagtggcaatttcttctcagaaggggcacccaaggcctaaatactgatggatgccatccccatcagactatggactgaaagatacagtgtctttgtcacccaaattcttgtccttagactgtggcatcatcattctctgggaacttgttagaaatgctgattcttgggccccactccagacctactgaattagaatctgcattataacgggagtccccagtgatttatatacacattaaaatttgagaagcactgttttagtgataagaacaccaatttaagaatcagaaaatttgtgttacagtcctagaactgccttttttaccatgtgaattttactgggtaaagcatttccttaaccccactgagcttcggttttctatcctttaaatggagatacgaagttaatctataaatataatggagttatagttagaatttcaaaggggttgttagatgggagaggactggaaaatatagttctgggtaaaaccaagaaatttttgcaaaaagaataatataagggggattgcccttatgtcttaacatgcagactgcctttagtatctggattgctatatattaaaagattgaaaagtcataataattataatagcatggaacttatttagtactagatatatttgtggcacagaatagaaaacccagatatagattcaaatggaggtacgtgaatttttttttttttttttttttctcctagagacagtctcactctgttgcctaggttggagtgcagtggcaccgtcatggctcattgccaccttgacctcctgggctcaggtgatcctcccacctcagcgtcctaaatatctgggactacaggtgcttaccaccacacccagctgattattttcattttattattattattttttgagacggagtcttgctctgtcacccaggctagagtgcaatagcgcgatcttggctcactgcaatctccgcctcccaggtttaagtgattcccctgcctcatcctcctgagtagctg

SEQ ID NO: 53137 - DNA, 1029 bp, Homo sapiens
aaggtacagtgccgggccttcagtgactggatgaaacattgtactgagaaaattgaaggcccttgccaaacatgtacaatgatggcctggaaatacaaactaccaactatatgctaagagaaaagaaacaaagtgttctgttcgggtttatagagaggaagtgtctctaatgcctcagtttttcaagtcctgtggagaagcagtagccgtacataggagcacagttccttttgtgtttgtttaaacctacaagaggagaaacaaatgatttttggcagtctgactagtaagcaagcagaatatgtgtcatctcgtcatccaatagatgtggagctctttgttcttttttttttttttttttttttaatagaagcaccatgttgcccaggctgatcttgaacactcttggccccaagtgatcctcctgcattggcctcccaaagtgctaggattacaggcatgagctaccccacctggcctctgtattctttttgtttgctttgggacatactgtaggagcagtgtttgtaccaaaagactgtctgatcaagggagatatgggatgcttgggggagggatatgaaaggagagatgggatggtggatcacagtggcttaataaaatgtgaaataaaaggcttgaagacctgtttttttttttttttttttttttttgaagacccattaaccaggagaaaaggggtctatctggaaggtatttgccacaactgacaaaggcagtccttttttttttgttttttttttttgagatggagtcttgctgtgtcacccaggctggagtgcagtgactccatctcggcccactgcaacctaagcctcccaagttctagccattctcctgcctcagcctcctgagtagctgggactacaggcgcccgccaccacgcctggctaattttttgtatttttagtagagacagggtttcaccgtgttagccaggatggtctcaatctcctgacctcaggtgatccgccagcctcggcctctcaaagtgctgtgattacaagc

SEQ ID NO: 53138 - DNA, 1301 bp, Homo sapiens
aaatggatattatcacttcacagttaagaaaataggcctaaggtcttagaataagtagcagacctggagtctgaacatgaaagtgtctgctttccatccccagtggcatatctgctacacaaagccatttcctttaagatgaccaggggctgtggggttcaatcagtagggagttttttgtttgtttgtttgtttgtttgttttaagatggagtctcgctctgtcacccaggctcatgatcttggctcactgcaacctctgcctcccatgttcaagcgattctcctgcctcagcctcccgagtagctgggactataagcgtgtgccaccacgcctggctaattttttgtatttttaatagagacggggtttcactgtgttagctaggatggtctcgatctcttgacctcgggatccgccagcctcggcctcccaaaatgctgagattacaggcatgagccactgcgccaggccaggagtttttaacttgtatgccagttatccttcttaggagtgtgcaacattttgatcaggaaaaagatgtattttaggattcatattgtaaatcacagtgttaattcatagtgatatctgtcaagtggagtgttgagctgactggaagccacctgatgtactttggggataaaatttgctgcagctaagagatattaatagaatctaatgtcaagttcgtatcaaagacagatagtgtttattggaacaaagggtaaacttggacttgtggagagcctagacagaacagtaaacttctttgttgtaacacaccaaagggtgaccaaatagaaagtgtgatcatagaaagttttttcaagtttctaaattgggttttttaaaaccaatatttgcattttaataattccttttggtgtgctgctgaaaattttctattcagaagtgtaccagtaactcagaaactattgtacaacactatcttaaatgttaaattgtctcgtacttcatactgcttttgtcatccctttgtcctgctttaaaatgtagggtcatccaaggcaacacctacccaaggtcaaccctacagcacctacagggcagttcctatccagagaaagtatttgtttttgtaaacattgaataagtactttaagctttgaggtaaaactacaatggggttgttaaaggtattgtgtctatggtgatcatttcttcatgtagcctgatatgcagtgacttgcttctgtagccatctagcatctgaaggtactgcctgtcctctttcttcccagtgttcttttttctttttctttttttttctatgacaca

SEQ ID NO: 53139 - DNA, 1266 bp, Homo sapiens
aagagtgggtagtgggtgacattttgggtaaatctctgatggaggaactacagcagctatttgttgaggagaatttacagttatgagtcttcacagagtaaatgagatgttgaacatgaaatgcctggcactgaacatagcacctgatgagtactcagcaaagaagggcagttcctttccccaactcacccagaagccagtgggcatagtttctgctttcattagtttatgtggcatgacaagaccatcagcacacatgaaacgatcggataattcaaaaaataatttgtttgcagtctactttgtgccagcttcagaagacaatttacctcaaatcccagctgtcttttccaagatatgcagctatagcctaacctcttcatgcctttgtttcttcttctgtaaagtaggaagaataatatcaataacacaacattattgtgatgattaaatgagataaagtatgtgcagtacttaatacaatatatggcacataataagagctaaaaatacagcagctgctatcttctgcgaggccctactggagagacaaaatcataatttctgcccttgagttttagtccagctgaacataaaacaaggcagagctaataaatgtttggacagagatattaatggatttgcaagatgatgggaggagagagactacagatgctagattttatgacaagtattatagaatttctgagacaggagaaattatcgaaggctggcttagtatggaaagctctctgaaaaagggcttgaaaaataggtcaagtttggataggtaagaaagaagaaaaagcttattaaaggaaagaacatgaagctggtccaaaggtattgagttgtctcagttgattgttcacagtcagttacagatggaactcccttttctactctttggccctttctcactactgtacatgactagtcttaaaaaaaaaaaaggaacatgaatgaagatgaagatttagaaggtgaaatggccatagtgtgtaggtaggatagtaaaaggagactgttcaattgcagatatggaatgtgagatgagcaacatgatgaaggcagtgtgtaaggaacattcatttgtgagcagtacgtatggtacttggataaaaaatatccaagaatggtataatagtagatctgtggtctgatacctcagagacttaagtaataagagtttcagtaagatggagttacactgatgacacctaaggtccatgccaatatttatgttctatcatttctttcttcttt

SEQ ID NO: 53140 - DNA, 1029 bp, Homo sapiens
actgcactccagcccgggcgacagagggagaccccgtctccaaataagaagaaaaaaaaaaaaagacggcgggtagttgaggttctgacaccagttagttgactgcagtcacgtcgcctgggtcctgccgctccctcctccctaagcaacctcgctacaaagcctgagatccgcgcaggcgcatagacggttgccatggggacagctgctccggcgcaagcgcagactgccataagatggcgtccgtggcggctgcacgagcagttcccgtgggcagtgggctcaggggcctgcaacggaccctacctcttgtagtgattctcggggccacgggcaccggcaaatccacgctggcgttgcagctaggccagcggctcggcggtgagatcgtcagcgctgactccatgcaggtatggcagtgcggctggcccgggcgcctggggaccccggaggccgcgtggacaccctgtggcaaaggtcttaaagggtgaaccccgaggcttgtaggggcggagggggtaggtaaagggagcccatacttactaagcacccgccgcatgccagacacagtgccagatgtttcccttatcatcgtctcatcaacttctcacgacgttactatttggtagatactattatctccttttatggagaaaggaattggggcttagggaggtgaaacgattttttccatgtcacatagcgaataagtggaagacatggtatttgaacctacaaggtcgacagataggtatccagtaaatatcttttgaataaaaattattccagagcttttgttgtaactctaaccctaacccagcgagatcaggataaattggataccacctatggtgtctgctgggggagtggaatagggttgacagtcaggagacctggattctagtcctgaatctgccattggccatgtgacttcggatcaacaatgtcgtttatttggacgttattttatatatctgtgaagtgaggaaaatgtcacctaccgcacaaggttatagtgcttaataaatg

SEQ ID NO: 53141 - DNA, 1050 bp, Homo sapiens
aataggatttataacttgtgaaaagtaacaattccccaagtgcaggctgtgctgggcaggaacaaagggcagctctgcccacagacccctcatttacaattctgatggggcatgaaagagcccgactggggaagatctttatagctaaactttgtcccaggccggtagctctttctctccaacccctccgtgggggaggggagagcctttgcagactgggggctgttggcttgggtctgccttttgttcttatctaagccttgctgtgcaaaaggaaattggagaatattttccttcttgctaatgtcccctcctttccttcactgtgcccttaccacattacaaatgaatcagctttctgctcacctcgatttgtatatatctaaattggaaaaatgtctcctaccttcccaagcaccagcgtagacagctaaagctgtagggtctatgtttgtgtttctcatgggatgtgtttcttctcttgatctcttttctcggacagagaatgaagaaattgatgttgtgacagtagagaagaggcagtctctgggtattcggaagccggtcaccatcacggtgcgagcagaccccctggatccctgcatgaagcatttccacatctccatccatcagcaacagcacaactatgctgcccgttttcctccagaaagctgctcccaagaagaggcttcagagaggggtccccaagaagaggttctggagagagatgctgcaggggaaaaggaagatgaggaggatgaagagattgtgagtcccccacctgtagaaagtgaggctgcccagtcctgccaccccaaacctgtcagttctgatactgaggatgtgaccaagaggaagaatcacaacttcctggagcgcaagaggcggaatgacctgcgttcgcgattcttggcgctgagggaccaggtgcccaccctggccagctgctccaaggcccccaaagtagtgatcctaagcaaggccttggaatacttgcaagccctggtgggggctgagaagaggatggctacagagaaaagacagctccga

SEQ ID NO: 53142 - DNA, 1126 bp, Homo sapiens
actttgtggcaatctgtgggctacatgctggggtcaaggcagtagaactccaggccctcctctcccatccttgatgcaagtgcaacctcgctgagggcagactggggcatcctgtgccactaaactacattgttcttattctggcatcttagacctccacacccgtgagaaatcctggagagggtatttttgtagagtgtagactgtggctagtgacaaataaattaggaccaagaaagctcactgtagcttttaggaataacttttacacgaccatttgatagggaactggggaatggggtatggaagttttcctacacttgagagaaaaaataggataacaaaaattaaaagtcttttttttcctggtccactgtgttaaggtcatttttaaccagcttgctttctacaccaagagtttatgtttgtttaatggctggaaagagaatcttgagatcaaaaaaccaataaagatgtatctctacaacggctggtggagtggtagagtggaaagagcattgctttggaagttggacattttagtttgagatccagaacgttacaaaggtgatatgtggacttcgctgatctgggcctcagtttccccatttgcacacgatggggttggacttgattgtcctgctgatgacatttccttgtctggatagagtaagacactactctctgaaagggagaatggtgtcttaaattatttctttcttagatagaatcttcctgagccacgaggcttaacactgaaaattaaaggtttgggatgtagggaagcctgctgaatcattttctaacctaccctttaacctgaacctgtttgtgagcttctagttcactcacaggccacatggcctggaacaaaatgcaacagattgcaaacaatgaggcggggggtggggaaagtgattggcagcagagctcacccaataggggctaggggctgggtaagacagaagtccaaacacagcgtaatcagccaatcatgggctttggggccaggagggctgaatggtcaggtttattaatggagaaataatgcgattgtccacacaatggaagccttcctgacaaaggggctcaagcttcctgatatgcaaagaagctgagaacggag

SEQ ID NO: 53143 - DNA, 1050 bp, Homo sapiens
gacacctccttcgcccggccggcacccggtcagcacgtccccccttccctcccgcagggagcggacatggactacgactcgtaccagcactatttctacgactatgactgcggggaggatttctaccgctccacggcgcccagcgaggacatctggaagaaattcgagctggtgccatcgccccccacgtcgccgccctggggcttgggtcccggcgcaggggacccggcccccgggattggtcccccggagccgtggcccggagggtgcaccggagacgaagcggaatcccggggccactcgaaaggctggggcaggaactacgcctccatcatacgccgtgactgcatgtggagcggcttctcggcccgggaacggctggagagagctgtgagcgaccggctcgctcctggcgcgccccgggggaacccgcccaaggcgtccgccgccccggactgcactcccagcctcgaagccggcaacccggcgcccgccgccccctgtccgctgggcgaacccaagacccaggcctgctccgggtccgagagcccaagcgactcgggtaaggacctccccgagccatccaagagggggccaccccatgggtggccaaagctctgcccctgcctgaggtcaggcattggctcttctcaagctcttgggccatctccgcctctctttggctgaagctgcccgtgtagtccccaaccgtgtctgtctggcacgtgggtgtgttggtaaacagtttggaaaagtggcgtgggagccagcctccctttgatgattattggagccccaggggacaagggatttgaggtgagggttggcgcttagagaggacaatactggggttggactgtaagggattgaagggggtaccttaagagacactccaaacctgaagtttttttgctgctgcctctttccctaggaaactcacactcccctagggggagaagaagccgagagccttttgtgcaaagccaaaaccttcgtccttttaaaaacctaggtctccagttggctttactttaaaatgccaataataaa

SEQ ID NO: 53144 - DNA, 1048 bp, Homo sapiens
ctcttctgttctttccagagaggagcttagccagggacttctgcccttcctgggcccgggcctcgggggcgattccgggtaggtaaagcggaacgagggcgtggcctctcttgtgagcccgccctccccgtgtcgctcccgccttgagggcggggctctttcccaagtgccctctgtgagagccgggccgctctctccggggcgtggcgaagaggggcggagtcacgagcggggcggtgagacttcctgcccagtcgcgggccagcctagcgcttcagccggcggctcatttccggtgggggcgccgcgcccagtgagggcccggaagtgggtcgcgcggagattgctgggcggttcttgccggaagcggagagcggctgatcgcagtccggaggtgaggcggaactctgaggtgagggtgtgcagcttggtagggattggggtcccttccggggcccatcggcccctggtggtgttaatggcccttctggcctacgcgcgtgtcatgaaccctgccgagagggccggggctgaggccctcaggccgacccggactcttgggcgcggtctcttgaggtggggccggggtgagcagctgagtccgggtgccccggggaggcccctctgcccgatttcgcagcgctgcccatcagcttcagcggaggcctgattcctgaggtgctctgactggaaggaacctccgagatcggagagtcttccctgtctcctgttgatgctcccattgcactgataggtaaattgatccctagagaagaggctagtctgagatatatagcgagtgaggaaaagaatcggaatcatgatcctggtgccttagataaccagccccagttcttcccgtgttgctcggaacctctctaacttgggatggtcttccggtcggtgttgccccgcaggctgctgcaggttaaaggccagcgctgcgtggaacttttttttttctctcctcccaaattgagccgtttgaaatgcctagggagtttttaaaagaaaggcgggcacatccttgtatttacaggcagatatc

SEQ ID NO: 53145 - DNA, 1030 bp, Homo sapiens
ggttcaggaaaagcccttctgaagaagcagagtttttaagatgaattttgaaggataaataggaatgcgttcgaagagtggaatgagaacatttgagacaggttagcatcagaactgtgtcagttgaagctctttgtggggctctctcttcaagagaaaatccgggggcatatcagcacatttatcatttaccagacttttatttaatttatttatttgtatttttagtagagatggggtttcgccgtgaaggccaggctgctctcgaactcctaacctcaggtgatccccccacctcggcctcccaaagtgctgggattacgggcatgatccaccgtgcccggccccaccagacgtttattaagaccttaatatgtatgaggcacattttaatgagatagcctttgtggcaaagaatacagttcttctggagtttacagtgggagaggaaatagacaagtaaatgagggatggcttacagtgtcatagtgcatagcacagggctacaagagcacagtggagaaatacctgagccaggtgcccagggttccaggaggaaatgggaggctaactcttgaaatatttatttagctacatagggaatccggaaaagggatttccaggcagagactactacaggtgcaaggacctggagaaccggacagctgaaagaccatgacgagttcagtgtgactggaattctagtaatggctggggaagtggaggaagtgagatgtggtcaggtcagtcatatgtggaggacattgtaagtcatgctaaggaatttggatttttaccctgaaagctatggagatgctttgaagggttttatgcaggaaaatgatgtcgtcagatttatatttcagaaagttcattctgtcaagtaggaggggaccagccctgtggggaagtaaaacagtgtttggaagctcttgctgtagacatggcctgaactaagacagtggaaatgggaatggagaggaggcatcagatgtgagcaatattaagaagatagaatccatagaattgg

SEQ ID NO: 53146 - DNA, 1336 bp, Homo sapiens
caagagtaaagatacggaggcaggagagggcctaaattgttcagtgatactggggcctggagttttgcagaagaccagactgcaaaaaaggttagatgtcggccaagttgtgaagggctttttgtttgtttgtttgttttgagacggagtcttgctctgttgcccaggctggtgtgcagtggcacaatctcgggtcactgaaacctccacctcccaggttcaaggaattctcctgcctcagcctcctgagaaactgggattacaggcgtgcgccaccacgcccggctaatttttgtatttttagtagagacgggattttaccatgctggccaggctggtttcgaactcctgacctcgtgatccgcctgcctcgccctcccaaagtgttgtgattacaggtgtgagcctccgcacccggcgtgaagggcttttaatgccttgttgaatttgtttggatttgattttgtgggtggcagtttgctaattgatttgcccaggtccagcataaagaaatttctgggctgggcacagtgactcacgcctgtaatcctgacactttgggaggctgaggtgggcaaatcacttgagatcaggagttcaagaccatcctagccaacatggtgaaacaccatcactactaaaaatacaaaaattagctgggcgtggttgtgcatgcctgtagtcccagctacttgggaggctgaggcaggagactcgcttgaacccgggaggcggaggttgcagtgagctgagattgcactgctgcactccagcctgggtgatagtgagactctgtctcaaaaaaaaaagaaaagaaaaaagaaatttctcgctttttccagaaatacttcctcaattgggtaggcataattgatatctcagagaagtttaaataaaatggtagcagcaaaagtactttgtagaatacagcctgatgtgcaaaccaaaagtggtgatattgttaagattcagtgagtatatttttgctttggagtttagctattgagtctgtaaaatgttttgtttccaacctagggatgatcttttattctcaccctttttcctggttgcagttatttttttagcttttaaaaagtgactttcttgaggctgagttagagactagcctggtcaacatagtgagacccctgtctctaccagaaaaaaaaaaggtgacttcctcctttcagttttttgtgaagcattgtgaatcaaatttttttttacttaagcaaatgcaatgtgtcactggaagccgaacctctggtttgaaatttaatgctgagatttgaaatatgagagttctcgagcggtatcttacccaattttagtgatt

SEQ ID NO: 53147 - DNA, 1084 bp, Homo sapiens
tgtcgcccaggctggagtgcagtggcgcgatctcggctcactgcaaacctccgcctcctggattcaagagattcttgtgcctcagttctggcagaaggtggtgtttttacaagatgatttctaggattacaggcatgcaccaccatgcctggttaatttttgtatttttagtagagacgaggtttcgccattttagccaggctggtctcgaactcttgacctcaggttatctacccgcctcagcctccctaagtgctgagattacaggcctgagccactgcgccaggcctggttttttggtttcaaaccacaatagacattgctggagaatcaagctcatagtttctttttactctgcatgatatccctccaaaagcttgtctgttctcatgacttcatgacagttctttgccaatgatttgcaaacattatctccagtcttgattctttcctaggctttatttctaaatactcactagtcatttccacttagaagctttgtcttcttttcaaactcagcatatccaaaactgacctcatcttgttgccctaactagaacatgccacaacccatttctgcctataatgtcattattctcttaaggcccccatatttgcaaatcaggagtcatctttgcctcccttctctgaatgctgctgtgctcacagtcagtaccatacagttagtacttgttctcagtttaatgcacacttgtttcatatgacctcctagggcagaaccaagattcgtgggtggaagttgcagggaggcagatttgcctccatataaggaagaactttttaatactttgagctgtctgaatggaatggactgcctccagaagtctcgggttctccatcactgaaggtgtttgagcagaggctgcctgactaattgctaattgaaaggactgttctggcataagatggtgtttttacaagatgatttctagaatccctctaatcctgagagccagtgagtcgatagaaggtagctttgtctctcctgctagactcccttaggacagggagactattttacctttcttttatattctgtacagcacttaattcaggtgctggt

SEQ ID NO: 53148 - DNA, 1775 bp, Homo sapiens
tctctattcactggccgtgtgactagacaagtcatttagcttcactgaaactaagttttctatctctaagcgtgtagtaatcatccttctattcctgaatagttgtcgggaggctcaaactgagataatgtatgtgactatcctttgcaaattctaactttctacacacagtatcatagtaaatattgagtatttgaatgagtaagcatttactttagtgaacaccttttcctgagcagttctcttgcttaatgaggtcttttgattttgtaaatatgctacttttttatctgatatttttgtattgttccattttgcagatgatatctaattttattaaattattctgttcctgagaattggcatcctcttcatccacctggggatgaccaggaattttctgtttttttctctgtaggtgctatttaatatttaaataacaaatgacatttgatctgtttcagcaggtggtccattatggctgacatgcaaaatctggtagaaagattggagagggcagtgggccgcctggaggcagtatctcatacctctgacatgcaccgtgggtatgcagacagtccttcaaaaggtaagcagtccacagcccagcagaatgctttctttgagcgtcttggcctgaaaattttctattattctctcctttggcgctaacttcccaaaacttaatctagaaagtttaccttttgtaatttgtattgctgtgaacagataagagaggaaatgacttgtacagggaggcctgtggttaagttattttaacacaagaacttcctgcttgtgcaatatttcctgctctttctttagcagaatgactccaatgtaagtcaaatgacaagtgataataaaattcctctctccaaacaattggcaaattggacattttgcacatgcaccagttggaacatagaatgttagcactaaaaaaaaccttggaggatcattttgtttattttcattttatagataaagaaaattaagctcagagaggaaaaggaatttagtcagggtcacacaaccagttagtggtgatactggacctggaacccaggtttccttactcctgttctgtatcctgttgactgtattaccttgcctccccactttcatgtagaagcacgttttaaagaagcctccttctgatgcatggctgattctttgtggtgtgtttgtctttagcaggagcagctccatatgtgcaggcatttgactcgctgcttgctggtcctgtggcagagtacttgaagatcagtaaagagattgggggagacgtgcagaaacatgtaaggatgttttgcctttttccccttcttttaaggactaacagctttcttcagtcagccaaggtcctcatccttggtttaagagctccttgagaagttcctcttggtttggggcattacacatgttctttctcttttgcctgtactgaggagttcagtctagccacagaaacgattcctcatttttttctaggccccttgcttttatcacgtatttatacagaaagcttgcttggtacataaaatatggttctgttcatctttgtagtgaagaatatgcaccagtttgatcccaacatattacataatcaaacctacagtggcttatttaaaggagtcattatcatgacttagcatttataaaactatgcttgatagttattagttatgctaatgtgggttattttcacacttaacccacagcaagaatatgaagtaggcaatgacaggtgcctttcctcccaccttccttta

SEQ ID NO: 53149 - DNA, 1028 bp, Homo sapiens
taagtttgcttttggtcagggtgggcatattttgacataaggcattgtctcataaggcagttaagtttcttagtctttagagttccacagtgatacttaagagctctcctctctaccatggttttatgcacagaatgtctgcttttatcagttttacatattagattgtgtttaaggtctactttgaaaaaagtttcaataagcagcaagtggtcaaaagaaaaaaaaaagttttggtacttaaaacagtttgagaaacattgctatgagagatagagatagaatccagagtctctatcttagtggagtttggtctgattagggtaatagactaggttgtatatacatagaagctggtgatgatagaaaagctgccattgagcggagcctaagaaacaccacgggtaggagaatgtgagcccataggaaagaagggttctggagtcaccactgttatgtacccggatcacctgtgacaagttcttctttaatcctcccagggataagaagcatgtagactgggtcaaagcttatttaagtatatggacagagctgcaggcttacattaaggagttccataccaccggactggcctggagcaaaacggttagtgaatccttcctccctccctccctccctcccactttctctctccagcatggggtccacaggtttcttagacttcagcactaccaaagtctgtgagggaatgctagttttttcagtggaagggaggaagaaaaggaggagaaagaaagggtaaaaagagtagaggaagcaaggatcagaggagaaggaatattcagtggtattcaatttcaataaatatgttagggacagtgattggtgctggagcaggagacacacacaaatgagttacactatcccagcctttaaggagcttaaaaataagaatgcaaaaccccaatacaaatcaccaagccaaatgctataataaagatacagactagagtatgaggaagagaagagtgcttctcactagaagagattgtactttgaaggtatat

SEQ ID NO: 53150 - DNA, 1035 bp, Homo sapiens
tggatagtaacatctttcactgaaatagggacaaggggatgattgtacagggagaggagcggcaggaaatgatgaaatcagttttgaatctgttgaatcagaggtactggtaacacactaaggaagatgtcaagtagatttgtggaaatagtttttagagctggaatcaggtgagttcaaaggcaaaatgtgatggtcaagaaatagaactgagagctggatccttgggaaagggtgagaaggcataaagccaagttgggtatgggtaggacacattaatcattgcctcaaaggctgtggtggggaccccatgtgcactggcccatgtagggcactactgggaatggtacagaggggagcagagaggatgatgatgttacctgcacttattgttccaggggcctgtggcaaaagaactgagcggactgccatctggaccctctgccggatcatgtcctcctccccctccaccatgcccccctcctcccccagtctctaccatttcatgctcatatgagtctgcttcccgctcatcactgttcgcgcagattaatcagggggagagcattacacatggtgagtgagcacttggacacgaacagtaggtacaacaagttgtgtgggccagaccccaccaaccagaaccgtctgtaaactacaaccctggcttgtgtggtggagactcgtttggtgtgtcctgttcctttaagggacggcaaagctggcttaaatggaaattgaaaatgatgatcacagttggaggaagccatctgccccatgggaaagtgacttaatattaggtagcatatatagaggaccctcttgtgccaaggcacagagctggcggttttccccagagctttttccgtggcaccacatggcctctgggaaggcattgtgttagggagttaacttcctcagaagatgcatactggttacatggaaaatttgcatgagagtgacctaatgttggtataaagtagatacccttaacacagctggtggaagtctgagttgtccagccacttctaggaa

SEQ ID NO: 53151 - DNA, 1030 bp, Homo sapiens
aatttgttaacaatctgtatgattataaccaacaaaaccaaatatatgtagaaaacaatattgtagagttgcaaatgccaacactgactgaggaggtgggggaagtagggttagctgtggggagtgagggtatttttttcttttccttttaccaaattttctttactaccactcatttttctttattgctttaaaaattatatatttgtgcacatacatttgatatgtctttctagacatagaggataaggatttacatatccttatcctcacccacaatatacacacattccatgttgttgttaatggaaccatataatttaatcttggggagaagagaaatgataaaagtacttttccaaaactgcttgcaagagaacatctcaaaggctctggttttggctttgaattttctgttaaggatgtttaacatgacgatagcagctcaaaggtctggtatgaaggacaggaacaaggtagctgttgttcttacagccctgaaacatgtatctgatgacatgaagactcacaagaaccctgccctgaaggctcagagtggtccagtacgcagtggccccaaaccattctctgcacctaaaccccaaaccagcccatcccccaaacgagccacaaagaaggagccagctgtacttgaactggagggcaagaagtggagagtggtgagttaaaaatacctagacaggggcaggtatttttattattttatttttttgagatggagtttcactttgtcgcccaggctggagtgcagtggcgcgatttcggcttaccgcaacctccgcctcccggggaaaaggagtaggaacaggaggttaaatggagcttagctagatgagggcagagttctggcttcaattgcaagaacaaaaagtttgggatagcctggttattttttgttcggtgtgtgctttgtgatgagaatcctgggatctctctctaacaggaaaatcaggaaaatgtttccaacctggtgattgaggacacagagctgaaacaggtggcttacata

SEQ ID NO: 53152 - DNA, 2717 bp, Homo sapiens
tgtatattactttcctttaaagttacacgttgacacactccctttcttctcctagataactgtaagaaacttggcctggtattcgatgacgtggtgggcattgtggagataatcaacagtaaggatgtcaaagttcaggtaactcgatattttggctccttctttttgtccctgaggaattaattcaaagagacatggtagacccacagatgttgctttggtgggaatctgattctacaaagtctgtaagctgagctgctttggacgtggcagaagaagggttggctcttcaagcaagttcttttcaggacccatcccaacccacccgagtatccagtgtcttgcgcatctgtgagcttttcatgtagttgctgagtcacgtgaaacaggaaaccttttcctgcgacttactgttgtccttcccaaccactgggactcagttctctttgtttactctgcaggtaatgggtaaagtgccaaccatatccatcaacaaaacagatggctgccatgcttacctgagcaagaattccctggattgtgaaatagtcagtgccaaatcttccgagatgaatgtcctcattcctacagaaggcggtgactttgtaagtttcttgatctctttagtatgatgttaaaaacagaagggactgaagatttctggcattgaagaaagctattttatgaacattctgcactgagcaggtaaaaacccaataatgcacaccaaaagtacacagaaatgaggtagtcccatgtagtggagccccaaaggtaggtgctttctgcctaagtggagctcaaggtagcaaaaaataatggggatgagccatggcaccttgtcaggctggtgctataaagccatatgtactgttatttacaccccatagacttaatagtctgtccaagatcgctgaacactagaacatagcatggctctgtgggtttgtctcttgctacattgtaccgtgctcctggggttaagtggaagcaagcattgggagaaatgtgtgagatttagccccagctgttctttagctcagatttaaacctgctgtctcttctttatttgcagaatgaattcccagttcctgagcagttcaagaccctatggaacgggcagaagttggtcaccacagtgacagaaattgctggataagcgaagtgccactgggttctttgccctcccttcacaccatgggataaatctgtatcaagacggttcttttctagatttcctctacctttttgctcttaaaactgcttctctgctctgagaagcacagctacctgccttcactgaaatatacctcaggctgaaatttggggtgggatagcaggtcagttgatcttctgcaggaaggtgcagcttttccatatcagctcaaccacgccgccagtccattcttaaggaactgccgactaggactgatgatgcattttagctttgagcttttgggggttattctaccaacaaacagtccattggaaagaaaacagtccctggaattaacagatcagaatgttcacactggttaatctttttttaacaatgagcatgaaggtagcagaagctggtgtgtttccagatggttcttctaaccaaactaatttttcactgttgacaagcgaggcaagggttgcactggaccaaaggctgaggcttggccatctagcattccatacaaaattgtttcctataagcattccttttattctctattctatcctgggtctgcctcaaccgtgagataggagagtctctggtactagctgctgtagcagtgcccttcatccagggcagttaatggagtcttggaccctttctttctctgggatccctgcccagcaccttcctatagagatgactttaaaaggaaaaaaaaaaaaaaaaaaacccacatgatttcaaggagtctggcattcctgaatccttcttccctgccaggtgcctgtcacctgtcttcactgcctccttttccctgtcatgctcatcagcttatggcttctgtctaagcacctgaacagaggactgaaacctccactgcaggctggttttaggtcttgaattatgtaagaatcttgcacagcactgctaatgtaaatttcagttgtttttccctctaggacaaacacttaccaaaatatgcaacttttttttggtgggaagagagattgtcctgtgatttctacccatttcctgaggcctgtggaaataaacctttatgtacttaaagttatacagaaaatagaataaagttaataccaaacttgcttagttgtttacctgtgatattggctgtacagaaatgcaaaaaatactgaaaacaccaaggataagaaactactctttattttagacaacctcataaaattattttcacatcccccccaacttcttgctcttaatcctcatcttttagttgaagaataaggcttaagagagagaaaggaaaaaccataatggctaaacttagcagcaccaacacggttctttcatcaaggcgtagctcatcatttctccaaactgacatgctacagaaatgtcttccaaaaagcgttaagttttcacagagtggggactatgatttccatgctcaaatagtgtaggaaatggtagattacgttagttttgtttactgtaacaggaattctcaggagtccttagacactctaatgtgggttgatctccagaaggagaaagggagtgtgtagta

SEQ ID NO: 53153 - DNA, 1411 bp, Homo sapiens
gagaattcgcttgaacccgggaggcggaggttgcagtgagctgagatcatgccattgcactccagcctgggcaatgagcaaaactgtctcaaaagaacaaaacagaaaaaccatatccaaccgttaggtaacaaaccctggacactttcatattctggagttgaaaatgtcattacccatagcctagatgctggagaacaacctctggttgggaagataagcagttacgacagtgccagaatggtgcttctgccgtggccaacatcattttgagttttcacagtaaggaagttcttagctgtaatttctcaagcctttttttttttttttctcaaatcagattctagcttccctttttacctcaccacccaagttgaggcacccagtgcaaaagaaaagccaagccaagaggagacaaatgacctctgaaataacatggaggaattctagtagacggtgattggttcagatgtagtacttagcattttggagagtctgtctccaatataaaatccttagggctgggcgtggtggctcacacctgtaatcccagcactcttgaaggctgaggcaggtggatcacctgaggtcaggagttgaagaccagcctggccaacatggtgaaaccccgtctctactaacaaaacaaagtattaggcatggtggcgtgtgcctgtaatcccagctactagtgaggctgaggcaggataatcgcttgaacccaggaggtggaggctgcagtgagctgagatcacaccattgcactccagcctgggtgacaaagcaagactgtctcaaaaaaaaaaaaaaaaaaaaaaaaaaaaaaaaatccttaaagtgtagaaggccccagaactggaggtggcaaattactgcaacttctgcttaagatacaggacctactgctaaacaaaattcaaaactctagtcccactcaacctcctgcaggagcctcccttgtcagtgcgtaatttagaaacaggatttcacatctattaatgtttaaaagtaatgtcccttggccaggcgcactggctcacgcctgtaatcccagcactttgggaggctgaggtgggtggatcacctgaggtcaggagttcaagaccagcctggccaacatggtgaaactccatctctcctaaaaatacaaaaattagccaggtgtgatggcacacacctgtaatcccagctactaagggggctgaggcaggagaattgcttgaatctgggaggcaggggttgcagtgagccaagattgctccactgcactccagcctgggtgacagagcgagaccccgtctcaaagaaaaaaaaaggaatgcccctcatcatgcatggaggcttcctggatttgtagcagactgtacctcagccaaggcagctagttttaaaacctttttatcaaaagaag

SEQ ID NO: 53154 - DNA, 2986 bp, Homo sapiens
tgagtccatggttcggggtcatcgccccgtatctccagcgccgggagcctcgggactgcggccgtgtctgtggcagctggagacagagctgagggagcaagaggtgtcggaggtctcatctttgaactactgccggagcttctgccaggtgaggggctgactggctggctgagggcggcggggcggggaagtcagggaaggaggccctggatcctctgtaagcagccgggtccaaactgaaaggcgccacctccgtgactcgccgcgcccccgggccgggaaggcccagctcggaagctcgaccgctggcccccctgcgccactgcccgactttggccaccgctgggtcgttttgctctgagccttactgagatcccggagggccctggcgggtccctggaagggctgtgccctgtcgccgttgcctgtgtcctggccgggtggttggagcgccactgccccctgagggattgattgcttgtccctgccgggagatccttttttgagtggagtgcagatctccgaactggtaaacccgggtttttctgaataatccagagaggtgtgttggggccagagacttatttttggagttaacatcttctgggctcctaaaaggtatgacagttggcttcgaaaggcgtctagagctttctgattagggattgcggagccggttggttgtttggtttttgctttttttttttttacgtttaagccgttctttcgtcttttctgtatttctttgagaggattgtgctaccgagaataaggctgactctttgagtagaagaggatgggaagagggatgtagagtgtggcctcttttggcagtcgtatgatcatttctgtgccttggtgggtcctaacctatgattacatatttatgggtgtgtttagtttagtctccatgaccactccgagatttttctgtatgttttcaagtcttttacaaatacaaatattggccattattatttctgcttccaatgtttgttctgtcaggtttcagaggcacccatcagctccttatctgttgtaccttagaaaatgcaaaataatcgtggcatgttggtacttggagtctaataagtagtccagtatgctgaataaattgcggcgttctaaaataataattttggggggcaatttgctctgttggtccggagtagaataaaagttagcttgcttgattgcttttcttccctctctctgccgaggcagaagcacctcatctctctgaatggaattttgtccttactaatcttttccgtggattgtaccactccaatttttgtgtgtacaacctgcaacattgccctgtactattaaatgttaacgtgttgttgttctctgcttccttagtagtagtcatccctgtttagtaagctcatttattttacagatttttactgacttcataggatagtgccagggactttaccaagtgctggggaaacatgagtaagacagcacttagccttgatgaacttacagttggtgggaggtggtaggaatgacagtatttccagtgcggttttggtaatgatggaaaaggaggtgttgtagagacaatggtgaggagagagccttcatgggatatcctgatgggaaagacaattaactagaaaaataagtaaaaaggttaattataaattgtagtatgtgcttagaaagaagtaactgggagaggccactttagttagtaagaccctatgggctgcaaggatgaaaatgagtcacgtgaaggtctggggtggggaaagcatcccagtgccaaaggtagagattggtaaggacccagaatgctatgggaggaggggaaactaatggaaggagaggggtggtgcaggaaaacaactgtgggttttgggtaaggcttctaagcttgagttgtctccctggaaagatgacaagaatgaatgtaaccagtcacattgaagcttgtcaaaggatcacatatatatgtattctgctttatgtctagtgcttgcaactgcagttttgtttaaggtaatgttttaatgtcttgagtcttggtgacaccagagatgtgatggcccagaagaatttttaaaagaaagcatgtgtaatttgtcttttctatgaagttttttttaacctaaaattttcccaaaaaatgttttttagactaataaatgaaacaagaacaagtattcctgtaacactgtattgtaatagaaagcacatgggattgggagttaagttgggtcttgactgtgactttaccactgcttagctaataaccttgggtaaccatgtctgcaaaactatcttattttctgacctttatctccttataatgctttatacaatcagaatagaaaatttgtgtacaagtcttcacaaaatttatcatatttttgacacattttcccctgtagtccagataagatcaactgtgtccttgatgaccagatagagaaaaagtaaaaattgtatgaagaagcaggaaaattttcaccatcagtaaattttgttgaatagctcttggtttcacatttgaaaagaagaataagatatattcatttacttaaggaacactgattgtgtgacagttctgaaggtgggagcctagttaagacagttttctcggactctaggagaggagcacataatatataaagatagattgtaggcatttttacattataaaggtctgacccctgcttatgggatgcttaatactacaaatgtattttcatcagttatttagttagaaatgtcctagagacttagattgtaccaagtaatcccttttgcaacatcctgggaccatattctctccaactcttgcagcacttaaaagaaatggctctatctttgggattgcaccaaatcaagaaataaactaacatatgagtgaatagagaagcttgtctcattctgggcatattttcaattttcataagtttgtgaagatgataaaatgaaacactgaaagtaatacttactaagaaaatga

SEQ ID NO: 53155 - DNA, 1055 bp, Homo sapiens
ggagatgccaagatgggtataatcagtccccttaccttgaggttgatggccatgaaggctcttgagccttacctctttcatatatttcaagaagtttttaatgcattagcttctcttcttgcgctgccttctttttagcgatatctaaatagaaactacatgacaagtagttatcatagcaaaagctagctttgtaatgcacatgacaaaaacatagtataaatgtgacccgtgaagcagtgaaaactttgggtgctgtcatttactgtggtaccatcttgtctcttactgtgtactgtgacctctagtggtttctgtttcttccatggatcatactcttctgaatagtgttgacaaaaacttactgcaagactgcaaagactaaaacgtgttttattttcattcagatctagatacttgtcacctttcccagtgaccttccttgactgtcttatctaaaatagcacttccctattgcctttcacctctttaagtactgctttatttttcttcaaatcactactaatcttgtatgtccgtctccccaactgggatgtaagtgccatgaaggtgttggcttttatttacctagtgcctagtctctaaaacttaatgggtactcactaaatgcttgttgatcttgatctcctccctttcctgtatctcccacttgaatttttgagagtaataagcaagtcttaactgtctttatcaagaaatagggacatttggccagctgtgatggctcatgcctgtaatcccagccagcactttgggagaccaagacgagaggatcccctgagcccaggagttcaagaccagcctgggcaactctacaaaaaaaaaaaaattaaaaattagccaggtgtggtaatattagcacacctgtgatcccagctactcaggaggctgaggcaggaggatcacttgcgctcaggaggttgaggctgcagtaagccatattcgtgccactgtactccagcttgggcaacagagtgagaccttgtctcaataaataaataaatagaaagatactttttgtttgtttgtttgtt

SEQ ID NO: 53156 - DNA, 1138 bp, Homo sapiens
gcccgaggtgagcagatcacgaggtcaagagatcgagaccatcctggccaacatggtgaaacccccgtctctactaaaaatacaaaaaattagccaggcatggtggcgggcgcctgtaatcccagctacttaggaggctgaggcaggagagtctcttgaacctgggagggggaggttgcagtgagcgcagattgcgccactgcactccagcctggtgacagagggagactccgtctctaaaaaaaaagaaaagaaaagtaaaggaaaacccctcaagcttaatgtattgcctgttaatagtggtctgtttctgggtggtggtattatgggttattaaatttttatttttgcatatgtatgtaacaatgttatgttacttttatgacaagacagtaaaaggcatttttgaaaattgaaaatgaaataaaactagaaagcatagttaaatcctgtggcagaatcggtatctaaaaataatcttagtaggctgagattgatggactgaatccagtgaagtttaatcaggatggatgaaaaaagtatagacagatagataggtagatagatagatagatagatagatagatagatagatagagtaataagttagtcatatcactggctttaagaaaaccacctataaccaatatagaaaatgaggcagggggcatagtggcagcatatgttaaagacttagggggtttaatttactctagccacttaactttctggttgtaagcagccagctgttctctccccatttcatttcatctcactctcagcttagtctcttgatggcaaacctccatcaagaggtggtgcttcctcatgctgacatttaagtctcttcagcatttactctgatctgttctagccatctagttgtctattcatcttttctgacttttttcaagttctttctttggagtcctcctgttcccctcacttttgctcgtacttcagagatccatctcaagtgctgccctctcctggaagtctacctcttgtagtgcagtcacattttactgaaatgtataattctgggaatttcacatgctgagaaatttaaataaaagtttcttgctttatgtgcaaaatttgaaataatccaaacccctctctattagaaaacacataa

SEQ ID NO: 53157 - DNA, 1291 bp, Homo sapiens
ttgaaaactcattattgaattatagagatggcaactccagacctatagtgagaacaactagacattttatggctctactcttagaattattctgacatcaaaagagtagttctgccatttctttaactcagcagaaatcattcattaagtgatgaaaatagaagcttctaaacaaaccagagccttaaaaggcaaataaaaggtatatgcatctgttagaaaaaaaatgggagagctatgtggtgtgtttgaggacaaagacaatctgtttcattatttttatttgtaaataatttttaattttattttgtagaccttattgcaatatgcaagcaacaagaatgcatcagaacatattgtgtatcttctggaggtatatcgacttgccatccaaagctttgccagtgcacgtccatacttaactactgaatgtgaagatgtcctcttagtgcttggcagattagtactgtaagtttgagaacttaaatcactcttaaaattgagtaccattggtcgtgttgtttgcctggtttctctttacagtggcatcacatttattcttcagagcaccattagagtcataccattgaatgaaatttccttcctactcacgttcccaggagatatagtccaagtgaagctccagccaagcaacatcatctttaacttgcctctagagtctcttttcctattcaggcttggaatctgagaatgatatatttctatcccttaggtatagattgatttaaatgacagaatacctggaaactggtagtccttgaagaacatcttggcaaaaacaacatgaaattctgcaatttgattatatttgaactaagaataattttattagcaaaaaatatcagggtacagtataagattaccatcctaagaaagagatcatgatttagcgcgggcatggtggcgcacgcctgtaatcccagcactttgggaagaggctgaggcacgagaatcgcttgaacctgggaggtggaggttgcagtgagccaagatggcgccactgcactccagcctgggtggtggagtggagactgtctcaacaacaaaaaaaaaagaacgtgatttagctgttattttaatatttagctgcatagtagcagacaaaattacacctttattgtaattttcatctgcaaattgaaaagatacaacagccaatcagttttagctgggcatcaccttgttcaacttacagattgtttagtgagatgacttctagtctagatggtttattttattttttttctagcctcacctgttttccttccta

SEQ ID NO: 53158 - DNA, 1051 bp, Homo sapiens
ttgctcattattcaagttgtagtgcatttcttttttcaaaaaaatcttcctgttatttcttttctgtgtcttctggataatagtcagaaaaaggaaactcttttgcttggttttttttacaggtaaagaaacgactttgccagtcttcctgcttcctctgcaagtgacagaaacctatagataacagttacatatatttatcatttatcattttatcagctgaattgacagtagtatgagctcccatttttgtctactggaattagaattgtcctatatgggtgcctcttcacacccaaataaacaaaataaaactgcttggaatgtgatttctaaagagcttattatattcttaccaaatgtactaaagcaacaatgtaaatataaagccttgtggtctttctttttttcctcctttttaaattgaacagtcaatataacaactctgaagcaaattttgaagagtaaaaacatttaaaatagcctaaacaaatgtaaaatagatttttagtattgctgtcatactctacttaattattactataaccacctttatatacttactcatttttattgtaggagttgtttcgaattactgctttcagtgtctgaaagtgaactgccatgtgaagtctggctaccattccttcagtctctacaggtgagttgattttaactcagaaaagttttctgtatccaagacacctaattaattactcccagcaaactaaaattggaaccttagaacaaaaacaagtttattatatattgatattaggtcatgaaatgataaaaaggcccttcacatgaaggggatgtattaaaaatgggttttttaaatttggttttgtttgcctctacatagttagaaatcaacaaaaaagtttcattattcaaacataaagtttagacagcataaagctatcaaaatcatacatgattataaagtaacagtatttggatccttcatagcatacttattggtaaccttcaatatacaaaacactatttcattacatctaaggttcacctttttcttcctaacacttta

SEQ ID NO: 53159 - DNA, 1030 bp, Homo sapiens
aaaaaattttgtattgaaatgtttgaagaaatgagatacagaaaggattgtgattgggagtgagacatattgttttaaatattgaagcatatggtagatttcctttcaataaagaaattcaaagattgatatcttcaaatgatttgtaaaatacaagattgagccatatgttaaaattgatttagcagcagtttaactgtagttataattattgaataaaatagcttaccgcatagaaataatagctatgatttttagagtgcctgctatgtgttgggcactgtatttgtgctttcatatctcatgtaatccatgaaacaggtgagagattacacatacccaagaccatgtagttacaattgtggaggcagaatttgagcccaggtgaggtgacgttaaaatgtttttgattggagagtgatgacccttcagttgctaagtgcatggtttaattaaacatccgtaatatacaagcccttgtgcttagtgctgtagggaatacaaaggctaacaagacatgatatttgttcacaaattgctgacagtgtaataaaggagatatcagagacaatagtaagtactattaaacatttactccgtgtttggccttgtggtgagtcttatctgcatttctagtatttctttaatttgttcatccatgtgagatgggtataacctttttacagatgaagaaacttgagtctcagagaggtcagttaatttgtccaagggtctcacagctgtgtgtcagaatcaggtttcaacatcagatcagtgattctaaaacctgaaatgttaacgtttgtacactataatcccttatcactgttcttcgagaaaactaaatgtggggaaagaagtaaaatgctgtgggaatttgcaaggcgataggttgtgtaggtaatatgcctgttatcaggtatgttgcttcctgttggatttgcagaattgcttacaacctcatatggcaggtaaatagagcagaatctgatgttaggcaggcagaataggatataggggagacgtgaca

SEQ ID NO: 53160 - DNA, 1062 bp, Homo sapiens
agcactttgggaggccaaggcgggtggatcatgaggtcaggagatcgagaccatcctggctaacaacggtgaaaccccgtctctactaaaaatacaataaattagccgggcatggtggcgggcacctgtagtcccagctactcgggaggctgaggcaggagaatggcgtgaacccgggaggcggagcttgcagtgagccaagatcgcgccacggcactccagcctgggtgacagagcaagacttcatctcaaaaaaaaaaaaaaaaaaaaaatttgagggctcatccagagcactgtacagtcaatgccaagtgcctaatattcagtacagctcagaagtactgagcttcagtacttctgaagctttcagagtagcattttccaaagtgtgtactgaaccaggaacacatgttttacaggttactaatatgtataaaagggttctctggtcaaatcagtttaggaaacattgggtttttaaataaaagtgaacagttttctttattgcaggactgttcagagatttgaccaaggaatcctttttttttctaggactatctctcaggtcttttggtcggtggaacacactttgagaaatgcctggtttagaggaaagagcaccactggctttggaatccttggcaagttacctaacttctgtgaatattaattttcctaaccttagactggggataataatacttgccttggtggtggtgtgaagaataaatgagaggtatataaaaatatgcagcttaaaacttgatgtctcgtaagcattcagttgatagttgttaatattacataggttacttgcttcatttcttgcatttatgcttatagttcatttcactatttcttaattttcctctcatctctattagatgaatattgagaccagagtaaacttctcatttatataaactaaatttttattaactaaaaatcaaataaaaagatctcaaactttcatcttagcaagtctgacatgttatgtggtatgttgtcaaactgttttatttttcattttttctagtcaataaattgattgcacaagaagga

SEQ ID NO: 53161 - DNA, 1033 bp, Homo sapiens
cccgggttcaagtgattcttgtgcctcagcctcccaagtagctgggactaaaggcatgcgccaccatgcctggctactttttgtactttttagtagagacggggtttcaccatgttggccaagctggtcttgaactcctgacttcaactgatccacctgcttcagcttgtactactaaaagtacaaacattagccaggcatggtggtgggcgcctgtaatcccaggtactcaggaggctgaggcaggaaaatcgcttgaacccgggaggtggaggttgcagtgcatcgagatcgtgccactgcactccagcctgggtgacaagagtgagactccatctcaaaaaaacaacaactattttatgtatcagattgcatcctttaaaaaaaaaaaacctcaattattatgtttcttaaatttggagttagacttctctaatggtttttgacattatacagaaaaaaactagagattcttaagctttatttcatcatctacctttaatcctcttatctgccattcaattctgacatatggattcttactctgaactgaaattttttattagatgtagtagtcccaaggatctggttttatgctgtagtaattctgaaacttttacttgtaatatcttactctccaaatacaattgtctatctttctaccttactccctttaatatacagtctccaccaggatcaatcaagatctattgatcttgtcaccttttcattttcccttatcccccttatgtattcacttccctatttaactctgctttgtcattgtcagatcatcattatcactctcaaagagcgagaggtcctctctcttttttttttttttttttgacagagtctcgctctgttgcccaggctagagtgtagtggcgcgatctttgctcctgggttcaagcaattctcctgcctcagcctcccgagtagctgggattacagtcgcccaccaccacgcctggctaatttttttgtatttttgtagagatggggtttcaccatcttggccaggctggtcttg

SEQ ID NO: 53162 - DNA, 1021 bp, Homo sapiens
ctctgtcattgggtcttctctttttacacttaactaggcttatttccttcatctttggctttaaataccaactatggtctgactcccaaaagttttctctccagccctgttccctcctccaaactccagacccatatccaattgcctaattaccatctctacttacagatttaacatgtccgtaactaagctcttgatattcctgatatttggactttgcttttatgagggttttttttagtcctcactatgtgtttggcaccatgctaaatgctttatatactttgctacatttaatcagcacaatagctctgaggtagctccattttattgatgaggaaagtcaggctcagattaggttgtgtgcttcaaggttacaaagctaaagtggttaagctgggattcaaacctgagtttggtgtactaccagtaatattatattaaagacataggataaggaatattatccttgttggtatttaccttagagtttatatgccaaatgctgtgttaggcattggggttcaaagatgaatgcagaagtctctggactggcatacttggttttactgttggcctctacattttatcttgaaaatagccagaataatctctctaaaacttgtcgtgccatgccacttctctgcacacaattatctaatagctttccatcttactcagaatacattcagaattctttattctatgtgccatgggccctggctacttttctaacgttctctcaccttatcttgtaatcttagtgcccactactctccagccgccttgtctttgctgttctttgaacaagccaaggatgttcctgtcttagagctttgtgcttgctattccctctgacgagaattgccttccacaagataatttgaatggcttactcccttacctcatgtctgctctaaatgttctcatgtctgttcaatattaccatatcagagaggccttcctcgctgtctcatctaaaatattaccctagccccctactctgccctaaatatctgct

SEQ ID NO: 53163 - DNA, 1025 bp, Homo sapiens
ataaacctgtatgctaatttatttatttgcagtatcaggtagtgtaaggagatagattgcttacctctaatagcagctgcagtattttatgtttgggaaagttaatcagactgagatgtagtaatggttattctcagcacctgacacatgccaaaacaattcaaaagcagcagcaaaacactacattttgggtttgattcctcatcctgtaataataacaactttactctctcagcctttgcttaattaaaacccgttttgtttctaatgttgtattaggcattggcaaatacagcaaactgtatggcccagtttgtttgccaaaaatagttacagaaagagaagtactaagctcaatgattactgccctaaattcagtagaagtgtaaagatagagaattctgtgtttatagaaaaattgatccttgaattggagctttaagtaatggtggggtttggatgggtggaaagaatggtttggagatgactgaatggtagtaaagcacaggtactaatgagtactttgcagggatccactggagaataaataccctgcttagggcagagtggttattgaagtcttgtgagaaataagacctgttggggttggaaaagaagggcttggaaactccattgcattaatggttagatttgatgcagtagaaattaagaaggctttgcagttaggaagtgacatgtctgaagtggtgttttaggaagactagacagaaagaatatgtattatgtttaggacaagagattgtagccagcaagaggacaaaggacaggacttgctgaccgggcaaaaacagaggaggatgtacagagataccttcaagaggctcataaggcttctagcttgggagactggaagaatagtggtgctctgctgctaattagaagaaagaatgggtggagggacaagggagagtctgggaagatgataagctttgttttatacatgatctttcctggtttattaataacaatgtttggaaacaggatttttcctgattgtgttgagt

SEQ ID NO: 53164 - DNA, 1092 bp, Homo sapiens
attttccttctatgaaaaaatgatgttaatgtagcatttgtatttaaagcagttcctgaactggcctcctttagccccactgatattgaggataagccatatgttttactatctgtaaccagagtgacccagctgtggtcatagatactaggggaagacaggaacaggaaagaaaaaaaaacatagtaatacttcaggtaaaaataacctgagattattatatataatttgactcatctatatggtagcaatgttcgtaatttttttaaactgcaaaaatgtttttatctgtattgagactgtagtagaacttccttatagtgtctgttcccttctttaatattttcttatgtgaaatattcatgcaagaagactcattcattagcaggagaaaattatgtctctaatttttgcctcattaagaagtttcaccttatataacaaagtttactgaaaagtcaccattttctttttgacttagtcatctcatttttgatagattgcaaaggtcgactgcaaggaagtactagacatcatttgtaatctggaatctgaggggcaggataacacagcatttgttctttgtacgacttaccttacccagcagctccaaactgcaagtgtatattgttcttggtaagtatatttagttttacactctttatttgttagtacatagtatagcatttagggtttatgtaaaatgttaatttgtttctaatttaaaacctagcatgacctgtgaatagcttcttgcttccacacacaatcatttaattaaaaatatcattggtttaatctagtcaagaaaaggtaaaatgttcctcttgatcatcccataatgggttgtctgttaactccaatatatgtcttctaccttgaagataaaattttgtcaatatgaaacaaacctgtgttagttagattgtttttcttttcatttttttagtatcttctgggtagtcactccccattcttatttgggaacccacaaatgaaaaggatcaaattatctaggtttctaggtcaaactagcactaaaaaaggaaattcacttgaatagtaatctcttttgcaactttggaactatat

SEQ ID NO: 53165 - DNA, 1050 bp, Homo sapiens
agatcagagagaggtgctcactgtataccagagtattaaaggtgtcagggaggaagtaatatttgagatttaattctaagaatgggttggatttgcattatcttgattagaggagctctgagtatttcagaacctaaggatggcttaaaattggaaatgagcattttgtttataggaaaacctagtaaagccttttgtgtacttcagccctcattgatctccctctggatcgtctgtctatttttatagttttatggttaataccattgtatgttactatatttctttttgtttattattttatgtagaaattttgtgtactgtaatctcacccagtcctcataataatcattgcacaggtgaggcagtgggaggatcatagggaccagagaaaacttgtaattgtccatggtctcaaggctaaagtggtagagctgagattcaagcccaggttttagacttctaatccagtgcttttcttctgtatacttgttttcttggcataggccaaaattcaaattgtagttttttaccaccaaatccactatgccagagttatacctcctgtgagaaaggagatagtgggatagcgacttaaatataatttctttataatgaaaaaatatccaccattatagctaggttttcagtacgaataataaattaaatcatatatagaatgtgttatagattgtgtttaaaatttttctccccttcttcagtcagccaccattcactcttccagagctgttagtggctctaggattaatgctgttcttctgtagcaggaagagatgaatggagatttccctttgtggcctcctcaggagctataatgagtaaaggaaagaaaatcttagtcatttcacactttgttaaaaggagcttctttcaagcaattcaaggagcaattgcatcttttttttttttttttttttgagacgaagtcttgctctgtcacccaggttagagtgcagtggtgtgatcttggctcactgcaacctccgcctcccgagtagctgggattacaggtgcacactgccacgcccg

SEQ ID NO: 53166 - DNA, 5846 bp, Homo sapiens
cattttaaaccctgcccctctactcaacatcattctattttgaatcctccagtgaccttttttatcctgaatttctttggattcacatgcatttattgtttatgcattcggggtacagataaattccttggaagtaaggaactgctttaatacacagtgcctagtaaatgtacattgttcgtagttgtagcatctaatttagttctttgcatgttgagacaagaaatatctaaatgtaactttcatgaagaaagatttaagataaaatttaggaactctaaaagtttttacaagctaaaattccttatcagtgaaagttatataatctttctgtatgcaaaaaaataatttttttatcctcttttacttacaggcacaagatgctggtcttggggtgtcaattttactgtgtgtcagagctcttcaactcagatcaagtgaagatgaggaaatgaaggcatcagtttgtaaaacaattgcctgtcttttaccagaagatttagaagttagacgagcctgtcagcttacagaattcttaattgaacccagtttggatggatttaatatgttagaagaactatatttgcaaccagatcaaaaatttgatgaagaaaatgcaccggttccaaattctcttcgatgtgagctcttactagctttaaaagcccactggccttttgatcctgagttttgggactggaaaactttaaaacgacactgccaccaacttttaggacaagaagcctcagattctgatgatgatttaagtggctatgaaatgtccattaatgacacagatgttttagagtcatttctcagtgactatgatgagggtaaagaagataaacaatatagaagaagagatttgacagatcagcataaggagaaaagagacaaaaaacctattggctcttctgaaagatatcagaggtggcttcagtacaagtttttctgtttgttatgtaagcgggaatgtatagaggctagaattcttcatcattctaagatgcatatggaagatggaatttacacctgtccagtttgtattaaaaaatttaagagaaaagaaatgtttgttcctcatgtgatggagcatgttaaaatgccaccaagcagaagggaccgctctaaaaagaaattactgttaaaaggctctcaaaagggtatttgtcctaagagcccctctgcaatcccagagcaaaaccattcattgaatgaccaagccaaaggagagtctcatgaatatgtcacattcagcaaattagaagattgccacctgcaagacagagatttgtatccatgtcccggtacagactgttcccgtgtgtttaagcaatttaaatacttaagtgtgcatcttaaagctgaacaccaaaataatgatgaaaatgccaagcactacttggatatgaaaaatagaagagagaagtgtacttactgtcgacgacattttatgtctgcttttcaccttcgagagcacgaacaagtgcattgtgggcctcagccttatatgtgtgtatctatagattgctatgctaggtttggatcagtaaatgaactacttaaccataaacaaaagcatgacgatctgcgttacaaatgtgaattaaatggctgtaatattgttttcagtgacttgggacagctttaccaccatgaagcacaacactttagggatgcatcttacacatgcaacttccttggctgtaaaaagttctattactccaaaattgaataccagaatcacctctcaatgcataatgttgaaaattcaaatggagacataaagaaatcagtgaaacttgaggagtctgcaacaggtgaaaagcaagattgtattaatcagccccatctacttaaccaaactgataaatcacatttacctgaagatcttttctgtgcagaatcagctaattctcaaatagatacagaaactgcagaaaacctgaaagaaaacagtgacagtaattctagtgatcagttaagtcatagctcttcagcttcaatgaatgaagagctaattgacacactagatcactctgaaactatgcaggatgtattgttatctaatgagaaagtctttgggccctccagtttaaaagaaaaatgttccagtatggcagtttgttttgacgggactaagtttacctgtggttttgatggctgtggttccacatacaaaaatgcaagaggaatgcagaaacatttacggaaggttcatccataccatttcaagcccaaaaagataaagacgaaagatctgtttccctctttgggtaatgaacataatcagacaactgaaaagttggatgcagaacctaaaccctgctcagatacaaacagtgactccccagatgaaggtctagatcacaatattcacattaaatgtaaacgagaacatcaaggttattcctcagaatcctccatttgtgcttctaaaaggccctgtacagaggataccatgttggaacttctgttacgcttgaaacatttaagcttgaaaaactcaataacacatggatctttctcagggtcattgcaggggtacccatccagtggtgctaagtctcttcagtcagtttcatctatctcagaccttaattttcagaatcaagatgaaaacatgccaagtcagtaccttgcacagttggcggctaagccgtttttctgtgagcttcaaggatgcaaatatgaatttgtgaccagagaggctctgttaatgcattatcttaaaaagcataattattcaaaagaaaaagtccttcagttaaccatgttccaacatcggtattccccatttcagtgtcatatttgccaaaggtcatttacaagaaaaacacaccttaggattcattataaaaataaacatcaaattggcagtgacagagcaactcacaaactattagataatgaaaagtgtgatcatgaaggcccatgttcagtagataggttgaaaggtgattgttctgcagaacttggaggtgatcccagtagtaactctgagaaaccacactgtcatcctaaaaaggatgaatgtagttctgaaacagatttggaatcatcttgtgaagaaacagaaagtaaaacatctgacatttcatcaccaataggcagccatagagaagaacaagaaggaagagagggcagaggtagcaggcgaactgttgctaaaggaaatctgtgttatattttgaataaataccacaaaccattccattgtattcataaaacttgcaactcctcattcaccaatctaaaaggcttaattcgccattacagaactgtacatcagtacaacaaagaacagttatgtttggagaaagacaaagcaagaaccaaaagggaacttgtcaaatgtaaaaagatatttgcttgcaaatataaggaatgtaataaacgcttcctgtgttccaaagctcttgctaagcactgtagtgattctcataacctagaccatattgaagagcctaaagtactttccgaagctggatctgcagcaaggttttcttgtaaccagcctcagtgccctgctgttttttatacattcaacaagttgaagcaccacttgatggaacagcataatattgaaggggaaatacattcagattatgaaattcattgtgatcttaatggctgtggccagattttcacccatcgcagtaattactcacaacatgtatattaccgacataaagactattatgatgatttgtttagaagccagaaagtagcaaatgagagactactaaggagtgaaaaggtatgtcaaacagctgatactcaggggcatgaacatcagaccaccaggagatcatttaatgctaagtctaaaaaatgtggcttaatcaaagaaaagaaagccccaataagttttaaaaccagagctgaggccctccatatgtgtgtggagcactctgagcacacacagtacccctgcatggttcaaggatgcttatctgtggtgaagttggagagcagcattgtgaggcattacaaacgcactcatcagatgagtagtgcctatttagagcaacagatggagaatcttgttgtttgcgttaagtacggtaccaaaattaaggaggaacccccttctgaagcagatccctgtataaagaaagaagaaaatagaagctgtgaatcagagcgcacagaacacagccattccccgggtgacagtagtgcacccatccagaacactgattgctgtcattcaagtgaaagggatggaggtcagaaagggtgcatagaaagcagctcagtatttgatgcagatactctgctctacaggggaactttgaaatgtaatcatagttccaaaaccacttccctagaacagtgtaatatagttcagcctcctcctccttgtaaaatagaaaattccatacctaatcccaatgggactgaaagtgggacttatttcacaagtttccagctgcctttaccaaggatcaaagaatcagaaactaggcagcatagttcagggcaagaaaacactgtaaaaaatccaacccatgtcccaaaagagaattttaggaaacattcacagccccggtcatttgatttgaagacttacaaacctatgggatttgaatcttcatttctgaaatttattcaggaaagtgaagagaaagaagatgattttgatgattgggagccttcagagcacttaacattaagtaattcttcacagtccagtaatgatttaacagggaatgttgtggcaaataatatggtgaatgacagtgaacctgaagttgacatacctcattcttccagtgactctacaattcatgagaacctgactgcaatcccacctttaatagtagctgaaacaacaacagttccttccttggaaaacctgagggttgtattggacaaagcattaacagactgtggagagcttgccttaaaacagcttcattatcttcggccagtggtggttcttgaaagatctaagttttccacaccaattttagacttatttccaacaaaaaagacagatgagctttgtgtaggaagttcataagtagcaattttgttttagtaacagactggctccaacactgcaacatggggacatttgccaactcgaacaaaggctgagaagcagccacaccgttgtttagggtagaataggctgtgtatttacatgaatgtataatatctatgtcagcagtattggctgagtccattagctctccagttggtttaatgattgggtttatttttgtttgtttgtttattaaaaaaatggaactgtacacttgtttggtgctaattaatacatcaaaatatactggggcttcctttttcaaattaagtgtgcatgattgtatatggaacaaatactaaggtcccagggtgggagggctagggaaagggatatggagttcttacttgacttgaatgtgcacctgagggtgctttgtgtaatatattgtacactacagcatcttatattttttgagttgagtttcaataaattacaatttttcacccattcgttgtttactcataatgagctttcatgccacatgtaaactgaaattgcacttgtattttctgaaatatgccattcacattttaccccagtaatttttttatttattattagctaaatcattcagaacaaggttcttttttttttttttttttttaagacagagtttcgttcttgttgcccaagctggagtgcaatggtgcagtctcgactcactgcaacctcctcctcccaggttcaagttattctcctgccccggcctcccaaagtgctgggattacaggcatgagccaccgtgcccatcccagaacaaggttctttttatcttaaaatttttgttttt

SEQ ID NO: 53167 - DNA, 1047 bp, Homo sapiens
tataaggctgaggcccacaatgcacttgttcgtgctctcgaaggtgaaaagcagacataaaatgtcgtcgacagtaagtacacttctctcttctatttttcatatccaagtagtgcttggcattttcatcattattttggtgttcagctttaagatgcacacttaagtatttaaattgcttaaacacacgggaacagtctgtaccgggacatggatacaaatctctgtcttgcaggtggcaatcttctaatttgctgaatgtgacatattcatgagactctcctttggcttggtcattcaatgaatggttttgctctgggattgcagaggggctcttaggacaaatacccttttgagagccttttaacagtaatttctttttagagcggtcccttctgcttggtggcattttaacatgctccatcacatgaggaacaaacatttcttttctcttaaattttttaatacaaactggacaggtgtaaattccatcttccatatgcatcttagaatgatgaagaattctagcctctatacattcccgcttacataacaaacagaaaaacttgtactgaagccacctctgatatctttcagaagagccaataggttttttgtctcttttctccttatgctgatctgtcaaatctcttcttctatattgtttatcttctttaccctcatcatagtcactgagaaatgactctaaaacatctgtgtcattaatggacatttcatagccacttaaatcatcatcagaatctgaggcttcttgtcctaaaagttggtggcagtgtcgttttaaagttttccagtcccaaaactcaggatcaaaaggccagtgggcttttaaagctagtaagagctcacatcgaagagaatttggaaccggtgcattttcttcatcaaatttttgatctggttgcaaatatagttcttctaacatattaaatccatccaaactgggttcaattaagaattctgtaagctgacaggctcgtctaacttctaaatcttctggtaaaagacaggcaattgttttacaaa

SEQ ID NO: 53168 - DNA, 1126 bp, Homo sapiens
gcttggtcttgcttttgaggtagctctaactcagaggcacgatttttagagcctgggaagtcggctgctgttcagtccttcctagcctcctcaggcgggagccgcggcccactcagtcagttgcggcccactcagtcagttccggccccagccccgactacctgtcgccttgttgggggaaggaaggcagataccgcagcccagtcagggtaagccgctgacccagaggatggaactgcggctctggagattagaaagaggaggacttcgccgcgttcactagcccaggaggaaagccagaaccctaggccggaacccagcgtcaagacgtgggggaagaatgttgatgcaacacagctcagccgggcccggaactcggcgtttgggtccccgccctctttgggccggaagtgaggaaggtggggctggggcttttcctgtagaaactaggagggactagggagagtctgcaaggggaagagtgtgtctgtgacactgccagcagcgcgcagagggagggatgggggcgggtatcggcgtaggggccctcggaaagaacggatattgctgtgacaccgcggggacgctctgaagggacgagtgtcggtgtggcaccggtgcacgctgaaggagccggcggaaccgggtggccatggggatgtgggcatcgctggacgctttgtgggagatgccggccgagaagcgtatcttcggggccgtgctgctcttttcctggacagtgtatctttgggagaccttcctagcacagcggcaggtgagcctagacagggtccaacctgacccccatacccggccagccctggagtagccttggcttcgaccctgagactcttgattgcttcggtccccgcgccagtctcgtctttgtggtccctgctgagtctcgtaacttggcccgatggcggactgtggctttgaggagggtcttggtgcgtcaaggaagttttctgtaacgttatcatgggacccaatccctttagggcctggaggaaggcttgggctcttgtgccctccctgcagcttccttgggatccttgggcccagacttggcctcctttatctttggaataagcctttaaaaggatttagacacccaacttcctca

SEQ ID NO: 53169 - DNA, 1137 bp, Homo sapiens
gcgtgacccaccgtgcccggctgaaaattggtcttttctcacagacctgatatgtttccatctggtgatcctcaagtttctggcatttaggaccaaatttaatgagcagcctcagtatctgttcatactcacagttagcatgtgtgcttctcctttgcatgaatttgttttccgtattataggaggtatgtaatacccagaatgagtagtacatgtaacaaagttgtgatgttaacagctttggtttacatatacaaactgaagtgtgatgacaaccctgattatagttttaccagtcaggtcacctcaggttctcttgttctgcttttattttcctgcatcagtcgtttcatgtacttgatcaagtgcaatatttgtgtaggtataaagcaaattcaacagatataagtggcaagctataaaccattcgatgtttgatcataaatgactattgtaataaacaactatttcactaaagtgttttctttaaaatatttcagagaaggatatataaaacaacaactcatgtaccaccggagttaggacagatcatggattctgaaacatttgagaaatctcgactctatcaactggataaaagcactttcagcttctggtcaggactctattcagagactgaaggcactgtgagtaatttacttcttggagagacagtctgtctggttgttttcattttcatatttttgtaacacaaaagagggtaccacacttacaagtcccagaatgctttcttaacctttgttattgatagtaacggctgtggagcaaaaaagacagaaacataactgcttagtcagttgaaaactatagaatatgggaactattaccctgaagccaggtaggaaaaagatcctcttccattaggatccagctgagatgtcatgtcttctaagcaaccatttgaaactccctgcctgacgaatgtggatagggtagcattctatcattattcctgtcagagtacttatctcattatgttgaatttgcctggatttttttttttttcttctggcacagtcttgctctgtcacccaggctgaagtacagtggcgtgatcttggctcactgcaacctctgcttcctaggcgcaaatgatcctcccacctcagcctcccg

SEQ ID NO: 53170 - DNA, 1056 bp, Homo sapiens
tgggtttctttggacaagttacttcaacctctcagttaaagtaacctttcagttaaagagtttcagttgcctcatctattaaatagagatgattatacccttttccctgcctgtttttcaagactgtagtagtgaagccaggcatgatgactcaatcctgtaatcatagcacttcgagaggctcaggtgggaggatcacttgagcccaggagtttgagaccagcctgggaaacatagtgataccccatctttgcaaaaaaatttttaaaaaatcaactgagtgtggtgatgtgcacctgcagttctagctacttggaggctgaggtgggagggttgctggagcccaggagatggaggctgcagtgagctgtgatcacactgctgtacccccgcctggtgacagagtgagatcctgtctcaaaaaaaaaaaaaaaaaaaaaaagaatgtagtgaaataatatatgtcaaagcgctggaattattttttctgggatcattaattttgccatagaacaaccctgggagcatgcttagtgaaattgtcaacatagagacattgtacagttcaccatgctttgtttttcagtccccaaaagaaactaaacatgctttgtttttcagtccccaaaaggtttgcagtatcagttttcaaatgcatttatagatcattcagaattcatattaaaactacccttgatgcttatttaaatactggacttttaataatagttgctgtggcctttactaaaagcattataagtccttaattatacattatttattagtattgggaattggctgaaagaaataccatcccaggtcaattagatcaacaactacagcatatgtcagacagtggtaccaaagcatgtcttttgggaaaacaaggtttatgtctaagattgaattagttgtagtaaagtggaaatacctggaggtagtgttaggggagccttttgaaaagcaatttattggggctgagtgcagtagctcatgcctgtaatcccagcactttgggaggccacagtgagaggactgcttgaggccagcctgggc

SEQ ID NO: 53171 - DNA, 1053 bp, Homo sapiens
caaattccatttctatcactcattagctgttggatttcgaacaagttttttttttttttttttttttttttgagacagggtctcattctgtcacccaggctggagtgcaggcacgatcatggcccactgcagcctcgacatcccaggctcaagcaatccttctacctcagctcccccgagtagctgggaccacagaatcatgccaccataattggctcatttttgtatttcttgtagggacaggtttcaccatgttgtccaggctggtctcgaattcctgagcacaagcaatctgcctgccttggcctcccaaagtgctgggattacaggcatatgctaccatacccagctgtttaacctttctaagtttagtttgtgattttgttgtggtcttttgacaaaaggtttttttttgttttgttttagaacagctttattgagataattcatgtaccatacaattcatataccatacaattcatccatatatagtgtacagacaaaaatgttatattaaccacctaaatttagtatctcaatggttagtactcatctaaatgcataatttatgctaaatgtgaaataggtctattttttaaaaaaatattttattttgttattttattttattttattttattttattttattttattttattttatttgagacagggtctcagtttattgccttgctggagtgcagtgtcacaatcacggctcactggagccttgacttcccaggctcaggcaatcctgtcacctcagtcccccaagtagctgggtctacaggtacgcactatcaggcccagctaatttttaaattttttgtagagatggggtctcaactcaccttgttgcccaggctggtcttgaattcctggcctcaagcgatgcttctgtctcagtctcccaaagtgctgggattacaggcatgagccaccgtactggcctcttttgtttttttaatagagatgattattttgtcctttctttctttataccatgctttctcatatgatagtttctagtactgttcaactgtgatcaaagt

SEQ ID NO: 53172 - DNA, 1287 bp, Homo sapiens
gctcactgtagccacgaccttccagattcaagcaatcctcccacctcagcctgcctagtatctgggactatagatgaattatactacactgggttaatttttttattattatttttagtagtgacagggtctcactatgttgcccaggctggcctggaactactgggctcaagcaatcctcccatctaggccttccaaagtgctggaattacagttgtgagccactgcactcgtcctcagttaataaggtttaaatgaattttcagctgtaaaatgcaagacatttacccattgtcttaagctgcctaatgtcatataatatagtttcactgcatgttaattttaaaaattgctttaataatgtatcctttgtatttatttatcagttattttaaaaagcagaaccagtttctcagtttcttgtggtaatgttttctttttgcagactttggggttcttcatgaaagatgcaatcaagaaatttgttgtgactcagtgtattttgttgcctgtgtcttcacttctactttacattattaaaattgggggtgactatttttttatttatgcctggctgttcacattagttgtgtctctggtgagtaaaatctttatttcgttttcttttgcaaaagttccttggtgagattactgtaatcttcattggcatgtaaacagttcttaagaagcagctgaaatataaataggtgcttatatacatttcccccttggtttctgcttttgattgtagacacaggagtattgactgaccataaatttccttctccttatgctaactcttcaggtcatagaaactagttgttagtcacttttaatgattcagttgtcaggcagttttgggttgtgcatttgcgagttgccaccagaatgactaagtgtgataatttaatgactcctgactgacctccactgcctaaaatcatggttattttgaagagaaatgagatttaagagggacaagagaaagaaagcatatacttaactggctttcttctgcttcccttcccttgcctttcccttccacgttagacactctctcccttctttgccccatctgcttccccttccccttctatcttttacccattcttcttcctttccttctcctgtcttcccttttctccccaactgccacctattcctgcctctcttctcctttccttttccctctcactcttttccccctgatttttccctccctcacatctcctattcctcttctctttccatactctcaagtgcttcacaacacaaacactacaacgc

SEQ ID NO: 53173 - DNA, 1017 bp, Homo sapiens
ttaacttttatatgtgtttctggcctgtttgcttgggggagaataaggctcaatttataatttcctcaccctaggtcccctaaatattagtgatctttcttttgtcctgccattcctcttatcccaagccaaacttctctacagtctcagctcatggaacctttagtaacaacaaagaggtgggcagtggctaaaaccctttcattttctttttcaggttctttctttttgcctaacagtcctaagccgcagatttgagtttcaagctgatgcatttgccaagaaacttgggaaggctaaagacttatattctgctttaatcaaacttaacaaagataacttgggattccctgtttctgactggttgttctcaatgtggcattattctcatcctccactgctagagagacttcaagctttgaaaactatgaagcaacactgagatgtccaggatctgtgactgaagacatttctgattatttctgtcctggcagcatgttccagctcttgatgtttttaaacttttttttagaagaaaaattaagtacagaaaagcccagatttaaatacatttaatatgtcattttaaaaatgattttaataattcatttcttaaaacactgaatgaattttgaagcttaatgtttttaaaggcatagttttatctttgacatctaatttaccatcaagttgtaaaattatttggaaaaatacagaactcgttttatttgtatacttatatggaatctgcatgtgaggtgtttgagggcatatgtttgaaagagggagcatcaccacaggaatcctttctgtgaggtggaaacagtggtcctgaatcattgtgctcacacctaacttgaaatctggtcttactttcatgctgttatgatttcacctggtgaatcagtgttttaaataagaaaggtaatagttggtaaggccaatgttatttaaatgaaagtagttagaaaaatgctctcctattctaccaaatttttaatttctttcttccctttc

SEQ ID NO: 53174 - DNA, 1050 bp, Homo sapiens
ggaggagggttctcccttccctaggctggatccctcacttgctcctagtgcctggaaccttaggtttagagagccactctactccttgaagtctcttgatgcaccttacctggggccctttccttatccctctctgcagcattcccagagatggtccactggagggtttcagcaccacagagaggctgatgattcacaaatctcatgcagttacacctcattccttctgacagcaatttgaaggggctgaaagggggctaatccctaaggaccagtggttggtagcctacgtaagactccctggtgggtaaatttcactcagaccatttgctgtgatctacgaatctcctatatgcctttctaaactcaactctgtgcttagactctggtacattccactgcagccataccagcctatgctgtccctctaacacgtgtacaacacacaagccatgccctgtttggaatgttcttccccaaaatatcactgccagtgaccttgcttcaggtctttattcaaaaactgacctcatccttaccctgatattccagaataccattctgctttattatttgtcttccacacttagcactattcaacataaagcactagaatataagctccacgagggtggaaacttttgctcttatttgctgttctattctgcagcacatcaaacagtgcctggcacacagcaggtgctcaataaatatttattaaatgaatatgttcaggatgctcagaggaagatcccaccaatcatcaaaccaggaaggaagggatctggtctccacttgtgtgtggctgagatgtgttctgagatggcccagtgtccgagttttattccctcacctactgagaacagggacctgccctttgacagctgaatcttgggaggcaacagtctgatgcaaaaaaaaaaaaaaaaaaaaaaagtaggaactcaattcccctgtttacaattaggaaaagggggatttagaagcttaacagaaagggcattgcaccaagacagcccagcccctttgcaaaggttcaacaccacactg

SEQ ID NO: 53175 - DNA, 1063 bp, Homo sapiens
tctgggtggacatgcacccatccccagtccaggaaaccatctcccccaggaccttctgtctgggactcaggagtcctaaggaaaaggaattctaaaacatgggggaaggggaggtagagcactgatgggtgaaaaagtgaggccaacacacagggcaagtggtgtcgatggagtcgaagcgctgaaggaatagggcggctttccttccagcgagcatcattcggctgttaccaaaacaaacatcttaatctgcacctttctccactggccatcttgtccttgggtcagtgggacatgggcacctcgggaggcccgggccctgcccagctacagttccacccctcagcttgaggaccaatgactgaggtctatgccagttcctgatcccatctcactctctggacctaccaggtgactgctgctgggtgactcccctgaggcggctatacccttaagccagccccactacttccttccctgcctcccagctcagtatttaaacatcatctcccttctctttctcgcataactccccacccctttctccccgatccacccaggcctttctgtaaataaaagctcccaagttgggtacaaaccaggatattggagttactctatcctggagttaactaggatagaggagttgttgggcttctcttcttgtggatggggcagttgttgctgggcctccattgcccaggcaggaaggacagaggctctggagggggagggaaggatggggcgttttctctgggcacctgaattctgagcattaggatagcatggcagttttgaggaacatctgtgggaggaacctaggaatggaagcaggatgctgacctgctgtgtaactttgggtgaatcccttttgagcctttgtacaactgtggcaaggactcacctgtatcttgttcatgccagtatagcacacccagtgtctcgccggggtctgccacttggaaggtcctctgtgagtttcagcacccacggtgtgctggccctggggtaggagctggtagtgaaagattggaagaccttgttcttgccttccaggggtttc

SEQ ID NO: 53176 - DNA, 1352 bp, Homo sapiens
atgcgggcgccccaggggttcagggctaccctggtccccccggccctcgaggactggccgggaaccgaggcgtgccaggacagcccgggagacagggcgtggaggtgagtcgggccccggggtaggaggtgcttcttctaggtagatctgttctggggtgcggcttacccgccaaaggctagggattcccagagactcaccgacttccccgagactggttccaagccccagagcagacaggaaggctgtgagtgcagcctgagggattaccccgcgaccttcccaagtaagcccttggccctgcccaggtacaatctgttcctcagcttgggaattaatgactcaacaccagagtctcctccatggcggcctcacgctcagccaggtgggataggagcggtgggcccttgtagccaggggcttcttcctgaaaggcctctgctttcagggccgggatgccactgaccagcacatcgtggatgtggcgctgaagatgctgcaaggtgaggggcagcaacccctcctcacagtcagttcgagggcatcgccgccccctcaccccctcccggagcctccacgtgttcacttgtctgaaaatctggagtcctgggggctccttccagtccagtctctgaagggttttgggaccttgaataagtcactctgggcctttgacttccgcaaaacagagcccacggaaggtggtgcttttctgtctgcaaacctaggggccagggcccatcggaatgctctgcctcccctagtgttactgctgacacccatctcatagacttccctctccctccctccctccctccctccagagcaactggcagaggtcgccgtgagtgccaagcgggaagccctgggtgcggtgggcatgatgggtcctccaggacctcctgggccccctgggtacccaggcaagcagggcccccatgggcaccctggccctcggggcgttcctggcatcgtgggagccgtgggtcagatcggcaacacggggcccaagggtgagtgctcctctgcggtgggcatgggggccaggcagtgaggatttgtccaggccggccctttccccattcccttctcaggatgacatacagacccttccccggttcctcagccacatggtccaggagacactcctgggctctttcctagtagcaaacggatggcaatgaatgtactatgttatcactcggggtttctggggtttgtttttgaatgtgcttagtggtaccccataagcatctttccatgtcaatagagatggggcggcagaccagcagagcagtaaagcaggcaggctggagccacacacgggtgtgaatccagactcccctttctca

SEQ ID NO: 53177 - DNA, 2980 bp, Homo sapiens
tctctttggccattccagtcctccatgttggctaaatgggatctgaccatttctgcactatagcaccttccatggctccccaccgcctccaggaaaaagtcattcagtccagtccttcaataagtagttattgaggtcgggtgcagtggctcatgcctataatcccagcacttcaggaggctcagctgagtggatcacttgaggtcaggagttcaaaaccagcctggccaatgtggtgacaccccgtctctactaaaaatacaaaaattagctgggcgtggcggctcatgcctgtaatctcagctactcaggaggctgaggcaggagaattgcttgagcccaggaggcggaggttgcactgagccaagattacaccactgcactccagcctgggtaacagagcaagactccatctcaaaaaaaaaaaaaaaaaatagttattgagtatctgaggtatactaagtggcaggtaaacaattataaataggacagatgcaatctttgtcttcatggctcatcttaccattcaatgaccaccataatctgaccccaacctgcccctcctgccatatcagcaatggcccctctctgtcctttcccttctcaacaggccttggcttttctgcctccacacctttaggcctttgctggtccctctgtttgaaatgccctttctggtctctttgtgccttcttatcgttcagggccatctccattccatacctcctggagtccagtccatgggagcctgccctccctccctgtgggggtactgagtggccaaacctgtttctgtgcacacatgcagacttgtgttcctgcgtgcactcacatgggctcaggcacctgagagcacatatccatctcttccacgtagaccccaggtcctggaagacaggccattctctgtgccccactcctctgccaccactgtgggaatgtacagttaagttcatcatgccgtggctggaccttctgttgttcagctcccacaggtgggggaaatctggattggggatgggaagcaaagcagcaggtgcatggggctccctcatgccagggcagaaactgacttcaacttctttctgcagggtgtgccaggccagcctgggacaaaaggaggccctggagaccaggtgaggcgatcccaagctggggacagaattgagcaaggaagtctggggccaggaagacagcaaggcccaggcctcagccaagtctcagaggctcagccagaacataagccccttgggcctaaccacctccctcctgccacctcccacccatcatgcactcctcagcctgcctcagtgcagataggatggcatggcttaaaatccagaggagaaacaaacaggaaaatcaggagccaagaggattgaaccaagaataccctctcccccgtcccagctcatctggttccaggctctgtttaggcttcgttgggtttccctgaggccaagggcctgactgggccacccagactgacctgagaactgttttcctgcagggtgagccgggcccgcagggccttcctggattctctggtccccctgggaaagaggtaaatgccccctgcactgacacaagggttcctgctttagggtgaggccatggggtggagccctaacctagggagagctccgagttagtctggctctgccctgacccaatgattcagggaagctctttctcctccctgggcctgtttccctatgtacattgcagggagggtggggactggctctgttctggagtgtgactttcctagatggccaagttgatgggctgggaatccaacaggcagagttgttcgttcatttattcattgcataaacattcactaaacacttgcaactatgagtctcctcttcatatggagggtatagtttaatggaagaaatagacatgaaataaatgatcacgccgggcgcggtggctcacgcctgtaatcccagcattttgggaggctgaggcgggtggatcacgaggtcaggagatccagaccgcggtgaaaccccgtctctactaaaaatacaaaaaattagcctggggcggtggcaggcacctgtagtcccagctactctggaggctgaggcaggagaatggcatgaacccgggaggcggagcttgcagtgagcggagatcgcgccactgcattccagcctgggtgacagagcaagactccctctcaaaaaaaaaaaaaaaaaaaaaaaagaaagaaagaaatgatcacatgataagtaattcaaattgtgttgggtcctttgaaagaaaactacagggacccaaaaccatggaacaggtggtctgggaaaccttccctgatgaagcaaattagctgagacccagggtagggaggggctggccaggtgtggaagggtgggttccaccaggtcaaacgcttagccccaatttctccttcctccagggagagccagggcctcgaggagaaattggtccccagggcatcatgggacagaaggtaagtgcctggcacaatggcccctccccgggggcctctgcggcagctggcactgctggatacagcatctgctccgtgcagcccgtgagatgcctccccaggcagggcctaggtttgctttgctggtctgccaagtggagaaaggaccccctgccagtgacagcaggaatggagggcaccctgaccatgcggtgccaggcctcggtgcgggaggctacccctgctgagagctgctgaggttgtgaccttctctttccatttcagggtgaccaaggcgagaggggtccagtggggcaaccaggccctcagggaaggcaggtgagtgcaggccagctaaggtgggcagggcgtcatatccaggcccctcattccatttattcctttggtttcttttctcctcagggccctaagggggagcagggcccccccggaattccagggccccaaggcttgccaggcgtcaaaggagacaaggtgccagatggggctgggaaa

SEQ ID NO: 53178 - DNA, 1110 bp, Homo sapiens
ggaggtgcacacagctccactaaagagctggaagaggccgatggagtattcatgagacggctgatccaggaaggactgtggcatattaatatggaaaaggcctgtttgtttgtgcttggagaggaaggagccagaggagaggggagcaaggtgggcgggagctggggagagcctgcagcaagatctgcagagcccgaggtgctctcggcctgggccctggagaggacgtagggtaagtgatggggcacaggctgtgcgtcagggggaaggtgctggggcctgaaggtcccgaggggaacctcagacggccttatgccttctcacaaagaaactggaccatcatctccgacccgcaccccggtcgcccctcgaggacagagggtgggcgcaggaggctggaccgagcggggcggagctggatgcctggcgccggcctccctcccggcaaccccgccggtcctctcaggtgacagctcacgccggcccccgccccgccccccgcatattcaggagccccagcccaccctgcccgcgaacagccagcgctggaggagcgccgggagactctgccgtcggtgcgtgcgcggacacgcacccgtcccccttggtctcgccgccagccatggccgccgctacggcctccccccgcagcctccttgttctcctccaggtggtagtgctcgctctggcgcagattgtaagtttcgcagcccctccgctgccagggtccagggtgcggggtctggagtccgggatggaggagctctgcctgtgtcccgcgcctactgacacccctagcccgagaggccacctgaggacagcgccgcgggcaggtcccctcggtgggtgcatacatggtgcccatcgcggcaccgtgaatggaggtggctgagccggagagtcaaacgggacccgtccccagacgcgcggcccggcccgggacaggcagcgtggggcaggagctggcgcccggtcctggcagcccggggagcccaggtggcggggcatacaatggtgctcattcacccgctgcgcagcctccgcccccgccgcctcccagggggcgccggctccaaccagacgccgctgtcgccccgaggcggcctctcg

SEQ ID NO: 53179 - DNA, 1047 bp, Homo sapiens
aaaaaaagtcaatagaaacagagccacagacaattcaaatatcagaattcggaatcaaaaactttaaagtaaccatgacaaattgtccttaagagtctacaggaaaggatggttatattgggtttaaaaatgaagaatatcagccttacggccagaaacgccaccttccagtaattcgccaaaatgacaaacacaaagggaaagaggagaggcacccgatacatgttctctaggccttttagaaaacatggagttgttcctttggccatgtatatgcgaatctataagaaaggtgatattgtagacatcaagggaatgggtactgttcaaaaaggaatgtcccacaagtgttaccatggcaaaactggaagagtctacaatgttccccagcatgctgttggcattgttgtaaacaaacaagttaagggcaagattcttgccaagagaattaatgtgtgtattgagcacattaagcactctaaaagccgagatagcttcctgaaacgtgtgaaggaaaatgatcagaaaaagaaagaagccaaagagaaagttacctgggttcaacggaagcaccagcctgctccacccagagaagcacagtgtgtgagaaccaatgggaaggagcctgagctgctggaaactattccctatgaattcatggcataataggtgttaaaaaaaaatagaagacttccggactgtaaaaatgtttctcttcattgagtagaagtgtagtatcctctcccccaaagaaatatttaaaggaaattttaattgtgtcctaattcattatgcaatgtctttactgttcaaatttaatgtatttcttgctgaaagacatgaggtagcttattgtgcaacaaattactcaattggttagaaaatggccaggtattatgtatgaaatatttgtactggtttgaagacagggcctctaaatcatcaaggaagaaataaaataatttacaaaaataaaaaaatgaaagctatcaagagagacttgaaagtagtagaaaagaaccaaatgaaaatcctaaaaaggaaaaa

SEQ ID NO: 53180 - DNA, 1611 bp, Homo sapiens
ctctccccgctcaggaggtgcccctgggcgggggaccgggagtcctcaaccccggactgaggcaggggtctctgggggcgaggagggcgcgtcgccctctgcccccgccggcaccctggccatgacaggcaagtcggtgaaggacgtggatcggtaccaggctgtcctggccaacctgctgctggaggaggataacaagttttgtgcagattgccagtctaaaggtagcgcatcccacctggcgggccaggggtccagccgcgccggggtggtgggggtgggctgcgtgaagaggcggtttctgaagcttaggccgcccaactcggcttataagtggtaacgcgtgctgcgcttgcagtgagcctactgggctttctgcagctgggggattggtatgggtagagcttgcgagggcgagtctgtgtgtgtcggggagggtggaggtgatggtgcgggtggaagttgcctggcgtgttcaggtgagaatgtctgtatttgagggctctgaatgagttctgggccggctgtccagagagagctcccagcatgtcacttgcaaagctggggatgaactgcattgcgtgcgtgcgtgcgtgcgtgtgtgtgtgtgtgtgtgtgtgtgtgtgagagagagagagagagaatgacgaggaggaggaggagggaagtgagatggcggaaaggaaaactgcttaaatgatttttaaaggtggtgatttttgcttcctgctatttggttagcaactcctgtcattttgcagccttgctaagatctgacaagagtgcttaggtgactttattcttctggatgtgtgcagtgggaaactgccttatgcagtgacacagtgcggatttctaggcagtgtagccctggcttgtagagtgcgttggaggcctatgtatgagtggtggcagaaactagccgattatgcctgtagtgcaggatccgtttaatcagtggagagagaaagatgaattcgatgaattcattgcttccatggcgattacacttctaaaggtgaaatatgatcattgtaaattggcagaaccatttagtctttgttttctgtgccctagaagattcatgatttgatacaattaaaagtcagtacaataggaaatcttggttattagtgaaatgttggcacttgacatttatacaagcttctatgaatctttttttcctgtattttctaattcttttggcatataattggaggattgggaaaattattttccctttggttgggtcgaaatggatagttatattttgggggcgacaatttacttttgttcataatgcagtggatttgccatggttgtttgccgtacagcgtagtgggcatatactataaaacaaagattcagttatattcgtatttatctattttgagaaaggaaggacatatttaattgatgctttcacttaattaccttttatttttgaagaataaggttataaaaggagaacaggggagggatacatagacacctagtaatgtattttagtgacctctaccaacagataaatggaatgtgccattaggaaaacaaattcctagacttctttcctgaatttttgcattagcaataattcattttaaaaagtat

SEQ ID NO: 53181 - DNA, 1938 bp, Homo sapiens
ataaatattgcaggcatgaaacgcttcctgatcgctgaatagtaagaaaggtctgagcatggtgccgattaaattctccattgaaatgtacctttgtgggtacattaaattattttagcataagtctagtgaagtgccagcagtagatactatgttatttctggagctcttgatgttgatttttgaggctgaacatgctcttagcctcaagcaggtcatatttggaatacctgatgtgtgctcctggttgctcagtgcttaggatgcataaacaggtagctgcagtctcatctctcagtatatatacttttcagcaaatcttttttttctagataaattggaaaactaccttttttctgcatttttcatctgatgtcattatggtatgtaggtggcagctttcttgggcacagttgtctatataactgttcatcacatgagtcattgtctgtttctgttcttctgcctgaaaattccatcttggaaatcgtgtcatgcaatcggtgactgcgacattctacttgttatgtacactgccactggctttgtatgttatgttgatggactctacctgtgctacagtgaagggataaagtgacttattaaattgagtcagactcagttcctccaaatggtatttcctgtaaaaatgatgccaagcaagattctgcataaaacatgcatatgctttacactgtaagcatacagtgcctaccttttgttattgtgtctgcttaaatccttaccacagttgtactcctgtttgatcaagtggccagtttaactagatactagctttgaagaagttctgtattggcccctggaatgtgacagttcataccacattgaaaaggtaagaaccaagtctttgtagagtagaacaccttaaagttaatccacttttaccaaattcctctattgttaaagcaacagtcctatattggctaatttttaaaatcataatgtgccacactttacacatccctagaatgtaagctagggggcaggggcctatgcctgttttgttcactgtagtgttcccagcacctagaacagtgcttggcacagaccaggctctcagtaaatatttgtttgaatgcatgaattgattttatcatctgtaaatgttttgtttcatattagaagagaccttttctaggttatctgaataattgttttaattcttaggaaagctattaattttctgaaaaataagttttaaaatatgtttggaaggccctatgtcagtcaaggaccagtcagaggaacagaagccactgttggtcttataagcagagggaatttaaaatagggagtaggttacaaggctgctagaagagccaagaagctgaacaggggctggtgaggcacccattcgattagcaatgcctgggaactactatgcctgcaaggaaaatagtgcactggtgtcaccaagggctggaagtccgagtggtctggtgtgagcggaagcatggaaagaggagcagtctggtggcagctggaagtaggccgagtgagagagcgtattaccctggctgctccctgctcctgcctcttatcctcctcagtgcctcccattgatggaacttatcctgaaatcagttggcaaagggagcctgggagatgtagttccctgtgatcaagcggagcaagggagggatcccagcgcaaacaggcaaagacacaaaggcactgaattctccaagatgtaatttctttccccttatagtatttgaattattttggacaagagaacggaagggttttccggcagatataacattgcgtgcttctaaaggatcttgactgttgctgaaacaattattagtcccaggaagtaatgtaacaactcagtcatagtttatatacttagggggtatgactaggcaaattggctcctgtattgaatatgtatttgactgttggctgctgcca

SEQ ID NO: 53182 - DNA, 1118 bp, Homo sapiens
gtgagctacctaccctccttggcctcccaaagtgctgggattgcagatgtgagccaccaaggccgggcctcagctcagtgttttctttacagttaaggtaactgcagtgtggctgttttatcttgtgctgcatgttagtttaactagtcttattgatttgtttgttttaccccacaacttcagataagtttgcactgggtgagggaggcaagatcactgggtctgttttcttctaccctgacctgaaaaaaatattttgtcttgtaaggaatgttgctgctgctccatttaagggcagagctttccaagttgtggctacttgttttctacgtgattataaaagtgtctaatgagttatatgagacaagttcagccctttctagaagtgctttttttgtcaatcaggtcacctgcatttgggcccttgctatattaatggaattggtggaactaggccagcagagttttcagtgcagtgtgagtatgtttgcttttaggctgttacttcccacagaggccacagataaaggactctcgttgtttgagtgaagttaccaactgtaacaattgcataggtttccttgtttctttcttttctccaaaaaactcatttcctcttggcaggtgttactataattcacaggtgtaatgaaaatgtaatttgggatttgaaaaagcatatcagactgcttcccagagtaccagttcttttcagctggtccatttcaacttaagaggtccatctatgcatttttgaagcttcatatttaataaatataatatttcactgctgtgtttgactattccgtttcccacactttctccttccctaccccactcttctggatcctgtgtttccccacaggctttgtgaatgccggtccactgatggctgaactgcaggtctctccccagtggaaagccccagagatgagccagatctgcctcagctgtggccatccgtcagcgtaaggttgctctggtggtcgtcttcagtttgtccagctcttccccttatcccccatcctccctcatgtgtggctgaagcttgccctggaatcccacctttgtagcatgtcactcggtagtagtagaattttattattgttgcttttttt

SEQ ID NO: 53183 - DNA, 1102 bp, Homo sapiens
gtcgcccaagctggagtacagtggcacgatctcagctcactgcagcctctatcaggcttaagcagttcttctgtctcagccttcatagtagctgggactacaggtgcacaccaccacgtccagctaatttttgtatttttagtacagacagggttttgccatgttgcccaggctagtctcgaactcctgagctcacatcatctgcctgcctcggcctgccggagtgccaggattacaggcatcaaccaccatgcccggccttatttttcataattcttatcacccatttacttgagcttataccataatgattttatatcattcttttttgcttaacatttattataagcttatttcatgacattaaaaacgtgtaaatacctttattgtatcccagcattggaatatgtcattattatctcttgcccaattgttaatatttgaattttcaattttttaacaatacaaataaggaagtataaatttttgtgttgttgttagagtgatgggttatttatgtgttcagatttgagtagtcaagtgggccctctaatttaaaaagttaccaaggggattctctgggttgagcccacgtagagatggctttgctatgggcattatcattctgaactgcttcattgcagtagatgtctgctgaggcaaggaatggggaattcgggagaaccctggtttccccataagggacctaaggaacataagggacataaggaacagctttatgggtcataccacagcaagatgggccggcactttcacattgagaggtgacagcgtgctggcagccctcacagccctcgctcgctctcggtgcctcctcggccttggcacccactctggccgcacttgaggagcccttcagcccactgctgcactgtgggagccccttcctgggctggccgaggccggagctggctccctcggcttgcggggaggtgtggagggagccagctccgggaaccggggctgtgtgccgcacttgtgggccagctggagttccgggtgggcatgggcttggcgggccccgcacttggagcagccggccagccctgctggccctgggcaatgaggggcttagcacctg

SEQ ID NO: 53184 - DNA, 1048 bp, Homo sapiens
caagagcactgcatagctttcccaggaccaactggaaagaattcttttttacgacgatgtaattgacaatgaaaattgtatatgtttacagtatacaatgtggtgttttgatatatgtgtacattgatttttgtggcagtcaggaggtcctctagttggaacagagactcaccacacccaagagtccctctgtctgtatcccatccccaaatcagaaaaaggcctgtgcgtctctgtgggtagtattcactctctcagattcctctgtgagtcaggaacatgacaagtggcatctatatacacagttttaagaggaagtgatgtcactcttggtgtatagaagtgagaagaggagtaatgagaattaaagacccagatcacaggagaatttaagccatacttagaagtttggagttcagttgatggtggggggtccagtgacatagctttgaatggggtgatgacattatcaggacatatgttggcagaatgtccttttcaaagccaacaaagtccaaactaggatctcattctttccctcctgaagtcacctggggaattgaattgataataatgatacaggatgactgattgatagttctttattcccagaaacatcacctaagtatacactagttaccttccactgctgggagagacaacaaggaagagtcacagtaagtccctacctgttaataataaaccaatggccaggcccagtggctcatgcctgtaatcccagtactttgggaggccaaggtgggaagatcacttgagcccaagagttcaaaaccagcctgggcaacatagcaagacctcacctctacaaaataataataataataataataaaacagggcagtaagattaatgtggagccaaatttacctttccagagtagtttaatgaatttttgagatacagttactatcttttagaagagatatgtttgagataatctggttaaggtatattgacttgtctaaagtcacacaggaaattagtgctgtaatttagataattcgtatctttagctgtgtagataaga

SEQ ID NO: 53185 - DNA, 1113 bp, Homo sapiens
aacagctggaatgcatacatgaatcttgcatgctgttagcttggtgggcttggagtgagactcctaagttaatgagtctggctggcctaagagctgtaccttgatatagcttcattattttttattctcttcctacattgaaacgctttaatttcaattttttctttcttgggagtaaaagggaagccccccgccccccaaatccagttgctaaagttggtaatggaaatcagaggttacgcttaaccagaaaatggctttagaaattgctttagattgtatttatagatgtattaaaggtctaaaaaggtgagttacatttttcagttacacttcactctgttttatgaaggaaattatatgccatggagatagtcgggaatttggagatttaaaaagctcttgggatttatccctcacaagtgttaaggagtctacttaaaagcctaatgggaaacacatttattggaattgattaatagtataaactcagaatgataacactgatcattgcctgccaagtagacattttaattggtagctgtgtatctaagagtttcaaatgagatcttgatttattactgaattgaatgtatcttggtacacaaatatttcagtaaaaggaacctatggagtgggggaaagacagcttggggcaaatgattgggaaatcctagtaaggtagagggaatcatgaattggaaatcagaatacacaagtttaaatgttggttctgacactctctaggttggttcttcaattgtacagtagtggaattgggtgagaagtttttcagttctttcttgatctgacgttccatgtttctacattctctttggtcacagtgcatgcaagagatgggaaatggaaaggcaaaccgactttatgaagcctatcttcctgagacctttcggcgacctcagatagacccgtatcttttctggagcaacttagaaggctgagtggtattttgatgcttggggagagtcagacaagactccagtcctgtaatgtgactgggtcatctctatgtggattagtcagtgtccttgcttgtcctctgtcctgcaatcaaggtgcacaaaaagcacatgtatttgtgaatgtcggaat

SEQ ID NO: 53186 - DNA, 2105 bp, Homo sapiens
ccttgtgcaaacgagcaagcctgctcaagcgctttccctgacactgacagtaatagctgtgctgaagatgaggcgggagcactggggagggggctttcctttcagcttttaggattggccaggcaagttaacaataggccccttctatttaggatgagggactggaaaggaaaaagagaggaactcatgctgattttctgtcgactagatccagatgccaggatgccttctttccctccctgagctttagtctccgtcagcattgcactcccaaaaggtcattcacgtacgtggccttgaaatgatctgactgctaaggtccagggtttactgtccataacagagtttccctttgtctcattctccccatcctggcagagaaagggactctcaccctgccttttgcactaattggcggaatgcccacagcctggtctgaaagtctcctctctccctttcagatgacccagcagatggctgggatgaacttctatggagccaatggcatgatgaactatggacagtcaatgagtggcggaaatggacaggcagcaaatcagactctcagtcctcagatgtggaaataaaaacaaaacacctgtatggctgccattctcttcagccctcgctctcccctttccacagcctccacccctgacccccatcctcttttcctacctctctgtttggtttagaaattgctcaataagtcatttggggtttggcatcctgcccagccacttcccaaacatgaagacctctctgttgctttatgttgtacatgccccatagccatcccaacgtcctccccagtcctctcctggcaccagcaccttagaagttgttggcagaaggcacttaaactgtgggagaagtgtgcacacctttgagtcccttccctcaaggttaaagctcctgtcagactctcagaagggtctgtgggtgttgtatattaggcaaacaggggaaagcttagaggtccttctatatgtgttaataagctgtttctaagtgtttaaatttgaaaagcatcatgttctcatgatttatgggaatgaagcaagtactgaaatcaaattaaatactccctgggtcctgggtcagtttgaccctagccctggggtgaggcaagccccctcctatgaggatgagcaaaaatactactctcttcgccctgagttgctttctggatctggggcttcaggacttgctgcttcagtcagcctttattagcaccaaagactttatgaagatcccacacacagacacacatcccttcccgcctcccccctgccttcagtaggatctggctccgtggctggaggaccaacccctatagtgggaatgcagagcttaacgtgtactgcttgtgtgtgtgcgtgagtgtgtgtgtgtgtatgagtgtgtgttccgcctcccaccctctccccatctgctctgggtatttttgtttttgtttagttttaggtttacaacagagaggaattaatttatcagcagcctaaaactgttgtgtttttcttatggtttaaaaaacgccatgtcattgataactccctttctcccttcccttctcccggtctgctgatcactctttcatgcctgtgtatccagggtgctctgtttccccaccgttcccaggtgtacgaggcagagggccgggacagctttcctctcagtcattgttcaccccacttgaaaattcagacaagaaaactttgcttaaaagatttcatgtgtgggaaccacagttcctggctgcctttctcctgtgtatgtgtaaattccttaataaatattgcagggaaggactgtttgcttggccattactgtgcgtcactcttggaggagggtgcgttacacttaggttttctgttttccaaaggcaattgtttcacttcctgtattttagaaaattctgtacttctcatacccaagggtgaggcccaggctccagcagtcagaaagggggcctctctccactggcatctagagctgtgagctgagagaactccagagatcagcaccttctagagtcacagagcatcagagcggcatgctttccccccacaggtggagaaactgagacacggagaaaggacatg

SEQ ID NO: 53187 - DNA, 1357 bp, Homo sapiens
cactgtgcaaactctgcaagaaattgctgcctttgcttgatgttgtagatgagttgccctccacctggctggagagatggcacatcattcagggccagaaggttgtccagcagtgtttctgcagtggctgcagggagatggaaaagaagagccctgcttccctgcctcctcctacctttctcttccactcctcagagttttcttctccagtatcctgacatgtaaagagattctttaaaatgctgcttcttctactggactgtctttcactgagtagtcagggaggagatgaaaatgtggacacatccccccgccttctccctcaaccttttcactcacgtcagaagaggttggggcaaaacaaaacaagcatgattgaagagcaggggaagcccacacaatcaggtgagccctgatgggggctggactggcctggtctggctgggaaaggattcttttaaaagcgtgcctgagcatctcagagcaatgtcagtgatgccaaagagagcaacttggcctccttgggcaccaactctgatggctgagttgcacaaacgtggctcagatgttggcatgcccgatggtgggaccttgttctctgataaagggcttaatctttccatgtagcaaagcaactttccctccctcccctccccccgaaccctgagcttgggcttgtgtgggcccagcatggctgtgcctgtgagggaagccacatcagtgagagaaagttgcattctctcaggggcctagattggcttggggcaggtgcttgttgaaaagcatgagtgtttctgctttgggaaacccttccagggctctggttggaaacttggccagtaaggacagggccttgggcctcccaaggagttcacaatgatgccaggaagggtccctgagcctgggttccagtcagcttggctaacagaatggggcttgggaattccaggggcaactgagcatccaccccattagccagtgatctggacagggacagctggctacagggaatcaaaggctgttctgtacagttttaccagaaactgtgaccttgggtaaggctcctcacttttctgggcctcaacttcctcatctgcaaaatcagagcattagctgctctccccatgattccctcccagttttaattaaaagtctctgatctggagcacatgagggttgcgagcctggtgcacctggttcctgtctccgtgggctggtttccttcagcccctgatgcccaggctgggtgcaggctctcatctggtccatgcccagatgctgcctcagacaagaactctgggaatcctaacagactctgctttcctctcttcgtggtttgtcctccctcttttattct

SEQ ID NO: 53188 - DNA, 2352 bp, Homo sapiens
ggcttgttataacaattgaaagaaagaatctaggtaaaatccataggatcgtatctaacacacctcaagtgctcagtaaattattgtgtgaaatcagtcttgagttctggctccctctgctccatctgtgccctgctgaaacgtgtaggttcctaggcctgctgcacagtcctggagtcagggaggtggctcactccctccctctcttcctcctggcaggtgatcgtctggggagactatggccgcatggaccacaagtgcttcatgggcatggcccagatcatgctggacgagctggacctcagcgccgcggtcaccggctggtacaaactcttccccacctcctcagtggcagactccacactcggatccctcaccaggcgcctgtcccagtcttccctggagagtgccaccagcccctcatgctcttaaggatgtcaggaagaggccaggatggtggtgtggggaggggtgcctgctggccccatgtcctcccctgtacatagtcttcgtgtctttctggaccccttgtcctgctgcatgcctgttggctactgggctcatcccagctggcagtggagactgtagtgtgtgcgtgtgtgcgtgcgtgtgtgtgtgtgtgtacgtgaccacgttctatctgttcatttgtctgggtatagtcactcctggtgatgatatgggctgaaatgtctccacgtctctttgtgtcttgttgaaaagaaacccaaaggagtgttgtgtggacatgactcaccctgaggagtctccagggatggaggtggggcatgcggccactggtcggtgctgcctggtcctggcctggggcagagcctgtgtgttcttcacctgtgcctgctcctggtggtctctgctttgttttctgtcttgtcttttgttccactcttgactctcccggctctgccactgttttctgagaaatgtagcatccgctgcagctggccacactgagggccctctgggaaccccaccccactggagccgctccggcagctcttcctgccactgaatgcgttctgcagcatgtagcatgcccacctagctccctggccagggccctggggaggcagagggtacccaggggactgagggcttagaaatgactttctctatgaggctggaacctcctccttcttccagtgaagcacgaggtcttggttccagggttcctggccaggtgcccccttagcatttgttcttcatctcctgtctcttcaagcctccccactccaccgtgccgaaggagctctgccagtgggcctgggcaggcagccacagagggcatgttatctgctaaagcaaacagtcctcctgaggccctgagggtggccctgaccccctcagggctcattcctggtgggcatgactcggtaaggaggttctgtgggtagggctgtttgctggaataaggagggctgaggctgagttgttccccgccactgttgaggatcccatctgacatttggggattcactgcatgaagttgttcatttggggctccagtttttgtgcatttccagaccagggtccctgtctgggagctcagacttagctgggctccagcagcctggctccggactctcgtctgccaccatcaccagctctgtctaagcaatacttacccctccgggcttccctgctttcctgtgccccactgctgccctctgcagagccatctgctccaggcacccacctgcctctgcttgctttctcacccatgtctggttggagcttctcacagccactcaaaccctgacttgatttgacaactgggccctgttggtggagaccagtgcctgaactggaccctgtgaaatctgtcccgtgggaatcctgaagtctgactcaggaatgcccagacctgtccctgtccctcctcagctctagggtgaaaggcgagaggttgcacaggacatggacagagcagcccttgggtttgtatctggtaggggagaaagcagcaggacagtggaggtgtgtggaaggcactctttccacctctctccaggcattatccccaggtgctgaaatggctgtggccccagcacctgaggcaggggtacgctacctggggtagcagtagaaaggtcttggggtctgaatgacttggggcctccattcataaccaaagttgtaggggcatggaggcagtggcgccttatggataggtcatctcagcccaaagggcctccttggctggcatggttctgtgttacgttgaagccagagtcttataacacctcccaagaaagataggggaagaagccagaaccccacctggcctgcccacaggacaagaagtgggtaagggcaggaaggaaatgaacggag

SEQ ID NO: 53189 - DNA, 1033 bp, Homo sapiens
ctttggcaggactcttagagaagccccattcataatctgaccttgttccctctctgtgcttggggttgggggggtcacagaaggggccaccaagaagctgcgcagcaacatccgccggagcacggagacaggcatcgcggtggagatgcggagccgggtcacacgccagggcagccgggagtccaccgatgggagcaccaacagcaacagctccgacggcacgtgcgtgcagccccgtgctgtggtcccctccctcctcctcggtcctccagtcacagagccactgggcagggtgggaaagcctccctgttttgtttccagctaaaatgtctgggtcctctgtgtctctgccttccttcatacccctcccctcaacactctgtgcctggacctcaggtcttccattgctcccattggaatatccagatacccaggagctatcagttccttctgtatgtttcaggaagggacccttacctcccacctcccacctcccaccacgcacacactgccctgctccagaggaaagggtggaaaggaaaatgtggccctaaaatccttttaaatctaaaaccattgttgtggcccagatgagtggaattttctcaaggaggcttgcttagagctgagggaaggagattggactagatcagtgtttttcaaaccatggatggtgactcatagacaggaaataaaataggtttagtgggtcaaaaccagcattagaaaaagaaatagacatatcttatgaagtaagaataaattgcctcgtgaacttttgtttccattttttatgtatagatgcacacaggtctgtcctgggtcatgatgttaaatctcctttcttacatgtaggttgcattaaaaaatctgaaagtcactggtttagatattcccacagatctcttctaagtctatgaaattatagttgtatgactaagattttctgcttctgcttcaaggcctagtgacttccaggcttaggattctgtggctccctcgtttgagattcagtgattgtgtgtctcactgc

SEQ ID NO: 53190 - DNA, 1041 bp, Homo sapiens
atactatgtgccaggcatgaagctgggtgcctttgcataccctatctcacttaattccctggataactctgcaaggcatgtatcattgccctcattctacaaacaaggcagcaggctcagagaggtgaagtaacttgccttagtcacccggctagtaaatgacaggggatggatctgaacttgaggtcgttctccaggaacatgctttctccccaggctctggatgcctcatcaataaaataagtacagcgtactagatgatctcaagggactctcctcactcacattcagcaattagctgattcacagagaccttcagttagaagggcatctgggcagttcccctagctccagtcctttagccatgcccttgcataccaaggagacaagggattcagaagccccatcatcattcatctcttctcaagatgaaaggtcttcctggtatctgctccaatccctgcctgcagcctgtaaagtcaaggcagaccactagaaggttctcccagtgactcaggtccccatcctggccttggaagactgtccccccaaatcactttgggcatgaagaagcctttgggtctgaagctgaatcagctggatttctgggcttggtcccctggagccagactcccggggtccaacacctccacgaccttctaatcttaatctcactccttagtcctatctcagccccttccttgtcccagcccaatttctagatccctaagtccccatctccctgactctctagtaccaggcctaaactgcatattcacagaggccatgcccactctagggctctgataacctcaagccccttccccacctataatagctttccccagcgagaaaccacatcacagcttgattgctggaaaagaccagcccacgtgctactgtcgacggctttgtataaatctattttaaggcctggaaaagtcccccacccccagccccaactgggagccttgatgagcattctccctggatcctccggagcccccgccccctcaccatcccatccagctgcctatttga

SEQ ID NO: 53191 - DNA, 1031 bp, Homo sapiens
agaatgtgtaccctggctggccctttcccacccataatctataccctgcaaggccccagagctcaagctctgtaaatctgactccagaaagcactttagtgacacgaggaggaatcaattaatcaataaaaaagcagttatcaagcagatagaagaacttttccctcttcacaaaacacacattggtggaaatgcctgttactttaatgtatgttttgaaaagaaaaatatgtggttttggtttttttctttattataacattaatacagtttcttaagtagtaactttagaaaacacagtatgtcacatggagaaaataaaaatgactcacagtgctataaatactgctaatttaatgttttaagttgccattcattcattctacaaatatttactgagtcctgctatatgccagacctgtgccaggtactaggggttcagggtgaagacgacgacaaggttcctatttttaaccagctcacagccagggggcggggtgtgggagacaagtacggaacaagttaggaacagcagtgtgttcattgcctagggaagctgcaataaagcgccacaaacagggtggcttaaaacaacagaaatgtagactctcacagttctgaaggctacaagtctaaaatcaggtgttggcaggattgcttccttctgtgtgctgtgagggaaaatctgttccgtgcccctcccctggcttctggtgacaggtggcaatccttggcgttccttggcgcattgacgcgtcactcccatttctgcctccgtcggcacatggcgctctccccgtgtctgtcttcacgtggccaccttcctataaggacactggttatattggatgagggacccacccttctccagcatgatctcatcttaacttgtcacatctgcaacgaccgtgtttccaaaccaagtcacattctgagggactggaggttagaacctcaacagtttttggggggacacaactcaacttataacacacagggacagtacaaagggagttatggggattaacctt

SEQ ID NO: 53192 - DNA, 1051 bp, Homo sapiens
tatctcagcctcccaagtagctgggattacaggtgcgtgccaccatgcccggctaatttttgtatttttagtttgaccatccagacggggtttgaccatatcggccaggctggccttgaactcctgacctcaagtgatctgcctgcctgagactcccaaagtattgggattacaggcgtgagccaccgtgcccagcctaggagtctgtagatttggcagaaatcattgaggtgacacacagtgttatgcacttaatgcaaaattgggaagtggtatggggatgtcggaaatgtgcactgttgacctagataattttgaaggtcccttccacctgcccaacaaatctaggggtctccccctgctgcgctggcctgctctcttctgctcaccttgaaccctggcttgggcttcttttggaggatcctgccatgatttccctgcagacaggagaatttgtgccattgttttcacaacctgcttgggaggggggctcatggagataaggtgtctggatgtggtaggatgccccctcatctctgaggccaggacttgagacctcctggggggagtaggggctgcataccctacagttcttctgcttcctatgtataacacaggcctcagggaggcctagggagcagtgaagctttgggagccacaggtaagggcaaggctgcccctggggcttcatgtcccagagcttggggctcagggacagtgaagcagaaggcttcggagtctcataggtccctcttcccctactccccgctttgtccaccgctttgtgctgactgcttgtccctgggacctcgcagcagaccccagggggcctcggaggacacagtggatttatcctcagggcccatgagcagggccaaagtagagaaggcagatggcaaggagggagggaagtcctgtctgccccctccctagtcccatgttcacagtgggaagggtggcctgggcaccaggaggatggagggcctgggtagagtgtggggtgtgtgcttgtgtgtccatggtgaatgtttgaggatctctgtgaaggcat

SEQ ID NO: 53193 - DNA, 1022 bp, Homo sapiens
tcctaggctcaaatgatcctcccaagaagttgggactacaggtgcacaccaccatgcctggctaattttttttttttttttttttttttgagacattgtcacattctgtcacccaggctggagtgcaatggctgggtcacggctcactgcagctttgaactcctgggctcaggtaatcctcccacctcagcctccctggtagctaggaccacaggctcatgccaccatgcccagctcagttttgtatttttttgtagagacagggtttcaccctgttgcccagattggtctccaactcctgggctcaagcaatcctcccatcttggcctctgaaagtgctgggattacaggtgtgattcacgacacccagtctgtcatctcattttacagacaaggaaactgcagtttaggcatttacaggctagattttaaagctcttcacctctcttaatctcggtgatttgctgatttgtctgcttgctgtttgggattgtgaaggtctcacgggcagatagcaggttaccatcctgcctctttccccactgcccagcaagggctgccaactgtggaacagatggatgcaggtagagtagaaaaggtgtctgggtggacgtcaagtctctgacgtgtggatctcccctgtgtagctagctctgtgactatggacacgtctcatcctttctgagcctcacatttctcattcagaaacggggaagataattcctgctctgaggctcatattagatggtggccgttatgacaatttgtgaataggaaaggaccaaggaatttctaaaagattgttattaccagaataggctgtagcaacagggcactagcggggcactgtgcccgaactcctgcaagaggtggacaagcctagagcttcccaatatgtggagtgggaccagggatgactttcagtgccatttcttaacattagctcacgtagtgagaaagttggttccctctcaacgatatcaagtccaagattgtccaagggagaacatgtcagtgtagtt

SEQ ID NO: 53194 - DNA, 1010 bp, Homo sapiens
accctccctctgccacatctgtgcaaagtctacatctcttactcgctgtctcccactgcactgggcttctccgacgtaggcacagtgattattttttcaggattgttcatctgcgtacctccggctcccagcttctctcttgtcttaattaggtctttgcttatatacagaaacccactcaaaccagcttcagtaataaagaagggcttattacaaggacagaagggattccctggaactaaggggaaggaaaaccattagcttcaggaaggcgggacctggagggccaagggaacttgaagcagccattctctgcaccctgcctttctgtatccacagactggatatctctgccttttcaggcaccaagccacctatagttcctgtattgtgtcccttggtttcagccacatggagagagagaacttggggcttggcagatccaatcccaaactcccaggagaggatctgattggctcagagtgaggcaggtgcccaccctggtccagtcatctgtagcctactgggaaggatcaaagagacatgcaaacagggttctcagtgccccgctcagagaagggggatcttcgttagcttccaaacacatctcctggaattcttagagtgccgatgtgggtgcaggcagttgggcctgagccccaaacttccatctggacagcagctggagaaaaaaggcctggaattgtgacttaaaggagagtcttttcctgggcagcagtgctcaggacaggctctgaagaacctgtcaaatgtcattcagaggcctgaggagagagagggagaagaaagcctgaattttctcaccttgctttggagtgaggagagagggaagaggaagccaggaacaggcagaagagtttttccccacgaaaatcttcatcctccaagatgtaactcttttcatcagtgaaaaaccaaaccatgtctacctcaccttccccctgtcactcattcttgacctgtattgattctgttctttgtgcttccct

SEQ ID NO: 53195 - DNA, 1033 bp, Homo sapiens
ccgggaggagtgaagaaaaaaggagaaagaatgcctggccctcttgcctctgtggcagaaggatgcattcagtccaccaggtacctctgatgtatcagactctatgagccaggcggcccctgccctcacggaggtgacattctagtggggacatgacccagagcaggtaattacacatggcatgtgtgtagaaaggagggacttgggctctggaacctatcactgaagttgctctcctgcagtctgtaatctgggaaaggttcctggaggtggcgacatcttagctgagtcatgaagggtgccaaggaattgtagaggcgaagaagggatgaggaaggggaactgtgtgtctgaggccctgttgatggtgagaacaggcttggcgtggtagagggagggcagtgtgggcaggcccaggacagcctggcccgatttcctagtctagcaggatactaaagacttgggaatttatcctcaggccaatggcaacccctaaagggttttaagcagaaaaggcaagatcagatttccccagaatgttagggtctatggccctcaggcagagccttcttgggagtgactttttgccctctcctacccttttccctgtgcagcagcctcggtcccagggaaccggttgtttatgtggctggccccaggagggaggacagccagtcccagtccctccagctccttctctctggtctaagctgtatcgtggccttgttgacaaagctcagcccttggggccaggttctcccaacctccctggggagccagagggcaagaggcagggttttgcaccaggctgctctgtgcccacatcccagctctgcagttcctgagctgggtaatctctgggaaggcatacccgtctctgaacttctgtgtcctcaactataaaatggagttgatgatatctctaggaaaacgataaagtgaaattccacatggaaaccataaaccctatctggatgtcagttggcatttttactctgttgtgtgggggctgacatcaactctgggccgggcc

SEQ ID NO: 53196 - DNA, 1032 bp, Homo sapiens
cgtgacaccgttgtggtgtccagaggaccccctccaccccataaaagaaaaggagtgctgcttactccagccctggggtgggaagagggggctttgggaagctgggaatgcagttggtcagcagcatggtgcagagcccagggttcagggaggcttggcaggacccttgatgggcaacttgggcatgctctcattcatagggaggagctcttccctgactggccgcctgggtacctggactccatgtccccatcacctctggacaactcagccctgaggagtgggtttcttcagtgtcctggtcctgaaggctcaggaaggatcctggaatggggtgggcaatggcatatcaaggctggagaacagggggcattggctggcactgccacttggggcctgtttcaatgtggtccttcagggcttggacacctgggtgaatatgtgtccaaccctagccccaggggtgttatcaggatgtagggaagaaggctgctgctcctttggtcctgtcctctatccatgatgacttcttaagtctgggttccttgggtttggggcctgaagtcatgggaggaggattgggcctggtcaacaaggggttaatgagccatctcccccaccccaccatagttgctgccagccaccaattagtctgtaatcaggcagctgccaactgtccctgggggcatgtgggtagcctaatggggcattcttggttgggaggcggggtgggtgggttggcagggatgtgctggggaggtgacccatgtgccctgtgcttaaaccaagcaccatgccctttgttgtttgtttagggcccacagaccccttccctgccttctgttcctgactgccttgcttagggacttccagccctggggttctacacttatccgaccctttgcagggtatgaagcccagagttggttaaacttggcttcaaacccaagctctgccactttctggctgtgtgatattgaggaaatcacttcccctctctgagactctttcagtaaaacaaacccagctgct

SEQ ID NO: 53197 - DNA, 1847 bp, Homo sapiens
caaattaaaaacacaaatacacacacacgcccctacttagttcctaaaactcaagggcacgcgcacacacctacttatttcctaaaattcaagctcgcaccaaggagatccacaaggataggcagggtggtggaggtcactgggcagcgcctccggatcccccgaaagggggcggggtcaaaactcagatctcgagctcccgaaagggggcggggttaaaactctcagatctcattccgcctccctctgtcgtcgccccttcccaattctcgcgagacctcaaggagcacagcttctgcgcaccgcacgatactgggagtccaggcgccaagggagggggaagggaaaaggggaaacggtgcaaacggcgtggccgccatcttgcttgtgcccccgcttcgcgcgcgctccgttctccgtgacgcacacttccccctcccctccgccgcgcctgggcctctgcattgcccgactccgtaggagcgcgggggcggctcctgctcttcctggactcctgagcagaggtgtgtgagtgtgcgggagtttctgtgcgagggtgatagggaagcggcggcggggggaggggcagcgcttcccgccttcgccagagacctcacttcctcgcgcggccgctgctgtagctcggtccgtcctgcccgccgccatgttgtgctcttgcctggcccgctgctgtcgccgccgccgcgctcgtggggtccgtgtgcctcgtcggcccggcccgcgggctttctcccattggcggaaggcgacggcgggggggctcgctcgtgattggtcggtggcggggaggccgcggacctggcaccttattggacgcgccagctccggtctagggggtgatgaaggaatctgaggctgcggggatgcgcgcgtcttgggctagggcggctggggcaatgaccccctgcggcgcaggcgtggggttgcggcgagagggcgagcctagaggctttaagggggaagagagggtgatggcctggcaggtactttgggggtagcttaggccatggcctgggaatgggggacactcactttcagaggtgcttttcctggtacatgcatggcccaagattggggtgtgcaggccctcagggttccaggcttggaaacaccgaaacccaagtgacaggctgagagtcttcgagatccagggttgctaatgtgacccagtttggaagtggccctgaagtccacggtgtgagtgtatggtgtaggaagaaaggcatcagggctaggggcatagctgaacggtagaatcggatcagggattttgctggagagtgcaagcattcaaacactgaggttttggtggagccctggagtccagagtcaacggacctgggatgtgatgtgaggagcaagtaaaccgagagaggaatgctattgagaagtgtgctctgtccgagcctaggaagcacagcattaagtagtatcagatttaaagtgacaaaatctgatataggaagcattttaggggacattttcggacttgggaagtgtattaatagaacagttatacattattgagtctcaggaccatacaagtagttttgagatgttgtatatgaaatttgctgctctaggaaggatacaggtcatggctgagtttccaaagccacattagcaaatattaggtagttggtagttatttgttgagtaaatattgttaggttcccctttaagggaaagggagctagccagaaattttcggtcttggtttatttccttgtatatgtgcctaaaaagtatacccattcccatgtgtactttgaattttttgtttgttttttcaaataagcagctccaaaccaaaaaaaagcccatgc

SEQ ID NO: 53198 - DNA, 1004 bp, Homo sapiens
ttccactggatagcattgcctctcctgtggacgcattgacttgatggcagagatgactttaagtgacaggtttacttcattcaccggaatgagaatggcagaggacattactagggtcacaaatgaccttcttaaggtcaatcctggcctcaggcatacaaccaggaagaatattcctttgccagtaagttgttcttttccattctgtttcttgttctcagaggaaactggttgtgagttatctgatgtcttacagtctttcttttcattttgtttattcagtttttcatgcatgcactgtcacagtttaggaaggctacaaggtcattttagtgttttcctgcagagactcaaagcactcaatataatgtaagtagattaattgcaggaggaaatggatttttaaaactttggccaaaaagtgcctatgggagaggacagtattagttgctgattggagtcagaccaagggaagagttctgtctctgcagtgcatttaccctctgtgctggagcaggttcttaacttgtttcttcttctgtaaaataacgacaataatacctacctgtagggtaattatgagaaatgaatataatagcgtgtggtagatgcctatcacttagtggaccttaataagtgggagaacacattttcattttggaacagcatgaaatctgtcctttcagcccgttacagcttccttgatgaggaggggtgaggccttttgtaattgtctgctctgcaatatacagtaagatttccaaatgggagagcaaccacttgacatgaagtaacctaatttagttgtgctgttgtggtttaggagctgattttcagtggaccagtgtgaggtcagtcttacttttgaatgcacaaagtagtaggatcatttgtttcagggaaagattgtttcctgatctcttttgttcatccccaagtgttgagtggtaatgattgcgatgcgatgaaaacttcttcatatttgacaaatagcaatgatgatt

SEQ ID NO: 53199 - DNA, 1905 bp, Homo sapiens
gaatacccttcatttaaagccaatagtatatcctttgcctcccgggttcaagtgttaaagtcaattgtatattcttaataagattcaataattgtcctattcttaaatacattcatgagtatgaaccataaatagtgatcttgagcagtgtttcaaagtgttttaataagaggaatgagatgggccgggcgccgtggctcacacctgtaatcccagcactttgggaggctgaggcgggcagatcatgaggtcaggagtttaagaccagcctggccaacatggtgaaatcccatctctactaaagatacaaaaaattagctgggcgtggtggtgggcctctgtaaccccagctactcgggaggctgaggcaggagaatcgcttgaatccgggaggcagaggttgcagtgagccgagatcgcgcctctattgcactccagccttgacgacagggtgagactgtctccaaaaaaaaacaaaacaaaaccaaaaaaggaatgagatgactcataggaaatgatgttagagtatagaatattttgtatcatgtcattggcttaaatctgaagtactgaaggttttcacaatcccaaattactgttgcccttggcctccagagctgtaaactgtccagtaatctctatgaagttgagattctttgcccagtgttaagaagatatatccctttgacactggcatgatctgttccttttaaaagagaagagagaaggggctaataaagtacacattatctgcacagttgacatccttgtcattttaaactgttttaaaaattattactgtaccctgaaagtaagtagcatagaatttgctcattatgaaatgacgaagttggggccttttaagaagccaagaatgcttggttggcaatcacttaggaggcaaaggattgctatttatggtggtatttaatgtcattttcagtagtactaagttagaaaggaaaacgccataatgtgtgtaaaactctaaccattttggaaggttatcagaatacagttgcctatagtcttttcactccactaaaatttgtaagttggtttagagtagcatttcccaagctcttccactgaacattagttctgtgtagtgctaatcagtgtcctttggggataaaaagaggatccttgacaaaaaatggccaaagtgaaatgcctttctttactgcagaattattattcagagccttggtgcttatttgcctatgacccttcaagagggaagatacattacgcggtgttactcagacttacttggtcatggaccgctgtttgtgagaacacctaataaacgtttcatgctatgactggtgtgtagtggagcccagttgagcagttctggtgtagtctatgaataaaaaaatgaatcattttgtataagatagcttggtaatcgtgggaaaggacttttctgagaacaagatacatcttcaaggtaacgtagactcttaaggatgaatgtgatttcaaaggtcatctaatccaatgcccaataacaataataatagtagcaggtaccattttttgagtacatgctttttatcaagcacagtgttgttattctacatgccttattaaccactgggtcttagtgatttttgaatcttctttattttttattttactttaattaatttttttgagatggggtctcactttcttgcccacgctggagtgaggtggtgtgatcatagctcaatgcaacctcaaacttctgggttcaagtcatcctcttgcctcagcttcctgagtagctgggactacagggatgtagtaccatgcctgcccagctaatttttttattgttagtagtgaggaggtcttgctatgttgtccaggctagtcccaaattcttcagttcaagtgatcctcccaccttggcctccc

SEQ ID NO: 53200 - DNA, 2116 bp, Homo sapiens
caaggtaactttaaaacaggaagtgtacaaaagaggtaactgatgacgtgaacagccaatcgtggctttgtgttcttagccgataaagcagttcagccaatgggaccactgtggaggcaaggtttggtgtcaaatagcatgctagattgaatgcctttgactgttaaagtggaaggaggctgcagggcttcattggagcctcggagtttttcactgaggcaggggtcagctgaaagacaaagaaaaatggcgaatagtttgttggggggtgggaggacagctgttcgggttttcagtggagtggacattccagactcatgtttctgcatctcctgctgccttttgtttcctccgtcctttggggggtagggataggagtgacttaaattctcccagtcggtggaggtataaataactacatgtaaaattaatgcagttcccggtaagtttaattctttgttttgtgttgaaatgatagaaactgtttagcttcagagagtgtagacaagttgcactgttcagaaaatggccactttacattccatgcataccttttggtgcacctagaataccttgctgtgtttagattttgcatgtccttcaactaggatttctttcctagttgggtatcgacaagatcaggtacatggagaaaggctaatcatttttcaggggcacacagaagcaaaacacttttctctttgcattgggtaaacttaactgttttccaaataattttcctttgttcaagtgccctgaagctttcctacggaataagctgggttgttgtgagagtttttctatttccatgcactttgttgacatctgtgttttcagatatggaagcaacactgttgctgttagaaatttgtgtgaaaatacgatttgcactgctgcaggttctaatggtgaaggcccacatgccagtgtgaaattttcccataactttcttgatttaccagtctacctctagattctaataagtagtagttaatgtagtaacaatctttgtttttaatgcacattttagcttagaatgctggttagaaatatcttcacttatattgacagtgatgagcaaatatttttccacagatttcacacattttgtcaggtgttgatttagttctttaaaatgatgtgagcaaagtgctttccatttttccgtattaaatatttaaaatcctgcagtttgtgaataggaaagttaagagtataggcaccctatcttttgcccttgatatgtatatatttttctctttatggatataaagctaatgtaggttgctaatcagtaaccagccagttctcatgaacagtgaaatcttcaatcccacatactaagatctataatacacctgattttaaaatgcaattctttgttttctttttatttgcaaatatggaatgaaggtcattggaacatttctgcagcagactcagtgtggagccgtcagccagcagcacttagtctctgggtacggaaaaggagcaggccctattagaggagaagtttcgagggtgtcgatttgccttccctagcttcccctctaataaaggatttaccttagaggactgataggatttagattcggggctcttggagttgtaatgatatagcaagtcaaagttcctggatgcaggcctctgtcgttgcttgcaaaagtgaccttgaaaaactgctggggagttgaaagattgaaggacaaagtttgtttatacagatttggactgaaaagctctatttaagatgaaaagagactgtacttctgatattcaagtcgagtggttagtaggaatatgttatagattcagattaggaattttcagggaataagacaatagggctgcattcattctctctcccactctttttacttccctccccccagcaaaaaattctaaattcttttggtatgatagctgagtgaactgcctaacagattcagaattccttgcatgctaccttgtcttctttgtaatctagagggttcttagtgaaggggatagatagtattttaggagttcagagtagttgtatttgtgaaagttttggggaattagaatgcttataataagaaaatgttcattctgggaatttaagtcctaagatgaa

SEQ ID NO: 53201 - DNA, 1357 bp, Homo sapiens
tcaggtgccctaatccaagtctttcagctttttaggaacaggcttgtacaagtttggagatttgactcccactcaatttgttgcatgtttcttttattcctctaggttgttttcactttttatttttcatgtttcttttctttttgggacttctgtataggcttgctgtttgggtatagaaggaacagagaaaatgtgccatggaagaggttcagaagtctttacctgaagtgtgttggttagaaagtctgctgcagcagatttagtgtccctttgggatctgaagataccttgcctcagccagttagttgcttattcagaaagctgagaaccagctaggaagctaatggtgttcacctgtgaggtattccagaaagccaggttacttttatgcattatgaggaatttagggtatacaaacacatcacctgcaagccagttagtgttttttgttgttgtttttttgttattatatttcaagaacaagctaattcccaaaaaagtttggacctggctcttaaagtgagtccacaagctaacctgtatttaataaacaaagattccagggtcattttaagcatttgacaagactaaaataggaatcattgtttatagacacccaaaataatatcttaactgtgctgactttactgtttcccatcagcaaagtggtattatgtgtgtatgtgcttgtgtatgtttgagtagtatttgttctttatattctttgatagaccatgatatactttaacatttttaatttttctgaaggtgatgaccttcatatatttagacaaaagttatagtccattgaaagaatgagggcttgaacgatgtaagttatgtaatatttaagtcctaaagtgtactgactgaagattataatagacatagctggatagaatatatttcatgtctacatttcccagaagtttagttttctttccttttttttggagacaaggtcttgctctgtcacccaggctagagtgtagtggtgtaatcatagatcactgcaaccttaaactcctgggctcaagcagtcctcccacctcagcctccgagtaattgggactacagatgcacgctactaggcctggctaattaaaaaaaaattttgagggcagggcgtggtggctcacgcctgtaatcccagcactttgggaggccgaggcaggcagatcacgaggtcaggagatcaagaccatcctggctaacatggttaaacctcatctctactaaaaatacaaaaaattagccgggtgtggtggcgggcgcctgtagtcccagctactcggcaggctgaggcaggagaatggcatgaatccgggaggcggagcttgcagtgagccgacat

SEQ ID NO: 53202 - DNA, 2318 bp, Homo sapiens
agataaaatgaaattttcttctgtctacctaagctatatagttcttactttcaaggaaatgctaaagttggatgctttttacacttcctttcatcaattcaccacgcatgcatgtcttttttgtggagactttaaaaatgtatacaaataaaattttactctgagactgatgatgtttatcaagtattagaaactgatatggaaagaacaagcaaaatacacagaattcagaggaggggagacgttcgcttaggaatgaaggcaagctgtttaactgggtgtagactcagggaggtagggacaagggcattccagacattgggagcaacaagcaagatcatgattcaaaaagtacatcttgggttaaggagagcagtaaatggtcaactgcttagagcataaggagatgagttaaggacaggaaggagtggtaaaagaaagaagtatggagaagtagattgggtcagatgttgaagggccttgtttgctaggctaagaaatttgaacagtctctgcttgacgttggtgaccattgaaaatctggggtagtagagtgatgtggcattatgagagctgcacttttatatgatttattatacatcttaggttcacaacccttataggattattaggaggtttaaaataggtagtaacataaagggcttagaattgtacgtggcacacagtaactcctaatgaacattggctatcatcatcatcgtttttattacatggaggcaatgagggtctgaacagagatagtggtagtatgaagaaaggtcaggagatggacactgttggacactgttactatagaatttagcagctgattagaattgaggaacagaggagaaaaagtgcaaaatgatactgagatttctatccagtctgggtgactggaggatagaaacagaaatttaggaagagcaagtttggggggaaaagaagatagatttgatttggggcacgtggaatttcagttctgggtagctttctggttgtagatgtccagccaggcagcttgtacatgaaggactgaagctttggagaaatatcaaaattggtaatgtatatttggaatttaggatcatagagattatagctgaacctaggggacaaacaggagagaatcaagaaagagaattgacagaagactagtgctacatgtcaaacatggaagcccaaaaatgtctgactctaaagttgagaaatccagaaatgagcatggtagagtcctctaggtcagtgctctctaagctttttttggttgcacacccctgttttctgagtgtgcatttcccatgtaagaattaatattctttattccaaaaagttacttgcttggttttttagtattagtttactaaaaatagagaatatctgtaactccccttaatccaggcgtgtacaacaaggtaaaggtttcattgttagcctacatcttcctcgcagtccttggagcaccgtatgtaatacatggtcttctgacaagttcaactaaatgagggcatcattatcagctcataggttaaatatttgaaaagctaatattaacactttctgtgtgtgccttgataagtaaaagactagaaatacttccttagaatctggtgaccttcacttgctttaaagatgtacaaatatttccttgagattagtacatataccatatctccatttggtacaaagactaggttttattttttgagttgctttgggcataatcttactgattttagctttgtaaaatctcaaatggcagcatcctgcatgaagctgaccaaaaatacatatgtaggaatttggcagcatttgctgagcaagtaatttatagcccacatgatcattgtagcaccaatgagcagcacacacaattaattaccaggaatgagactagcctcatctgtaggatttagcagaatttttaatataagacacctatatttagtttctaggctatatatgttgtaattatcctcaatctaaaataaaggcaataagaaacttttcactagagaaatagtggtaaatttccagccattttacctcattatttataatctaaactccatgattattttcctcttggaaattcattggccagatgcccatgaagctccccttgaaggtggttaagcaatgtaatagaatgcagtgtttatatgaatagtactttatagttagtgaagtgatttcatactcattctcttatttggtatctacctaatgtaagtaggacagacgattatcatcccccattttgagggtgagaaaatagaaggcagagcctagtgacaaaggcttttgctctttatact

SEQ ID NO: 53203 - DNA, 1060 bp, Homo sapiens
ttcttgtccaggcatggtggctcacatctgtaatcccagcactttggcaggccaaagtgagaggatcacttgagcccaggagtttgagaccagcctgggcaagatagcaagaccctgtctttacaaaaaattttaaaaattagccaggtatggtggcaagcacctgtagtccccgctactcaggaggctgagcaggggaggatcacttgaacccaggaggttgaggcttcagtgagccatgattacgccactgcactccagcgtgggcaacagagcaagacactgttatttaaaaaaaatttttttttaagttcttgaggaacctgtgtttgttcattcagtagatgtgtattgaatccccactatgtgcaaggcatatttgccttgagggtgtatcagaaacaaaatgattatgtttgtcttacaaacgggggaaaaaataggagcatgaaaaatttaagcttaaaaaataatatgccccctaaaaaaagagaacatgttacacaagtctgaagcaagtgaatatgctaattagagaaatagatttgattgtgtgccaggaatggtttcttggggagaaaaaaaatttatcatcactgattagtgaatgtgtagacagtgtttaatttctttacatttgtactgtaaaggcaagcttcttatcaatgctattgcagaagagccttaaacattggtttcaacccatgagatagtctgagaaattccaactttccagaacatgtttccttcatgttcacttcaggatgttggatatagatggaagtgggtggagctctctttagagctccaaacagaatcttttgcttggatggtggggccaggttgagtggggagctgcctggactccaggtttcctctaccctctaacataaacaagattcctttcacaagacaaaacaggcacgtactcctagcttgtggaagtcttaggtatccaaggagatggtggtggttgtgggtttttttggggtttttttttgatacagggtctcactctgttgccaggctgaagtgcagtagtgcaatcatggctcattgc

SEQ ID NO: 53204 - DNA, 1076 bp, Homo sapiens
tctatttagttttagttacctcaaagagctgtattgtgggtttaggctactataaaagagtttggtatagagaatgaagtacatgccaaggaatagagagctgaactgaagtctaaaggtcctgagtttcagaaaccaggtcatattgcaataaaaccttagatttctttttatttatgaggttgataattttgatacatcctgttgttccatgcccaggcatatcactaagagaagatttggcaggcatggtacctggttgagagcaagagcttgaaagatttccaaacaattttaaaaggaacactctgattttgggatgttttgaaaacttctgaagtttcatttttttctttaagaatgataaagagtaactggatataagagtaacagctagattgcccactcatcagtggtctgatcaaatcatctcacttctgcatgattttccccttcttgctaatggatggccaggcagaggtatttatcttcctcctacttacccattgtcattaatatttcagactttgctaatctatcctggtcacttttctgaagaggttctgactttgaaaagatttacacttgagaatggtatgcatccacatttccagccttcaagtctgcctttcagcttccagcactgtcttagatgtttgtgtgtgtgtgtcctttctgtcatccccttttattttaaatccatttcagtaaatcagtttcaggtagatttctgattgcagtcttgctttaaagtcctggagctcatttagtctaagcttctggaatagcttgtgtaaccatttcctttggttaggcaattccaataagtatgtcagggccaagctttccaagattcgcccccccccccttttttttttttcctgaaaggccatacccagcatcagtcttgcacctcctcttaggggtaattagttatcagactgtgtgctggatactgtgagggatccagagagatgaatcatatgcagatcctaccctcaaggagcttgtatagcaggaggggaaataagacatacacattgatgtgtatgtcatacaaggtatcaaatacaatg

SEQ ID NO: 53205 - DNA, 1046 bp, Homo sapiens
tctttttgagatggagtctcgctctgtcgcccaggctgttgtgcagtggcattatcttgactcactgcaacctccgcttcccaggttccagtgaaactgttgcctcagcctcccaagtagctgggattataagcatgtgccaccatgctcggctaatgtattttgtgtttttagtagaaacagggttttgctatattagccaggctggtcttgaactcctgacctcaagtgatcctccacctcagcctcccaaagtgttgggattacaggtgtgagccacagcccctggccttaaaaaatcctttttttagagacagagtctcactgtgttgccaaggctggtctcaaactactggcctgaagtgattctcctgtctcagcctccggagttgttgggattacagacataagccacaacacccagcctcctcttacttttaaatacattctttcccttattatcctagaagatgaacccagaatattttccatgggcttgtagatgttgtaaatggactacttctgtagcaaaatcaatttatttgcaattaatgcattaaaataagaggtgattaactacggttgctttatttatttatttatttatttatttatttatttattttgagatggagtcttgctctgtcacccaggctggagtgcagtggcatgacctcggctcactgcaacctccacctcctgggtttgcagcctccacctccttggttcccgagtagctgggactacaggcatgtgccaccacagccagctaatttttgcatttttagtagagatgaggtttcaccatgttggccaggctggtctcgaactcctgacctcaggtgatccacccgccttggcctcccaaagtgctgggattacagacgtgaaccaccgtgcccggcctgctttatatatataatattaattgttgggtgtttttaaagctccatgcaaagaatggatctgctttaggaaaagccttttgaataaaagtactcactttttccaggaatttacattaacaatttatgttcttctaagag

SEQ ID NO: 53206 - DNA, 1579 bp, Homo sapiens
atttgataacttctgttttgtacctaacttccactactacagtatgtggctctgagccagccaaagattcatgatctgttgactacacagatgtttgcgggctgatcatgcctgcacatctgtagttgggacagttcaaaatttaaaagcagactgcacagatggttctagacgtgctttttgaattgtgtacctttgtaatgttttggggggatatcagaggacagccagaatttgttaccagacttttaaatcgtacaggtctttgtactccaactaaacctacccatccattagcaagtgtacagagatatcgtcctggcaattgtgcatctttctcctttgaccttagcagtttgcatggcagattgtgccaagatgaggcctgtccagggacccatgcaataaaaggttagattcttttaaagctttttgataattattattatttccagaaagatatttttgtttgccccatttaaaaaaggttaaattgagtcactgtcttcattttcatgagtaccttgtagaaaactattaataatgataaataactaaacttctctagattaccttaatttttttgttgttgttctcagtacatctaagagagtagcatataggccatgtgtatgtggtgataaatgaaaatgcaggggtcttacttggttatttaggacttaagattttatctagtcattttcaactgtgattgaacacttccctttaactcccttcagaaactccaagatcatattgtatcccaggtactagaatttctgttcagctgtttataggcctccaccacaagaaattggctccaaacctattcccattacatcatcacccactaatgtcattacaccagaatgaaatctgctttgaggcttgtattgttgttttccttccatttctttcccctcatcatttcctttagaaggaaaagggaaggaaaaaaaaagaaaaaaatcagagacctgtaaacatttaagagtgaattggacatccccacaggctaaacctagagttgtcagctttcattccattctgctgtgatagagtgttctgcccagtatgtatccacatggagcctggaaagtaacaagtctggtcatgtgacaactggctttggtgctttgctttcagcccctcagaattagttcctaatggctcacatagctccctgccagcatcccgtcactggcacgttaaaccttttcaaataattcctcagaatagagattcttaggagagcactaaatttctccattctttgtgtttaattaaactgttcttgcattttaatatttgccagataagcgcttaagacattacaatacaggttgagtatccttaatctgaaaatctgaaatccgaaactttttgagccctgacatgacgctcaaaggaaatgctcattttcgattttggattttcagatttgggatgctcaaccagtaagtataatgcaaacttattccaaaaaaaaaaaaaaaaaaaaaaaaggctgggcgcggtggctcacgcctgtaatcccagcactttgggaggacgaggcaggtggatcatctgaggtcag

SEQ ID NO: 53207 - DNA, 1023 bp, Homo sapiens
ccttgattaacattaggatttcagcttacatttctagcaacttttgatattctagttggaggtcttcagtagtctctatggtataagctagatagaaggaaaaactttcctaccaatgtttttaagatgtaagtctgtgttaaaatctttttagcgtaattatataccttatcaaactgaaagattgaatagattcataaaaacatccacaaatatacaaatgcctaatctggacagaaagtctgactttattgtttctaatgtgtcttatgtatgtgtttattttcagttgtcgagatgtccacagaaggaggatttggtggtactagcagcagtgatgcccagcaaagcctacagtcgttctggcctcgggtcatggaagaaatccggaatttaacagtggtgaggaagaatgagaaacttttattagaaacttttaaagagtataaagagctctgggaaattaaccaaaactcagactaaagcatttttaatttcaagcacatttacagaggcatggttcacccctgacctgtgggtaggaaaatgaaaacataatttgccttccgtgaggtaactgcaagagtcttttatatctcagtgttcttccataggcgtgtggtgtgcagtggatactttgacttggaggtagtttaatgtgaggcatatcctttaggacttacagaaaaacagagatctcatcttccttcagtagctgtagctcaattttttaggcctgatttagtggccctacgacatttctagaacttggtaaaaactattgggcaatttattcaacaacaaatctattgtgagtcaggaactctttctaggtgttaaaaagatatactttgatcgcagtttctcaacagctgcattattgacattttgggccagataattctttgttgtgaggggccgtcttatgcataacagcatgtttagcagcacccctagcctctactcactagatgccagtagcacccctccccgagttgtgacaaccagaaaatgtctccagac

SEQ ID NO: 53208 - DNA, 1017 bp, Homo sapiens
atattttcataatacagttgtcatgtccttaatgaagaatgttcattaaggtgtcattttagcacatactaaaggagctccccatgttggctgtgtcattcctgccctggaaatactagcatcctggcagagcagacactggattccttcctgatgtagaattaatgttgcaattgcttaaggttagtgacctttaacttctgacgttacaatgtcagtttattcattcactcaacaaatacttattatgtaccaactaaggctatgctagatactgtggatacagtaatgaaccagacagacaggatcattgcgctcatggaacatatattctgatgagacaggctaataaacaagtaattaatgaaatgaaataacttattatgataaatgcccactgacttcagggataaaaagtaattcatgttttggatatacctctgggtcatgtttgtttatatgaagagttttcagcagttgaacttggcttagcctttctcagactggcctgggttcagagtggatttccactgaaaagtcattgttcctcttctgcagtctaaggtagtagttatctaaactgtctcagatatgaaagagaagggaggaataaatgaaatgataaagtcaaaaggatggggtgttttgttcatattttagggggttaatctcatgattaagcttatcagcttttggtgctggggtcagcttggtgtaaaatgaatgctgtcctggggtgtggtgggactaggccaatcgagcaagtctgtgccgcagcttgagccgagaggcataaatccaggatcaggcaagtggccagataaactctggaggtttaagctcagcacttaacttttctgttttgttggactttgatttttttttttttttagttgtagtaaaaaaacacataaaatttcgccccttatccatttttaaatgtacagttcagaagtgttaagtataatcacattgttatggaacttaccttgagaattttttcatattgcagtactg

SEQ ID NO: 53209 - DNA, 1837 bp, Homo sapiens
tggtctcaaattcctggcctcaagcaatcctcttgccttggccctccaaagcactgggattacagacatgagccatcatgtctggcctatcctttttttttttttaaggcagaatcataccctgttgtatgtatataccacattttgtttatccgttcatctgttaatggacatttgggttggtttcacctcttggctattgtgaatagtgctgctgtgttacatgagtgtgcaaatacctcttcaagaccctgggctttgatttgtaacctacttggtttacaagtttgattgccaacaaagctgatcatgatgttgaccaaattttagtacctagacttagtctatcagaagttaaaagagaattactttgagggattcagttttggttcaagttttgtgggtgaagagaaagaaaagtaaagaggaagttgtctttaatccttcttgtattggtgactaattaaaattctcctcctatgtacttttgaaagggactcctagacctctgccatgctatgtcttttatatcaggtgcttagaacaatgtctggcatgtagtaggtgcacaataaatatttgaacaaattagactccacttcaggtttagtgcaaagcaacatcaattccatatttgagtaagaatgcaatccagtaaagtcagggtaatttttttcccttgtgtgactcttattttcccctcttctcaggagtgcaacacgtgatggcatctgcttctctgactgcgctgctgcctgtgtaacatgaccaaacattttagcatttaatctgtccctttccagaactcaacagtacttaaaaccagacttcctcagatgtgtcagagcctcttaggttgacacctcacaatatctaacagattaaaaagaaaaaaattccttatgtttaaactagccaatcataagtaaaacttacgagaatattcataaaatgtgatctcagactgggacacaatttgtttcaaaaagaagtaattgaagtttgctagatgatatatttcatgatgtgttggaaacactggcctcaagtccttttggtctgcgtcctgtaaaagcaatttatctttcattttagcttgttctcatgattcttaaaagctctgtagttgtctataaatccaggtggtgttcagctgggattgaaattagttaaaaaccatatcaagatgattgtgcaccagagtgattgtgtaaaaccctatattcccgcacagcagagctctgggaacagcaaataacagacttcttcgtgttgagttttgccccagtgggcctctttgaaaataggaaagagaaagctaactttgtctttatggaggtgagttgggggcaggtgggcaacaatgctgaatttcgaaaagaaaaatctaattctctacttactctttacatcccattcagccttcacttaactgtaattgagtgcctaggtcactttcttttaattggcagtttcatcttttcattcctcagtgcctcctgattgggtgatgacatttctaacattacaatcaaatcagataactgtttaaacaagaacttggtgatgaaggttggtggactgttacaaaacaggtcctgtgctgtgtgagccctttctgtagagcagtgcttctcaaactttattgtctgtatgaaccacgtgagggaggatcttcttaaaatattgatgctgatttagtaggttaggaacggaacctgggattctgtgtttcttttgagttcccaggtgataccattgctggtccaaggaccttactttgagtagcagggccgtaaaacagtagtccttaactctcacttggatcatagtcaca

SEQ ID NO: 53210 - DNA, 1945 bp, Homo sapiens
gtgggcctcaatctactgattgtagagggcctcccttttccaacaagcttatggtaaatccttacatgtaactagaaggctaggataggattatagaaaactgggtgattgtcaacagggatgaaccatacacacccctcaagatccacttttacacactgcttcttgagatctcaaggtttcaggaacatgaaaaaatagtttgtcacaaagaaaagctttgggaaggggattaaagcagagcttattataaatttctgcctcattttacatctctgcaaggcgggaatgatctcttgatccttgacttttgttgcttttgattaaagaagagaaattgaaggagtaatagtttactctttcaatttggggaaagaggtcttttttatcaactttgggctttagttaagtaatcatggaacgttcttgtacaaattatatttaaaaccaagccaaacaagagcacacttgcaagagagctaaatgtatgatcatcttgtgctgtatgtattagcctgggaggttttccaaaggaatgatcatccctagcattctctttggcatttctatgtagtgtcatcatcttctgtgatatgccacacaagaaggaagaccagtggttgatttctgggattaaacttttaaaaaaactctttaggatctggccccaacccagtatcctctttcctgcttttcccctctatactcaggtagtagatctaaaacttaaataggctgtgattttttgtctctctctctgtctttgttgttctgtctgaataacattctcatactttttcaacaggcaaattcccagcatcccttagacacaattcagatgtcatcccctttgtggaacatttcccaatccctcactctccctccagccccacattgctagctgtccctagcaatatgtccttctttgtgtccccgcaggggatccctcccctccagtattgggtaggggattataatgtttttatgtgactatctctgacaaaccacaagctcttcaaaggtaggagtagatgtgtattttttttctttcttttttaaatagtgatggggtctcactatgttgaccagactggtctcaaactcctggcctcaagcgattctcccatctcagccttccagagtgctgggattacaggcatgagccaccatgcctggcctacatgtgtattttttgcatagtagtaggtatcatacatttactattagttgagttgcttgaatcagtaaatgaaagagcaaggggaaaaacaagaatagaatgaacctgcgctactgtttccttttgttgaaattttaataaactgaacttctaagtctctgttactccagggttagttttagtagagggttcatggaaaatgttgatacctaatttggaaaaggaaaagatgaaaaattggtgtttgaagtttgtagagcagagtggtagccaagcagcttgttgggtttgcatggaaaaattagatgtcttggtgtacattttatcctaatagattctcttctttctataatcataaaataggttctgggaagactgttgatgtttttccaaaatacctttttttgacatatatttgagattttctgttggtcttgcaaaagaaagttcacttatgcttgttaattacatcaaatctgaaataatatatgctccttccataatgtgatgatgcaaattcccaggtgagcatattaggtttagtgagtcacatttcagaccacttatagaatcaatcatttgacacctagtcccagtagagattttgctgattttagctaatatctgcctttgcaccttcctcttcattgcagctctgaaactcaaaattgatttttttcctagaattgcatccatcattgggcatgtgtttaaataccagtagtttcaaaataaaacaaaaaagggcttaagtctcaaattatt

SEQ ID NO: 53211 - DNA, 1054 bp, Homo sapiens
ttgatctgaactcttaagaaatttttgataatgatattctacctgttctaaccttttgatctatgagtttcttttacatgaataatacttgtgagagggtttgcgtgggcttggccatttctgtattcctaggagtccatctccattacagatctcagagaaagaggaactctgtctctttaccactcaaaattaatagtcttttgtattttcacagaaagctaacaattgatagtaattttcccttttattagctcctttcttcctcacagtagccctgtgagatttgatataataagaattatcagttccattttacagacaatggaaatagacacaaagaggttaagtgactcacccagagtgataggaccaagatcccatttcccatctgctgcttctttaactccagagctctttctgtggctgtatcctgcacagactacctcaccaaaggtttagaaccttgtttgaccaagagcttcaactttgaaatcagacacatcaagaaagtttatatggcttgagcatttcctatatgccaagccctgggctgggtacatatattatctcatttgattgccacaataaaactgaaaggttatcctctttttcagtacatgaaaaagcccaaaaggatgggaagcctgcaattttatccaaatccattggctttcaagctcattctccttcctcatattgtttctccttggattagaacctaaaccctgccacttactggctctatggctgtgggcaagtcacttcatctctcttgacccctagtttctttgaaaggctattataagagtaagaaaacaccttgcacaaggtttggcgcatggtatgtgctagataagtattctttctccctgttacctgctttgttcccactcatggatttattttaccttggaatctcttgagtataccacctcattttttgacccttgccccatagtcccatgccaggcaatgaggcaagagacagactggtttgcatgacttgctggtgattgacagggagggcctgtgtctgttacagatgatcagt

SEQ ID NO: 53212 - DNA, 1846 bp, Homo sapiens
cagatttttatcacagagttgactcttcgagcctggattcacacagaagataacaagcgccggactctacaggtattattgcagacttagattaggaaaactggggtaagcagcagcctttgcctgttttcctgcgtggtgttggagaaagattgttctcctttaggaccaaagattgttctcctttaggaccaaagattgttctcctttaggcctctatcaagctgacgtgtcattggcatcaccactgttgggaggcagacataccttctagccatggtgattgtgtttctccaccaaaaatcttaatcaattctctcctggttttcacagcttagtgactgaactcttttcccttggtgagccctcactataaacagaggctcaagtgataagagtatttacctgtttccaaacgtaatcaacttctggttgggagccttgagagattccaggaagtatcatcagtctcactagcttcattaggctttttgttccttgtcagccttcctgggagtccttttctttttcttcttcttttttttttaattttaatttttaacctagcgaattcacattcatactgtatgcagagcccttggtcattgactctagaaaccctcaccctatagccaagccctggctcttagaggaaagatttcccagatacaagaagaagagtgtaacaagtataaaacagtggtggcagtattttaacaatgaagccaagaaagtaaattattttctcttcttgtttccctttacctacaaagtagaaaatgcatgtgtttattcatttattctaaaaatacttactgaacacccacaatgtgccgggcacttttctaggctctggggattaacgatacacacaacagacaaaaatccttatctgtgggaagcctgcattctagtacagcttgtcaatgcgtcataaagttaggatttgtgtacattactatatgaaagttttaaagcaaaaaaagcaaaaaatactgagctccaataaatgatatgcatgttgaagtcacaaaatttatgttgccttgaagttagtctgtggatccagagagatccagttaaagctcccttcaagatcaattcagattagaaaataaaataggcaaaacacttggacagaccttcagaaaaaaagataaacaaatgcccaataaacccatgagaagatatgcaacatcattagtcatcagggaaataaaaaactgcagtgagatactgttttacacccactagaatacctaaaataaaaaagactgacaataccacagttggtgaggaagtggagtgtctgaaactcatatattgctggtcagaatctaaagtggtcagtcagtttgaaaaaatattagacattttctgataaacatatccccctactctgtaacccagccatttcattcctaggtttgtacccaaaagaactgtagccattcttatataaaaatgctcttaacaaccttgtttatactacctcaaaactggaaacaactcaagtgtccatcaatataggaatatataaacaaattctgaggtattgatgaaatggattcctcctcagcaataaaaagaaacaaaccattgctccatacaacatggataaatctcaaagatactatgttaacaaaaggaaccagagggaaaaaattacatagtgcatgatacaatgcattattaccacctatagtgatagaaatcagagttgtggttgcccagatttaggggagtgtggggaaggatattgactggaaagggctagaaggaactttctatattccttttttattttttgagatagggtctcactctgtggcctaggctggagtgc

SEQ ID NO: 53213 - DNA, 2076 bp, Homo sapiens
acaaatggtaaagttaagctcatttcaagttatcttaggaagtctatcagagctcttcatctgggataggagaatattcccagaaagttatagattttagatttttaagaaacagcttctctatgtgcacagtggcatttggagtgaatggactatgttttctcttcctctatattgtggttcattatatctttatatagtaccctgactgcacactagaatcacctgttggggttttaaaaatatcagcgcccaggctctaacccacatcagctgaatcagaatctcatgatggagcccaggcatcagtaccttttaaaactccctggatgcttttaatgtgcagtcagatttgagaaccaccacttgagctgttttgcaagcaatcacaagaaagaatatgaacgtctgccttcccgtctcttctgcctgcccctctccaaaggtcacactagttgttttttcagcaccttgggtgcatatagctcttaattgtgattgtaatagacctctgtcctttagagctcattgttttaagcatgcagattgcatgattcactaggtgccacttgggaaattgtggcagaatctcacaggagcaaagctgtgccttgttctgcttgctttgttatataaaactttatttttaatgaattatttcatagtatattatccttagaagcagtcattcagtgacagccattctccccatcccagcctgtattaataaccagtcagagaaagtctaggagaagtgggcatcctaatgaacatttgtaattctgaccctgcatgagggcctttggattagcaagccctctgtcacctccttactagagtagggtgtgcctcactgcgtctccgttctttctgggcagtctttgctactgtaaacatccttgactggaagctgtaaggtgttcagaggagctttcagtcggatgtttacagcggcaggctgccacggtcgtccccagctacgcaccggctttgaaacattgcaggtttgtgcccacaggctcaattcctcctcttgggggtccttccctcctctctcagaagtcacaacaagaactcaggccatttatcttccttcagaacaaagagtatcatacacctgctttccttgttgaaattgttttctccttttgtctatcagaagccccctttaaaacaagattgtgagctctgtgatgaaatcaggccttgctcactctcattgtgctaactccttgttttctgtgggctgcctgctgaatacactggctggagagaagggtcacatcctgtcagttcctccaaattcctcagtgcttctgggtctctcggggtgtcatacagctccttattccatcttagccagactcaaaatgctatgatccatctgattttaaagtgtgtctagctgaaacagcttcttgttgcttggatttagttctttgtaggtgttcgaggcattgattggcatcgtattcgggacagctgctgcctggcctttgaaaggttgagattgctgaaagctggcctgaaattctaagatagcatttttaatcctctgtagacatgaagttttcccaggcttcaaattggctggcacctcctaaagtcctttaaaacgcctactctccaaaacccaccctttctgaaggaggcagcagttcactcttgctactaaagcgaatgtacttttttccagtcagggctggttgcacaacactgtagagatggccctaggatgtgatgctgctcttctctggcactgttcgtcagtctcagcttctggaaagattccaagagcaagccctgtagttggggaggccactgctaaagttgagcaagtgccccattctggattgatccagtcattaaagcattgttctgccacttggggcaacctcccactgctgggaaaaggaactagtcagaaatactgaattgtgagtccaaggccctgacttctcaaagatacttgagagtttcgcttgttcttcagagaagcaagtaaagattatttgaaggtaggaggtagttgaggcctgacttctgccccactaaagctattgagttgaaagttcc

SEQ ID NO: 53214 - DNA, 1819 bp, Homo sapiens
ggcacctaacatagtgtggggatggggtcaataccagctttgtaaatgttactttggggagttggaggcaatccacagggtctgtgtacatctaagaagtgtcttttcctcttttctggaacgtggcaaactttgccctgaataaggacatgagtaaatttagctaatatttttactcagccagcccaagtggttctgtgtttttattgtttttgttgtcccaggcaggggcaccatgtgtcacacaggtcactccggatcagacgccgttctgtgtcagtggtcaggggctgatcaaccctggaccctgtgggctataaccatgctgtagtgtgtgtaaacatcctacactctcagctgtgagctcaaggtggctgggagagggttgtttactccttctgccatggaaaacatcagctgaagaaggaacagtctccactccgcagatcggacagaatgcgacctccctaatcagccaaggcagtaccccagcggagagctgtccatcaggccccctgggttgcgcttctgtggctaagtacaaccagaaccagatgtgacactggatagacatgccctcagtgaccacagagctttcaacaagctgtgaaaagctgggtacttgcctaccagtgctctcgatcctgaaatttcagctcaggaaaagccctgtttcccattaacctgttctgtcccccttgaagtggtggggctaaaacgagaagagtgctgcctatttgggagattgggaccaggcctgagaggcatgatgtttgggtagcatcttcccaacacttgcaattagcactgttctcagatcacaggccttgacagcatttactgacaagcactgctggtgtgtggtttttagttacggtacttatttgcccgtttgcaacttatcatgcaatgggtgattatttcgtacttcagaaattggctgtatgttttgtgaagcctataggatctgttatttttagtttgatttagcataactggtctctttgaattccactttcctttggcttcaaatgtggagagctcagcattcagcaggcaactgcacatagcctgtttgggggaagagtggaaattcactgtggcggctgctgagttggttcttttcctcttacctgcctctctttccacccaacaggaggaggtgcgccagtctgtaactcctgccgagccagtccagtactatttcacgctggctcagcaacccaccgctgtccaagtccagggccagcagcaaggccagcagaccaccagctccacgaccaccatccagcctgggcagatcatcatcgcacagcctcagcagggccaggtctgtgagctgctgaggatgcccatccagcaagacagtgccccttaggtttttggatgggcagagcttgatgagggcagagaggcagccagatcattatagagcactggatttaaagtctggaaactggaacttttccccagattcagctactggggtgagatgttaccctaatctctctggaccctgtttttctcaaaggtcaaatgaggaaagtgtactagacagtatgttctccaggatccctattagctcagaaattttagaagggaaaaaaaaatgtctgaaatgccttatgaagagtagaggtgctaaagtgaactccatgcctgctgtctgtgtgtctgtgtgagaagtggaatttgtgcccttaaagggagagattaggtatcattgccaagttgcatactccttctccccgtcatttctctgtcccatatttgtgttaagtgaccttctctttttacgatagtaatcagaggactcttt

SEQ ID NO: 53215 - DNA, 1250 bp, Homo sapiens
aggtgcggtggctcacacctataatcccatcactttgggaggccaaagcaggagggtcgcatgggcccgggagttggagaccagcctgggcaatatggcaagaccttgtctcaaaaacaaacacacagagaattaaaaataagtaattatggctgggcgtagtggctcacacctgtaatcccagtactttgggaggccgaggtgggcggatcacaaagccaggagttcaagaccagcctggccaatatggtgaaaccccatctctactaaaaatacaaaaattagccgggcgtggtggcgggcgcctatagtcccagctacccggggaggctgaggcaggagaatctcttgaacctgggaggcggatgttgcagtaagctgagatcgtgccactgcactccaatctgggtgacagagcgagactgtctcaaaaaaaaaaaaaggtaattatgattttaggatttattctctgctcattttacttatccatataacaaaaatgtattgagtgcttgttctatgccagacactgtgctaggcaggagggttcaaagataatggctgctcagtcactggctcaaggcctcgactgtatcatgatgcctaagggaccttctttggctaatgcttgtgcctctgcagtggtgaaaactttacctgccaaaggctttatccctttacagaatgaacttagagggagtctgccaagggcaggctctgattggctgatcatcctaagaagctcatggctgttgtgccctgacagcagggcacaccatacatgatttgacagctgccatgctaacacaagccctcattttcctgaaatgatttagaaataccttggaaatcctctcgggaaaattgggttgatacagtacagtgatgagttggcagcatgcatttctttttagtcagcgagaatttcatctgtgctcctctctgccaacccagacgtgctcagcttggagctgataaggcttgtgaggatggtgaagttggtccttcccagcatttcctggctgttgtttcaccatcctgctgcttcagggtggccttgtgctgtgtcacacctccctggacccgtagtgatggctatttcaagttgagtgcaaatatccttcgtaggacagaatacatatgtattaaagcagagttggaaagaatgcatattttggtaaaattaatcctgtgttttctgtcataaattgaaaacttatttctggaggttgggaataggctgagttgaa

SEQ ID NO: 53216 - DNA, 1015 bp, Homo sapiens
ctttcctttaatctaggttcaggttcaccacgattgggcggcttctctcgatttcccctcattctacctatgcagggaaatcattgtaaccactacccatgccaaggcccaaaggccctgtgaggcagtcctgtatttgattagcagaggataagagggaggcgtatagggaaggccataaatacacttgttgcatattcatgagtcagttcccagtggagcctgcagcaaagtgtatttttggctttcatataacttatctattcctttactgtggactgctgcttcctgtgtgccttgagggatttcatttcttagatttgttggcttttttatttgtactccttttgtaaaatgtgtccttgtcttaacacttgcagtctttacattggtcattttgaccccccaaaactggaaagtgagtgaaacagagcagtccttctattccctgccctttgccatttttgtcataaatgaaacgtaggcaggtatagaaactcacgtagacttggttaaccacttcctctgtgaaaataactctaaaagtatcctgagatcagtttaggaattgttcttcatctgaagttaacatagtaataggccaagagaaagcttaggaaagtggagtgtgtatgtctctttctctacctctctcacgtgtgcttacgatacccaggattgcagatgactgagctctgccttgcttcattgtttcagtcctcaaccccaagatttctgttgaatggttctcatttttgcaagcgaaggcaccaccacaggttcatttaagacagagaagagttccaccttgcagatactttaactctctggggcacagagctttagcccagaagatttgttgcagaattcactacttcatcttcactggctcaggcaccttctgtaggagtcttcatttccagactctttaggcagctcattggaatgttcctaatagtgatgagcttcaggaaggaaactttatttccctttcaaaaacccagagcttattttc

SEQ ID NO: 53217 - DNA, 1032 bp, Homo sapiens
agctatgagggtccccagacctgtcctgctgtagaggaatgagggacggatcatcaccaaatgtcttaacctaggccaaaaaggaaagcttcttgctttgttgaagagctgcttggaaccatttggctcacagcttttcagtcacatttgggtttctgcaaagagctcttcccagctagaaaattttaacatccctgtagctgtcagtataccttctcccactcctgggacaaggctttagtttttcatcttgtgatccctggctggagttctggggactcctggaactagccaccatcagtctctgtagatgaggttttccaaacttctgcccagctgccttcctccccacaagcaacttaacattgttgccaggaagctgcattataggatttaggtggggaattcaggcttggcaccacagcctcccagcagcttctcttggcatattctcaggaaagaaatgactgcaggtcctaatactcttgccctgtctcctttgaaccagatttttaatgggtttagattgggtgtccctccatcttgcctcaagtgggcaattctggaatggtctaccgtgaacttgagaggtcgttttttctcggtagttcaaattctgtgaggctggaagtctcagagaagcattttgattgaacactgcgtgcaggaatgcagcttcatcccattagcattttcctcatggaagagtcctgcagtgaagttagctcttgaaggccagagggaaatttgctccagagcagaggcaatacttgcctgttagccacaagaagcttccccttgcaacaaaggcaggctgggcagccagggcaggtggtttctggaccccgcagatagagacctagtctatccatgctcccagaacccctttcatttcctctaaattgagggtgtgaatgtctgcagtcctcctctgctgaccatcatctttgctgagctacagttctctgatgtggtaaccgccttggtcctcttttcatccccagctcaaaacactaatactttcatggtaca

SEQ ID NO: 53218 - DNA, 2330 bp, Homo sapiens
tctttacagatgggagcgaaagaggcccacacttaatgtacaggcattctgatgatgtcagtcagataaattcctaagataagctgtgatcatgtagctaagagctggcaaataatgagcatgcagccatgctgttctcacctttgtgacaggatcttctgggagttttttctgaagtccattcagggaatatattctcttctgtgctgtgtgacttgtgggatgtggatgttctgattttgcttgttttgacctctgtttaaaagggacttttttcagggcaggcttctttggagggcttgaggggtagggggcaatcaacatctctggtcatggaaagtttgcctgtttgagattatactcaatgtcttatggtctctttgtctctgcccctgccctaggtgcagctgaatgccggccagctgcagtatatccgcttagcccagcctgtatcaggcactcaagttgtgcagggacagatccagacacttgccaccaatgctcaacaggtatgtgccccagagacacaaggcctgtgttggagaccaggagcagatggcttctgacaggaaaggagcgctcagcacacagctgtcttgccacctcatccttcaaccagaagcaccacccccacaccctccatatccttctgcacccaagaggcatgggtggtaattggaacattagattcaaagtgttttctcttaccatcttgttctcaaggggcaaagaaatgcaagtcaggggaagcctcgaaggtgcctgaaagaaaccttacaggtgtgcacacccatcagacctgggaaatgttcgacagatcgcctgatcgtcaggctgtttccatctttaaacccaagtggctgttgtgttctggcacctcctgtgctctttggaaagcttacttagattttacccctacctcctcttgcatccctaaccagaaaaattgcccttctcctctcctctcgtgccctacaatattgatggctatgagtcacagatggtgagggggctgcctccctgggcttgggggtgttgagggacatgggtattacttgcagaagatggggggtgctggtcaaggggaggcattgttaatggattcttttgcctcagacccaaaaaaagcagcgatcgtttaagagctggacccgtctggcccagttgcatttctggtgatgtatctattgacagtggtgacagagctgagtttgtagagcaggtctccaaagatctcatttgggaaaatacgaggaatgagccaaaagcaaggcttctgagttccatatagtctctgggatcattaagggctgtttctgtgcccactccccggcttacctaaggacgcggcttttccgtagctgatactgactcacacccttcccccagcccctctttttaacctcataagattcttccctgggatccaaaaaacataacggcatgggagtgggaggaaatgagaaggaagcttcttggttcctcagaagtcagtttggggctgggcacagtgggtcacgcctgtaatcccagcactttgggagggaggctgaggcaggtgatcacatgaggtcgggagtttgagaccagcctggccaacatggcaaaaccgtttccactaaaaatacaaaattagctgggcgtggtggtgcatgcctgtcatcccagctacttgggaggctgagacacaagaatcacttgaacccaggaggtggaggttgcagtgagctgagattgtgccactgcactccagcctgggcgacagagtgagactctgtctcaaaaaataaaaattaaaaaaagtccgttttgggaacagaactaaagccaaaaaatgggagaggctggggagaagcaagaaagtggtagctgaaggcaatgaaaatctttgtaacaacaggttgtaattatgacaacctaatacttagtaggtgctcagtaaatgtttgttgaatgaagctgaatgaataatatgtaaataaaatgtaaaggtaaatgaaatctcagctaatatgaatggcaatcctgctggccacagagcagttaaccttcttatctatgtggaatattttccatttgtctcaggctcacttgtttattctgcaacatttctggaatactaactttgtatgggctcctgccctcaggcatcttataggctgttggaaggaaaaggaccaaaataaggaacaatagtaaaaaatagtcatgaagcctgtcatacctgttccctttcttgttcctcatagcctcatgggtaggcctgcaggggttgtttttggccatggtgaggacatttgagaggacagtccttgtcttgcaggctggct

SEQ ID NO: 53219 - DNA, 1051 bp, Homo sapiens
caagtccgcttggcgaagtctggggcccctggagtgggcgcccttttcctcttccccacccctgcctccctgtgtcccagacacaaagaggaacccttggctcccacacgcttctgtcacctgctccccagctctgagctatgaagggctcccctcaggggtgctcctctccagggcggccctcattcctacccctgcccagctgactgtgggtgtgtgggggtccctgtgggccccctgggccctgacactcgcatatgctgtgtccgacttgatctgtgtcttcgctcagtcttcccctccaccctcaacttcccagtggcaacggcggccgccctgcctgccctgccctaccctgccggcttggcccagctcgcctgccttgttggctggcagcaccaggcctggctctaggcaccaggggaaaaagaaagaggagaggggtaggtttggaaacactgacgctgctggggccccctcctccctctcaccaggctcctacaactttcaaaaacactgacccctcttgggtgtgaagagtgaattttggcagctcagagctcagtcttggggtacggcctggcccagccaggaacatgagaggccccgcagatatcagttgaagggctgggcctgacgctgggacgctcagaggtgcccagagagagacctctggtccctggaaaatgtgtggctattaatccctttttgctgccaccagagagggccctttggcgctggggtctcctgggtggcccacctgcctgcccacctgactgtctagcagccctcctgctggcctggctgtccctctgccagcctgagtttccacctgtgtgcgagttggccagtctgctcacccttccacctaactgtccgcagtccttctgcttgcctgtttccatccatctgtggcctgtgcagttatccgggtgcctgtctgtgcatctgcctatccacctgtccacctgactgtccactcttcctctacctgtcttttccacctgtctctgggtctgtccttcggcctgtttctcgggtgcttgctggc

SEQ ID NO: 53220 - DNA, 1717 bp, Homo sapiens
gtagcgggcgcctgtagtcccagctactcgggagactgaggcaggagaatggcgtgaacccgggaggcggagcttgcagtgagccaagacagcgccactgcagtccagcctgggcgaaagagcgagactccgtctcaaaaaaaaaaaaaaaaagaacttaaatagcctttctttcatctaagggacacttttgagcatctaccacataccaggcactgtgctaggcactgtgcacacatgccctcacttacccctcacaaagggtcagtgctgctgttctttaccttttacagatgaagaaactgaggctcagctgagagttgcaattcattccatcattagttcattcactcagcttttactaaaagcctgctctgggccaggctctgggccaagtgctgagaagaagaagatgaacaagtccttcaggagacgtgcccataaattaataacaactaagtacatgcttcaacagacaaggtgcagtgggaactagagggggagcaacaggctctcctgggggttatgggaatggacagctgacctcctgcggggaccctgcaccgctaaggtgcatgcgccctgtgtagctgtgcagtctcactttgatcaaggctttgctgtgtatttccaggaagcctcttccgccactgagcctcggtctctacctggaaagttaaaaggttgcgtaggcctgacatcctgcagctcttggggggcctaaaactctggccctcccaccccaccttctggtcagttcaagctctaccccagccaagtccgattccgaagccctgagggccagaccgaatccctccgaaagtgccaaataccccgccccagggcggtgctcagagcctggggcgtggccggagtcccaaggggcggggttccagtgggaggggcggggccaagacctagatgcaggcgtgcgcggcccgcccagaagcgtctcgcccagccaatgagcgtccgagggcggggaagccccgcctctgggtataagaatacgccgagcccagctacgcgacgcggaggtttcggagcactacaggttgcgggcctttgtgaccccaggctgcggccgcaaggtgcgcagtagtgggctgggccggggcaccagtcgggtttggttttgctccgcccggccgagctgcagggaccgcacggtgcccgggtctcccgccgcagagcagccgctggcccgggccgggggagccggcgctgaccaccgcgcgctgtccccgcaggcagccggcctgccgccatggccgaccacctgatgctcgccgagggctaccgcctggtgcagaggccgccgtccgccgcggccgcccatggccctcatgcgctccggactctgccgccgtacgcgggcccgggcctggacagtgggctgaggccgcggggggctccgctggggccgccgccgccccgccaacccggggccctggcgtacggggccttcgggccgccgtcctccttccagccctttccggccgtgcctccgccggccgcgggcatcgcgcacctgcagcctgtggcgacgccgtaccccggccgcgcggccgcgccccccaacgctccgggaggccccccgggcccgcagccggcgccaagcgccgcagccccgccgccgcccgcgcacgccctgggcggcatggacgccgaactcatcgacgaggaggcgctgacgtcgctggagctggagctcggg

SEQ ID NO: 53221 - DNA, 1007 bp, Homo sapiens
cgagtttacttgctaaacactcccaggattcttgcgttaaatgacttggtttaatcagcgtttctctgatttatatccataacaccctttttgagaatcccatgtgcattttgttgaaaccagggagcatgcttttggaaatgctgcagcagaggatgcaaagagcctttggagcggggaagacttctgagcattcttccttccctgccaagtgtgttctttcttgctctggggagggggtggggcgggggaatgcttcgagcacaactccttagttttcttgttccttagtttatttttatcataatttggcttcacatggaacgttcctgaggaggaaaatgtcctgaccatgccaaagtaagcattttctgctactttctaattgtgtttttcattttggtcacatttgggtttgctgaccaaatggacgatcctggacctctgaagctggggaccagtgataaatcctccgtggtgagcctgtcacggtctcctcacctcttgtcgatgctgttttcacctgcatcttgactctgctgcccttatatcttatttctcctttccctgccaccgtggcactgctttttggatttaatctcatctcccctctctttgagtcctctgcccgtcatgtgcttcagactggtttcttatctgatgtccctctcccccagtatttacagtctctcttcattgcatgcctgggagagatttctgacaaggagcaagttgttgttaaattatagaagagaactactttttctttttttttgaggtagtcttattctgtcgcgcacgctggagtgcagtggcatgatcccagctcactgcaacctctgtctcctgggttcaagcgattctcctgcctcagtctcctgagtaactgggactacaggcgtgcgccatcacagccggctaatttttgtatttttagtagagatgcggtttccccatattggccaggctggtctcgaactcctgacctcaagtgatcctcctggctc

SEQ ID NO: 53222 - DNA, 1052 bp, Homo sapiens
ccaaagtgctgggttttataggtgtgagccaccatgcccgactgccttttacttctttgttgttattgagaacctgtcaatggtgtgacatacagctgtggctgttacttcaaagattaattgcttaaaactgggagagatgttaaaacatacctcttaagttttaaaattctgcattcgtactcctactctctagcgttgaggtgaaaatatgcaagcattaaatgtcactagtgcagaaatcctcgtaacaaatggcatcaggaaaagatccatatacctgagtgatatttaatacagaattcttgagcagaggatgagttatctctctgagggagaaaatgagactttttttcctttcctgtgtttgagcttgtctcctattgtgatggtaggaatgaatcattctgggcaaaatttctagagtgaagtttcatggaatgaatgtgcaacaaaagaatggggtaaatatgtgcagtttcacaaagttgtttagaacaaaagcagagctcggaagctgatttttataatcagcacaagcttaatatgcatatatccaggttttgaatcaaatattgttatcatactttaaaccatattatgctcaattaggagacgtttctgaaggttctttttccctaagcagcagatgctgtatactactgtaaagtcctgtatgcacagcccactgggctgtcatttcttcccatcccatgctattttataactcttcttaagaatgagtttgttgacaggctagaagtatgaggttaccttttagagaatagctggtaatttttctttttgtgtgtcatatttagtcttctagaagtgaatttctgtgcttcctattacgtaattgcacaccttgttaatgagtgttttatttcaggattgcagttgtgccatggtataggtatttttcacttaacgtaaatggtttctctgttcactgcaggtgaggtttttgtgctggatgatggtggggaagtagaccttgacctgggtaactatgagcggttccttgacatccgcctcaccaaggacaataa

SEQ ID NO: 53223 - DNA, 1748 bp, Homo sapiens
ttgaagtgtgggagtgatgaattctgacttgaattttaaaagatcactttgacgccatgtgtggagtagataatgaatattcttctgcgtgaggcaaatgaatatccttgtgcatgaggcattgctgtaactggagtaacctggagttaaacagtaatcttcaccttttaggaacttgccatctgtgcccaacaactatgatttttgaagtgttgagcaattgctggcattctttgagcattgacatggcaggcactttaccgagcattttacaggtgctgtctcacaaaatttccacagcttaacaggtggggaaaacaagcttaaaatggttctataattggcccaaagatccacagctaacgagtcatgagactaaggtttgaatccagacattctgaccccgggtgctgtgcttctaaccactctgctgtgctgtgctggctcactgcagtggattgtctaccctttggtaaactggaaacatatggaacagggtcccagaagtctcttgttcctggaagtgcactgaagtgtaatgtgcctaccttcagctgtgagcaatagggttggctatactggtgtgtggccaaaagggtagactctgcacaggggcacgtgcgcctgtgtggctcaggacactgctgtcagccttgctctgttgcagggcttccagcaacaacttagacatctggctgcaggaagtgtgagctcagagatttgttgaggccagttaaagggggcctcaaaagtatttttatgaccctattgctactctctccaggcaaagagtgctgcagtttgttttcacagtaagtgcatttgtctcaatcaatgtagatggacaagcgtaagttccctgtttgttttctttttcccagttgtccctcatatcacagatgcaatccaggagtgggtgatgagacaggcgttaatacctgtagatgaagatggcctggaacctcaagtgtgtgttattgaggtttgtatgattcctgcacatgtgaacaagtgtactcatctccttagtcagccatcaataactgataagacagttcccagtggagcccttggccttcctatctctggtgcagtatgttgcaatgtggcaggtaagggcacagttaacagtcatgtggaatggccacgcaagggaaaaccgtagtttgcccagtgttccttttttgtagcatttatggtacaatcacttagtactgattgtccccatgagtagtgtgacacattttcatctgtctcttgagcaagtcagcagatcttttgctttcgtctggcaagagcattcgtctccgaatgagcttcatttggtttcagtatctgtactcctgctgtgctgatcctagctgttggatctcagtgttcctcagataacaggagactcaaaagttccagcagtttgtttataactaatactttttttttgagacagggtctcactctgtcacccaggctggagtccagtgcagcagtcatggctcactgcaaccttgacctcctgggctcaagcagttctcctaccttagcctcccaagtagctgggactacagtgcgcaccaccatgcccggctagtttttgtacttttttgggagaggcagggtttcgtcattttgcccaggatggtctctaactcctgaactcaagccatctgcctgccttggcctcccaaagtgttaggattacagatgtgagccaccgtgcccagccaactgatgctttttcagtacaaaaa

SEQ ID NO: 53224 - DNA, 2627 bp, Homo sapiens
agaaaattagaaggagataagctatatccgttaggtaagaactggatgctataagaaagaaacattgagagaacagaaaagaatccttggaaattaaaaattagatagcagaaatgaaaaagttaagagaaagtaagttgaggaaatacccaaggaagtacagcaaaaagaccaagagatagaaaataggagagaaaaggtaaaattagaggactggctcagaagttctaatgtccaaataataggagttccaaaaaataagaacacagaaatggaggtataatctgaaccccaggggtcagcaaatgatggcctatgggccacatgaacctacccccccgtatttggaaatcaagtttatggaaatacagctgtgtctgcttgtttatgtgctgtctgtggctgcttttgctctagaacagtagagttgaatacttgtggcagagactgtgtggcccacaaaacctaaaatacttactatcagggcctttacagaaaaaattttctgaccccttatctgaacaattcaaggaaatttctagacatcagtttctgggttgaaagggcccccttggtgcctatcatattggatgacagatgacctacaccaaggcatattattgtgaaggttcagactaatggggcagaagttctaaaaggctctgaagagaaaaatcaagaatcattgtgccactggaccccttagcaacaatactggaagctaaaagacattgatgctatttcattaaaaattctagtggaggctgagcatggtggctcacacctgttatctcagcagtttgggaggcagaggtgggaggactgcttgagcctatgagtttgagaccagcctgggcaatgtgacaagagcctgtctcgatttaaaaaaaaagaaaaagtccaacagaaaatgatttccatcctacaagtccatgtgtaacgtgtatctgttaagtgtgagagaagaataaagatgatttagtacagaaaggaaaagtgtggcacatggtttgggaacagtatttaaatacttaaaaagtatgtaaacccaaaagaggactgcaggcacaggaaagtgtctaatgggggcaggatcctcatttaacagggaaatcaatagaaaatgcctccaagtaaatgtggagaagtagcacaccagcaagatcagttaagagttgaagagcggttgtttctagggattggaaaggggagagtgggtgagggccgatactgcttacaagctcggttagaaccatttgattctaaaatgcatgcatgtgtaactttgacaaacataaaagctaaattacacaagtgaccaaatgatctatttccttattaaaagaggttcaaggaaaagtcatacttgaaaattccttatcagagggaaactaacttttttttttttttcttttgtgaaatagccaagttcaacaggggaacagaagactaaacctacccagaatagtgttcgggaacttagaggacttgggctttccccagatctggtaagatttcctgatagctggttgcagtgtaatcttttatgtctagttaagatcactctatcatgacagacaagacctttgtcttgttgggttgcttttgataattgatgatggagaaaataggattagttctttgaaccgggctgtagtttgcaagatgttcatacttagagcgtgttaggtcttgtactccccagaccttatttttcctctcagtctttttactctcatttttactcctacttgggaacactaatggaggaaaatcccagagctcttgtagttcattaatgtattcatttgtactgccattctcttatgtttctccagtttggcgtttacggattttagctttgaaacgagtcataatatttttatggattatgtgcctggtgctgagagttaacgttttcgttcatcttaacaatgtgatgtctgttttaatttcagtcaggagaaacccctacttctgtcattttttccttctgtctaagccatcttgttctctactgctaggttgtatgcaggtgctcaaatccacttgacacatcagtgaaggagaaaatatcaatgttctgccatgttgagcctgaacaagtgagtagaaattcccatctctaataagttgttttttgcttctaattgtcctaaagcctcttgatcagtttcgtgaggcttgttattttctaattagagatagtgggctgttccagaagaacccattgccatcggccattccctgcctctcctggttccccaaacaacacctgtgtccctcctgcctcttctccgtgcctcgttgtactttgtgcttcagccgggtggagtatctttcggttcccctagtaccctccactctccctatgattgtactttttcactggctaatttctgttaagaacccatgtccccctcttcctgttggcttggcagtctcctactcactctcatccttcaggttctagcgaagacatagtgttgtctgagaagctttaactgccaaacctcctggcccttggccttcagggttaactgcgtccttcactgggctcctgtgtggtgtcgcatgtatgctgctgatgggcccatctttctggtgtgtgtgtgtgtgtacatgtg

SEQ ID NO: 53225 - DNA, 1093 bp, Homo sapiens
gacggggttttgccaagttggccaggctggttgcgaactcctgacctcaggtgatctgcctgcctcggcctcccaaagtgctgggattacaggtgtgagccaccgcacctggccttcattttcttaatagtgtcttttagagcacagacacttttaaatttcgatgaagtccaatctgtttttttcttttatggattgtgctttcactgtcgtgtctaagaactccttgctcttaaccaaggtcatgaagattttcttgtaaaagttagttttaggtcttacatgatccattctaggttaacttttgtgtgtagtgtgaggtaagggttgaaatttttacatgtggatatctacttgcctcagccccatttgttgaaaagactatccttggatactattctgtactttttaaaaataaaggtacattatagatttactaatcttcataaagttgtttagacttatttatagctattcataatttttattactaccgtgtatttttaaaaattatattttctgattagataataccccatgtgtaggagaccctgctgacctctgtccattcatctacagcctagcaaccttactaaaattctattagtactgattgtttacctgtaaattcttttggtttttatggataagcagtgatattgtatgcattattcagtggcaaccgcttcttgttttctggttcatttttttttcttatctaatgataatggctaatatcttcagtacatcattgaatagaagtactgaaagtggccattctggccttgttctggactttaaatagtaaacattaatattaaaccatgtgatgtttactgtgggttttttatattgccaaattttccctaatcttaatttaccaataatttttattatgaatttggttttgaatttttatcaagtctacatctactgagggaattgttttcctccttaatctgttttctatttatgtggtgaattccactgttaaatttcctaacacagtagttctcaaacttgactgcacactggaatcacttggggagctttaaaaatactgatgcctgcctcctaccccacaagatcctaa

SEQ ID NO: 53226 - DNA, 1915 bp, Homo sapiens
ttgaccttcctattgagaggcagccaagaaaaatgctgatgaaatggaaagagatggctgacaggtttgcctgcaatgaggagctgggagtgctagcctcctttactcttttgtagggctggtgaagccgactctagccctagcacttttgtacttttgcacttctgccatccactcattagaagagcctttgtagtaagagatgttcagaaaggatcttagctgtcacgtagctgtggcacagatgaggagatcctgatagggccaggccaggtgccgggcctccagacaatgagttcgggttatgtcttaacacgcttgtctcttaccaactagatcagtgcagatgggcgtcctggtggcagcgggtgagtgtgcatatccaaagcccacacgaatggctgacagtggctggagcactcctgggtaccactccagagttctgagctgtgtttgggaatgtgtctcaccccacaccagaaagggatcacattaggacggggatgtgttgctgcctactccactacatccttttaaggctcggtgatgctgtcacattccttcagaaatcttcacttcgtgtcttagagcaatgggcaggccttatcttagttgcaagatcaatatgatggcctagaagcatttggagagggcatactcattccgttgctctgtgagaatcatttttcatttcaacattttcctttcagtctttgtctgcttacatatagctatcagaatggcagttttatcatcctttttcataaaacattataagcattttgctctgttattatattttacaatgaaaacttttaatgagtgtggacttttctattttgtgaatgtcccataatttgtttgacacttgccttcaccccattaattcttgtgaattgtctatgtctgttattttttttggtctttggtatgaaaaaaattttttgtaggcaaatttgtgtgagacgttgaaactctttgtaagtttcaaaacaaaaacaaaaaaaaaatttttctttacaaagcctgccatgttgatctgaaaattacttcctctttactggtctgtacacagaactcagataatagctattcccgttatattcttcccaggtgtgtttttgttgttttttgtgggggttttttgaggcagggtctcacactgttgcccaggctgtagtgcagtggtgcagtcagctcactgtaacctccaactcctgggctcaagatccccccgcctcagcctttcaaagtgctgggattataggattatgggcgtgagctcatcctggccagacgtggttttttttcccttgaaatagctattttggtctcatgatagcgtgtaccttctgagtaattgggtttttcttgacgtttatttgatagatatgatcgcttgctggagacctgctctattgcccttgtgggcaaatacacgaagttctcagactcctatgcctctgtcattaaggctctggagcattctgcactggccatcaaccacaaattggaaatcaaggtaaggagggtggcacaggtacagccaaaggatgagcagggaagcagtctgtagtctcgtaggtgctgtgtcatatctgctttctgtttggagctcagaattactttttaaggaattactttttaaggattaaaaagatttgtggttgcttcgtggctttgagaagacagtagagcattttcaggaattaatgaaggggagagatggctagaggagagggtgagagagacttgagttcttggctatgactatcaggtaaccaaataaaatgccctgtggaaatggggaccactgatggaccacaggcatgctgcacagttgatagctggaggctcttggagactttgttggcatgtgggctgcctttcctaacctgtgcttatcacttattgc

SEQ ID NO: 53227 - DNA, 1804 bp, Homo sapiens
aggctgtggagctcttaccttgctgccgggagtgtaaaatggcaccaccacactagaaaacagtctggtagtttcttatcaaggtagagacgtgtgatccaataagtccattcccagatactcacttgagagacttgaaaacgtccacaaaaaaagatttttattcaaatggacaaattattcgtaatagctgaaatctcgaaacaacccaaatatttatagcctgtcaatggatcaatttgtaatggtttatttatatagtagaaaccactcagcaatgaaaaggaagaaaccaggctgaacactgactggctcaagcccataatcccaacacttagggaggctctgctgtgggaggatcgcctaagaccagtagttcgagagcagcctggtcaacatagcgagacccccgtctctgcaaaaaaaagttaaaaaagaaaaggaacaaacaactgataaacacagcaacatggatgaacttcaaaaacactaagcaaaagaagccagacacaaaaggttatatactatttggctccatttatatgatgttctataagaggcaaaacgaatctgtgatgatagaaattggatctgaggttgtttggggtaggaggtagaggggcacattctgggaagatggtaacttatgttttgttttgttttgttttgttttgttttgttttgttttgtttgagatggagtctcgctctgtcacccaggctggagtgcagtggcatgatcccagttcactgcaacctctgccttccaggttcaagcagttctcctgcctcagcctcttgggtagctgggactacaggtgcatgccaccacacccagctattttttttttttttttgtatttttagtagagatggggtttcaccatgtttgccaggctagtctcgaactcctgacctcaagtgatccacccgcctcggccttccaaagtgctgggattataggtgtgagccaccacgcccggctcattctatatcttggtgtgtatgtttgacaaaactcttcaaagtatgcacttaaaatgcttgtattttattgtatgtgaattatgcttcaatatggtagaaagaaaaagaaaaaacccacaaaagctgggcggaagatgggctgaggaggctgtcattgaacagaaagccctctagagtctgctgcagaggcttagctgagacccgatcctgaacacagtagagtgcagaaagagagagatttgggaatttaatgattttgaaggaaactgttgtattttaaaacctcatatttaaaaaatgtttaagttattaaatatattaagttgatcactttaaagccagtattaagatgatcactttaaagccagaatcaagaaagacaactttgataaaatgataatattatttaaaaattaagaacgcacagcctggggtcacgagcctgcttttctcccctgtctgaataacatccagtacatagattctgcggacttggagcccatcacctcgcaagaagagcccgtgcgctaccacgaagcttggcagaagctctgtagtgctcagtgagtagagttcgctgccttgggtttccagagttcttttggtttgttttaatgaaaaagtcctcttgttttcatgtgccagtagtaggtaattgacttgttaaaatattttttaattgttgaaaagactacatgccatctgatttaatccttaaaaaatgcagcttgtcaatatcattggatctgaaaagctgctctgattttgatattgtttgccatatgcatctattgatgaggctcatttaaggatttttc

SEQ ID NO: 53228 - DNA, 1994 bp, Homo sapiens
caaaaacaacaaaaccagctgggtgtggtcccagctccttgggagatcaaggctgcagtgagctgtgatcacaccactgcactccagcctgggtaacagtgtgagaccctgtctcaagaaaaaaaaattgtgaacaactcagtaccaaagatagtgcagtggcagtattacaattatgtatactatctttttcacttgcaataagcatgttcttaagttactaagaaaagtccatagtttcatatgcagtttctaagttgatagtgtttacatacaattcattgtcacagtagcacaatgtatggggttaattcatggcttcagtgtcttggtaatggcccgttaggcgattattgcaagttggactggtagaaaaggggaattgcctttgtggtttgttcttttgtgcagtggagtgctggttccaggaggatttggtgttcgaggaacagaaggaaaaatccaagcaattgcctgggctcggaatcagaaaaagccttttttgggtaaggagctctgcagtgcagtcttcacttaagagtaggaaagagtggggaacggtgccacgtgggagcctatgaacaaagtggggggattactgaaacatgctgtctttgtggataggagctcaagtagaagccttcatgttttctctttagagacaaattcagtcttggaaagcttatttatgcttatgagctacatgtagatgtcgtggaattttgagagaatgaattgtgaattcctgtccatttaatgaacccagctgtttgtagcacacgtgaggttgagttttatatctgctcacttggcacaacagctgactgtaattggacaaaatgattttgcatgcctcctggtgctgtacattttagtaattttcaacttgaacaattataaataaaaacttaatgagagagggtaagaaaacttgaattttaaagtactgaggctaggcacggtggttcacacctgtaaacccaacacttgtggaggctgaggcaggagggttgctggatcccagaaatttgaggctgtagtgagccaagatctctccactgcactccagagtgggcaacagcaagaccctgtctggggggaaaaaagtactgaatagaatatcacttacttctaaaatcggataactttgcaaatctagaattttcatctactttacatgcagtttttgaaatctaatacaagtaaagtgtaacagcagagagtacttgttcatagcaggaagttatgagtttgcaattataattctccaaataaaggacacaaaggccattgcagaggctgctgggaaaagtaggagctgccttttcaatggagttttgtttgttttttccccccgactggaaggcgtgtgcttagggatgcagttggcagtggttgaattctcaagaaacgtgctgggatggcaaggtaagcgtgcattaagacactcattcaattcccgcttgtgtatttctggaggatatgaggcctgttgccgcctgggtgatcaggagctttggagaagggcaggcctgggttcctagcacctcatggtgtgccgtaagggagctgccttgcctcttgaggaacagcacggctcctccatgcaggaaggagggagcacagccagactccctcctttgccttctgcctctgtgttcctgttcttgagattctgtcactttgatcaccgtggccaccatcctgaagctggtgcctggtgtgaagtccttgtcctaagtgaggcttgggcagttattatgagaacctgggctctggagctattgaaactgggctcagattccaaccttaccgcttatgggtgattttaagcaatttacttagcctttatgggcctccgttttttctgtaaaatgggagtaataaaggtacgtacttcacatgattaagggagataatgtatgtaaatagtctctagtagtgcctggaaaatagggaaatgctcagataatatcagctcttcgcctagctgt

SEQ ID NO: 53229 - DNA, 1024 bp, Homo sapiens
gccagcatatggtttagggctgggtttcattcaccctttccctgagaggctgcttcacagtgacctggcggtgtggcttagtttggtagacagcatgcccttgagtgctggcttctgagtcctgagaggcactgtcttatcacccgccaccccagagctggctttctggtctccctggatccttcacagccccagacctctgcctctcacttaggttcccaaatgggtaggtgctttggtgatgagcttacacttcagttgagactggaccctggttcaggccaggaggagaacagtgcccagcgttcacatagtaccaggaacttggtcctttgccttttggtctttagtggttttgctttggttagacggtaagttcaatgaaggttagaaaggttgagttgaaatcagttcatttctgactgagctattgagtgaaacagttgagtagggctttgtattagctgctgaagatgaaagaagtatagaagaaatagtacttgtttatctcagagagacaagagtctgaaacattaagacaatataaaaacttggctgggcatggtggttcaggcctgtaatcccagcactttgggaggctgagttgggttaatcacttgaggccaggaggtcgagaccagcctggccaacatggaaaaaccccatctctactaaaaatacaaaaaataaccaggtgtggtggtgtgcgcctgtaatcccagctacttgggaggccaagacatgagaatcacttgaattctggaggtgtaggttgcagtgagccaagattgtgccactgcactccattctgggtgacatagtgagactcttgtcttaaaacacaaacaaacaatataagaactgtcacaggcggggcgcagtggctcacgcctgtaatcccagcactttgggaggccgaggcaggcagatcacctgaggtcaggagttcgagaccagcctgaccaacatggagaaaccccgtctctactaaaaatacaaagttagctgggcatggtggtgtata

SEQ ID NO: 53230 - DNA, 1139 bp, Homo sapiens
tcagaaggtgcctgggaacgctgggctgagaggtggactgggccatcagtgcatggcccacccagtcctcagatgcttgctaagctgcagggtgctagccctgcatcccttgcctttgagcagtcatcaggctagctggggcgatgacagacatgttatgacacatccagtccgtgtctgtgctactgtatcagtctttctaaggaagtgatgcttaccgtccacagtgctggggcgggactagcctgaggaggggctgctgtggtcctgtctgcagatcaggaggacaggctgaaggacggagcctccacccaaccgaggttacaaatgccaactgggaggcattttcttctgtgacaaaatgtctcataaggaaagcctggagaattagagcttacttacaagcctttgccacccactcagcgagggaggtttctctctagcggaagcagagttctgtagttggtgtctgttttctgaacatctccaggtcgtagacatgccagaacacaacccagggcagatgggcggaaccatgaggctgggcaagaggagaaccctgttccagaccaagaactcagtcatgagtaagagctgcctcacgctggcccagcctttggctctgcgtgcccaggacgcgtgtcttagggtgatgctgtggcttcgaggagcaggctggctttttttggtttcgttcttgcttttgaagttcattctttcctctcttattcatacccttttaggatgcactgtgatagccatagaagcagtgtgggtcttagaaaggacactggcagtgcagtcagactcctaggcatgggcgcctcaacagaatgaggcagtgaggttacattcatccttatcggttactttcctattaagaccagccatatcaattgctgatgtttggcaatttttgtcacacaaagatggcaatttcatatgattcagcctaagtagattctgttctaataaagtactaatagatgctgaaggtttagggtagttttcggaggaaaatagttaagaaaatgactattacacagatttccttcttgtctactgggaaaattctgcctttactgtattagcagaggcacccttgtgtctgtctgggcgttctgtagcagcatagctgg

SEQ ID NO: 53231 - DNA, 1022 bp, Homo sapiens
ccgtttcgtacatcctgatttgctttccaaggcagttttctagcagcaaagtgcccatactttgcaatcatgtgtttgagggtggtggtgagagtcttgtttctgttacagctttctgtagtgttgtcagaaagagtcaaaagcccaagaattagtctaaactgtgttgttaagagcaggtgaccttagcagattcatagaaatagccctcaaaagacctggctgtgtggatgatgaaaagtaaagcaggaaggaggatgtctttgtgaacgcatcatcctgtgagataaagttctttacatacagcccgtttgttttgccagggaaactctatggagacgcagactacttggaagagaggcaccgccaccgatttgaggtgaggattccagcttgctggtactctggaaagatagtgagctgagagaccagcagaattatttttcatgcctcaacaggtgaatccagtctggaaaaagtgtttggaagaacaaggcttgaagtttgttggccaagatgttgaaggagagagaatggaaattgtggagttagaaggtgattattcgggcagttttatttaatggaaaacttagtaaagttttcttggcatatgggaaaatataaaaatgttatcttgttgctcctgacctaacagaattaggaagcagcactgtctcatgagggaaggggtcttgataaacatggggtctggactctagaaacttctttctggtacatggccttcctcggggagccatttaacttctggccgcagtttctccttctccaaaatgcttggagttggtactaaagccacttcagccctctcctgaaccgcaagactcagtctacagaaatcctgggagccagggtcttgggcgggaccctggacaggaggccttcagccaggaggggacagcacaaaccgtgctgagaaagggtatcagatcactcatgctttgaggttccctttatctagattcaaatgagaaagtcattttcaaattattttagggcctatg

SEQ ID NO: 53232 - DNA, 1778 bp, Homo sapiens
gtttcccctcctgccttggttggttgaccccctgtcctggcatagcctaagtaggtggtgggtaggcatgagaagttagtatcaggaggagggcctgtgtgctaggtaagcgtttaacacggatggactcattaatcccctgaccagggagtttgctataggctgtttcacagtcttaaggagctgatacaacaagaactgttaccagtgaaggaggtagatatttggtcagttacatggaatttctgactgcctcgcaagtggagaattgcccgttagtgacactgttacgaggtgctgtggagaaagaatgcttgcattgggtggttgtagaagtcgatgtgtgaggtcttgaaaaggtctgattctgtaggaattataaatttagcgtctaattattcccagtaggctccttctactgctctgccatgaaaaacaggcttagtttcccatggcagctgactagaaattctaacttttctactttaatgtacatcatataattcccacttttttttttcttttaaacagggatgattcttcaagagacccttcaaacttgggtagagtttacagctctgactttacactcggctttggagactttctttaaattatgtttttattaagattattttattatgcggaaaggtatttgggaaacttgtcacttgcatgtcccatcacgtgtactggctcctctgtggtgtctgcctgttgcgtgacactctccttgcagttcttgagttgcggcagaacatcgcgatgggaaccgatggtgggtggggctgcagagtgccccatcggtcaccttgtttctcaactacctcgcatcattgcagatgctagcgcgttgcctgtcgctttcccttggatacctagaccgttataaagtgtgccacatggacttaccgagcatggagagaggattttagctaggatttgaacacttggtgctgggaacctcagggtattgcttgccactaagccatgaaaccagagacaaaatctctatactgccctgagttggggggaattctcagtgccaactgtggctggtcctcattcaaagggacggtcagtttggtgtcaacatgaaacaccaagatgtctgtctctgaagcgtgattttaaaatccccatgcctgtggctgcgcttcctatttctagggctgggaaacactccttgcatcaaggggtcacttacagaacaaagaatcttttgggggaaacttcctctaaaaccctctcatatatagacagctttgactggagggtccatttttcttccaggatggtgttactgcagttgaaagggcaatatgaagttactttcttaatgtgacctagcaataggcatagctacgtggcactatattctggccagactcgatgtgtactctaacttaagaaataaatcagtaaggcagaacaagagacatgctttgcttctcattctctttatgtcattggccagatgggaagcgtctgagcacgttgctggcttgcttgtgtgcagtcagctgaattgtcagtgccgggtgctcctgcaggtgagcagccttgactcagcagacaacctgagagtttgtttaaaaactaagaaatgaggctttctttttaataggaaccagaatttttcataaagcttcaaatacaggttctcagcatgtagagcgagatgaaaaggtgcatgggtgctattatggtgctatttatgactgagaaaggggagggataagcatgatttaggaaggtggtcctttcctctgccaggc

SEQ ID NO: 53233 - DNA, 1029 bp, Homo sapiens
aaaggtgtcttttccgaccttcctctacacaaacaagtcttgttcccacactgccttccctggtgtcttttcatcatagtcttaacagaatcacctccgataaaagcactgcttctagagaatgtgcccagggaagtgactgttcccccattctccttccccctttccctcatagatacttctgtacccaaatccgtattgcttatgtgacttgcaagcaggtcaaaaagatacctgaattttaaatactctgtgggggccagaccatctgatccctgcagccatttctatgatcccctggctgatccttttctatggagggaacttctcctcacctaacccatgctagattgctttctttcagtaccagagtctctgagaaaagaaaaaggcattctgacttgcagttagaatgttgcactgggagtctggactgggcatggtagagctggtccagacaaaggcaagttttaaatacctccagttaggcattcaggaactctgatctacatttcagacgtgaaagttaggcctacctgggattctgaaagaatggatgcatgaatgggggttagcacatccatgaatgtagctgctagtttaaaaagagatttctcaaagaaataggaactccgaattcttaaatggaatgccatcattaagaagtgagagaaacatactggtagcagcattcagagactggtaaggatgtacctcatgggcctgcagtcccaaaagtggtttgggaccggggcatgacctttcctgggaattctgccccaatttacatctctctgattcagccactagataagaggaagcaaactttagccagactcttcttgcctcaccaactaagagaaacaaagaccaaggtatcacattctgccattagctgctacctctcccttccccattttcagacagattgagcccactttttgtgtcctcctctgctcttaagctgtttctcatcgtgggtgctcagcaacttgtctgctctcactctagtttctatttgcttccctg

SEQ ID NO: 53234 - DNA, 1064 bp, Homo sapiens
gtaagcctgttctctttctaatcatactatttcctccttctttcctaccttctggtcattagtatgcaaatgttaaaaattcagagtaagataatgtttcctgctcatggcaaataggaaaaaccaatatttatttaatgttcctttacacacagattttcattttatcttctggtaactctgaacaaggtataattattttcagatacattttatttatgagaaaactgaagctcagataattaaatgacttggctctgttgatatctgagtctagagagtgaaaccatggagatcttttagtagagccacctgtcaggaccaatatatcactgaggcatattgttttcacacttgtctccctgatactcttcccattctcctttggcccttcttcaaagcttcatttgagaccctggattttggcttccaaatcctgataaaaaataggaaagaaaaagtatggtgtagtatcagagcactgaactgggttctagtcccagccaggccacaaacttggttacgtcattgagcaagtcattcttacatgtgagaggctgaactacatgatccctagtgggcacttttacctctgtaatactatctagtttaatgatcttgggaataggtagcaggtgactcctgtgcctctgtctcctacatgattttaggttcatcagctcacctatcacctatctctgcctttttgaagtaattcctgtgtgccagctgtctgctgcctctctttttctccttttctaagccaagtagtatcccttttagttgctaaactcctgtggccaagccaactctgatgggtagtaactaccaagcgtccaactaatccagagtacttggttataaaaggcagaagctttttacttttagcttattttttgtgacttaaaataaaactgaaacagatacatgctttagtttttaaatgtaaaaagcaaaatgaagaattcagtacatatggcatgactatgatgctaatcatacctttagccatcatgataatccacttgacttccccttgctctgatttcaggctgggaaagcca

SEQ ID NO: 53235 - DNA, 1092 bp, Homo sapiens
tacccctgatgctgccattattcttaagaccaaagtctctttggtgcttttagtcagaacttaagctaatataagcagttacccaggactgaccaaaactcttgatctgtgcttcctaatacagtaactattagctatgtgtggggatttaaatttaagttaattaaaatttaaaaaatttagtttcttacgtacccacatttcaagtatccaatagttatgtggctagtggctaccttattggctagcacagatacagaacattttagtcagcacagaaagttttattggacagtgctgctctagatgccagagttgaagattctcaatccagggaaatccaaaacttactatttgatttaatctttcatttgtaaggatggaataataaattgtaatgttttatttttctaacagcaaacaatgatgaaatgtattcagtccttgctttagggccctgtcaactagaagcaaactcttcattaaattctgataacgcctttaaaccttgacttcagaaaatagtcatctcatttgccctatggactaactgtctagtcatgttgattaatcatcagctagttcatgaaatagttcagaactgactgtgatttctggccaaatctatttggcttagttaagggtagtgggaaaggaaccagttataaaacagaagctataaaataaatagagtgtaaagtcttggcatcatctttggagtgatttagatttcttcattcagtgactcatttttattcccagcatctagtgctttttgcatggcccaaaggggctctgtgctgctccactacagaggaaacttcaagaaatgctggtttgctacagtgttttagcttgtgagattctctgggaccttccctgctccatcatggggtcacctctaggtgggtattagggggagactggtaattggtttaacctttaaataaagaacttgataatctttagtgatccaatgaggtctgtatcaaatgttcctgccttaagatgttttcccttcccccagcacagtgtcaccttgaagattgtttatctaggacagtgttcttcaaacttttagaggctgtaagg

SEQ ID NO: 53236 - DNA, 1030 bp, Homo sapiens
cgtggtatgcatcagagtttataaaaacacttttataagcattatttactaaatgagatggctttttctcatctgtaaagtcttagcttagacatttcctctgaagagtatctgtccatgactttactaagatagctcccagtctctatcacatcacctcattttattcccttcaagttcttttcacttactgccttgtttatttattgtttatgtgttagttgtgtctcatcatataccagcatgtaaatgagggcagggacccctgtcatattgcctggcacatagaggatagttaataagtatctgttgaatgaataattgaaaacattcaaattatactgtttgaatattttgaattataatgttggaataattgaaaacactcacattatatatgtttaaattataaaacattatacctatgttagttaataatattaatcttcgtaataatctctgagcccaaggatgaatgagattttcatgttctgcaatctcaagacaacctgtactacctcgtaaactttatcattatcataacagattatttgtgttatgtttattaatgtctctgtttatctctagactgaaagctccatgaattgagaaatcatgtcttaccttgttcccctaacatttaacacagttctttgtacttggagaagtttaaatatttattgaatgaagaatctatatacaatcttgtaagacagatattgtcttcatctttcacatgagtaaacttaggcttggaaggattaagtaatttacccaagatagttagctgtagaaacaagacttttaccaacatcttcagactcccaatattacattatttaaactacaccagtagtagttcttagtcacagatgttaatccaaattacctagggagccttggaaaatacatattctcaggccacacttggagcctactgaataagaacttctgaaggtgaggcccagaactttgtttaaagaaatgagactataagtatcacttgagagtcaatgatttataccagagg

SEQ ID NO: 53237 - DNA, 2051 bp, Homo sapiens
taaaggtgcctggcacttgataaatgatagttattttttattattctttaaaactttcctcaagctttttaaggtactgatgtgtggtagaaaaaacatggacataggagtcagacaatttgaaccaaggttcaaattcctattcccacttaccagttttgtgacttcaggcaaattacttaatctttctaagcctatttcctcatctttaaaatgggagtaaaacctactttgcaggttataatgaacacaggagataatggacgtagtctggcatggtacaggcaaatggaagacagtgatagctgctgttgtttttggttttgtcgctaatatgaatgataataacaattgtagctcagtgacagcttaaggcatattgtaaactgttgatggggagttgtgaaatgtgggtactcaatttaacatagagtatatcagttactaaaagatgttaaaatttgaaagtgtatttttcctagagcattggttgcataggcatatcctctgatgtaagttaatcctgcatatttcatttttaccatctagcataaggagcagctccaaatagcaaactgaaataaaattcagtagatctgtggaatctcaaagttggaaaagaccataaaataatctacccttgcccagcatttaaaactcaacattttgaattttttgtaaaatgtcttatcttgaactcctcaagtttttgaggacttagaacctcctcacgtaattcatttcatatttagacatatttattggtcaaaaatttgctctttttgtaatttctgttagtcatccctctgactttctggccatatgaaacagggttagcctatttttcacttactggccctgatttttagagagaagctctagggactgccttctcattgccactctgccgctttcatagttgaatctcacacctagattattaaaacagcttcctaactagtcttttttgcctccagccctatcaccctcctgcccattctttacactacagccagaatgacttcaccccaaacgcttgaagacttcctcttctcagtaatacagtatatttggctcgctaatgactgaacactgcctttatctgtaacctttttctaaactactttttctgtaaactccacccagcagccataccaaaagatctgcatttagaactgctttttctcatgtctgggcctttataatgcctttctttctgtctgaaacaaacaaaaagagtttcctttttctttgactcctgcttatccttttacactttagcttagaagcctagagctttctttggtaagtttccacaagcactctgggtgctcctgtagcaccctctgtctctccagtgtagcacttatcacattatcttagtggtgactgtttagtctctgtccctcactagattctctgtctgtcactagactgaagctctgtgaggttaaggatgatattttgattacagttatatgtccagcactcagcacagtgctttgacacacactataaatatttgttggatggatggggaatggctctgagacttcacttttttactcatgctaattgttcatgttccttcacctggtcctcaggtgatgtggttttgggtctgtttaccatcactaggtaatcatttaaactcagatttgctctctctcaaagtgtagttttcagaactatatcccaggtattattttattagtccaagaaagaataggaatattacttgtgtgcttcttttcattcactcagaaactcatattgagcctctattaaatttcaggcactgtgttaaacagtaaagattttaaaaatgaatataagcccccatccataaagagcttacataaataattatggtgatatgatgtgaacaggatgttataggagatagggagatggtaaaatttgtccagcccttttctgcaaagccttctgacagaaaatgtaaaatttttgctgagctttagtcactgagtgtgagtaacatgggcaaagatatgggaccaagaaagccatgagttttaggaaacactaag

SEQ ID NO: 53238 - DNA, 1727 bp, Homo sapiens
ccgctgccatcacaaatacagttacattctgcggtactgcggagtggggaccttagcatgaagttttggaggatacagttgagcccataactggggtgctgtttgtttttagtgttttaaataattgtgatcattccatgaatataatttttatccccatattttacctaataacataacataaccattttcccatttgttctttagccttttaaaaatttaacagcttcaaaatactttgtcaagtgtttgtattatcaaatcttaatcagtcttctattttgaacatttaggtgttcctttttttgttattgtaaacaatgccaaggctttttacataaaacctttttcttgtattttggagtatttttccttagcatagaatctcggaagtggattactttattaaaaactgttaatacatactgccaaattggaaaagtatttaatcttatactttctttccacatgactatttttctctccctctgcagtgatagactggagtgatgttagaaaacacaaatatggtcacctatcagagtctgcatcccaatatcaaggtaagggggaaaaaactccgtttggtgtggaaaaattttactcggcatcttttcccataaaaccttcgttgttagaggtctgagtttacaaataactcaattgttatatcagaagcaaatattgcagtttacagaggtattggtcataagcaatatactttgttttagctggaaataggaaacctagattctgagtataggtaatcccaaattagcttcatagttttaggcacggttgcttagcctctctgggttttctatagtttgtataagtttaggcttgggaataggcaaaattgggtggtgtgcttccacaatgactactaagaatctcagtgtcttttaggatgagataactgaactagacaaatactcgatttcctattttaccccagaatttcaccttccatcatgttggtatgtttgtcttaatgacttatgctccaacatttttttctttactagaagctgctgacatcctggatctaggtaagctatttttcttgtgtttctgttaaataaggggaattggtaaaccagggattagattataaccagttttaaccaacgaggaaaagaattccacgtgtctctgtctcagaaaccagtgaatcctgtgctcttgtctgcctaattatcccatgtacttcatctcagctgtcacatcaagtcctgcttatcagtaggccacagaccaagctaacaagaagggagggaaggtggttaattacatggggtataggggagaacaggaactgaaccaaactggaaataccatcttaatttactgaatccagaactaaaacaaacccctgccatccataaatcagtgtttggtgggatttttcccccaaaaaaattacttgtaagataaattgaactgaaactaaacctaaacattttctaactttattgacaaataaaaactgaaatattaaaatattatcaagtaagaagtcagaccaataattgcatttggttttcctccctggttagtgtatttcaggactaagatttgagtaataaaactagttctaatacttctcaatcagagttcctgcataaacatcagtcttaacattttagaatcctttaaaatccttttatatgttacatagattttgatatccagatacctgtatcaatttttgttcaagtattttg

SEQ ID NO: 53239 - DNA, 1031 bp, Homo sapiens
gccctgtctccaaatgtagtcacattgggggttagggctttaacgtatgaatttgggggagacacagttcagcccataacaccatgttaatgggtttttagtgtcttttgatattctggcttaacctggttagctggaaactaaatttagtatttgaatgggaccaaatgtagcaaatatctgtattctttatttctgtgaatatagaggcttaattaaattcaacctgtggtacttgctgtaaggtactttgcaactccaagatattctaatagcaaaaaatctgtatctaaatttcctacttttcttataatgtagcctaattgttaataattagagatctcagtactttacaggtaataaatgttcttctccttcctccccacctaccttttttacagatggagaaattagcatacaaagaaactgacttgtcagaagtcagagcaaggtattggtggatccagggataaatcccaaacttcttaacccctagaccggtttttagtccattgactatgcagcctaatggtaagtatctttttaccctatcgtggaggtaagagggattaagagacctagcaaggactggctttaaggaattcctcacgaataattagactactcgttatccttttctttatagccatgatgtcatttttgtcattggcatgaattttccagattgggagaggaggtctgaagttttgctttttaaatacttaaaaatatttctcggtggctcatgcctgtaattccaacactctgggaagccaaggtgggcggatcacctgaagtcaggagttcgagaccaacatggagaaaccccatttctactaaaaatacaaaactggtgggcatggtggcgcatgcctgtaatcccagctacttgggaggctgagacaggagaattgcttgaacccgggaggcggaggttgctgtaagccgagatctcaccattgcactccagcctgggcaacaagagcaaaactccatctcaaaaaaaaaaaaaaaatctgtaacaatttggc

SEQ ID NO: 53240 - DNA, 1082 bp, Homo sapiens
aataagtgtgaagtagtatatcattgtaggtattttttgcatttctttagtgattattgatgctgagcatcttttcatgtggttattggccatctgtatatcttctttggagaattgtcttttgcccatttttgaattgggttgtttaggtttttagttcttcttgttgttgaattataggggttccgtgtatattttggatatcgacagactacaaacatgatttgcaagtattgtctccgattctgtggactgtcttttcactctgatgataggatcttttgatgcacaacagtttttcattttggtgaagtccagtttatctgttttctgttttgttgcctgtgttttatctgtcatatcctatagtcattgccaaatctaaaatgttaaagattttcccctatgttttcttctaagagttttatagttttagctcttacatttatttaggtcattgataaattttgagttaatttttttgtatatggtataaggtaagtattcaacttcattctcctgcatctggatattcagttttcccagacctgtttgttgaagagtgtccttttcccattaaatggtcttgggacttttattgaaaattaactatttttgagctctctgttctattacattggtctgcttatctatccttatgccaatactgtactattttgattactgtagctttgtagtacattctggaattagaaagtgtaagttttctaactttgttctttttttcaagattgtttgagctatttggaatcctttaagattctttgtgaattttaggacaactttttctatttgtgcaaaaatgccgtttggattttgatagggattgcgttgaatctgtagattgctttggatagtattgccatcttaacaatattagtctttcagtccatgaacacagaacagagtatcttttcatttacttacatcttctttaatttctttctgcaatattttgtagttttcagtgtacaagtctttagccgtgttagttaaatttattcctaaatattttattctttttgatactatttaaatggaattattttcttaattttctt

SEQ ID NO: 53241 - DNA, 1280 bp, Homo sapiens
gaggtgatgccccgtcatgcttcggcttgccctccgtgggctgtatccactgtccaaccagtcccaatgagatgaaccagatacctcagttggaaatgcagaaatcacccgtattctgcatcgatcatgctgggagctgcagactggagctgttcctattcagccatcctgcagttcagtcatttttgtttcattttaagagattttccttaactgtttttctctcagaaatcaatttgtgggttgtaattataagccatccaagtataatgtattttcaattcagtaagtagccactattctggtcatataattttttagttttgtgccttttttccttactattaaattagcatatacccatttcattaataaatacctattgagtatctcctcttacaccaggcactattccaggtgctgggatataatgctgaatgaataacataaacaccccagtgagagagacaaataaatagatatggaaaatattaaatggtgctaactgctatgtggagaattaagagtggtatgatagaaagggtctaggtgactactttagtttgagtgatcagggaaggattctctgaggaggtgacatttaagctaagacctgaatgatgaaaagccagacatgtgaatattgaggtggaacattccagggagtgtaaaggccccaaggtcataaggaacttggcctccaacaggagctgagaagaccagtatagctggagcaaagcaaaaggtgagagccataggagatgaagtagaagaggtaagtaggggtcagatcatgcaggactatgtgggccaggataaggtacttggatttgatttgaagtgctatggggaggctttgggagattttaagctggagagtgatatgatctaacttaccttaacatatagtcaggacaggatcatatagggaagaaaataggtcaatactgagaacctgtaattcaaacacaggaaaaagattgcatttgctgctaaggcgtactaaatagcccagttttccttgaaaaatcctaagcctaagagacaagaaatttggccaaattccattgttttgattcccagctccaccatgtaccaactgtgtaaccttgggcaaattataagatatctctctgcactggtttctcatcattaaaatgaagataataatagtgcctgcagataataatagtgcctgccttatagactagtgaaaattgaacaacattgctgagaccagctcggtcggggagaccctaacccagcggcgctagaggaat

SEQ ID NO: 53242 - DNA, 1042 bp, Homo sapiens
gtgctcttgtgcagtaagttatattctgaatcactataccataagcataatcaggagaaagtgatgtttggatgccaagagaacaacggtaagtttcaaaaagaaaggaatagtcagcagtgtgaaaggccctaaagacatgaaatgggaatcctaaaaagagaagatcattggatatttttttaaaaatcattttgctgtaagttacagtaaggaataccgggatgatagagatatggatatctcagaatactagtgattcagtctatcagttctgtgggccagtgattataatttcatttaattatgaagaagatataatcagggactattaaaaatagatcatctccatatttaagtacttgatatattaacatgatcgaaagacttttgatcttctgctatctatagtcatagttactcttaggtaactatgattgatagtgacaattttgtttattcttctgtactttctggttttgataaagataaaacttagcttgctagtttagtggatttttcagaatgggatgatattctaaagaacagtagtagttcaatcccaaatatttcatagacaagaaggtgaaagagaccttataagctgcatggtatgtggaaagagttatatggcttatatatatatggcttatatatatatggcttatatatagggattaagagtcctgattcaagtcccagtttgccactcagtggttctgtgatttaggcaaggagttgccgtgaatgatttctaagatctcttctcactctcaagttctgtaactattaggtcatttattcagtaaagaaactgaggcctaaagaagggacttgtttgtcgagggtcaaaaactggaatctggttctcttgactcttggtcctggatatctgatggaagaatcatcaaacatttgaggggctgccacatagcagacatgtattaggtgctcgaaaaagcaaaaggcatgtgaaattgtttcagaattcatttatccaatttgtgaaagtaacaatcagcatcttctgtgtttgtttgtt

SEQ ID NO: 53243 - DNA, 2172 bp, Homo sapiens
tcttaaatggtaggtaggagtaagtgaggcaaacatgagcagaaagcgtccttcaaacagagaaaacagcttgagcaaaggcatcaatgtgagaaaaggaatggcttgcgtagagaaccacaaacagtttgggactgctaggaatataacaataagtgatgagttgtaaggctggaaatacagtcagaggccatgtcgtggtggaccttgtatgcataagtatcctaaaatcaattcagtaggtgttttttttttatttttatttaatcactggaaggtgtctatcagacatggttgaagtaacatttttaaaatgtggtcatagggatgaagagaaagaaatgaatctgagaaaatgtataaggctttaatgattgattgtatgtgcaggtgagagggtgaggagtcccgtgtgatgctcaggtttttgccttggatgactaaggaggatatgttggtaattttaactgagacaggaaacgatgatgagttcaattctggacttgaagattttcaatttcttgagttagatcagtgagcaaatatagtggaagtaagctgagaaaaaaaagaggtgtggtcagaaagtggaatatcggagttaagttgtctgatattgggactgttctaggtgacagcgaggtctctgtgtatgggtagctaaaatacagcagaggcgaaggtcagtaaagctgagtatgacaaggaatttggaggctagtgtattgaatgagtcatctgtgtagagagtgaagtgattgaggatgatgggatgtggggaagagagaaagatgtgacccaggtgcagtaaagataggggattaatcaggagggtggtagatgacagatgaggaggtggggtagagagttatatagccagatggtgcaaaccttgaaggaggaggggtttttaaacacaagagtgagaaggtaatagtttttttacttttccttcctggaagcagagttctgatctctatctttattcaggactcatattaatcattctgtttgctctgaagagtctgttcttagtcttggaaagtgggagggcacatacctcatattgaatcctttctgctaatacttaatgacaaagggcagtggaggttttttcctctgatgatcattagtgggtgggtagggaacaatcagataaagcagtgaggatatacccatggttttctagacagagtatagtggaaagagcctaggctttggagttagaaacaccaaaattcagatctagactctgtcacttactagctttatgactgtaaacaaattatttagcctctgtgagcttcagtgtccttatctgtaaaaaatttatacttcataggatatcacaaatattacatgaaaaaatatatacacacataccacataaaatcacaagcgattggtgattcatagatacaaagtaaatattagttcctttcttccttcatttaaggggcttatgctctgctagctgaaatgaaccttttacatgcttacctaagttataaaatagaacatagtgagtactctaagggaggtagtagcaaagtggtaaagcagttcagaggagggagctgtcatttctaagcatttggaaacaaggttgggcttcatttcaaaatgaattttacttgggccatgaacaaatttcaatagagtaaataatttaggtagatatataaaatagggaaagcatagggtatggtatctttgttaaaaatagctaccacaggtttgagtattgtatttgtaaaagctaatagtaggaaatatggctagagagatgggctggggcattggtattaaagatccgaaactgtgatgcagtttggagttgattctggatacattagggagccacacattggatgtcttctttctctacctcagtttactatctgtaaaatgtataggcatcaattcagaaacttcaaatttttgtttgcaataaacgaaataagaaattccacacttgaaaagaagttcctgtgtaggccaattttaggttaaaaaaatctaagatttgttttgtagttgtaggttaatctttgcagtaatcttatttgattgataggcttcgtgaggttaagaaacatacaagatctcactggtagaaagtgaccgaagaagctctaatttcaaattctgtcttttttattccgccatact

SEQ ID NO: 53244 - DNA, 1111 bp, Homo sapiens
ggacacatttggttataagttgaaagaaacagctggctcccatccttcctagttcttttcccttatgggaagctgttaagatatctgaagatagtaatcatgtcccctgagtcttcacttccactttcttcagttgtctctcatctgctgtggttctctaaactgtcctctggatgagctttagtttcccccatccccttaaaggagagtttcttaaaagtgatcctggagacaaaacgtagtaagtttctctaagaaacagccccaaggattgacctgcttaaatcaaaagtactctagattcccttcctcatttctgtactgtattttgaacttaaaaaaaaaaaaaaaagaaaacatttagtagtgtttgttcaaacaaactaaaagacatcttattttgtggaaatttgggggtttccttccttttaaaaaatgtctataaacactttatcaaatgttgctaactaatgtacatcaaaatgttttgttgaagtgtaatgtgccaggcaaatagaatagctctttttttttttttaaactctgaaaaggattgagacctagtttagtgccaaactgcaattttaatatttggttgcagagggaaatgctttattacattgaactctttgctctagttctaactgccagcaggaggcccaaaattactatgaaagagaacactttttgttgcttacttaccaacctcctaaactcttgcctaagcaactctgcaggttagtaatgttttaagcccagtagagatgagatggccttgtagataaaaggccaggctcttacatctgggatcctgtttaagtactaagcaaagtttcagtgtttttacaacttagacaagcacataccagcagtcagaattggttctttatttttgttcttaagccttcattttttaaattggtcaatagttttgaactttgtagcacatatgtcaagttttgattttaggtatgtttgtgcaaatgttgttcccttttatgtaagttgggtaaacatttgcatagcaccattctcaatggaactatacagatccagaggaaaggccctgattccttccttgcaaaggacttggagtgaaaggtagaggata

SEQ ID NO: 53245 - DNA, 1030 bp, Homo sapiens
acgttttataaagtctcctttgttccatgtagggttttcattttgattctatttaatctgatattaatatttctatggcttcattatattttgttagcatatattaatttctcattcttttttttttttttttttggagacggagtctcactatgtcacccaagctggagtgcaatggcgcagtcttgcctcactgcaacctccacctactgggttcaagcgattctcctgcctcagcctcctgagtagctgggattacaggtgtgcaccacaacacctggctaatttttgtatttttagtagagacagggtttcaccatgttggtcaggctggtcccaaactcttgacctcgtgatccgcctgccttggcctcccaaagtgtgtgagccaccacgctcggcctcatttttcattcttttaatcattttgtatcgtattgttttaaatgtgactttaaaaaatatctgcattgtgtgttgacctgagcatatacacatctacttatggatgttggtgagggttcttccctgattctgagagtctctgtagtttaataggagagttgaatccattaacttttattacaatctctgatatgtttgaatgattcctctgctttttgtttgattgatcaaattttctttatttctgtttttctctatttgttggcaaattatatatttgtatgacacacctattacactattacactaatagtatgcattatagtattttatttttctagcgtcttacattttaaatagagttatttaattgtttttcttccaatagtgtcttaaatctcctcctactgctcatactttgttgaaactttagttacaaatgttattttattttatccctatacttttaaaagaaatcatttcttaaacactgtatgaggttttatagatccattttcatgtattattcagattttagatatttactggtttctttcaaatttttgtaaccctatgaaattctgtttctcggatttcttttttgttttcctgcagtacctaatta

SEQ ID NO: 53246 - DNA, 1040 bp, Homo sapiens
tctcctccatccatccattcaaacttaccaattcattagactaatgggacagagcacctgactcagggaacttatgacttatgatgttaatgaccatatggaaatatagccatccccagggcaacagtgagcacatcacggtttgggagtagctgctgggcccaaaggaatatcctgaggcatctggcctgtgttcttctggggcaggctgggatgctctgcctgtccttcctagaacgctcctgtccacagagctgtgtggcctgtgaaatgttgtgcacctgttggggaactgaagctgttgctactgttccctgattccacagagctgctgcctccactcttcagcttgtgggctggacctacaacttggggcaaagtcagcctcccctctgagggctttgtaggcatggagcaggacagaggccttgcccaggccttccctgaaccaccctggtcctgtgtctgcactgtagattggcctggggaaactgaaggcccagaaatgggacttctctatggaaaccaagcttgggcccccagccttgtggctcctgagtccctggctagtagacttccctactctcaccttctgccctctcgccatgcctaatattaaatttgccctggtttctctacctacactttagaattctgccctgtgagctgccctagaggtgtcctcagccagaagggcatgctcagtcctcacccgtcatgccggtcaatgggagcctcccacgtcatcccacacttgagatggccaatagtcctgcctgatgagtgtcaccagctactagggccagacttaaatcagaagcaaaaaaaaaaaaaaaaacctattgcacttgagttgtcttttaatttcttttttgtttgttttttaaccagcatctcacttcctcattatactgtctgtcccctcacagccctcgcccaccccacctagctgctgtgcactgccctgaacagcagctgtggctacacttctgggcctgagcaccggggcagagggataccccagctcctgcccagccctg

SEQ ID NO: 53247 - DNA, 1050 bp, Homo sapiens
tggtacccactgtcacaggttggcttcctcagaaacagactcagagatgatggatctatgtgtaggaagttcactggggtgggagggacacagggtgggggagagggaaaagttgaactgtgatgcaattccaacaagggcctgagtccatgctacagagttctggagctgaaatggctctttagagttgtcccacattgcggcaaaggagccaggtctttgtccctgtgcgagtgatcagtcagtggataaagactgcttttgggaaaggtgtatggccttggtaacacagctcccttcagaattcctgggagagactcaagtgtgagctgtcagcagacaacattcccagcagccagaagaatgagtggctccatgctggaggggacctgggcagtaccgcagcatccaccatagcctgtcatcagggcaccaaagatgtattgcttgcaggtttctcccactgaaggacataaaaacacctttctcctgtcttatttttgccttgtttgaatattcatttattggtcacatacttgttgacatttactgacttccaacttatgggatgggcactgaaggggcagaaatgaattaggcaaatttcccatcttggagcttgcaggactttgtggagacacaagtagacagagagatagttagacatgtatttccatgtagctcttccagctgatgaattgtacaaaaatacttcttctgtgatggatatgatggtcacttcagcattcaaatctacggggtcaatgagaccttgacatgaagtgcatcacacctgaatatgttcaccttcattcaatgcacagagatcatggaagctgataaacccatttgattagctttttctgggaaaatgaaggagggaaattggaaagattgccttgtacatgcaaatgataataaaagtaactaatacttattgaatgcttatactgttctgaaaattacatacagatctttccgctttacaggtgaggaaattataagagaaagttaagaattcttgagctttttttttttaactgggaacat

SEQ ID NO: 53248 - DNA, 1037 bp, Homo sapiens
gtggggctgggatggctcctacagggccagaaggcaaagaaagggcagcagatgggcacagcagggacaagggtgtggtgaggaatctgactgctccagcccaagctggcatggcctctctgctctcgccttctgccctctttctgtaatctttcatctctgaggatgttgggccattcctgggtccctccttcttcctgcaattctctctacccttccaccctgttgccctctcccctccctcgcttcctattgtgtcctgcccactgccgattccatcctccttatctcatgtctatccatgattgacatgatggaaatggcacagtagagtccaatggtgataagcactctccgtgtttgcaggtaccagccatgaccaagagcccttcacatcatctggcaatccatccagaacccactgaatggaggacagcacagcgaggtctttctcattttgtaactgcaaaagctggaacaagagccagagaagccaaagaagcagtacaagtccaacagcttttagaataaccctgagaaaatggttgaattttgaccagttttgcaattggatactatgagaagagaccttccctcctgcactggatttcatcatcatacctggaggccattcctcatgggactttggccatctcatatccacctttaagcatgttattcccatttcagctgtggtagctctgggtatccttccctaggagaaaatattaatcttttctccctctgagttctggattaaactgtcttatctgaaactgggtcactttaggctagaagcaccactagacattcctgttctcagaagttgccaagttcatgtcatatctgtttcattgttaacgggatccacttctgcaagaggctgcctggccagatcagtgtgtctcctggtcagctccttgatgcccttctcctctcccctgcccaatcccagctgagacttgcactgtggtgactctgtcccctcctggtgctttgactggatgtgtgagagaaagtatggtctgtggcactga

SEQ ID NO: 53249 - DNA, 1467 bp, Homo sapiens
tcggcatggaggaccagaaggggaagccctaatttgccagttgcagactcttgagccttgtgactctaatgacgacaaaaattaggagattttctaggactccacgtttgcgattttgagagtagtgctgctggggttcctggtttgggttctattgattgtttcattgtttctgtgtgcaagttaccctctctaagcttagtttaattaatattatattaagtgaggtagttagattatatgaaccctaaggctccttttattcttaaccttaaaataaaaacattttgtaaacagtttttctttgtgtgtgtggtggccttttctgtgcctctgctttggatgaggttacagggctgagtgcgagtgagtcattagtggttcctttgatataagacaggtgatactattgaacactgttggtggtagaccagtggttctcaaagtgtggtctctggaccagcaatagctgggcttgggaacttgttagaaactctagctgtcagcctccaccccagacctactgattaaaaaaccgtaggagtgtaaccaaaactctgtgttttaacaaagtctacaaatgattctgatgcatgctaaagtttaggaaccactagagtagagtatgtgctttaagatttgggtctaccggccaggcgtggtgtctcatgcctgtaatcccagcactttaggaggccaaggtgggtggatcccaaggtcaggagtttgagaccagcctggccaacatggtgaaaccccatgtctactaaaaatacaaaaattagctgggcatggtggtgcatgcctgtagtcccagatactcgggagggtgaggcaggagaattgcttgaacccaggaggcagaggttgcagtgagccgagattgcgccattgcactccagcctgggcgacagggcaagacttggaaaaaaaaaaaaaaaagatttgggtctaccactgatggatccttacattccagtcactgtcatggtcacagcaagtagttgcatgtctgtgcaaatattgcaataagatgtttattcagcttggcttggtgaacagtcctgtgactctaaagcagaaaatgttcctggcctgtgctaggactggacccacactctcctccttggtattatgtcccatccactcctctaggtgagcatctgcatggaggaggggttagcaaggaggcaggctgcttccagaagttgtgacagagtgctgttggatgtgcttctggggagactgatgtaattggagaagtttgtgcatggttagtttccacacatttttaaagtatgaaactgtcttgggtttctaagtccttggtagatatatctgcgtgcatctgtcgtgaagatcagtggtgatgaaaggtctcaggtgccatagaataagcaatctggtgaccctgctgcacactgagtttagagttctgattcagtttggtttcccttatctaaatgt

SEQ ID NO: 53250 - DNA, 1051 bp, Homo sapiens
ctagaagtgaatgatattgagtagatataggtagtttagcctttaaatgcaaaagtatatcaggtactagggagttaattattctttcttagtaaattgagaaagctgatggatttttggccgattttcagttctacacattgacaattctactttaacaggttatttctcccgatacagcttttattccaaacctggaacagagtgagttaggattagagatggtctctttcctcttccacttactagatgcccagaaccactcacttttttctcttatggatgcctatttttttgttttgttttgttttgtttttgcttatttctgtcttgggccagagttgtaccctcctatctctccaatctccagtttttatagaattataggcttcaccacctggagaccagctctcttttggagaaataaagtgaaagcatctagttctccaatactatctctctcaatttccaacaaacaggacttggatggcagctggcatccccagctccccttccattgcccatgtgtctgagttgcgcttggctgaactcaacttccatgcctcttggccaagggactttataaactctctttgtccaagaggtttccgactgataactctgatgtggtttactgccaggccagcgggtcctgctgctcacttcttggtgtaacttctgcgcaagggacagttgggttgtcattgttctcttcccttcctgtgagcctactagtggtggggcacagcagatggacattctggctgccatgggcctcccgcaggcccaggggagggaaccgtgccagtctcacgttcttttcccattactgctgcttctttgccctgttaacctctctgttcacttctcatccagcgagaagtgaaccttcatatggttgcacctcatatgggtgctgtcttaggtagtcatgtgggcactggttggtgaagggttccctcttttaccatctttcccagagttcaaggtggtaagagctcaccttgctgctaccgcagagtagtagggcattggcttcctctgtcctctc

SEQ ID NO: 53251 - DNA, 1088 bp, Homo sapiens
atgcaggatcagactctcagctatagcagtcagttggagtccttggatagtagtggtggctgagacctgcaggcaagaaaaataaatctatacctggaatatttgccaattctaatcacgataaaatattgtccttttcagggtgggagtaaatcaacttgtcaccatcaagccagttggtctcctctaaggatggtgccatctcagggtctcagaattggcttttgtggctagcggtttgaatgtttagcagcatcaggagctagatcatcttcagaattcaggagctcctgctgttgggcctgtgggtagcgtctatctctgtcatcatggctgctccattcatgagccattgcataagccctggatagccaaggacagaggccggctgaagtctcctgtccagtggtagttaagcacctcttccatcatcagtgctcactggttggccttaacacacaacacagagctcatgtcacttggtgcccactcccacaggtccagccacatgcccttggacagacttccatttcctcagtcttctaatctagttttacccaagcccctgacccaccatccaagccttgcacgactgtccatgagtctgtatacatctgtctttaccacgggccacttttctcttcatgcaaagtgggtgaacagtcctgcttcctgaagctttgcccattgggaggcaagctgacctatctgtgagccaagccaagccttgggatttttccttttctgtcatccaggaatgggccatagttgtgatctaggagggaagaagggttgctgcaacagtggtgagtgacatagtgggggtgggcctggtcatctgcccctgcagcttgtgacccccggccctgctcatgtgaaacctggggtgtacctcttctactttatgaggattgttgctgggccttcttgaccttatgacttgctggatctgactgtacttagttcaagatttacagctctgcccatatggtcacttgctgtttcatgttcagatgttcagttttcaccaagtttcaataactaccaggagctgttttcagaatggtgtataatcctttacttacaat

SEQ ID NO: 53252 - DNA, 1007 bp, Homo sapiens
gctttgaggccaacatgaggaccacagaatcggtggaggatttgatagggatagaggccaatgggcaatgaccaggtggaaagaaggcagttgatggaggccagggcaggcaccatgtccccaaatgcctgagaaaccttagctagaaccctaacaagaagggtgatggtggtgtgatatcttgaattgatcaagttaagcttgaaatgattaattttacccagaagtaactgagtttacctggaaataacctagatttaacttctaactttgaagggaataggaggtcaatacagaaactaattctttttataaagagaaaatatatttgactttatacacgtgagtctagattttaaaatatttcactcagtgtatcaattttcacttctaatcccttgccctccacattatattggttttccagatactctgaaactctacattgtcaaaagaattgaaagaaagttgacttgtgttaatagaaatgtacacaggattctttttcaagatgacagactaagtacattcgtttgcctcccctgccttcttggaatcttctgaaatggtggctaaaggcatctagaaaaaaaaaatttgtgacaactctgaaaacagcaggcagtgctgtgggtagaaaagatatttcatcaagacaagctagatgggcttgcagtttgttatttcagtgggaaaccgtgtcctagaactaaatgaagaattgtgtcagaggagggagaccttgttcagacaggatccaagctaggaattagcacatatggaggacaagagtgagctttgaaacagtggtctgggctgagccttggaggtggggtgggatgaattaaagagcagggacatccctcctcttggtggttaactggaaagatgtccttgggacattttggttaagtagctctttcctttctaagatgtgtatagagcaatttgaattctaagaatggttttctgaacttatgaatgattttctaagggacagccaaagg

SEQ ID NO: 53253 - DNA, 1059 bp, Homo sapiens
cccatacaacatgcagaatttgcgggttccagagtgtccagcatcacggagccaagccaggacgtggggcctgaactctgcccctcacagtgccccactgtggatcgcctggctcccatatgccacgaacactgcctgtgagcaccactgggctggaccggggccagcacggggggcacagccaggaagcaggctgcagcctggcctcatgctctgggcttctctcttccaggatggaaatttctccttttctctggagtcagtgaagaagctcaaagacctccaggagccccaggagcccagggttgggaaactcaggaactttgcacccatccctggtgaacctgtggttcccatcctctgtagcaacccgaactttccagaagaactcaagcctctctgcaaggagcccaatgcccaggagatacttcagaggctgggtgagcagcctccttcctctctgattggtggggttcgggaatactgtggtggcacttgaggaagagatgtgctctgattggtgggatttggaggaagggctcagctctgactggtggaactagggagcttggctctgattggtgggtctgttccatgcccacttcaattccaagttgtaactgctgaggtttgggaactaagaccattcatctggtcttagtttcctctctttctggtggaatctctgctttgattggttggtttgagtggtctgtgtgccctggtttggggcgaaaagcccagtaggtcagagtacgggcctgctgagattctcctggggctgggtggtgacgtacaagctctgggccaagggcggcaggggcctcgcgaggaaatgctggttctcacgaggctccatctctgttgtgcagaggaaatcgctgaggacccgggcacatgtgaaatctgtgcctacgctgcctgtaccggatgctaggggggcttgcccactgcctgcctcccctccgcagcagggaagctcttttctcctgcagaaagggccacccatgatactccactcccagcagctcaacctaccctggtccagtcgggaggagc

SEQ ID NO: 53254 - DNA, 1602 bp, Homo sapiens
ttggcacttttctcgtgtcttccttactgcagcctggtataatggaaggagtgtggatcaagtgaactgacctcagatcctatctttgtcccctactggttgtgtgactttgggtaatttactcatcctcttaaaccgtatccccttacctataaaataaggatcataagagccactttttgaaggcttatggttgaattagtgagataatgtgtgcctggcatataggaagtacacagtaggggttagtttatttcttactttcttctctacccaagtcgctgctattattgcctctttccttccaggccatcacagagccatgaaccagcagcacatgatgccttcccaagccttccagatgcggcgttccctgcctccagatgacatccaggatgactttgattgggattcaattgtgtagggcttgtttctgcaagacaccagaccctaacgttacctttctgtgcagtgaagggaaaggtttaagagaatccagttgagaaaacaaacttgctaatcactttaccaatgttatcaaaattacttttgaagacaatcagaaggattttagctggataacttactgcttttatctgacccaagcaagtactacatgtttgtctccctgccagctgccctatgtagctcctaactgttgtgtgatttggacggctttttgcatatttgtgtcagtttgatgttaaccacaagtgccagactgatttttcagacggagcctattttgctgcaagcagtttatataaagatacatatgtgtaaatatatgtacaaaaattactgaaaggcttcagttttttctaattggattattatgtcttgaaagttattgtcagtttttattccttgttaggctattttctgcaggatgcttttaactgatgtaggaaactgaaaggaaatagattttttccaaaacccagttccccttatttaatcttttttagaaatgtgggtaatgaattctatctaataagtcaaggaaaccagaatttgacacactccaacaatccgaaggggcatgttgctcctgagcagcatgaagaactgaccaaattggttttgatgcttgggggatcatagagtatttatgtctgcttttctaaatctgcattataatagctctaaaatttgttgattggtaagaaattgggcattgcttggctctttaaacacatcagtgcttccacattcacctatgtatttattattcaaaagtgtcattttaatatttattgctaccttctgtgaatgcttagctcctgtcgggttcattaaggagaaatgtgtctgaaagcacagaactattattatttttttctttttttgagatggagtcttgccctgttgcccaggctggagtgcagtggcacgatctcggctcactgcaacctccgcctcccgggttcaagcaattctcctgcctcagcctcccgagtagctgggagtgcaggtgcacaccgccatgcctggctgattttttgtattttagtagagatggggtttcaccatgttgcctgggctggttgcaaactcttgagctcaggcagtctgcctgcctcagcctcctagagtgctggg

SEQ ID NO: 53255 - DNA, 1039 bp, Homo sapiens
catcagggaagtagagaaataggtggtgatgtagaaagagtccatgagtggctgggtgcggtggctcatgcctataatcccagcactttgggaggctgagacaggtggatcacttgaggtcaggagtttgagatcagcctggccaacatggtaaaaccccatctctactaaaaatacaaaaattagccaggcgtggtagtgcacgcctgtaatcccagctacttgggagggtgaggcaggagaatcgcccgaacccaggaggcagaagttgcagtgagccgagattgcgccactgcattctagcctgggtgacagagtgagaccctgtctcaaaaaagagagtccatgagttaggagatctggattgtagtcctagcactgtcaaactaatgtgtctttgggcaagtcaggttagcctttctgagtttcagttgcctcatctgtaaaatgggtgtaacaatccctgtcttaccctcctttggggcttagtgggagggtcagatgaagtaatggatacaaaaatacttttgaattgtaatgaggtatgtgatagcaacaataatagacataacttgcctaccagcgtacagttagtggcagcgctagcattagttcagtgtgttcacacccggcctggcaccctgttcaaaaggccaagaccacaattttagcatctgaaaggagtaatattttcttccccctttctccttattttacctgcttaatttactttcagagtaacaattctgttaagattttagtgctccatttgttttatttgtggtaacatgttttccctctttctgcttttaatctgattaggaaatttgtacatagattctaggcaaaatctccctccttcagtgatgccaccccctggttatcctcatatcccacaggcactcagcactccaggaacaacgatggcaggtaagagagagagagagagtgagtgtgtgtgtgtgtgtgtgtgtgtgtgtgagcactccaggaacaacgatggcaggtgagagagagagtgtgtgtgtgtgtgtcagtt

SEQ ID NO: 53256 - DNA, 1029 bp, Homo sapiens
agaattacgaagccataaaagagaagtggtaaaagattaattcccaataaaaatcagttttacattttcattatgacatgaactcgaaagatgtgtagagtgagagctaagattttgaaggacagagacagggaagttgtgggtatatgagtgaccctattactctgagtggtgtggcccttccagcttggtgcagtctttacaaagtacactaggcgtgcatgtgaagaccgatcagcatttggagacaggattccgccccacgtcactcgtaccagtattagagctgtagtttagtataacttttctcctcttttttctttctaaatcatcagtatggtcagtcagtcaaagaggtcagttctgactataaacttcactgataaaaggcatgttatcatgggaggcagggacagggggtcagaagtcttgaattctggtcctggttctgtctcatttcctctgtccctgtttccctatctgcatggacagaggtaaggtcagattagattatctctgaggccatctcaagcctggatagtctggctttccactggagggtaaagacttgtgagcagccaaatacagaatgccttaccttaatagaagtggaagattttttctactctttttagtttcctctgggaaaatgattactattttttagtttcattacaacattactagaattcaagtgtaatttacatgaaatagtagataaacttagggaagtagcctttccagaattccagatgttccttacaatgtgaaccgcttttataatcattcctcatgagttattggaggaggggtcatgtttgttctctcttttgcattgtgatgtaacgtagttgacattttggaggcgataacacttgatgtctcctgttaatgaaaatatattaagaaccttctgaagtaaaatttgaatgagatccatggtccccatcctcacattctaggataatactcccctcccctcccctcccctcccctcccctcccctcccctcccctcccctcccccacc

SEQ ID NO: 53257 - DNA, 1049 bp, Homo sapiens
ccaattgtaattagtagagaggctgaattagttgtgttttcttttaatgttaggtgacaagccatccagaatcagtctctcaatcattaactcctcagcagcaaccacagtacaaccttccagaaagagacaagcaactacttttctcagaatataattttgaagatcttagtgcctcatttcggagcctttataagtcagtttttgagcagtcacttagtcaacaaggtgagttttcttaaaatcttttttataacaaagttttattggaaaaaggtttttaaattatttcacatggcagctgttatactcttaatcttagaatattatcatcacaataagaatcaggtaattgtattttgccctttgtgcctttactgtgttctatttatatcatagcacaaaaatggcagataaattttatgttgcatgcctacttacttgtttactagtggcatccaggaacactgtgttaaagaattctgacactgcatctataccatatgggaaacactactataattaattagtgatatctggcatatgaagtgtttgagtggtgaatgttgcaccacaagaatagatgtgccttgcttttgttctgactggtattagcaaaaagagataactatcggaatgtggtagcgccaaatttgtgattttgagtgtggcacttagaagtgaatacatcagctactagtaaacgctaggtcattgttgtacacgatatacttaagtcagattttaatattaaaagtgactttagttgagatacactgttgcatcttgaccaaatggtagattcttgctataatgtgttctcttcccattagctgctggtttaattttaatcagagggtaaaaatgtcacagtatcttttccccagagatgaattgtcagaaattgttgggaactctactgttgaagcatttcctaattacttgtttgtttggcacattaactatttacaccccatgttttattcctttcctgctgctgtgtcaaaataccttagaatgggtaatttataaacaacagaaatttattt

SEQ ID NO: 53258 - DNA, 1621 bp, Homo sapiens
acaaattagaacaaaatatctctcaggagagattggaaggtccttaccgagaagttctatacttgtttaaaaattcttggctctcacagttcccattgatagaatttgtgagccagcattttattgagtcaatttgtttcagaattgttaattacctctccagatatgtggttgaaaaaaagattgtcaaattctggggagttaacagaatctagtaaaataaataattggacagcctcatagagttcactgggatggtggtctacctattttcatgatattcaagtctaggaatatagccagaaatagtacatggttgtttgctacattttgatggttgagtcacaactttgtgatgggtcattatatacctagtgggatacaggtatatatctgtctcttctttataagacagtttcttaatcttacatctcaaaaccctaaaaagactctgggaggttcatgaatccagttttgttcatctgttttcttccctactagaccatgagtactccagagccatatatctctcacacttatgcttagattctctttcagtcttgttttcattttctccctctagctttcaccctctttttttctctccctctctctcattttcattcttccacttcatgcacacacataaatatgaacacatacacatacatcattgcactaatatggtactcctaggatccttttacttgtagaaagataatgattaaacagatgacagattataatcagagtgacatattcagatttctagttcagaaaggaaactggtagcctaggcatagaggaatgattcttcccacatggcagtctctggaataattacatcacagtcacttagagagagggtttatggggcagttggggggtggggggtggtggtagtggtggtaatcccaggattccattgcaattctgccaaatcagttactgtgtcatgaatagggcccagaaatacgtcctttaaaaaatgatctctaatggtgaccagctaggtgagaatttctggtgaagtggttgggttagaatcagaaatacctaatactgctctgtgctgtagtctaagtggtgatgaagacctaaacatagatgatagtgtggttactaggaaacaattaggaagtagtaatgatgggactttatgaccaaataatgtggatgtcaaaggagctgaagattttggttttctgcatccagatatgacagaatactggtattagattaacctttctgcctatctgtgtaaaataccagacatacatagccacacacccctccccacccacctccttgattgaaaaaaaagaagagggaggtattggaaactaagacaaccagggcttcaggggtcaggagcccagagaatagttaaacacattgagataagctttgtatattttcctttggtgcatttcccgattctcagtgcatggcataggggctacacagagagcagtagcctagagcagtcattcaaccagggagacaaaattggagtttggggttaccaaagagccaggggttgcagagccgagatcctgaggaatatcaggggtgaatccaactttttttttttttttttgagacaggatctcactgtgtc

SEQ ID NO: 53259 - DNA, 1010 bp, Homo sapiens
tacatattttaatccattaagagtaaatttcttaacactctaggcttaatttgatgatcaatgtatttaaaagtaataaaaacttgtatttgttcaaaaagggtatttcaaggacctaagcaggcattggaatagttgttatccacatgttcattcggtcaactagccagacaagcagactgcctttgagtacttactgtgtgttgtggtctcagtagctatttaacctattgtccaagctagaaacttctgagaatgaaagtggtgctattcttaactatgtttggggaacagttataaagcaggattgaaactccaagtatggttgctctagatctgtggtgcatgcaaatgctgtgcctgagcagttaccaggaacagcatcctaagaagttgggagaaaacaaggcaaacaaatcttttgaagttggattgccaaaataaactgggagaggttaaaaaaataaaagatgaaggcatggtataaagccaaagaagtcagggacaagaggaatccagctcctgagatgaatatgcattgaaagctaaggaagagcagagaattgtctatgatgattccctttaccaacgggcatatacttggcaatagtaatagatttcaccatttggaatgtttagctatttatgacagggactgctctccccaggagtctgaaattaatattagcatttttggtttatttgtacttaatcaggtaatggcttttttgttaggctattttcaacctaagataaatatgcagggtactttgtgttgacataaaattttagctagaaataaagttttggaatagttaaaatgcactttatttgaagtaataaatactttttaatgatgggaataacaacatttaagtttattgttgatctttgacacatcttcatttctgatgcattttcttttctttctttttttttttttgagacagagtctcactccatcacccaggctggagtgcagtggcatgatcttgtttcactgcacctct

SEQ ID NO: 53260 - DNA, 1051 bp, Homo sapiens
aggctggagtgcagtggtgcagtctcagctcactgcagcctccgtctcccgggtttaagcaattctcctgcctcagcctcctgagtagctgggactaccggtgtacatcatcatgcctggctaacttttgtatttttagtagagatggggtttcaccatcttggccaagctggtgtcaaactcctgacctcaagtgataggaccacctcggcctcccaaagtgctgggattacaggcgtgagctgccgcacctggccacaaagcgaggtttaaatacatttttctctttgattttggtcagacatagatgtaaatttggtcttataaaatacatttatgtgaataaagtcatttttatttttgatttcaaaatgagattttgttttttaagaaaacacaaaattccactgctttaaaaaagctttgaagacttcagctcaagcccatttcataaaagaagaaactaaggccagtagatgaggaacagcttgctcaggttcattgtggaattagaacccaggcatattcgccagacatacttgtcagtcacagaaactcaatacaaactaacttaaagggaaaagtacttaaggaagaactggagccaggttcttaaattatatcaccaggaatgtctcttcatccattagttgtgctaacttctctgatagcttcattttcagtccaattagtggcaagtatgtctttcagcagcttctggtttatattccaccagctgagtaacacttaacagagagagtaggcctggtgttcaccccgtcaccccccaaatcacctggaattacagaaaaagtcttagaatgaatgttgaacaagcaaagcacagttggtttcttagttcttagattagtactttttccatgatatcagtcttccttgagagggagaccaaaatgttagttaagttttggtacttatgaattgttgtttctttttgtattacagtgtttcctgacatttgaggagcttttccaaaaccaccctcaccacagtgggagaaaaccattgagcgaagttggggtgggagtag

SEQ ID NO: 53261 - DNA, 1070 bp, Homo sapiens
atttctttttaactgcttggatggtggccatctctttttcctgtgctctgccaaaggtgatttagttgtgtgtccagtttctcattgaatagccttgctcctcttaggaatgtggtttggttgccttgcaacctgagctctctgatgtggcttaaaaataggttttttttgtttattttttttaaagcttacctagggttttctctttgggagagagcatcattctttgtagctgtttacatcccaagcataagttttaaatttctgctttggtaatagatggtcttgaatttatattctgtagtcatcttttaaaaacgtttaaaattccaatattgtgcctgagggagataagttttattataggcattcttgttagactactgaattttatattaaacaataaagcagatattatgtcaaaatatgatcccagaaggtaccattctaagtaatggctaaatgcagttggacctcttctctcccaaatactagccatttgggaacaaaccaagataatttgagaatgggttttggagcatttaattgagaagaaatggactttggggcatattctgtaagaattggggtacagtcctacctattcatgaacaaatttctttttcacagactctgcaggtttccaagggcattttcctgctacccaccttgggtgttcttccctgctacaatgaagaatttagatgttcttcccagctccctgtagccagtatctttccatgtggttttcttttttacagattgtggtgagaacctaatagggttctatatgtttttttgtaatagagcagtgaatgtttttttaaagcattttttaaactaattaataagtggtaatacatgtgtcttgcagaccatttggactttgcagaaaagtaaagagaagaaaatagtcatcatctttaatttcatgtagagtaacttcttacattttgcattctggcttatttccaagaataaataaataaaataagtaccacaattaaagtcataatatgtatcataatatgccaattttatatttggaatttaatatttaacattacatt

SEQ ID NO: 53262 - DNA, 1035 bp, Homo sapiens
caatctaccttttcagctttattttttgtaccttcctttcatatacttctcgccattccagcctactagctgtccctgtaagtaagcacatctatttccttcttgcttttgtttttttcttatttctccttggaccttgtctcttttgcccccccgccgccttttttttttagttgatattgccctattatttcagctcatgtattatttctcatctccctatagaatcagtctcttgtgttaccatatgctttattaataacagtattataaacttagagtttttttgttcagaaatcttgtttcattagtttttgtttctgtacttagatactcaaataatagctgcttttattattttctgtctgccaggcactatactaagtgccatcattgtctctttaggccacacaatagccttatgaagtaggtactattattttccaaattttaaaggtgaaaaaactgagaattagagaagttaagtaactttgtagagtttctcagctagagaatgatagagtcaggatttggtaccagacttggtagatgtagagatttttttcaatgctcatgttcttaaccattacacaagatgcataattctgcaaaaactatattaaatacttaataaatttaattttccaggataaactcccctcaactggctgactcagtatgagaagtgattgttaacagtatattttgaataggagtctatcctaacagaatgtttcagtggaggatataccgaataaaacttgaatgaaacatgaatcaatgcatcattctaagcaagtagtagtggctctatttaagctgtgctttctggctttacccctgggtactgtagactttctttgtcaatatttagcctgagaaaaggctagaaaattttgataaacctgtgtggcaatgaacacacatggtggctagggagtagaaatggctaaaatttgagtatgtggcttagaaagcccaataagaattcatgggtctgtatcattgattgtaaacctaagtgcctgcagatgc

SEQ ID NO: 53263 - DNA, 1572 bp, Homo sapiens
ttccaatgtgaagtgtcaagccttgtttctatattcttatcttcaattcttagagcagctttctcccttttcgaggatatgtgttaacctggcagatttagttttctttctttgtgtggtaatggtctgaatttttcagctttggagagaaatacactacagaattcaaatcactggacgtttgcccaaacctgtcttttagtttttaatgcttcttttcttgctgaccatttatgtgatttaatgccttagattctgtactcccacaatttcagttagtttttgtaaacctgttccttgacttgttttttaaaaaaagtaactccctggtactgcctaatttaatttttctctcactcatcagtgtccttgactttgcattccttttttcggtcaactcccccagctagcttgtctccttgctattcttgtataccctgctttactcttcctaccgcctacctgcataaactctaccttctttccttcatgcagattcctatgccagtttctcagttacttctctgacctcttgcctccaccttactttttggtaatttgtttttatgactctcctaaaatttgtgtaaaagaaatgccagaggtacattttaagcttttaacggcttgtggtggtggtgagtaaaagagttgggctgcagctgggtttttcttaccaagatcctgttgccctcttaaagaaacaggcagtgatttttagaaagattggcatcggaaccactttgtttgtctatattctgtattttaaacaattttaaaaccaagtttgttatgttttggtgaggaaaaaattaagaaaaaagattggaatgttgatcccttaaatatttggtttgctcattaacatactcaatctttttcctccagatgtaactcaggctttccctcactttggaactcctagatttgtgaatattggatattttgagaagcaggggttctttccttgatattgactaaggagtctatttaccttcaggatgacatctgaactggagagcagcctaacgtctatggactggttaccacagctcaccatgagagcagccatccaaaaatctgatgctacacaaaatgcacatggaacaggaatttctaagaagaatgcactccttgacccaaatacaactctggaccaggaagaagtccaacagcacaaagatgggaaacctccatacagttatgccagcctcattacatttgcaattaatagctcacccaaaaagaaaatgactttaagtgaaatttatcagtggatttgtgataacttcccatattatagagaggctggcagtggttggaaggtaaggattttatttaaattattacttttatgaagtaagcaatgatgttgatttctactgaaaataaagctttgtgaatgctcatgtaattgaatatgaaattttgatctctagtgatttttaggatgtcaaaaagtttttagcttaggtgaataactttatttttggtagattattagtgtgttgaagcttgattatgttataggactgatgtagcataaagtaagagcggggataatgtagcgtt

SEQ ID NO: 53264 - DNA, 1043 bp, Homo sapiens
tcttcacttagctgaagacttgctaagttcttccttctttaccctcaaggctttagtccatgttgtttattccttttcctgaaccttcatagcacccacagctcagctgtgtacttttattcagttctttgttgtgtctgaacttctttattggattataagttcctggaggacaggtatgtgtgtatttttattttattttattttttactgtaacatagctctttacacatgtataatttatgcatccttgttaaatatataacacatagtaaatacctgtattactgagattcttataaagtctcattactggcactggtggaagggagcagaaggcaaagatggttctcagtagggagcacctgcaataacaattatattccaatttgtaatatgcttttgtatgaaaatgcatgtaactggctgctttgggaatttgaacaaaataaagctctactccatggagacttgattgaggtaaattggatgacagcatggtataaaatagccaatctttattgaatgaaatgtgaataataatataagcaactactcttattaccaatacgagtagttaacatttgttgaatacttattacttgcctggcactgttctgaatactttacatcagtgaggtgggaactatttaaattttttcatcttacagatgaggtatgtttagcaaaactaccagattgggtatcaggagatctgggctctggtttttgtactactgctaactacctgtgtgaaattggatgagctttaactgcagtttttcattactgaagggattcatctctgatctctagggtactttctctactgttttgacattgtgtgatctctaaattatcctatcttcttattctacaagtccctataacttcttgctgggaacaggcatttctggttgagattgtagagtaggatagtaagttttttttttttttttttttttttttttaagatctctgaagatgctatatggatgaatttaaagttcaggttcagaggaatgtgtacaatagagatggag

SEQ ID NO: 53265 - DNA, 2104 bp, Homo sapiens
ccttttttaaataaaaattaaagtggttttgtgtaaaagactcagtctaatttttctttgaaccttagtgcacttgaaattataacaagaaatctaaaggtagatagaatgtatttatgatcctctgaaaataactccaactcaggtaatcataatgagcagtatggaaggtctgtaatatttattatttcagacattttatattgttaaatagcttgtgtcagattgcgtatcagagaagacttataggtaattcagagattattttttggcctcttcagatgctgtgcatttcatgcaaagcctgacatgtgcatgagcagggaagatttttgtctttttaaatccacagcatagaactgaattgaattgtatttgtatatgttgtacactatggagacttttgacaaagggaaaataagcatgtctttttaaaagtgtttctaacaaaattgattataatatttttcatttattgaatgcttactatgtgccaagcattcactgtatgctaaatattccacatgtatcttgtcatttattcctcagagcacttctttgaggcttagaggtttatttgacttctttaaggatacatagttaataagtgggagagtaagaatttaagcctaggtatcacagtaacttcaaagtccttactctttctgttatatataagaaacacacatacataattatatatattaagaaacatattcatatataaatattgtatatactatattaagacacatgtctaaatataagaagagaccaaaagactgaagatcagtgttgcttatttttcgtcccttaaaaaattagtgcttaaagagcttttgtttatgtgggttatatctgtcaatatttattgtattacaaattaaaattaagaaaaatttaaaatattcacataaaaaataacaaaagtctccgtagtgtacagcatataacaaatataattgaattcagttctacattgtggatctttaaaaaaccctttgccaacatagataacaagttttatgtaaagtaactgtatgttccaaaacaaaatttagtgagaaaattggcattacattatatttttgcagatcttttaaatatctgacttaatagaagacagctggattctcatctctctctgcattaaatctgttgtgatatcacacaccacatagtatctgaaaagctctactatacactgtatgagaggataagagtgaaaaaaggcaaataatgttttatgaaaatagttttgactcttcagactgcctgaagggtctctggaccacactttgagaactgctgatccataaacaccacatatagcagcttaaactgtttctttagcattttctgtacatcatacttaacactaaaagacaagacaggatcactttccaccgtgttagccctctgccagcattgatgccatacttacttgtataatgccatggaagcagaagtagagaaaaaaactgatgaaagaatatccagtaaatgttggctggtgagctgaagtagtatggttgcaaacagaggtcaggataaccactttaatgaaacaaaattagtggacatatgttacttgaaggatgtgtgtgtgtgttctaaactggatataagaaacattctggagcagattctgagtttttaaattacggctgcaaagatgatgttgaatcttcttatgcgaaagactggttgtgttcatcaatctttacaactactcagagacatagacattttaatagggtgagatttaaatgcaaaatacaatatttacttgatgacagaataaacatttggttaatgttcaacagtctttattttttcctcccctaaattgtaaagtgaaatattttgaagatgagaattatagcataaaatatctttgaccatatatgatccttaggtttgtattctaagtggagttctatttttattttatttttttgtgacagggtctcattctgttgcccagggtggagtgcagtggtgtgatcacaattcactgcagtctcgacttccctgggctcaggtgatcctcccactcttagccttctgggtagctgggactacagggacacactaccacact

SEQ ID NO: 53266 - DNA, 1111 bp, Homo sapiens
tacaataaaacatgagaaatgtaaaaagtaggaactgttgtgttgtgtacaacacagtggtttcagatttttgaagtcaccagatgagttttgccaatcaattcatatgtgaagtcaaattagtaaagcagataaacatatgacttctttttgctggtttaagcttccatgttctaccttcacactggcccctgagggattgtcgtggttcccagagtgaaaaataatctaaacctaatctgctaattgaaatcttagaatatgaagtgttgatggcaggacctactagttacatgtggttgtgcagtcagccatatcatttattcatctagcatattgagcatctactgttgtcagatactattctaaatgttggggcatagcaatgagcataacatgtaaaaatcctgtaatcatggaatttatattttggtggagggacaattaataaacaaaatagtataagtatttgttagtgatatgataaagggctaaggagaaaaatagagaaggggaataggaaataataggagtatgtgttattttagacaggccagtcctaagggaaggcttcactgaaaaaggggacatttgaatgaagatcttaaagtatgatggagggagccatatattggataagtggtagtcgagcattctttaggcacagagggagtgcaggaaggtccaaggcaggaggctgccttgtatgtttgaggaggagtggaggaggtcagtgtggttggagcagcctagatgatgaagtgttacaattgcccagctttggagggcagaaggagagagaggacagatacaaaattgccagagccatgattgggaagtcagggaatccttaggcttgagagaaatcctgattttccagaatgccacacacacacacaaaatgaacaatgaagttacgtttgtagtttttacatatttgacttttcacaagtcaaggctgactatcctatttctcagtagaaaagcatttttttttttttttttgtaaaacgactgttgttatttctttagtgtccactttctaccgattagacttccttaagatattttagttgtgggaaatgctgaaacactcatatattaatgtaat

SEQ ID NO: 53267 - DNA, 1111 bp, Homo sapiens
cttatgtctaactttttgatgaactgccaaacattcccaaagtagcaacactattttacacttgtactagcaatgcatgaaagtttgaatttctccacgtcattgcaacacttgttactttgtgtctttttgattatagccatgttagtgggtatgaagtggtgtcttgttttaatttgtatttcccggctgagtgcagtggctcacgcctgtaatcctagcactttgggaggccgaggtgggcggatcacctgacgtcgggaatttgagaccagcttgaccaacatggtgaaaccctgtctctactaaaaatacaaaaaaaattagccagacatggtggtgcatgcctgtaatcccagctacttgggaggctgaggcaggagaatcgcttgaacctgggaggtggaggttgcagtgagccaagatcactccactgcactccagtctgggtgacaagagcgaaactccatctccaaaataaaaaattgtatttccctggtgattaatgatgctgaacatcttttcatgtatttattggacattcatatatcttctttgtagaaatgtctgttcagattcttgcccattattaaattggattattagtcttttggttattgagttgtaagagttgtttgtatattctggatacctaacttggtcttctaactgcagattggtcctaaattgcttagagataaagtgatggatacaaaagactgtattaagtaaagacctggtgagttgtcagatctcattttaagtttcttttttccccccaatttttgaagaatctggtttattcattcactgaataaatatgagtgctggctttatactaggttttgggaatataacagagaatgaaacatggagctcacattctgatgggggagaaataaaaatcatatcagatggtgatgagcttttcggttttctatttctatttatgaagaataaaataaggtaatagagataatgtgatgaaaattctaacattctctacctttcctgaattcttaatctataccttctgttcttacattttctacttaattttatttaatacaacttgtagctaaacttttatttttctttcactcctgattct

SEQ ID NO: 53268 - DNA, 1036 bp, Homo sapiens
atagtggtagtttccttgataattttttcaggtgtatgaaacttttttattggctgtacatgtatcttcattaaacgtgtttagtgaataaacaatatggtttaaaaatagtggaggccaccagaaaactattgaatggttcaaggagttatagatttgtaagtaattgttttttctagagttgttttctggtgagatagttacttttactcaccctttcctgttccagctttggggtttgggggtggatcctgtggcactagtgagagaagcagcaggaatgtgacagaataaaaacatttgtgtgtggtggttctgaacttattttttttcctaactgctttgttgagatataattcacataccatacagttcatctagttcagtgtaaaattcagtgttttttagtatattcacaggattgtgcaaccattgctacagtctaattttagaacgtttttctcctgccttgaaaagaaactccatacctaatagcagtcaatctctattctccatttactttttctcttactgctaaccctaagaaactgctatctaattactcacatgaatttgcctattttggacgtttgatgtaaatggaatcatacaatatgtaatcttttatgactggtttctttcacttagcataatgttgttaagggttatacatgttgtaacatttattcctttttattgtcaaacagttattccattatgtggatataacacatccattcatcagttgatgggcatttggattatttccactttttaaacaaaacaaaacaaaacaaaacagggtcttgctgtgtcgctgagctggaaagcagtgacacgatcacagctcactgcagcctccacctcttgggcccaattgatccttccacctcagcctcctgagtagccggaactacaggcaccagccaccatgtctagctaatttttgtatttttttagagatgggatcttgccatgttgcccagactggtcttgaattcctgggctcaagccatctgcctgcctcagcctccca

SEQ ID NO: 53269 - DNA, 1850 bp, Homo sapiens
ctgcatttggttgttatatttcttaaatctcctttaactgaaccatagccacttcccactctccccaccttttggataatttgacctctttggcccttcacgtctctatctgtaccaaattctgttccttttgaaatatctgctagattttttttttcttttatgacaattcagccatcattttgaagtattatgtgtagaacatgtgctaggcattatgggagataacaagttaattcgatattccagtggtagggacagatgtttacagaaacaacatgaaatggattatttgtcctccaatgcatcatgccttgatgataaagtctcccattttttttccctggaaaatgatgccaatggaatcttcctcatacatctctttaatcatatactgatcaggaacccacgtttggtttcctcttgagtcggttcatacttgactgtttttggcctgtcactcagttcttccactggctcccactgttatccaaagtggcgcaaaaatctttttatttactttatttaaaaaacccacgtttatgttatgtagaattttcatttctccaacaagattataaacatctggagagcaaaagtcatactgtcttctttttctttgtaatactgggtgcttaataagtacttttgaagagtcctggtacatacatcaggtctgttcttctgtttcctacctttctagagtcagctggagattctgccagttaaaagtaaataatccagacctggatctctaattacctcagaagtcttcttagaaacagtccattcagtggtctaactgaatcagggatgatagataaatgattttcatgttaccaattgctcatcaccatgtccttggcagactactaatttctgcttgtgtttagacattattttttcattgtagcacttcaggcagccactacctattgagcattattgacaaatgataggaaaccgttgtcctaaaccagtagttccggaatcagactacatcagaatcagctgagataacttttaattaatagatttcccaagtttcacctaaatcaggatttccaggaatgggatataaatgattataaagtcagcagtggtttgtttactgactttgggaatgaggcaggtaatttttattttgttaaacatctctggcagcggaggctttatagcttcctatcttttcagtttcagtacagcattttattcctctcacagccagtaagttctgttaggttcagtggacttttcagcaatatgggtaggatctgttgctttgaattccaccaggcaaagcacatgaatcaaatgcccaagataaagatacaggatccagggaagtggcgtcttggttttctaaatataactgagctcaaatttaaagcctcacagcctttagccctccaaaaactcattctttgtttagtgaatacctttaaatgttgcttaaaatgtaagagttcaacatttttgcagtagattagcttttgaatttttcatatttcatgtatattcaataaaggtgatttaaacatataatgtgatctaatttcatatacctttaaacatataatgtgatctaatatcgtatacctctaatttcatatacctttaaacatataatgtgatctaatttcatatactgtataatttcagtatttaaacatacggtgtgatctaatttcatatacctttttcaggttttctgtaaaaataaatgtgtaaattgggaaagggttctttattagaccacatgatacgattttgggaccaaatattaggtagttaagtttttgagcaaagtagagagactgaagcctcaggattatctagtgagttaatga

SEQ ID NO: 53270 - DNA, 1072 bp, Homo sapiens
gtatccccagcacttggaggagtggttggctaataattggtgcttaataaatatttgttgaatgaatgaatgaatggtcatatttgagaaataccgatcatcattttcttggacattaacaaagcattttaggatattgaacactttaagtcatttagagaaaaaaagtgtttatctcaatcttctttaattatggaatgtgcattaacaactcttgaaatcctctggaaaatattacactggtctgtatggtagaggtgaggtggaaggctagaaagtgttttcttctccaagctaaacacacccagtttcttcagtcattatacacttgacatttggtttctgatccctcactagtttgatatccctccttccaaggattctgtcctgtaagtgttcttaaaatgtggtgttcagaacagaacatgtttccctccataggtgatattttttaattctatattaaaacaaaacgaaaaaccctcagaatacaatactccagttgtgaactaagtagtgaggaatacatggtactgttaccctccttttctggatactgttcttctaatgaagcccaagtttgcattttgtttctttttagcagctgagtcactctcttggctcatattcagttctcatcttaatttacaacaagttctttgagtagattcagagagatttcctattagtagagctaactaatgaatgcccattttcttctgattgagtctaggctgttttctcagaagtactagtcatccttagcttcctgaaatctgagaaagaaaaaaattaattatccattggtattgttgagcaactaacaccaaacaactttaatccaactgcccttttgagtatacttagaaatatataaaatatgaagaatccccctttacccatcgagattcaacaaattaagataggtgccacatatgcctcaaataccttttttttaagtatttcaaagaaaatcatagacactgtcttttcacccctatgtcagtatgcatctttaagaaaatgtaaatattttcttatattacccatgccatcattgtatctaacaaaa

SEQ ID NO: 53271 - DNA, 1028 bp, Homo sapiens
cagtttgataaattattgattatcttatgggtcaagttgtgagtgtattaagtggtttgggtttttctttgcattagaagttggtcatttagctctgctgatcaagaaattaattttagtcccctggaagcaaccaagaccttaagtttacttacagtaattatttatcaataaatgatctagaaatagcactccaatttaaatcctgaaaactaacttaaggatctacttataagcttccattccttggcagatttctaataaaaaaccaaattgttagtgcttctttaaggtagtgtttttcatccaggtacattggactcatcatttctctcactcattcgcttgctcatctgttccctcttttgctgtgtcctgggcacagtactgaatactggggacacgactaaggcagggtccctgccagcaaagactacagcttttagtttgggagaaaaatcagagatgtccttggcatctggaagtatcctgtgatttcttctgttttcttcttttcgactagaaaggcagaatgagtagcttgttcaaagaacttaatggatttagggatatgaatagatggctttaagggaagctgatggcttcatagttatttctctgattgcaaaatactgaaaatttaaggaatttcctcatctaatgagcaattgttactgaggtagatgacctgggcattcaggtttgctttgggaacttaatcaaacaacattgtatcgattcttccaggatggagacagtgtctttttgactcttatcctctatacttaacactgtgtgtgatacataatagacattattatatagccattatacagtcatgtgccacataatgacattttggtcaactgtggggcatatatatacagtggtggtcccataaggttataatggagctgaaaaatttctattgcctagtgacctcaaagccatcataatcttgtagtgtaattaaaaaaaatttagtgtagtctgtgtgtacagtgtttataaagtctacagtagtgtac

SEQ ID NO: 53272 - DNA, 1065 bp, Homo sapiens
tttcacctggagtataaaacaaaaagttctaacggaattctcctacctagagtcctcctcagtggtatagtgtttactaaggaaataagattgatcttctgattgattggtagagtgtggtgccagtgtgaccttattaaaaaccttgtaaattggaatcatcttttttttttaagattgggacctgacctttgacaccactaataagccttgtttccaattagcactattgtgttgaaacagatttgtgagaggaatggataataaaggaaagactgctagaacttactaactgttgcaaattttgtttgcttacagagagaggggattcaatatgatggaagtaggttatcataaagactctagattttggctggtggtacatgggtgcttattaaattattaaaattaactttaaaaagtttctgtggcttggccatcaaattttgggtaattacagacacaacagtcaaacatgcagcaatcagggtcaggttggcctttctgaatgaggatggagcagactgttacggcaggaggtgaatgatacatggcgtctctttctgctaggatagttgggtctgtgagtctatgacaccttacttgtctaccctgtgtacagaactggtgatggtattgtcccactgtgtatacgtgggtagccgtcaccatcagaaatggcacctttgtgtatcagaggaagtcgtgttttatattattgtaggggatgtgtattttcaaaagatttccaccttacatttgaataatattttttcaaaagtgttttatctgatctgttggattttggagacttataacagccttgtgatatgtgttaatagtgatatgtgttaatagtgatattcctattggcaaatggagaagatgagatagaagctaggtaggactcagtgccactcagttatttagtggtggaacagatgctggaacccagaccctgcattctccttgtttcttactcttagtatgaaactgacaaagttttggtgaggaacttgctctggatttttgaggtaaaaatggaaggttatagaccccaaagga

SEQ ID NO: 53273 - DNA, 1847 bp, Homo sapiens
aggatttgaacccttgtagtctattttcagaactctgtggctcttaatcactacactgttctgtttactgtgttacgaattaatagaggataatatttcaagtaagggcatgatagaatatgaagatttgattttgaatgtagttggggaaacagttaaacagcaattttaacttgacatcgcatccgcatttcttttaaaagtggacttaacactacagtgtacaaagatacatattgtttagacatttttttgtttgtccctgctcaaaacttctcagctcagaaattacattattttcactgatcttcactgttggctttgttagtcacttagctttccacattgccactattcagaaaccttggcttgagacagctaaagctcacttttacctctctcctcagccttcctttaactgtgaatttttgttttccattttgaacagttagcctttcagtcctagagggggttattctttacctcttccactccaaaacccagaaaacaccacagtggcgttttataacaactgtcacaaaatttgaccatcttaattggcataacatgattttagtgcacaaataagaaccaaagcatagtgttttggttaaagagattgacttactctgaaattggaaaaggcatctgctgtacaggatttttgatttaatagaatttgttataaccagatcagcagagcattattactgtgggccatctgttggaatatggaaatagctttgttatatggaaccagatgttgtttttatatttataacaatgacattctacttattttaagtaaccttttgtagttaggtacctttggctgcgattctatttgacatgtatatcaactgataacctgagaatgtgatgtctttcaaagtggctattattctgtgggatcaggacaacacagatgaaacaaaaaggaaatgagactcatacagtgtcaaactttagtgctataacaagataaaatataggaaaaatgacctggtgtggtggctcacgcctgtaaacctagcatcttgggaggccgaggcaggcggatcacttgaggtcaggagtttgagaccagcctggtccacatagtgaaatctcgtctctactaaaaatacaaaaataagctgggcatggttgtgggttcctgcagtcccagctatttgggaagctgaggcaggagaatcgcttgaacctgggaggccgaggttgcaatgccgctgcattctagtctgggcaagggagtaagacattgtctcaaaaaaaaaaaaaaaaaaaaataggataagtatgaatatgtgatatgagataattaggaccatattaaataagagctctgaccttgagactattaataaaggcctcgtttctaataattactaagccacttggttgctctaagaatttttaccctaaatctaaagtgatttgattttgatgtaattggacctacattaataccacactgtctgaccattgtttcccatcatcaattgatgaaatagtctgtaacaagactcatacttgtagagtgggactcaaacttagagtgcaataagaggaactgtttttagaacacagacttagagaactctgttctgaattgaacgctaataatttgaagatgactgggtctttgggtaggaatttttatttttttgagacaagatcttgctgtgtcacccaggctggagtatagtgactccatgagagctcattgcaacctcccaactgcagggctcaagcgatcctcctgccttagcgccacaagtggctgggactagaggtgcgtaccaccacacctggctaatttatttatttttaattcagacaagatc

SEQ ID NO: 53274 - DNA, 1828 bp, Homo sapiens
tgccggcagggcgggctgtacctcacgccttggagtggccctttggggagaggaggcccatgcgagggtgcttgcgttcccgcccatcctgtgtctgtgtcctttgctgggattagggcaaaggcagccgttccatgcggacgtgttgctgtcctgtgtgtgttgcatcctgcccacgtggtagagtgtctcccgccccccctcccagctccatttttgcagctggtgaggagggaggttaacgggatggtttttcctctgtgatttcctccgggtggcgtggaaggtgttagggtcagtttgctttgccgaggccggctgttggttagatgaagaatcgagagttgtactctgaaattgaggccagtaggggacataacagggcttagtttcattaacatcttttttcctcttccattagctgctcttattcttttctctgttgcttaattatagagaataagcgcttgctaccgatgcattcaggtgtatagttttcatttctctgttttactttttgtgtgtctggttagcaaaggttttactattccgtgttggtgcattccacgtctgtgttgtccctggttggattcctgaatgagttagagccattcactctaattcctgaaggagttagagattggtgggcacctttttggtctttttctgagatttatttgtgtgtgttttcttccttctattttgtttcccagtgaaaaagcgtgatgtcataggagcgttatatgcatagctctttttctcacaaggcagcactagtttcacctagtcacttattttgtagaagctcttttacttcacttttcctcttactctgttgagtacccattgcacactctttttttgaaactggtttgaaacatggtttgagtagtttttttcttaatgtctcttccagattagggtttccatcttctgttttgctgttttgagaccacagattgttcccgcaataacagtgagagaagcctattcctcctggtccctagcaaatatttatagaaaagcagtaactcctctctttttctgagtggtatatattatatagacgtgattaagttttttagtttcttagataaataggaggatttctctttttgcttttgtgtctcagaattgaggtgaatcttcttggttttgtgctgccgaggacaaaactgggaagtttctcatgctttcattagattttttttggatgaggctagaacgtgtttattttggctcttttttgttcattagtttgggtaaaataaaaaaacttaatgtttcaaagtcacttactagattccaaagtggcctgcattctcactttttcacattgtacattctttgagtatatttttgacatttttttccttttatctggtacagttcgtatattccctttccttctatgtagaatgaaaatatttaaatatagattttagattatattttttcattatgctaagtatgggtggggcagtggaaaatggagaatgttgttctgatacatactgaggctttttgtttttttttggtaagtcagcatttgtgtacttctgtaaagtaccgagttatctatgtgtgaagtctgtatgaagagacgaataagatacgtggtctcttggaaagcttcaacttatatcgaaagaacagagtttctttttctgttcgggaaacatgtacatcattcagaattatcaaactgcatcaaacttctccttgggataacagtacaaccaaggtcaaaagtgtaagggacatttgagaaagatacaaatttccaaagggaaagaggtgtatttcaggagagtgaaggggcctgtgc

SEQ ID NO: 53275 - DNA, 1029 bp, Homo sapiens
tctccaggaaagcggacgccttttccgacctggcacaccgcggattccgggacccccaacaaaggcgccttggaccttcaggacacccctcttttcagaacttcatgagtcccaggtgctagactcatgtctgcggaggcctttcccgtgcctggtctttctttctttcttaaaggagttggacctctaaaggcccttctaattctcaaggtagctacccaggttatggtactactatcagtaggtggagcgtttagaagggtagtttggtcgacgagtgaactttggaatttacttctacgtcagtcttcactgattctttctctaaactattagcactgataatctgccctataatttcacacttaattacattccagtgtagtatttgctgttgcttcattcgcgttagtcacatattcccctgcagcgccaaacacgcttttgaactcacaatgggtggctcaatatttggagacttagatatttgttagatgaatactaggctgattggatgagaggaaaaggagaggcatgagtgaattggccctgggtacttttttgacatagtctcaaagggttcagataaagacctccagcagatctgagcacacaattccttcagtaaacattgaacacctgccgtttggtcaagcatttctaggcactggagattcaaagtattcacatattccttttctttataagactagcaagattctgaagattcatgtactcattcactcaacaaatatttgccaatcactactaaggttgccagacactattttagtgcttgggatgtatcagtaaacagaagagagagagaaaacaaatacccttccctgttggagctttcattctaatataaggagaaagatgataaatgtaagagaattatgtaatatgttagaaggcatatggggaaaaaaaaatacaccagggtaaggggtatgaggaaaactggaggaagggggtttgcaatttttttttaagagggaatcctgctctcccgcccaggctggagtg

SEQ ID NO: 53276 - DNA, 1001 bp, Homo sapiens
gtaccttacatttaatctacaacaatgactatcagatgcaaccggtaccctctctctatccttgatttattaaaactgtcacagttaatgtagaactagatttctgaacagggaatctgcagatgtgaattcctattacagctttacagttaacaagtatcttggctttgctttgggcaaaccacttttgtctttgaatctcgggattcttatttatagaaactaggggttaaggttcctctcactttatgtgtttcaggatcatatttaaattgtataatctgttgtatttcaccgacctagattaagtagttaacatgtacatctttctacccaggatgaactttttgcttatttattttacagtttgtaaagatgtctcttttttgagatacagtagccaaattccacatcacatttagtttgtagaaccgtcacaaattctgtaagagcaagaaaatgctctgtatctaaaacctcattttaaagaatcagtcctaaaaaaaagataaaattaaatgctagtgccacaggaaacactcagacccttttgtttagtgtcttaaatgttaatagaattcatgtgtgaaaataccttaatctattcacaaaccaggagttcttttttttgttttttttgagacagagttttgggtcttgttgcccagtctggaatgcaatggcgccatcttggctcatgcagcctccacctcctgggttcaagcaattctcctgtctcagcctcctgagtagctgggattacaggcatgtgccactacttttttttttaatttttattttatttatttatttatttatttatttattttagtagagacagagtttcaccatgttggtcaggctggtctcaaactcctgacctgaggtgatccatccgcctcgacctcctaaagtgctgggattacaggcgtgagccaccgcgtccggcctgttctttttaactacaggaaaatgtacacagctatttgcctggtcgatgg

SEQ ID NO: 53277 - DNA, 1035 bp, Homo sapiens
gtcatgtccctctctgcacaggcctggatagccagcatgcacaagacctgtctaactgcttagtagagccttttgggctatactttaacccattccattcttcatttattaaaggcttcagttggaatgagccaggcccaaagatttacctttggagaagagagatgaagtcctggtaagacttcctaggtctatgtgaatctgctcgttgaggctgagttgtctctgtccacttgtggttggtatttccagaaatgattgaattcttttcttcccatttagaagtttaactgtttgtctgtggtctcatgttgggatttgaaagccagacgtttttgctgcttctcgtttctctaggtcatgtttctgttgtaaagctgtttttcttgtgaggtggtaaaaatctccataagttgtcctactttgcttagtagaatgtcttctgtgtagtaataatgccagtgccttacatatgtatagcattttatagttttcaaagcattttcacatatattatctcactgtgtaatgttgtcctgggtgttctgtatttactatcttaagcaacttgaatatttttcttttttctccaaccacttttgaggctactacacatgggttacttttacctttcgcattatttcccccaagggctgtaagtgtcaaaggaatttttcaaagaacagtaaaagcatctgtaagtgatactgttttctgatggcaaagtgaagataacttggatgctgtttataaccctgagaattaggttccagttccttggactcacatgatcagcggaagtacaaaaaacagtttattgtaatgattgttcctacccctcccctttttaatcagtgaaatatctcctagaatgggggaaagtgtgcaattcagggccatgtagtagttttgtgggtgttttgtttttcatctttgtgcctagagcttttatattgatattattcatcacctggtggagaaattgtaacttcattagcacccttttccccctagaattatgtggttatgcagtat

SEQ ID NO: 53278 - DNA, 1057 bp, Homo sapiens
tggcacagaaagggtattaaatatgcatatatatatttcacaattgagatataattcacatatcataaaatttacccttttaaagaacaattaaggccagacacagtgtctcacgcctgtattcccagcactttgggaggtcgaggtgggtggatcacctgatgtcaggggtttgagaccagcctggcaaacatggtgaaaccctgtctctactaaaaatacaaaattagtggggcgtggtggtgcatgcttgcagtcccagctacttggaaggctgaggcatgagaatcacttgaacctgaaggcagaggttgtagtgagccgagatcgcgccactacactccagtctgggcaacaaagtgagactccctcaaaaaaacaacaacaacaacaaaaaaaggacaatccagtggttggttttagcacattctgaaggttgtgcaacaatcaccatgatctatttccacaacattttcatcacccctaaaagaaagcctgtaattgtcagcagttactccctcttagtgcctcccttgcattggaccccctgttagtgcctcccttgcattggactccccctgtcgcctggccaccactagtctactttccgtctctatggatttgcctattctggacatttcatataaatggaatcatacaatatgtggcctttggtgtctggtttctttcacttagtatagtgttttcaaagttcatccacattatagcaggtagcactacttcattccttcttatgactgagtaatattccactcatggagatggagatggagatggagatggagatgcctccttttgttcatccactcatcagctgatggacatttacattgtttctgttttttttttttttactcttccaaataggctgctgtgaacattcctgtatgagtttttctgtgtcaataaatacttgagtcaatgaatacatgagtgaatgggtaatgactcatatttcctcatgtgttctttggcctggatatgaattataaccttcttttctgcttttgggcaggtctgggccgaatcgttcagg

SEQ ID NO: 53279 - DNA, 1048 bp, Homo sapiens
attcaagagagacaaggtgatagaattgaggtgagagaatttgttaacggctagatcaagcagagcctcatgggttgctttagaaatttgatctttatttagaggagtgatgggtcacatttttgtatgcaaaccacattggagggaggccagagatgatgtggggagaccagttagtaggcagtggtctagatgagagatgatgagacttgggctagggtgacttttccagaatcccatagctagccagtgtcagaggtaaacagaacctgggctgtattttcttgtccagtgcttttctcattactttggaggaaagacagtctggaatggggtgtcagacctgggcagggtgagcagggcattcctgcaggcaaacagcctgttatggggagttggaacccacacaagtgaggagggatccatgcagcagaggcagcctggaatggggagtcagggcccatggagcgggaagaggtatctataaggtggaaaggacggagttagagagcggggattgattcatacaggggaactcattaatatgtaaataaaccaatgaaagtgaaagctgtcagcaaagggagttgcaattaaggaatggaagtaaatcagattgaaccctatggtgctgtattagatctggatcaaacagtatagactagtggtcatagagatattgatgtagatatatagatacaggccagacacggtggctcatacctgtaatcccagcactttgggaagctgaagcaggtggatcacttgaggacaggagttcaagatcacaaacatggtgaaaccccgtctctactacaaatacaaaaatgagccaggcgtggtggcacacacctgttgtcccagctactcgggaggctgaggcaggagaattgcttgaaccagggaggtggaggctgcagtgagctcagattgcgccactgcactctagcctgggtgacagagtgagactcggtctcaaaaaaaaaaaaaagatatatagatatagaaataaatacagatgtaatgtgtgtatacgtacacccattat

SEQ ID NO: 53280 - DNA, 1029 bp, Homo sapiens
aaacatgtggctcacaagctacttaattgtgagccctgattgaaagcatttatccattcctactttatccctgaccctgtgttaggtgttacaggtgggacagatcaataagcagggagcccgcaaatatataaataaagctcactttatttagaaaggcaagatatgttagtggctctcagtggaacaaaagttcaggcatctaagttaacatttccattgcttacaagccccacttgataaattccctgtggaactcagctatatcctggctaagtgcttttattgatctgtttataataattctctacctccccaaaaacattttaaatggtttctgtcatttctttggtagcagtcacaacttgtaaagaatatactttaattgcatttctattgtccaagaaggtggcaatattgtccaagaaggtgcttgaacatggctatatattgtctgtggctgcttttgtgctacaacagcagagttgagtagttgcaacagagatcctatagctctcaagcctaaaatatttatctgaccctttacagaaaagcttttctgatccctcctctagattattgttacctgttttgaaatatgtataaatggaatcaaacagttaacttacatttaagtgaaaatgtgtaataagcaatagaaatgcaaaaacccatgactatgcatctaacaacagagcctcaaaatacatgcagcaaaaacagacagaactggggagaaaaatagacaatttaataataatggttgaagacttcaatatcctaccttcagtgatgaacagaacaactagatgaaagatccagtatcccactctcagtaatgaatagaacaactagatagaagatcaaatatcccactttcagtaatgcatagaacaattagacagatcagcaaggaaatataagacttgaatcacgctataaaccaactagacctaacaggtatctgtagaacaccattcaataacatgagaatgcctattcttctctagtgcgtatagaacattattc

SEQ ID NO: 53281 - DNA, 1034 bp, Homo sapiens
accttcctggcagtagagttcaccactttggcggactatttgcatctgttgcaggctgcggcccaggcactcaatccgctaggtgcgtgccctaggagtaccccttttgcctggaagcacagcctttctttccagccacttatccccttacctcctgcttacccacggatctcagctggggaacccgagttgagaaggagctgatcctatatcgtacctcgccgatttgttaacaccttgtgtttctctttgcaggcccttctgcgatgttttacctggctgcggctgtgtcagatttctatgttcctgtctctgaaatgcctgaacacaagatccagtcatctgggggcccactgcaggtgatgggcgcttctcttccagagatctaatcccatataaccaatcttgggttaatttcctcttgatctggagatggcctttctgcatctgtattcgctaggcacaggggatacagagatgaataagacaccgccctccctcatggacctcacaatctagtgagggagctggacacagacataattacaatacagagtgataaatgctctagtggaggtatgtacaaagtgcagtcagatcatggggcgagtgaatcctgggggagtcgatgaagcttcttggaggagatgaattgaactgggttttaaaagatgagcagaaccgagcgcggtggctcacgcctgtaatcccagcactttgggaggccaaggagggcagatcgcctgaggtcaggagttcgagaccagcctggccaacatggtgaaaccccgtctctactaaaaaaatacaaaaattagccgggcgtggtggcaggcgcctgtaatcccagctactcgggaggctgaggcagaagaatcgcttgaaaccaggaggcggaggttgcagtgagctgagatctcgccattgcactccagcccgggcgacgagagcgatactccgtcgcaaaaaaaaaaaaaaacaccaaaaatcaaaacaaaatgagcagagggtgtacgaagtgggaaaggtcattc

SEQ ID NO: 53282 - DNA, 1051 bp, Homo sapiens
atgtttgccacatgcattggataaaaactatttttaaatttttctttacaaattgactgcatagttacataagatagtttgtcttatagaatgaaacttcccccaaactgttacacaagtaaattttcaaatttgtctctgaatatctgaacatattaactgttccccctaaaaatcaacctttcccagaaagatgattacttattatctgggtttgtttttgtttttgtttttttgcgtgtgttcaccatttcagaggtgattttaaacatggatttccaacatactttgtgttcatcatttttcaaaataactgctctgaagggtgtaaagctgaccaggaaggtaacctgaaaataaatacatgtgtttctagtaaaacttctttcaagtataaggatttgggtcaatacataatgtcctctgactgcctcagtacttgttgtacacccctactacagagctgataactttacagggtaacttatctgcttgcatatctgtgctttcccactgtgacaatctactaggataggaccacaggggtatttgtaacacagaaagatgtgatcaagcaactttagtttagatgttgggagcacactttggaaacagtctgcctgggttcacatcctagctcttatcaactacattgtgaccttgaacacattacttagctctctgtccttaacttccttacctgtaaaatgagaataataatgtccctaggactcagcaaagaatgaaggcatattttgtactcagtaatcattgagtgaattaatgagtaaacatacaaacaaatcaataagaagaaaggtgattttatttaacaggataacattttctttagaattactgaaggaaactattgtacacatgtaacactacagtttttaaaaggtcaaatttttcaaacaaaacataaagaaaagcagactgaatctcttatgcaaatctcactaacctcccattcttccttcccacattctaggaaaaagattaatgatgttgagtattgctccttcctgtggtgtctgggaaggagggt

SEQ ID NO: 53283 - DNA, 1039 bp, Homo sapiens
gctataacataatacaatagactgggtagattaaacaacaaatatttatttctctcagttctagaggctgggaaatcaaagatcaagatgttggcatatctggcatattcagtgtctggtgagggcattcttcctgatttgcagacagctatcttctcattgtatcttcacatggccaacagcaaagagagagagagagtgcaagctttttcctgtctcttctcaaaagggcactactacaatcatgagggctgcacccttgtgcattagttacttgccaatgtgtcctcctaataccatcccattgagggtaaggctttcaacatatgaactttgagtcaacacaaacatgcagtgcataacaagaccattgattttgaagaatgtctcttaatttggatttgtctgatgttttctcacgatgtaattcagattacccacactacagagataatgttgtatccttctcagtgtattttatcaggagacatgacatttttgttctattcctcatgatattaacttggatcatttggttaaggtactgtctgctagatttctacactacaaagttattacttttgcctttgcaatagatacatatcttgtggggagatactttgagactatgtgttatgtttcccatcaaacttttactcattaaaagtttctgttttgaatctttgatttttaagttatattctagtttttcttcagaatatagagtgctttagacttaaagatagtcttgctaaagaagctgtatgtatttgctgaagcccacattttacaggctgtcatttttgtttgggttacaacatctagactcatacagaattttagagctgaaatgagtatgatcatgtagaccaactccttcagtttacacataagaacaccaaggcccagggatattagactgctgccaagttacatggtgattctcagcctatgctctttctaccctagcctaaggcctcaatcagaaagtggaaccataagcttaattcttatgctacttaaacatggctgattatta

SEQ ID NO: 53284 - DNA, 1008 bp, Homo sapiens
tcttgcccttcagctaacatggccggggaaacttactgcaggtatatttggtttccatcaggcgaacagtggtccaagtacaaatggctgtcagttctttatcacctgctctaagtgcgattggctggatgggaagcatgtggtgtttggtaagtcctactcctgtctcatggtccaggccccattcaccctggatggaacctccagaggagttagttctcaaactcttaccaagaaagctcaacctgtgtaactgcttaggtggtaatagagaaaacagaaatggtggggaggtggggaacatgtgtggctagagaactagagggaaggacaaaaggaccatttgatatagtatggaaccacttagggagaaaacccagttgctagcaccaaagaaatgccatagaggcagcatgatacggtgagactttggagtcactcaggtataagtttgagccctaactctacttattacctatgaccttgagcaagtcatttcacctctaccgcatcttaatttcctaaagttagtatgagggtttaatgagaaaatagctaagaatgggctttggaagctggaaaatgctatgtaaacaagaataaagtccagctcatgctcttcctacaggaaaaatcatcgatggacttctagtgatgagaaagattgaggtaagtactgctttgatttttctgtttctctgccattgtggtctggtactgtctgactagcgtgcaggagctagagaagggggaatgagctccagtttgttaggctgtcttcattgccccaggaaaagggaagagaaccacctaagttagcctgtctggccaacactgaggtttggcctctgatgatcctgttgcctacttgataaaattctactcctcagcattgcgttcaaggtccttcatgattagtccctgtctacctctccatggccccttcttctgccattgcctcttccatgttccagtcacatcaggctactagctcttctctaaatctgc

SEQ ID NO: 53285 - DNA, 1037 bp, Homo sapiens
gtccactgtgctcctgagattctcaaaaggggcactgaccctccaaaaaagaatcaggccaatatgaaccacttaaggattttcagcagaatactgtagatgaattttcatgttcagaagatgattctagcagcattgtggaggatgggctggaggccagtgaggagtctactgcagtagtagtccaggcaagagaaaagaggttttacatgaaaatatgggtctggggaacactggagatttggcagcaaatatttatgtgcctgctgggcatgtgacactgtatgttccctgtcctgaaactcagaagctctgccagctgaaaaggccaggagtggagagaatgtctggctccagtccattccagtccagtacaaaggcaaagctgcttgcattgcagccaagtcttacacacgtagaggttccattctcttcagtggaatactatacagccttaacaaaataaagaggtagatctggatgtgttggcaagatttctaaggtaagttaagtgacagtcaagatgtagtaatttatgtaagcatgttactgtttattttgaatgactttcaggaatctctgcagtgatatatagcagactgtggataatacttctgcagagtagagatagcaaagagacttttcagttgccttatttaagcttgaattttctaccttgaacatgtatcttgtaatagaaatacatactgtttatatgtagtgttaactaatcctaaatcctcccagcacttcccaggagcctgcccacagctgtggctaacatcaggtgtgaatccattgctgatccctccacctcctcttccaggtctaagcccagacagtgggtgctcccacagcacttggttcatctctccactgtggcatttaatatactgtatcacaaatatgtaagtctgtttttctctggactgagaacttgttgaagcaaggatcatgctgactaacatagtgcctggtatgacagagcttaggtcctggcacaccatgcagcttacaaagtacatttatacattttc

SEQ ID NO: 53286 - DNA, 4394 bp, Homo sapiens
cccttccctcacgtgctctccgtccgcggcctgcgcacacacccatcctggggcccgcgccccgggcctgccctggagcgccccgcgcttcagactcacccacgtgtgcggcggcggcggcgactgcgtggccccgcacccgggcggtggagagaaagggctgtcaggtggccgcggcggccggcgtgcgagggaccggatgcccaagccgggcggatttggaaaaggatagctggtaatcgtggcttgttttgctttgttttcttttccagcaacgaaggttttgggaacagtaaaatggttcaatgtaaggaacggatatggtttcatcaacaggtgagctgccgggctctgaagcctccatcccaccttcttgcttgcttcctgctctgtcggcttctcggggcttgggaagccccaatccacagctctgttctgaaaggcgtttactacctctggtgtattagtatgattttttgttgttgttgttttccttgattagggattagtggatctagagaatgcctttgttttgcagctaaatattaatttgaagctaacttaaaaggcttcgtcacagtacaaagcaattcaaaaggcaagcggagtgaatgagccattccttaacagggtaaacgggaaactacggtccagtacatttttatccttgtcatctttttctactttattgaactcggtatttgagaatgtgatccactgacatcggatatttatacattgttaacgttttagggtaagaggatttgactatatgaggttttgtcatctttaccgagaggttgtattgcctttgtttcacgtttcattttaatacctgagataaattttgtcttagcacagctttgaccagagagaactgtttttatttgctcatccagtaaataatatatttacaagaaagtggttttttttccttcttccgttcttatttttcattcttccttgtcctagaatcataactggttaagtcgatttctgttagatccctggctgtagcttattagagtggccatagtcactggtaacttgacatttttcttcctgtttgaaggcaaagctgcagacacgtctttaggacttacccttcgggttgtttgtaggagtggtggtggtaacgtgcagtagacgcactgtattccatgggctcccttgtaagccgggcatcattttcaagatggctgccaaggctagtagtgctagttacatgggtgcagagcactgggtatgccagtagcaatcttggcctcacaggtatggtacttagtgccatctcagcattgtcttgcttgcttactgtagaagacctaagcagatgattaaaagaacaatgtggaatggacaacaaatgggcaaaatcaagcttaaggacagaatcattgcctgatgaaaaactgttcattaatcaatcatagagtattgtggaaacactcagagtaagagataagcatttggtgatctattctctacttttgcaattgtgggaaaatattttgtttcttccaaaatcttaggattttccatcttgttatatactgtttgctttcctggctggccgaaactacgtttttcattaattttttgataatggcttactagcaagaaggaagggaatgcttatatataattggcatactgatagctttttaactgatctctctgaactttctagtgttttagtttgtatttctgtcttactctgattatcgttactagtctaacccttaaaccagtggttttcaaatttaagtgtgcttaccttgggagggtgtgatgtaagtggtgagttcctccttctgagccttggattcattaggtctgggtacatttttaacaggaatgataatggtcttcgggccataccttcaaaatcactgcttttaacccttgacccaatgtaatggtaactctggtgtgcaaatttgcagccttttcagcggatagattgcaggttttgtatgtgttgaagaagttttagcatgtgccttgtttcgctgcattttttttaagtaggcataggttatgacattttttgaaatcaacagttttgtccagaataagagtaatatctttacattttttaagtatttagtccatgagatactgttcattgaatatctctattctgaattggaatcaactcaattggtcatcctccagggcaagttatgaattggcttttgatggtcctttgtttggactatcctaacctcaattattttgtcaaattaactggttaaaatgttctttatgcttctgaactggttttaatgattctgggacttttttaataagatgctgtaaaatctgactccaattaaatacagggaagatttgctttaattaaggaaaatgtatgtgataaaagaaatcactttggaagctagcagttggttctatatgtagttcgtgtagtggaacaaatagacttggctggaggcacctgtctcttatgagggagggagacagactgacacataacgtgctgttttctgtataaaggagagggtgcagtgttcgggatgactattgtgacgacttttaattggggtttttggatgcgctggattatatatgctaggattgtaaggaatttttataattacaatattgtatgtaaattttctgcctttaaagacataatttcattgtaaatgtgtttattccagcctgaattaccacctgatgaattgttacaaccttgttagaattaattcatgaaagggcttctccctgatggttatattgtgaagaaggtgctaagtaacatgagcatagagcttttaaaaatagcagaagttttggctttattttgttagactgtgtaatctagaaattctaagaaattcattgagttattcttttgtgaactgtgtctacaaaacataatcggagaatgtgactagaggggtttattagctccccccagattactgttgaattttgttagtggttgagtattgatccatattcaccaaagattaccatgaattggcaacagtttatagtgaccagaataggaatatttttctgtttccagagtacttaaaatgtttaaattaataattcttaatgttttgaggtgaaagaatttggagcagaggtcacaaatttgtgaccttctggctaaaactactcccagatgctttgattagacagtacagtattttttaaaggaattgggattaattactaacatttataattcaggagataacaccaagtaatccagattattatatttttaagatctgaactttagctggctttgggggcctgtatttccacataagtaaaaaccacctggccatattgtcaccacatttaggtggggtatactttttttacgacagccttcacgcctggcctctgtgtatgcatttgagtttattacccatggtctaggaagatgtaataaaccaagccagggaaaggtttggctatctctctttagtcacgcctatcaggtttagtctccctttggggtgggggctcccttgtggggattccatatgtacataactgataggtgacttccaacacatgttggtgaaaatagatacagctaacaagtatttatactagggtctatagtaagtgcttaaaatgagccaatttacttaatctttaaaaacctttgaggcgtaggtactgtcattctgaggcacaaaggagttgttacttgtccccataagcataggtgataagtggcaggattggaactgttttttgactctggagttagtgttcaccaactgctcttatgctgtctctgaaatagaccctagccattttcaatttggttgttgtccacatagttacagataatttcttagggtgattatttttagccgttgaaagactcttaaatgatccaagtatgtcactggggctcttgtctgctgacttgctaggtcctggatttgaaaagttttctgcctttcactatctactttgtgaagtttgggattgttaaaagttctagtttagcatgtaggtcagctatacaaataaaaggacttgcttaattcctgatactgggaggtgaagaattaaaggagagaatgttgcaccttatctcccttaatcttttttttttgtatggcctgcaaggtaagactgaatattgcctttttaaagggtgatttttcttgagatggagtttcactcttgtcacccaggctggagtgcaatggcacgatcttggctcactgcaactccgcctcccaggttcaagcgattctcctgcctcagcctcccgagtagctgggattacaggcgcccgccaccacacaggctaattttgtatttttagtggaaacagggtttctccatgttggccaggctggtctcaagctcctgacctcaggtgatcc

SEQ ID NO: 53287 - DNA, 1062 bp, Homo sapiens
ttgtaacctttgttccctttgtcattaaacgctagagctactactgagctttttctcactctgacctgacggagtaaagagggtgaggcaggccactgcaggcctggaaatccgtttccttctccagtggtgattcttgctcctcgtgttatcaccttaatcccaatatccaggctaaaaagtgagattattctctaccccctcgcttctgacatccagtcatccacaaagtttctcattttgcctcaaaaagagatctcaaatgtctttttatacatggctccgtggtctaaaccttcatcagtccttgtctggacttgtggagtagcttttataactgggcttttcttacattcaaacataccttatcacccaaaggtcacagttcccattaggtttcactctttgcgttatacattctgttggtggggaggggggttctcatttttatgatctcaaggaaagttggtagttgggagatgcaggataaggtgagaatgtaactactacttctgttggtaaccatgctctagaggtaagaggagggtgtgctagaacagttaatgtttaataggataaggaggggcagaatatattttgctagtcattgctaccctcttaattatggctcagtaggtcacactttaatttcttagacttttttttttttttgcctatcttacgggtaatgaggctacaactgtttgcaactgctgaagtcttgaaagcagagagcatggtggcttgtgttttttgatttttgccaaatttcctggtacctaattggcagccagagagtctctgggaaaattaatctttgacaacatgagatttatttcattttctaacttgttcaacttggttctgtcttgcaggaatgacaccaaggaagatgtatttgtacaccaggtgagtgcttgtgtagatatttgcacttctgattcaaggattgtaagaagaaaaggttagatatgttctcagcttttgttccttataaaaggttaagtccaaccaccagtttatttacttacgacaggagtagtagcatgcttaaaaatgtat

SEQ ID NO: 53288 - DNA, 3988 bp, Homo sapiens
tcactgcattaaatatttatacctaatttcagatgaacagattattccatgattctaaagttgaacaaataatgttgctataaatacacagaaactttggcaagaagttttcaaaggcttttaggtgtacctgtagggacaaatctccataatcaagggtaaataagacagacctgcaaaacatagtaattgaagtgagtacttgaaaagtagcataaagagccttctgcttactttaaatcactttgaatgggtattgggttttttttttttttaaacctttggagagttttggctggcttggaaaatgaaaaaatttcactagtttaaggttaagtggggggaagtgtgacaaggttggcagctgctcattaaataatttttagattggcttccagtgatttgggaagagaaaactgttaacataggatgagtactgatgagtactgcatagtgaactttctccctaagtatcatttagggaaaatgtttgcacattcaggaattaagattattactaatgtaaaccactgccaagtgtatgttaatacttcaaatttagatatgctgtaggctacattgaatgtacttatcctcacagatacgaaatgagtaggaaaaaatatgtttgtgctatcagttttctcactaaggcttttgaaatattgtcaacttgtattaaaattagagaccataactacttttttgtactataatccagaaatcaaaagacctaaaagttaatatccatactcacatttaattagatactagcttttatggcagcatgtttcataggaagggctgtcataggttggtgctttgtagctcactgaagtgtcctacacagtatttgatgacaaggaggaagctatatcaatttctagtacacccaaacccaatcaggtagttcagggtcaaatgtaattatggaatcatttaaattctaaatgtaaataaatacaggactacttcagacaaaatgttgttttaaagtagatgttttataaaattggtattcttgtttggaagaacacagctcaactgttccttactccccttctgcatgttcaaaagaatgtgtagacttaggaacaagagacagcaaagtttctcggtcttgttgcctgttggcaacccttaagggttggggttggggcaggggtggagatgttgataaaaataaagagttgggattttaattatccataattctgctatcccctatgactgcaggtaattgatagttggctatatctgaaaggtatgaaaactatgtgacagtttagatgacagatgagatcaattatttgactcaactcacccagttgtactgattcacaaggtgccaccaatatgctttcatttttttggaagtggtttcaacatgtagttgtttcttgggactttggctgctcaggtcttagtggtgtatcagggagactgcagttctgggcagcttcacttaattggcctcagattcgttgattgtcctgtctcctctgcaatggaaatgcatgagtgatcctgtaatggatatagctgagatttggagtgaacatgggatttggagacccaatacctgggtttagaaagtctccttactaactgtgtgaccttgggcaagtcacctaactttaaagcctgttacattatctgtgtaatgggattaacaatactttcacatgtcctgtctcataatgagattgaatagatagtaagtgaaagaatgttgcaaaaaaatttcatagaaacgtgagatgttactcttcctcccttctcttaacagtctggagaaagtagaagcaacaagtctctaatacaagatttattgaattctggggaggtgataactaacaattccatgcagtcagatcatataaagaatgacatagttaatacacatgaattgcatttccactgatgtattatcagattggaagggattttggttgacatttgtaattgagtttgatacggtaacacaggggcaaagttggtttggtcagctttgaagcatgcaaaaccaaactcgcctgtcatctaaactgacgcagtgtggggccaccttctcctattaagtgcagtcctcaggggatagatggatatcctcatttgttaaaagttatatataatgcttttgcaaaaagcagtttttaaaatgatgtgtctgtcttgagtgttaaattacttgttttagttttgtaaatagtggtacaatgctggggccttgtatgattggagtgtttttgttgaagttggggatagtgtggtccccgctttcctaaatttattgatggtttggtcttatttaaagcaaatcttaagtgtatatccaagctaaaataatattgactctggtacattttaaatgaaaaagcacattattctcccctgttaatctatttttggaatgtgatattactagactgccataaagaagaataaccccaggaagtaccttcgcagtgtaggagatggagagactgtggagtttgatgttgttgaaggagaaaaggtgaggatgctttttgtgtaaaggtttgacttcagtatggaaatattttggaggtctcatccattaggatggtggctctaatgtggatggatgtgttcaggtgacctcatgaacacaggtgcatcaagcctaatgttctggctgcagttagagggcaatctcttcagaacagtgaggaactgatatttagtcatttctgtgcacccctggtcacgcagttgcgcccccccccccttttttttccttaactttgttgttttttgctttgtttgaaaatgttctgatttccttttgaaagtgttgaaagtgttctgatttcctttgtcactatcaatatgtaatggcttttgtagggtgcggaggcagcaaatgttacaggtcctggtggtgttccagttcaaggcagtaaatatgcagcagaccgtaaccattatagacgctatccacgtcgtaggggtcctccacgcaattaccagcaaaattaccagaatagtgagagtggggaaaagaacgagggatcggagagtgctcccgaaggccaggcccaacaacgccggccctaccgcaggcgaaggttcccaccttactacatgcggagaccctatgggcgtcgaccacagtattccaaccctcctgtgcagggagaagtgatggaggtaagtttcaccatcaacaacagcaatgtgataagttctggtaggactgtttagagctgttaattatatggaaagcaacttggattcctagtaagaaccaaaaggattaatttataatgtagtcacaattactagatggtctgttttgtttgttttttaactcttggatttatctggttgggtttttttattatattactgacccagtaggcttaatttccattgtctttttcagggtgctgacaaccagggtgcaggagaacaaggtagaccagtgaggcagaatatgtatcggggatatagaccacgattccgcaggtatggtccacgtaaacatgtttctattaaaatttcctcaaacccgtgttaggactcagcaatatcatgcctctcctgcagactcatttttctgttaacacttcacgttttctttcatcagatgcctaagaggtgaacctattaaaaacagcttgtatagatgaggtctgctttatacataaatttttttagaaaatgatgagggtttggaatttcaaattttctgtccttgaacaggtaagataatattttaaaccacaccttttaaacctgcctccttggtagggagaaaggaaagcattaggagtatctgaattgtaccatggcattagtgaagaatcaacagtgttatcacttgaaatggcatacattatcttccactaaacacttctcagtttagatatgtacccccttttttttggagttgggagttgtcagctcaaagttgcaaaatgaaattgctccaccaagaatttacattctgcggggggaaatc

SEQ ID NO: 53289 - DNA, 2430 bp, Homo sapiens
gcactctttgggaggccaaggagggaggatagcttgaggtcaggaattcaagaccagccttggaaacatagcaacacatcgctactaaaaatcagacattaatgagacgtggggggcttgcctatagtcccagttactcaggagtctgaggtgggaagatcacttgagcctgggagattgaggccacagtgagctgtcatcattccatggcactttagtctgggcaacaaagcaagactcttccccctactcagcatccccccccccccaaaaaaaaaaacccatctctttacacaaattgcctacagaccacttgatacagaatgggccagacatggtgagttagttgtgaaccaactggttacactggtgggtgtgttgaagagagaaggttttatcattcttaagtttgacaccgttcattgcaggggccctcctcgccaaagacagcctagagaggacggcaatgaagaagataaagaaaatcaaggagatgagacccaaggtcagcagccacctcaacgtcggtaccgccgcaacttcaattaccgacgcagacgcccagaaaaccctaaaccacaagatggcaaagagacaaaagcagccgatccaccagctgagaattcgtccgctcccgaggctgagcagggcggggctgagtaaatgccggcttaccatctctaccatcatccgggtaagcaagcttggatggccatccatttatggcagtcgtgagtggtgaccatttcgttttattaatgcaagagtagaaaaacctcagttccatcagataatgaaagccatgttatttataatgtgttctgccctattcttaattacctaatatttcattttaggaatattgaatatcagagtcatatttggccacccttcagctagttctcaattctgacactggagacctgtattttcatgagtattttgaactattagtgctttctatcaacttttctgaatgaattttatgatttcactagtaaacagaggaaagttttgctagctgtattctgagaaatatgttaattacattattatttatgcattatttcaaaaaggaagtggggatagctgttagaattaacctagatggtgacaaatagagtctgtttggagaaagtggcaacattaatataatcttttaatcatttctaattgttttttttttttgttggtttatgttgttcccggaaaaagacgagagtgtttcgtgtctaaaaaactcctagaatgacacgtggtttatcatggtttatttaaactgcctgtagattaataataataattctctggcagaccacatgatacaattacgttcttgttactttagctcattagctcacttgtttttattacccttaattccaaaattaagggattctttttcatttcgctttttacatgatatcgagaggtacgtgattgttgttccctccaaaattagcattcaaccagtggtgcttttggttttttcccgtttactatttgctggatggcaagagatctgttaatgtctcccaatacacaagtaatgtaaactagggcatgtactacactaaatgaagatcaccatgaattctacatgatcatctttatttttttctttacagtttagtcatccaacaagaagaaatatgaaattccagcaataagaaatgaacaaaagattggagctgaagacctaaagtgcttgctttttgcccgttgaccagataaatagaactatctgcattatctatgcagcatggggtttttattatttttacctaaagacgtctctttttggtaataacaaacgtgttttttaaaaaagcctggtttttctcaatacgcctttaaaggtttttaaattgtttcatatctggtcaagttgagatttttaagaacttcatttttaatttgtaataaaagtttacaacttgattttttcaaaaaagtcaacaaactgcaagcacctgttaataaaggtcttaaataattgtctttgtgtaaatttgtctagttttgctttagtttgtaagtatttagctatttataggacccttagcttgacccagtctacaaatagatgatgctcactggtaattccctcaggtaaaatgtctcaaaatctctaatcctttaagtggcatgcctgtgggcccatactaaaaattagaaaatacatactctgataacctggccatttttcattgaaggatttagctcatttgtaagaaagacttgagtgtagattttgggtgggtccctttggctgtgaggcattgtttaaaagggcattgctctagcctagaccgaccagactctcatcctgctccacttagttttgtcaccttgggagaatttgtttcagtgtgtcaattgaagatgccaattgaagtgttaggacaacctgtcacactgcctggtgtg

SEQ ID NO: 53290 - DNA, 1034 bp, Homo sapiens
cgtcatgtccaggttgttgtttactgtcctagccttaaggctaaaggactggggagagacccaggaaggtagggctcagactcaaaaggcatgattctaaggcttttgccttattctaaagcattgtgtattactaaacagagtcgtcctgttccccgccccccccaccccagaaggaaattggcaggccataaaatatgattgtaggaggaatacacccatgtactcagccccagggccaaggagcacagaaacagaagatgttcagcaaaaaggagtgaacctgagcccctggagaagctgatcaggaaaatatgctattgcttgggaagaggctcaaaaactgtgcagctgagaatagagcgtatggactgactactagattatcaaggagttattgttaattttgtgttacaaatattgttagttttgtgtgataatgatactttttttttgtttcttattattcttatctggtaggggtgcatgctgaaatgatataatggttgcatttgctttcaaataacaaagaaaaagttcagaggcagtgaaagttataaaataagatgggtgaaccccagtggtacttaggggttctccttatgtatgtttgtaaattaaaaaaataaaaggtttaaaaatacctctaaggtttgctggttgtatcatataatataatcctcctgaccagggaagtaaggatgatggacactccagagatttgctactcaaagcacagccctcagatggcagcaacgcatcacctggaaacattagaaatgcagattcacaggccccgccccagaccctgtgactcagacgtggcatttttaacaagatctccaggtgattcagacacacagtgaagtttgagaaacaccagtgaagctggtgagagctgtgtggtgcttctcctttttgaggggagaatttcaattgaccttgtcctgttttcctccgtcatttgcatattaggtatattgaaagtggttcattttatgatttttgtctacagctggcaaattatgaggagc

SEQ ID NO: 53291 - DNA, 1046 bp, Homo sapiens
acattatactggcatcaaacatataaggtagatgctgtttgacagatgagaacattttaattaattaaaattaacctcagggaggttaagtaacttgccaaggtcacacagctaatcaatggaggatctaggagtcaaagtcagttcttcctcgttcccgagctcatgttttaggattgtgtttctgatgtttcctcaagagtgtgtcatggcccaaaagccagcagctatttggtcatggagctgggactgggaatctcatctttcagctctatgttctgtcctctggactattctacctttgaaaatgacctagcgggagattttgctggtgaaaaggaaacagctggaatttctatttgtgacgaggaggcaatatccaatggagagtctttggtctagctgctgctagatttagctagagttttgtcattgctttgcaggtggccccctgctgtatgaaggcatcagtctcaccatgaactccaaactcctgaatggttcccagcgggtggtgatggacggcgtaatctctgaccacgagtgtcaggagctgcagagactgaccaatgtaagggaagcccagtgactgcaccttcccccaagggtccagcatccccccaccaagtgccccttgggtggtagccttcgccttcctcttcctggccacagttgaccacctcttctcaagccctcagctgccctggctaacatcaccttgtgttttgggccttgtaggtggcagcaacctcaggagatggctaccggggtcagacctccccacatactcccaatgaaaagttctatggtgtcactgtcttcaaagccctcaaggtaagatcaacactgggcattctagagtgtggagaaaggggtggggaagggggaagctcaggctttgaggaagagttggggctggtggcaggaaaggtgaagagggtccacctgccaacattcttgttgccaggaagcgaggatgagttatgttgcgtgaggttcacttttgaatcctgttagaccgagtgtaatcaaaacaaagtgagcag

SEQ ID NO: 53292 - DNA, 1050 bp, Homo sapiens
aacccaggaggtggaggttgcagtgagctgagattgtgccactgcagtccagcctgggcaacagagtgagactctgtctcaaaaaaagaaaaaaagagctaaatgtttttaaatttccagagctaaatattttgtaaagaccatttacaaaaggccttcattttatagtggtacccaggtcacccctttccatccataacctgaggaacaggaaattaggacccctgtgaaggtggctgagggcaaggagagagggttcctcctctgtggcctgcatttgagtgctccttcttcccagtagcaagaatttcgactgggagtgcgactctactcagaggaacagccacaggaagctgtgccccacctagaggcggcgctgcaagaatactttgtggcctatgaggagtgccgtgccctctgcgaagggccctatgactacgatggctacaactaccttgagtacaacgctgacctcttccaggccatcacaggtgcgtgcagttcagagccagaccttcagccaggcctcctgggactctaaggtcaccatctgataatataaatggggactcttcaccctcattcctcaatttattaaatctgagaagctgatgaaaaattgcttccatttgaatttgttcatcttaaccagaatttgagttctaaagagtgacctcatagttattccttctgtttgattcctttcagatcattacatccaggtcctcaactgtaagcagaactgtgtcacggagcttgcttcccacccaagtcgagagaagccctttgaagacttcctcccatcgcattataattatctgcagtttgcctactataacagtaaggcctactttccttcctctttctctgctggctaactaagaagctaaaggcaaggtgggcagggattacagccacttacttcctcaaggtgtttggcttatttcagtagctatgggaggcaccatgccaagtgatccctgggtagtttgttataaacaactggcctaggaagccaataccagcaacccaaaaagctgggggagggag

SEQ ID NO: 53293 - DNA, 1048 bp, Homo sapiens
tcgtgggcatgcgccgcccggcttggaaggtggggcttcgcccgggggcgggccttcgccgggggtaggactccggccttggtggcgggtggctggcggttccgttaggtctgagggagcgatggcggtacgcgcgttgaagctgctgaccacactgctggctgtcgtggccgctgcctcccaagccgaggtcgagtccgaggcaggatggggcatggtgacgcctgatctgctcttcgccgaggggaccgcagcctacgcgcgcggggactggcccggggtggtcctgagcatggaacgggcgctgcgctcccgggcagccctccgcgcccttcgcctgcgctgccgcacccagtgtgccgccgacttcccgtgggagctggaccccgactggtcccccagcccggcccaggcctcgggcgccgccgccctgcgcgacctgagcttcttcgggggccttctgcgtcgcgctgcctgcctgcgccgctgcctcgggccgccggccgcccactcgctcagcgaagagatggagctggagttccgcaagcggagcccctacaactacctgcaggtcgcctacttcaaggtgcagacctgcctggaaccaggcggccggggtccttctggggagaggagtgttgcaggggacctgaggagcttgggggatcggggaagtgtccgcagggaggggaaagtggcctcctggctggggagctctcctcggagccggggagagctgctccctggcaggagaccttcctcgcccagttcgcatgggcagatgctaaccccaaaggtccagcctggggttagggcacaggccaagcaaaactcatggccattttgttccctgggaaatctcctggaaggaattaaagcggcagtttgggtctcccattctgatgtcattgtaagtgtccgagtgagaagctagtagcggtctacaatatctcccttccggttggttttccagtggtgcttttcctgctgtttgattcagcagctctctttcaggatgtgaggttgccacgtcgccagcaggggctgc

SEQ ID NO: 53294 - DNA, 1021 bp, Homo sapiens
ggccggagtcctacccccggcgaaggcccgcccccgggcgaagccccaccttccaagccgggcggcgcatgcccacgaggcttgcaccgcctcttttcctttcagtcagcccggatccccccaccggccctcagcgaatcccggcgcgtcagccggagccccgcctccgagctcaggccttgctcagtcgaactgacgcccagtagacaagaaagacggaagctccgcccacgcgcctttatgcgcaggctcttcctactcgcacagcccagggagtggggaggataaggcgctgtcatggaggacgccgccgcgccggggcggaccgagggggtccttgaaaggcaaggagcgccgccagctgcaggccagggaggtatgcggggcgggagtcagcagggggaagtcagctcccgcgaggcagccggtctcggggctccgcgggaggccgacggcgggagctcacggcttgtgttcctgggtgtgtgtcgcaggagccctggtggagctcaccccgacccccggcggcctggccctggtgagcccctaccacacccaccgggccggggaccccttagacctcgtggcgctcgcagagcaggtgcagaaggtgaggaggcgcggccggggcagcgaataaccatcttcgttcacgttgtactctgcgtctttcggctcagacctcactaccacctatggtgggggtggcatttgctcttgtctccattttacagacgagtaaagccgactgtcattgtgagtcggtggcctgattcgaatgaccttctgggaccaaaggttcctctaactgcaacttgagtgcccataatcttccttcgtgggaaggtttacacaacactttagtgttcattatttcatttgcaccttaggacagccttgtgaggtaggcagtacagagttattcttcccatttgacacaaagaaaagttcttcgggaagtttcaaggtccgcttattttaagctgcttcccataagatctttgttacctgagagtttaaa

SEQ ID NO: 53295 - DNA, 1055 bp, Homo sapiens
gggcaaggactccaagtttagtcctcattaaacacagtattcccaagcccagtgtttatatatggatggccaaaataagtcaaataaggaggaaatgtgaaataatggaaaaaacactggaagtttggacacatgagtattaatcccacttttgatactaacttgcagtgcgacttaaggcagattacttctctctggacctcaactattttatctgtgaagtgaaaggtttgaagtagtagagctccaagatctaaagttttgtcattattcaatgaaaaaccagattccttcttatctcttatcaagacttccagttgtacaccctcttcagtgtccacagatggagggtcctgctgttttaaagattatcatggccccttatccctgtatacactatcagatttggccttgattatgttccagggtctttgctttgcccaaaattatttaatgtgctcaaattccctcacatctctttttttttcaatgatcctagaaatccttcgaatccttttttttttaaaattaagaaaaattcagatacgcagaaagctcctttaattcaaaacttggctttcttctttttgaagagctggggagcaaagtgcaacttttatttattaagagaatatgcatctagttaatcagattactcttattgggagggaggttggcagggacagaatcttgtgcacacaacgtattcatgtgctattgaatgactatcgtgtttattacgatggcctgaacagatggaagaaagaacacagtttttgtctttcatcctataatcttatgaaatacagaggatgcattattatgctgcctctgtttccccaatacaatctgtatttgagaagctgaagaaaaaaaaaactttagagacaaacaaattgaatcaaacatattaactatctaaaatgtactttttggccaggtgccgtggctcacacttgtaatcccagcactttgggaggccaaggtgggtggatcatttgaagtcaggagttcgagaccagtctggccaacatggtgaaaccccgtctctacta

SEQ ID NO: 53296 - DNA, 1034 bp, Homo sapiens
gcccagacatgactctaaaaaatatacctgtgcttaaattatttcactcattttcttcattaagggagggatctgatgtgtaaggtaactgcgttccaaaggttgttctgactagtatgaagtgaaaagccaaaaaagagattgtggcatgattaggaaatgagctcagtttgtttacaacccacgctgatgggaactgcctcctttgccttctctaggaatgggggacaagttgtccacatgacttccttggtgcctacaaactacagcatgacttgtcctggactccgtatgaggacattgagaagcaagatgctaaaatcagcatgatggacacgttgctaagccagtcagtggccctgcctccgtgcactgaacccaacttccagggactgactcactgagagtgggctttgacaaacagctctcacaggacctggctgtcaacctccttgttgcccccactgttgccttgagaattgaagacatgtaggtgactcacaaacttcttggaaagagaccctgtgtgaatgtaaatgctgtcattatgacttttaattgggatgggaataatcattgagacagagtcactgtctttcgggatcctctttggaccacagatacccaagtcagtcagtttcagagtattggccagtgtactttccttcttcctctccatcacttcttcccttaagttaaagtgttagagaagaccttcttcccataaaaaggttggtggatcgttttccagagagaactgttttcagtcttttatatatatatatatatatatataactggtagtatttaacattggggttgaggctgtctcacagttggtgcaactccagtttaaaattcatctgggaacgagaatgttgagtaatggagggtgatttaaaaaacaacaacaacaacaaaaaaaaaaacacttggcttggctggaccagagagtgtgtgattctgggatttctgtgctgttgatgaggtttgtcttgccccttttgctctctctgccttgctagagtgacaga

SEQ ID NO: 53297 - DNA, 1010 bp, Homo sapiens
ttttgagacagagtctcgctgtattgccaggcctgagtacagtggctcaatctcagcttaccgcaacctccgcctcctggttcaagtgattctcctgcctcagcctcctcagtagctgagattacaggcgcacgccaccatgcccagctaatttttttatttttagtagagacagggtttcaccatgttggccaggagggtctctatctcttgacctcatgatccacctgcctcagcctcccacagtgctggcgtttgagccaccatacctggcctgttggcagaatttcaattccacaagggttgctggcttccggggttccactagctgactgttggctggaggttgccctcacttccttgccacacgagcctctataacatggcagctttcttaagcaaagtaaacaaggattagagtctgctagccagatggaagttacagtctcatgtagtctgatcacagaagtgacatttcatcacctttgccgtaatcttttggttggaagcaagtcactaggctagcccatattcaagggagggagttatacaaaggcatgtataccagaaggcagacatcattgaatcattgaacagatcctagaatctatctgccacagtgctcagttgagaagaagaaaggaaaattctaggtaaaaaaggcaatattactaagtggttaagtgtgatgatgtcaaagtcacagatctgcacttgactgtcaactctgacaagacagcctcccagctggcatccctgcttccccctctgtcccctctccaatccattctgcatgcagtcatcagcttgatcatttgaaaatgccaaatctccctcactcttgacatttcctaacctaaagagtgggagagtagtgattgaaaagagagaaactgccttctgttcagtaagatgtactccctgcactgaccaccaaggggtgtcattgctctttcctggttaagccagttaccacacttgggaagggctagtggcaatgtgaggtgatt

SEQ ID NO: 53298 - DNA, 1004 bp, Homo sapiens
cacggacacgattggggatgggcggggccaggtggtttctccaccaatcagaggcgcattgttgggcccgacgaggggcgggctccaagactccaccaatcacaccctggcggttccaggcgctggcccttggggacgacctgggcgcctgcttgccaggcgatgcggtttactctggagggggtgacggtgacttgtgtatcgctgggcatccctggggacgtagctcacccgggttcctatcccgcgtaaggtgacgtctacggtttctgacgaaaaggggtaaatagataacgggactgttctccaggccaccatcttttcccagcagtgcttagttgtttcactgacagtgttatgagatctttcatttgaaatcttaggcgcaaaatctcctctccctggaagccttctggatcaggttttcccgggaacactacatcggcttgtatttcctccatcaaagcgctctccacgctgtaccggaattgagtgtctttccaccacattgggggcgggggcggggacgagggcgggggttgggggggtagggcagctgccgcaggaacaggactgagccattccttggtccccacttcccaccacagactctggtcaggattattgaatgaatgaagtagaatttagaagccaagaagttctgaaatctgaattcttacagtgcaattttaggtagacgatctgacaattcaggatgtatttaataatagggaaaggatatcattcttttctgtcaactacatttttaatgacccctttttcattctgtgatttttatttcataagtctcctacagttctggtccgtctgtccattgcaattgctgggcctactgctggccactcatcacctctcccaggatcactgcaactgccttctcactgatctctgtgcttcctgcttcctcctcattctccacactgcaatcgatgatcttcctaaaattcaaatctagttatgtctctctcctacttaaaaacctt

SEQ ID NO: 53299 - DNA, 7512 bp, Homo sapiens
ccccttggagcctggcctccatcagatgcctgctgacttgggacaggttgtgacagggcaggggaaaagatggctagaggctgagcacccacagcaatgggaaggaaggcaccaggaggcaggcccagcatatttgaataggtgggcatttctgggactgcaggctttggtttggcaagtgtgcctgcccacaccttcttcttctgctagacctcagtgggttggaagggatagggaggaccaacagcagtgatggaggctgcagaggctgcataccgctgtgtgtgcatgaacctgtggcatgcacacacacggaggggtgttgggatgggttgggttcacatggaattgagtttgagctgtaagtggtaggggatgaggggcatgtgagtttgtgactggctaaagcaggaatatttagattctatgagcacgggtatgtgtgtgtgatggtatacgtgcataagaagccgtttctgggtaactagggcctgcactctgctatacgtgtggctgggtgggtctggccagtcccatggcactgagagtgtggtgagtgtgctcaggcagaacgggtgctgcctgcctaccacatccgtgggagctggccagggtgggggcagggctggtgggcagggctgccctaggacgggcgtttccagttcctggaactgcttccttgtgtggaacctttccccatacctcctagctgggcccttgggagaggggaggaggccgtgggtccttcaagggggtgctcgcaggccagacacaagggagctaggcctggggaacagaaagccacagcgtgagtctttcaagcacttctgaagggtgacatgtgtgagtttgtcacaccaggccctcagtgcggtcagggagtctgtacttcctggatggcggaacctgtctgtcaagccctgcttcctccccagcaaggggttggggggagggcctgatggcaggagatgggcccctggggctttgagacatggtgaggagaaaaggggcaagtgggaagacccttttccttctgtatttctctttttttttttttttttttgagacatagagtctcactctgtcactcaggctgaagtgcagtggcacagtcttggctcactgcaaactccgtgtcctgggtttaagcaattctgccttagcctcccgtgtagctgggattacatgcttgcgccaccacgtccagctaattttttttttatttttagtagagatagggtttcaccatgttggtctggctggtctcgaactcctgatctccagtgatctgcttgccttgatctcccaaagtgctgggattacaggcgtgagccaccacacctggtcttgtacctctctgttctatgcctgaacttccaccactgatcacttgccatcatcccagcaagtcacactgagcctgtgaaaccacagggcactggaaaccacacgttaggggaagtgggagagttggcggggctctcagatgaactccaaccccttgtttctcgcctggggaaagtgaggcccacaaaaatagagggacttggctcaagaacatgcagtgaatctgtggcagagccaggccctggccctctcttagggaggggtgcaaggggaaaggaaaaggaagactgggtcctggcccctggcttgctcacccaggctgcatctccccctgcaggtgatcgaggagttctacaaccagacatgggtccaccgctatggggagagcatcctgcccaccacgctcaccacgctctggtccctctcagtggccatcttttctgttgggggcatgattggctccttctctgtgggccttttcgttaaccgctttggccggtaagtaggagaggtcctggcactgcccttggagggcccatgccctcctgcccagggagtcccagatggggtgggaggtaggggagacttatctgcctgttccagggtattacctctgacccagcccctcggagcccaaggaatgtgggcactggcctgacctgtgaccccgtccccaggcggaattcaatgctgatgatgaacctgctggccttcgtgtccgccgtgctcatgggcttctcgaaactgggcaagtcctttgagatgctgatcctgggccgcttcatcatcggtgtgtactgcggcctgaccacaggcttcgtgcccatgtatgtgggtgaagtgtcacccacagcccttcgtggggccctgggcaccctgcaccagctgggcatcgtcgtcggcatcctcatcgcccaggtaagctggggcaggatctacctgcctggcacggcccctgcccacagcttcagtggctctcggatctgtgcccagcagggcagagtttctcttccgcccagcccccacagccttgcagaggacaactatggtacacaggtccagagaacacagcaccatggcctcccagttgacagcaagatgacttgactcttctcagtccctttcttctcactctaggcttccaaccacagggcccgccttcccccaacatgccgcaggctgttatgcacagtaccctctctccaggaggcttccccttccctgtccccaaaaccctcttgtggcagagtagcagcccccattctctgtgctggacacatctgtggccttgtcatttgtcctcccagcaacactgtggggtaggtcctacttttcccatgtgaccgatgaggaaactgagaaacagggctcatgctagtggcagagcctctagaactggggcccttccctgaagcagcagctgacacaaagtagggaaggccactctggcaggacggggtgggaaagggggtcagggcagaggcgctcacggcccctgcttcccccaggtgttcggcctggactccatcatgggcaacaaggacctgtggcccctgctgctgagcatcatcttcatcccggccctgctgcagtgcatcgtgctgcccttctgccccgagagtccccgcttcctgctcatcaaccgcaacgaggagaaccgggccaagagtggtacgggcatggccctgccctcctccccactccctgagccctggccttcttcccactctgagccaccctcaccttccctccggtccccccagtgctaaagaagctgcgcgggacagctgacgtgacccatgacctgcaggagatgaaggaagagagtcggcagatgatgcgggagaagaaggtcaccatcctggagctgttccgctcccccgcctaccgccagcccatcctcatcgctgtggtgctgcagctgtcccagcagctgtctggcatcaacgctgtgagtgcccccacccacccttcctgtgccccagccaagccctctggtcaagtgtgcatggtgaacaagtcccaaacttgaaacaacagatacgcctctgccgaagaagtttccctttagaccccaagcccgtaaggtcactgcagtgcagtgtcccttctgcctgagtatttgtccccttcattctttactcatcctgggtcccacatccactgctacagaggcagggaagggccacaatgtccaggtaggccccaacagtttctcttgtctggcaggtcttctattactccacgagcatcttcgagaaggcgggggtgcagcagcctgtgtatgccaccattggctccggtatcgtcaacacggccttcactgtcgtgtcggtgagtctttgcttactggcccccccagccaaaccccagggaggaggcagtgccatcttccccactggtctttgcagtgccctgtgactttctcagctcttgaggcaaggcctctgggtgggtgggttcagaagggcactaggcaggggtggcactgacactgtctctgcccacagctgtttgtggtggagcgagcaggccggcggaccctgcacctcataggcctcgctggcatggcgggttgtgccatactcatgaccatcgcgctagcactgctggtgagttgctaggttctggagagtgagggatgcgggagagtttgcctgggcttcatatcccaaaatgcctgtctcagccccaggctggcaggccttttggtggctgcattctccctggctgtgggtctgactttctggctcctgaagttgtctccttccaaaccacacacatcctctcttgaacttgctcctccctgcttgatggattctcagcgcagcacctctggtcccagaccccaaactctcacctccttaaggaattgctttgcctaatattaaccctttccaatcttcatctgtagcctcaattcatcttcacagcaaccccgggaagtagtgctgtcctccccatagaggcgcagaaacatgccttgcctcattcagttcacacgactggaggtgtagttcagttcttcccattttatgggggaggaagcttaagtcccagtgaggttagtaacttgtcagataaaggatgaagccaggaatcaacctcagtcccaggcctgtgactgtgaccgctgtgctaaccctgtgcctggcactcacacacaggcactcgtttatttagcctctgggcaaggaaagcaccatgactgtcattttacagctcaacctgggcttggaaagtttggtggttgccgaaaggccagacaggcagcaagtggaaagcccataaattttctaccctggcctcctcaagaatggttatatgcagaaccgtatgcttagcgcttactctgtgccagcctgagctgggcacctcacacgccttagaacctgaatccaccccacccccaggaatgttctgcatcctgccacaggcggactgtgctgcaggcacagacaggggaccatggggcctcttagcaccgtccacatgcacaccacattaccactcccagcgggtggactcaacacttgcagccaccctgcaggacttaaatcattttgttcggatgaggaaacttaggcccaatgctggatacacaacaaatccaggaccatccccaggcttcctgccttctcgcatagctctgctctggcctctgtagcttctgtttcccctgaggatccatcacaacccagtctaacttttccccctctccgtcatcctcaacaggagcagctaccctggatgtcctatctgagcatcgtggccatctttggctttgtggccttctttgaagtgggtcctggccccatcccatggttcatcgtggctgaactcttcagccagggtccacgtccagctgccattgccgttgcaggcttctccaactggacctcaaatttcattgtgggcatgtgcttccagtatgtggaggtgagaacccccactgtctctatactcacccgcacgcatgaccccacagtgctgtgcaaagtgctggcccagcattctcattaggaatcatgctgaggaggaaactgagggtaggaagcccaggtcacatgaccaagaatgctgacctcaactccagggttctccccttagccttgaatggtgctcctggagcctgttacattctaggtacaagcgtggtctcagttaattatgatagcatccctgggtaggtggatgttcccttttcagctcaaaggcccaaaggtaaagtgacttatccaaagtcctacagccaggatgtagggtcatgactccaaccaagtgtgtctgtgtgtctttcagcaactgtgtggtccctacgtcttcatcatcttcactgtgctcctggttctgttcttcatcttcacctacttcaaagttcctgagactaaaggccggaccttcgatgagatcgcttccggcttccggcaggggggagccagccaaagtgacaagacacccgaggagctgttccatcccctgggggctgattcccaagtgtgagtcgccccagatcaccagcccggcctgctcccagcagccctaaggatctctcaggagcacaggcagctggatgagacttccaaacctgacagatgtcagccgagccgggcctggggctcctttctccagccagcaatgatgtccagaagaatattcaggacttaacggctccaggattttaacaaaagcaagactgttgctcaaatctattcagacaagcaacaggttttataatttttttattactgattttgttatttttatatcagcctgagtctcctgtgcccacatcccaggcttcaccctgaatggttccatgcctgagggtggagactaagccctgtcgagacacttgccttcttcacccagctaatctgtagggctggacctatgtcctaaggacacactaatcgaactatgaactacaaagcttctatcccaggaggtggctatggccacccgttctgctggcctggatctccccactctaggggtcaggctccattaggatttgccccttcccatctcttcctacccaaccactcaaattaatctttctttacctgagaccagttgggagcactggagtgcagggaggagaggggaagggccagtctgggctgccgggttctagtctcctttgcactgagggccacactattaccatgagaagagggcctgtgggagcctgcaaactcactgctcaagaagacatggagactcctgccctgttgtgtatagatgcaagatatttatatatatttttggttgtcaatattaaatacagacactaagttatagtatatctggacaagccaacttgtaaatacaccacctcactcctgttacttacctaaacagatataaatggctggtttttagaaacatggttttgaaatgcttgtggattgagggtaggaggtttggatgggagtgagacagaagtaagtggggttgcaaccactgcaacggcttagacttcgactcaggatccagtcccttacacgtacctctcatcagtgtcctcttgctcaaaaatctgtttgatccctgttacccagagaatatatacattctttatcttgacattcaaggcatttctatcacatatttgatagttggtgttcaaaaaaacactagttttgtgccagccgtgatgctcaggcttgaaatgcattattttgaatgtgaagtaaatactgtacctttattggacaggctcaaagaggttatgtgcctgaagtcgcacagtgaataagctaaaacacctgcttttaacaatggtaccatacaaccactactccattaactccacccacctcctgcacccctccccacacacacaaaatgaaccacgttctttgtatgggcccaatgagctgtcaagctgccctgtgttcatttcatttggaattgccccctctggttcctctgtatactactgcttcatctctaaagacagctcatcctcctccttcacccctgaatttccagagcacttcatctgctccttcatcacaagtccagttttctgccactagtctgaatttcatgagaagatgccgatttggttcctgtgggtcctcagcactattcagtacagtgcttgatgcacagcaggcactcagaaaatactggaggaaataaaacaccaaagatatt

SEQ ID NO: 53300 - DNA, 5135 bp, Homo sapiens
gccactgagaaaccatgaagtcctggcccaagggacagtgtcaggcatgtctgagaataaggcatcctcagaatccagagtttgggccagaaaggcctcagttgtttgacaaacaacactccttgtttgacaaaggaggaacctggtctgcagaggaggtgaggtctgcccaggatgacccagcttggtgagtgaaagagctggaggcaacacccgcctcccaacccaagccctgtgtcccgtcaggctgaactgggcttcgtgctctaggcagcctctccttctctctcctatatccaaagagttctagtcctctctccccttcacccgtcaccactaccataaacccttactgcttacttatagcttgcccaggcattgttatacatactctagaaatagtaattcagttgttcttcaaaataaccccattaggcagacaccataattttccctgctctataagaaactggggcacaggaatgttaagcaattaaagcaaggacacacagctagtaagtggcaaggctgcaatgtaactccggggagtctggccctagtctgtgcccttgaccattgtggaagatggacacagtcccagatgggcacctaaacaccctttcactcacctacaactgccacctagctggcagtgtgtggtctcactttggagctgagtcaagctcagtcatgtaccaacatctcaggtttcccacacacagttgcacaatctcttacaccatcacaccctgtcatatcacatcacccctcaagcccttcagttagattcatggcttgttggtcatttagtgtcaactctgcacctccaccaccgtgctgggcaccagcaacatggatgcatcagacagaccatctccgtgctgaggtttactgtacagggagcacacggtaccttacagttagtcttctaaaggcgatgatggaaatgcgagcaagcacagtgggagcagggaaggaagagggagagggtgcttcgcccttagagcagggtttctcagcttggcactgtgatgtttctgctggtgttgtagaggcctgtcccatgcattggaggatgtttatcagcatccttggcttctgccctctagataccagtagccagtgtggcaaccaaaaatgtctctgggcattggcagatgtcctatggggtaccaaagccgtctctgtttgagaaccagttgcagtggagtgggaggggtggttctcgggaggaaggctttccagaggagtatctgtgcatgttctgaaaggtgattaggcccaagcaaaggtgtgaggtgtctaggtcgtatgagggagtcactgcgtgtgccttgtgagtcatagttggggtagaggagacactttattgcaagagctgagaagggcttcgggtgtggccacggcagtgggatgattcctctgtctaccgggaggcctggcctggcctggccttggtttggaggctagccatgtcagggctgttccagggaagcagcctgggtggtccagccctctgcaggggggttggggcccagctctagccccaacctgggcctcttcccccaggccccaaagtgaggccccaggggacccagtgggcagggttatctgtccagccccacctggaacatctggctccaatctcccagctcaccctggggtgtggctgagagttgctgtggagatgaaggccctgggctgagagcttgtgggaagggcagtgtggggccagccccaactggaagacaggggcaggcaaggaacaggggtgaaggccaggctgagaggctaagccggagaagctggccctttcctccttgtaactggcgctgaaagcttggctggcagtttagccccttcttccccacaatagcatcccgtagagcacagggagagttgagaccgagcctaaacctggcccagggatccctgctggggatgacctaactgacctagtcctcctggggtaaaggaatgtctagagggaaggatggtgagaccagccagaggttccaaaacgcatacccctcctggcagtggtctagaatcctagatcaagggttggcaggagggccacatccagccagcagcctgtttttgtgcaacccatgagctaacaatggtttttacatttttacaaggttgagaaaaaaagaacaatgagtgacagaggccatatgtggctcacagaccctacctaatggattctagctagccttttacataaaatgtttaccccagtccggctctggagcactttgacttgcatgctccctacttacagggaactcaccacctgtaaggtgggcagcctcataccctgaagtctataaagctcttccttcccctgagctggagtctggccctggcacctctgccctctggggctacagagtgctgggttcctctgccaggagcagccgagcagggtctggagactagctttattccctgaggcaggcccgtagttccttcaggttcctccttactcttacattcttagggtaatgatttctggcaatttcaaaatggaaaaccttgtccctaaggctcctccgaaagtggtgacttcttttcttgagagagcaacagtgacagcagtaacagcttacccatgtgccaggcagtgttcgccgcctcatgcccctctacaaaggggaagtgagaagttccttggcagatgggcagacatgtagtctcacccacagttgcctcgactggcgggaggtggtgtggggattcccaggtgtccttaggcttgggcaggcctccccctcaccccaggagagccaccgggtgaggaatagcttcgcgtaccagaagccatccggttcaaaggatctcagctgcccagagtcaacctgcttctccagggtggtctccatggtgggtgtcctctaggctcagtgaggcacctggacagagatctgtagtagcccctcagctctaggctggccgacaccatggcagtccccccaggaactaaccagaaccgctcctccctcctcaacacgcttgccgccacccagactccacagctgggtgaagagactgggctgggaagggagcagagaagcgggtggatggccgagcctggcacatttggtgtgcaggactccgactgcattctgaggggtggttcactgtgggaaatggggtctgactttggtggataggaagagtcgggagcagaatccagatgagacccagggcaggctgcctgggtagagaagtaggacagactcggaggcagaatcgagaggacctggtgatggatggatgtggggtggtggcagcatcaagtgtttaaatcctaagcttgggacgggcatgtgaggtgggagcgttcagaacaggcacgtgccaggtctcacctcacacatgacccagggttgcggaggctgctgggagccggcgggattgggcctgtgggatcctgtcagggcataataagtagactcttctttcctgaggtgcacccagacacttctagggaggatgtgaccccagagcttttccccatgtagggttcttctcattctccagcatccccctgcctttcctgggccaagagtcagcgtggaaccccatacgaatccccagggaggagagggcacagagcaccggaaccagcagtaggaattggaaaaccaggcgtggcttcttcccagaaatctcaggcatcaagaggcagaaacccactccccagcctcagcttggccaggaagtgctgctgtgggctggagaggatgggtctaggccaaggtgaacatgcagagagctggctgctcacccttcctccaccccataaagtggtctgagtaacagagcagctaggcagcgtccaggagccagccctggacaaggttgggtccctttgactgtgtgaccacaggcaggagacgtaactcagggtggagctctggtcacacctcacttacacacagccctcttgtcagttgccccaacatctcaagagatcttcaagcttatttaggtagtttcaagccttacttagcacctatttactctttctttgtatacaattcaaacaaattccatttgctgacttcttggcaaatttcaaaagaggtgtggagagttgtacaagacaagcctctgaaccacagagggttgggggaataccttagaactatggaatgcagaaatttagccatcaggagccagtctgcacagggacaaacacctctccttgcccctggagagagccccaagggcagacaccattgccctgcagccctgcttgtaggtctggttgctcaggagagcaaagtgaaatctcttcacattttcaccccataatgggtcaggaaagattggaccctcagaagggcaagcgccatttatctggaccgttcccatatccaccctcattcagagcagcctgttcttggtggagcctgataaacggggcattaccgttcccaaccagtcctcctctggggttagtttcgtccacagaagaacactttgcattttgttactctgttttttgtcaaaatctgccttctgtctgcccccagcagaatcaaggggttctaagaggagagcctaacacctttggttcgattcctccatttcctcaccaggtatccctggcactggctctgggacagaccatggtgtgaatcaactgtcttcctcagggaagacaaactcctggagtcagggaaacctggatctcgaaaggtttcagcaataaggccaggggtaccttccaggcaggagtagtagcatctcaaaggcgtagaggggtgggagatggtgtgtagtgagtgcaaaggtgtggtaggtagggagattggattgatacctggcaggagccccgattttgagttacgggttgaaggcttggggagactctgttagtggtctgcacagccttcaggccaccagtgtgcagtggggtgattttagggatgatgacaccaagcactgtttcactgattccctgcagcactgtgaagcagctcctgctaatgtctgcactttagaaatggggccatggaaactcacagatgaaataacttgctcatggtcacactggaaataaggggtggagctaggacctgaatttagttgtgtccagaatcagagttcaggtttctatt

SEQ ID NO: 53301 - DNA, 2013 bp, Homo sapiens
attgctagaaaaagaccctaagtagaagaacaagagctggtatctctaaaaccaggagaggataccctcccaagacagagggataatgtaagccatcgaagggccagggtatttgtctggtttgtccacggccgtgtccttagtgcctagaacggtgcctgtcatagtaatagacactggtggatagtgagtggaggaaggccatcgggtaccccaggggttgaactgggcaagcctctccacattgctgaatgcagaagaggcgatggtggccttgtggccactcgggctgactgggtggcacagcgtggatagaagcctcactacgattgggtgaagagtgagaggcagatgagaaagggtggagacggctcttccaaaagagttggtgggagagggagaaaagaggaggtttggaatgatggtatggctaggaatttatttatttattttaatgaaggttatttttaaacatgttggaaggaatcagcaggagagggtgaagataaggaagtgagggcggaggtcttccaggagggagggtggtgtcggagcagaagggaggggctgcctttggccaggagggactgagatacctttttttttttttttttttttgagacggagtcttgctctgctgcccaggccagagtacagtggcatgatcttggctcactgcaacctccgcttcctgggttcaagtggttctcgtgcctcagctttccaagtagctgggctactggtacaggtgtgtaccaccacgcccagctaatttttgtgtttttagtagagatggggtttcaccaggttggtgaggctggtctcaaactcctgacctcaggcgatccacctgccttggcctcccaaagtgctgggattacaggtatgagccaccatgcccagccagggactgagagacttctgaagatgtagacaaatctgagatgaacttctgtgatccccggggcctcccatctaatcagaaataggcaagaggttataactgtcatggaatatgggcagaacctctgaccagggcatcacggggctggtcagcagcacagagggcccagatgagcctgtaaactgcattcataggaccatgtatggtcacctgtccaaaggtcacttcaggaaccagccccagcagaccgaagctggagatgtgagtggccagaactgagaacgctgaaatctagcggtgtttcttgggcaagcacccagacacttggtctgttgacttttgtactttacaaacacttctcacaaggctggctgtagtttttccaaccaggagccagattagaagtgatacatgtaacatgtgaagagaggacagaaggacccaagaagaagaaatgaaagtgaggctcagagcccatgtgtagtaacagggcagagagactcctgtgcccgcgtaggctgaaggcctgccctagggcgacacagagattccatctggccaaccctttcattcagccaggacttcctgagcatccacgctgtgccagatgcggtcctagacagtaaggagagagaagtatagctgtgaacacagcaggcacatgctggccctcagggagctgcctgagacacagtctgagccaggccctgtctccacagcagtgggagagaccccttggagaaagccagagtgtcactaacagagggcttcaaggtgctgtgagagcaaacggggcaactaatgctggggctggggtgacaggggagattaaaaaaagggcttcacgaaggacttggcagccatgctcgaccttgaagggttagttgacctcatagggcaggaggggcaggtgtctgggcagtgagaggggcttctgcagaggtgcaggggtgtgaaatgttctgctgatgcggaattgctaactgcctgcagtgggcacactgacttcccttgtctgtttagaagaacctctcttaggaaacagcattgggttggccacagtttgcctactcttgagaagagactttgccccacaagtggtgaggatg

SEQ ID NO: 53302 - DNA, 1042 bp, Homo sapiens
agctgcaggggaggtgacaggacttttccaagtttgctgggcatggagaccgtgggcccatgcttggaccagccccaagccctgcatttgctaagtgctcttgacagctcttgccaaagtgtgtgcttcagaactggctccctttgggaatccttacagatggaaagtctgtaagacaggctgggaggaaacagagggaggttgagctctccacttggttgcacattggggtttccagaacgcccccagattctgatttaattggtctgggatgctgtttgggcattcaattaaaagcttcccaaccaattcgaatgtgcagccaaggttgacagctactggatttaatgatgtcttgactgtgatctcatagtgagttaatgacagaactaggactctaaggccaggacagaggaggtgttttccagaaacagaacagggttggggtgagcagggggccttcaaagcaaaatgcccagaagacagaaagcctggcattcagtaaagcgtgagtagtttagtgtgtcactagagtgaacaggaggaggggaaaggttggggaggtcaacaaggtaaggtaggcaagagccagaccacaaagggccttgtgagtatggcacggcacagtcagaaggggcggatgggcaccagcacgggggcccagctagggagcatggacttcaggatgaggacaatagggacccactgcccagggcagacgtgatcagacttgcattgtagggaaatgactcaggcgtctggtatggaggggcggacttaagaatgtgagactagagacgggaaaccatcaagaaagttgccgttggactagtgacataaaagcaaaccctcagaggaagaatggacaggatttggtcatcaattccgtgcgagggcaacagagaagggtttaaaaatggtttctaggtttctggcatgggtgatgtgtggtttgaagaaggagcaggtgtgccaggagctgagaggtggccgtgggatgtgcaggaatggaggcgtggggtgacacagctggagatgtgca

SEQ ID NO: 53303 - DNA, 2283 bp, Homo sapiens
ctaatgggaaggaaggatgcagcgcacacacagagggggctctgagctgcacactcctcctgggccgaagccttcttcctctttcgcagcctctgatgtgagagccttggcttttgcagtcgttgccctgactgacgctttcagagaatgaaaagaccatactgggaatatgcctggtaacagctatgcccagggctatctgtgatgatcttgaagtaaaggctgcttctgggttctgtggaaaccaaggcccagagacccacagccaggccatggccagctccacccacttccagggcccagcttggtatagtgtgcgtagtgaatgccagtcgtttctttggcatgcctcccgcagccctgttctcccacaatcagttaaaggcctgcctaatgtcacatttcctgacttcctcatttttatagctgaaaagagcacttttcttcagcagggctgacaccctgctggcctctcagtcacctgtggctaagcagggctcttcacctgctggcctctgcccttcctgctgccttaggtcctcggcttccaatggacagaagcaaactgctctttttctctcccatccctttgcccattggaaacaccttagccccacactcttactcaccttgtgcacttttccaaagtgcattcccgcctagcatgtcgtctatgtccatataaccttgggaggcttatggtttggggattattgccgtgaggagcactgggtaaggagtccggagccctgagctctgctgcaggctcctgagtgatctggaacttgcctcaccctctcagggctcagtttcctgccctgtgaacagcaggaagggtagggcaaggtgggatcacatctccaatgtgacaaacgaagctgttgccattttgctgacaagcaaatggaggataggggagaggtggtacatgggggacttagcctgctggaattcacagagcaaacaggcagatgggctggaatcagaagccagcggcttcagctccaaatccagggtgcttctcctatctatatctgtgctattcctaccaagtaatttgggccccctcgcataggagggctggttcctgggcctcccagtcagagagtctagaaccaccagaccctaggcatggctccaccagggaaatgagacccccaagaatccaaagcctctccctctctgagacctggctacagagagagaagatcatacttcccctctctccccaggaaatggcccggccagcccagtatcttgaagtcagctaggctggtttgggcacctaaggtcaggaattggccaagtttcctgggagaaagactggtgtggtgccaagagtcaggcaagatatctgaacacagaaacttgccagtccaggccctgccctgtagtaacctgctcccagacacgcctataacagtgtggtttgtttctccgcagaagctgacgggtcgcctcatgctggccgtgggaggagcagtgcttggctccctgcagtttggctacaacactggagtcatcaatgccccccagaaggtgagtactgtgccatcgttggcttatggacaccagcctgctctgttgcacatcacacatgcccacagtctcacgccaccacctgaattagagtcatttatatgaacgcactgtactgtctgcctctccagccagttttctggccctgatcatgtcagagactcttctcttgctttggaatcagggtggcagaattctagaatctcaggtcccacagaatcctggggtcttgtataggccctcttgaccaaccccccacccaactcagtcatttaataatatgtttgatgatataataaactcaaagcaaagctcaatacaataatgctgcatttccgtggcattctggggctgcagagggttttcatgggcttgtctcacttgatgctcactgcagcactgtcaggaggcagcaggcaccactcccagcctgcaggtgtgggaaacggccagagagaggaaacccgcccaatatcacccagctaagtcagagacagagctggtatccaacacctgcctgccaggtggtccttgagcctgcactcatacccatccacaggcagcacacttcctttatttgtaggttgaaaccgcgtcctctccctgaaggccctgtggcagtcaaagcagaaatggcgtcttgccctagggagccacagggggtgaaggtctgtgctggcttcctcctccctgccgtgcatcctagatctgtcctcacttgtttacttgaatgtcaggatggga

SEQ ID NO: 53304 - DNA, 1049 bp, Homo sapiens
tgtgtgtaattttagtagagacctggtttcaccatattgcccaggcaggtcttgaactcctgagctcaaatgatccgcccaccttggcctcccaaagttctgggatcaccgcgtcctgcccctggttctattcttaaggagttcccaaactgagtggcagatgggtaataagctagagactgcagaggacatagcaagagcaaaggcctggaagagaatggaatgttctagaaagtagtctcatccccagggagtgctgatgggctgctggggatcccagactctgggctgtacattgctccccaccagtaaaaaaggctcccacaagaaaatcacaagctctatggggctagtacccttctctaagtcatcaccaactgttcatcagcttgacaccagaataaataaatacacgttgagtgaatggacttcattgccatgttccagttctagccactggctggtgggggcagatggtgctgaggctgcccgatcgagggtagcttgctattcttcaccgatccagcaaacacttgtggagggaattctgccaggcttcatgatggatactgatagaaaacgtaacagcaaccctttaaggaaggaactttcatccccgttttctaggtgaggaaaccaaggcccagagcagggctgccttgtatccaactccaaggtgaaaggaggcagcttgctgcatttaaacgtgggtctgcttccaagcccagcaatgatcaagccggctatagtgggcgcagcagagtggcagcatgaatctgagattggtcgcagtgtcttgtgcctactgaggagcaggggccatgtccctccccctacacctagcactgagccacactgagcacgctgtttcttaatctgactggtccccatttcttctccttgcacatactgttctgtccacctggaatgtagccttgccactgctttcccacttggcagactctctgtgtgtccttcacagcccagctccaatgtcacctcctgggaactcatctttttttgtacccaggcaaaactggaaatctttc

SEQ ID NO: 53305 - DNA, 2275 bp, Homo sapiens
actcgctgatcgactgcatcagcctctacgggaatctcctccagccaagcgctaggctgagtgtgggcctgagtggcccggcagccagctatgtcatcagcactgtgggggacacagtgctgcctagaagcccgggctatttgtgggcttgatcctgatcctcattttcactgcatggtctcattctctccacaaagtagcctttgagcccaccagccacagaatgtgatataaagatcacccctgcttattccagaatgaacagcctgagacacatatcccttcagtagttggtcttgtgaatgcagtgtcctagtgcaaatgcccatcatctgttgaccccatccttgcccctgcctgccccatgctgtggatatctgggccccctcatcacccatcctggccccctgaccagtgaggatgccccctcccatctagggtactctgcgtctaaggatgaattccagtgtaattttctctcttctgtaggtttatttatggaagattggacctgttcatacatctgtggggcagccctccatctcccagctatataaagtctctaaccacagtgttgcattgtggggttaccatgtggtctgacacttccttgcatgaactaccctcactccagccctggacagtccagggcctagcaggcagtgtgtggggcctaccaggtcctggcatccaagctgtgtccaataaagttcttagatgtgactggaaaaaaaattggattaaaaaaaagcttcagaagttacagagccaactacagagaagcataataaatgaaagagtgtcttctagttttgacagtttggtgtttaccctaaagacttctctttgtgcatgtgtagatacatgcctataaatagaatatttgtgtagttggatcccactttctgcatagttctttgcaacccattctgttcaccaaaccaacccttagaggtaaatactggcagtgtttctctctgcacatacaaccaagtgccactatacaagttcactaactccctgttccttacacaatatgtacatcctattgctttttttcccccctgaacaatctaccctggtactcttcataacacatacatgttatgtgaaacacagatgtgtttcattctttccaatagctgcataatacttcattacaggcatgtcccaccatgattaagaaatagcagccccatcaccttcttcataccactcaccacctgatgtattacatgtatttattttctgccccagccttcaactaacctatcaagttccataggcagggatttggtatagttttatcgctgaatttccattgactagaagagtgttgggagcatgcattcaggcataatctttccttagcaatatcatttattcatagaagatcctctcttatggagaattaactgaagcttagaggaagagacttttttttgagacggagtttcactcttgttgcccaagctggagtgcaatggcgcgatctcggctcactgcaacctctgcctcccgggttcaagtgattctcctgcctcagcctcccgagtagttgggattacaggcgcgcgccccccacgcccagctaatttttcgtatttttagtagagacggggtttcaccatgttggtcaggctggtcttgaactcctgacctcaggtgatccgcccacctcagcctcccaaagtgctggaattacaggcgtgagccaccatgcccagccaggaaaggacttttttaaggtcacacaagtggaggagctgggacttaaatgtgtctgctgagagtgacagtgaactttgcatgtgcccaatcttaccaaattaatgttctcttagttgaattattgcccatctcaccaccaaatgtgtatcttctcaggggtgtcagtttccccagggtccagatcctggccccacacccacacatggccaaggagccatttacatttaacattccataataggatgcataccttttcggttatttagggaggatgtggttttgcctggaaggctttgagaatgctgggcagctagctcaggggacgtggggcttaaagcagaggccgatcaacttttttctaaagggccagatagagcgtaaatattgtcagctttgttggacatgtagttctcggcctgccactcagctttgctgttgcagtacaaaagcagctgtagacaaatgagtgtggctgtgttccaataaaactttattcatggtcactgaaatgtgaatttaatataattcttacatatcacaaaat

SEQ ID NO: 53306 - DNA, 1873 bp, Homo sapiens
aaaagaatgtacgtctctgtccccatagatgctccataaatatttcttgcttccttggactcccatgatgccttacctgggctgtgggtgacttgtacctgggccttggcctttatccaaaagctggcattctggcagtatgagcttttggggagtcaggatgctggcccatgggtattaagtcaggtaaatcattaaagctcccactaacccattcttcctagtaggggcttgttgggaagtgagtaggcatggcacatgggtgagagtgccaggccagggagggtcagctcatgtgagtgccctgcgctgctttgggcttctttgctttgcttttttgccttaggcttcctgcctacctttctgaatttgggtcacccttgggatagtttgaaagggacattcatgtccattaactccaagggtcctcacaactgccctgtgatacaagttacagtgacctcatggtccaataaaaaatgactttgccaagatcacacactgagcctcccaccccaagacatgctgccagcctttccaggatgacattagagggtggaaggaacccagagcaggaggggccttccagccatggcccagccctccatttgacaaatggggaaattgagtccagagaagggaagagatttgtccgagataaggctatcacaaaagatttgaggcgttctatggagctgtgttttgttttgatttttgagacggagtttcgctcttgttgcccaggctggagtgccatgacacaatctcagctcaccacaaccttcgcctcccaggttctagtggttctcctgcctcagcctcccgagtagctgggattacaggcatgtgccaccatgcccggctaatttttttgtatttttttttagtagagatggggtttcttcatgttggtcaagctggtctcgaactccagacctcaggtgatccgcccacctcggcctcccaaagtgctgggattacaggtgtgagccaccgcgcctggcctagctgtgttttttttttaaagatgctttcttctccacatgcctgtctgtgccatcctccacccaccccaaatgagcaggaatccccagacacaggacttgccatgccataggagcctgaaagttggattagacgtaacttgacaactgaaactctactgtgaatggaaacaaaacactagatgttcccactaaactctgaccttgaagaagtggctttccttggagccttggtttccttctcagtaaatagagacttggctacccccagtggatgtggtgagactggccccgtgccctaaattagagaagtggctattttaagtggaaagaccctttgtaaggccagtctgggtgtacaaatgatgtaaacagccccaagatgatccttgtctagtaccgagccatccagggattcgaccctatttgccccggagctgggccagcctcaaatcccccgtaatcagcttgtgacttcaaggagctcagctttgcccagtgcctcctggtcacggggtgtcggcccagagctctgctcaagtaccaagggtacagccatccagctccctgcttccccaagactggcaaagctggggaggcctggaacaaagaggaaagtgtgcagtgttggcttggggcctgcaacctcaccccttcccccacctcactcctgggcataaaggtgataaagccgctcactcagtctgcagtctggtaaccgacgtccccatgatggcggaggctgggaggcctcctgaccagattcatgggctcagagaggctgtgtccaggcctgcaggcccagccctggctaccctaacaagcctccaattgttacctctctccacgggaggggtggactggagcct

SEQ ID NO: 53307 - DNA, 1136 bp, Homo sapiens
cctttgcgaggagtgcaggccccaaagctttggcccagtctcgcggagatgtgttccgcggaggcaggtttaccctcggggccaggcggggagcgcaaccggaggggcgggggatctgggggccaggaaagagccccaggctgaagtctagcgggaagcgcgcacgccacggggttggggaatgagggatggggactctggggaccaacaactccctagataggatttctttttttctgtgtaagtgggcttgtcctgcagggcatctttgtagcgtccgcagagcgatttcttttcaacaaattgtttgtggagcccctcctgtgtgtagggcattgtttctttccacctcctttcctccccctagtctacaatattttcaagtcccctttttcttttgaaacggtccctctttatctattatactttgatttttccatctcgtcagctgggagggcacctggatggcccttgttttcttagctgggacgcgggggtagcactgaattttgaactgcccttcctactggctgtggaggtgtcccgctgagactgagcggggtggcgctgggccgcaccctcggcaggaaaaggccttccgccccacacctgttgaatccataaatccagacgacttggttcacccttcctgggccctcgcttgaggtgagaccccggggaagttcccggggaaggctcccaggatcttaggtgagccgtaagggtgggatataactaaacaaaagttcagtgagaagctcttctagctagtggcaaggaagtccaaatatctcagggctcttgcaggccacttaacttctgggcctcagtttttccatctgaaagagatcacttttgtcacttcctctagggaaggaactatctattcagcatactatgccagacatgggtatttatttgttgagtggataagggaatactacgtggagacagaaaagtggaggagaaaatcagcaggttcttagccaaactactttaagcgtcacggaccttatagccctgctggttactcactagcctggagctcagagaagggaaataagtttgccaaagtcacacagctagtaagtggttgaactggatttgaacccaggcccatcagatttaatttcatt

SEQ ID NO: 53308 - DNA, 1238 bp, Homo sapiens
ctttccatgcagtagacgctgttctaaacactttacaaatattaactcacttggtctttctacaaccctacgaggtggtactgttactatccctagtgcaccgaagtcacccagcggccgagtgagaactccagtccagctttccacccgctactccgcgcatcccagcttgccttacagccgggtaccggctccaccattttgctagagaaggccgcggaggctcagagaggtgcgcacacttgccctgagtcacacagcgaatgccctccgcggtcccaacgcagagagaacgagccgatcggcagcctgagcgaggcagtggttagggggggccccggccccggccactcccctcaccccctccccgcagagcgccgcccaggacaggctgggccccaggccccgccccgaggtcctgcccacacacccctgacacaccggcgtcgccagccaatggccggggtcctataaacgctacggtccgcgcgctctctggcaagaggcaagaggtagcaacagcgagcgtgccggtcgctagtcgcgggtccccgagtgagcacgccagggagcaggagaccaaacgacgggggtcggagtcagagtcgcagtgggagtccccggaccggagcacgagcctgagcgggagagcgccgctcgcacgcccgtcgccacccgcgtacccggcgcagccagagccaccagcgcagcgctgccatggagcccagcagcaaggtgagtcgcgcgcccgcgggccctcccgccaggaacaaaggcgcagactcctgcccgccttacgccggccagggcctcccccgccgccccgctgcgctgtgcgcccggggcgggccgcgcgcctctccgagcctggctcggtgcgggtcccgagcgcagcgccccgccgggccgctggccgcagtggggatgggcttcggatctagcgggccggagggcgccgcgtgcgtagttggcgccggcactgagcacatggcctccttccgggggcgccgcgccgtccacgcggccctgctggggctggggacacagggcccgggagcggcacgtcgcacacgacctcggcagcagcagcccagcctcggcccctcccggtgcgggggagggggcccgagcgcggcgcccattggctgagcgggccgagcccccggcccggccccggccccggcgcgcggaggagtcaggagccgcccccgctctccgtctgctcccctagcccggac

SEQ ID NO: 53309 - DNA, 1036 bp, Homo sapiens
cccctgctatcccctcttgtaccaattgtagctgactcagcaaaacctttcctcctggctgccagggacgcttgcctttaaaggcaacagagtcttttcccagcccgccttactcactcctaactctggagctgctaggacccgccctgcacggccctgccaccaccaccatcaccaccaccacccctcccccacccacttgcgtgctctgaggcacacactaggctccagcatccgcctggcacctgacacctccctgctagccagtcccagagagctcttttcctccagactagctggggctggaactgcttagaatcggacccagaagaggccgagttccgtccaggactaaaggcagcctccagggaataaagctgtcagtgtgggcgcagactagggaaggggcactaggtcgttcaagctgaatgctggggttccacagcctcctcacaccccctttagtgcctcaggtagagtaggcttgtggggacactgaggtttcctcaggtcctttccctgctcaataactctccatggctcgccactacccactgcataaagccctaactcctatacctggcatttgggagcctctgtgattccacttcttcagtctcttctcctccctaagcccccatgccccagccacaggggctacttaggtgcccctcctgctcccctttccccttgcacccaaaccttctctgctcatgtgctatttcctggggccttctctagggctcattccctagttggagttaaattctgcttccaaggaatcagccacccaaataacaaaccagtccacctgagaatctagtctgtgatgcagcgtcaatagcttctgatgaatttgcttctgaccagtagcctccaggggtcataaaacattcacagagaggaacacagagaaggtaatgggggtctgtgtgtgggcaggtggggtggggtgggtgaaggaaaagcttttttttggccactgtgctttttcctcaagcaccgccctaccatgggatggggatttgactgaact

SEQ ID NO: 53310 - DNA, 1024 bp, Homo sapiens
tctctgaatgtctgcatgtgtatgtgttcacatgcatgtgtgtgcacgcaggtgtgtgtgcgtgtgtgtgtgtgtgtcaatgggagaagacaaggggtggcatcttctttctctgttaagtagaaggtggtgtcatctctaagaataacggcagaggggtacaggtttgaggagtggtgaagttttttaagatgccaatggatagtggttgattactgagcagtgtccaaggcccattcgaagtgagggtcctggagctatggggaagcctctggctgtggtgggactgtctcagcagcatttggcttgccagggacaggcatgggaggatgcagaagggggggagtttgcttgaccagtgagatgaagacacagggaagagaactcatagcattgaaaagaccgttactgagacactgcacctccacgctgagctgtgataaggaaggacatgaggaagaagagggtgatgggctggaagaaagtagagggccagtggctggaggggcctgtgtcgtcagagagcacaagcggagggattcatgcagttggtgagtgggaagaggagaggctgtgggcagctggcgaggtgtgggagttagagttttagagctggagtggttctggctgtcagcagggtccacggtgatgctgtgggaggtgactgatgaccaatgggagaatgagtgaatcgatttgtgtggtcacctgagccattttctttctccagttagcccagcagcctgtctgtttctcatcctttggtttacagcaactttgcccccaactccacgacttcctcagtcttcttgtttttttgagacagggtctcagctggagtgcagtggtgtgaatatggctcactgcagcctcgatctcctgggctccagcgatcctcccacctcagcctcccaagcagctggggccacaggcacacaacactacgcttggttaattttctaattttttgacggggtctcactttgttgttcaggcagttcccgaactcatgggctcaagcgat

SEQ ID NO: 53311 - DNA, 1036 bp, Homo sapiens
ccctttccttcttcctttagcccaacaggaaggagttgttgctgtttgcttcaggaagcagctcatacaaagagacagttccacaccttaccacggcccctcctttcccctcccttccacatagtgaaagtaggaggaataatgattaatcaggacagtacttcctgagtgtttattattatgtgctaaggacttttcataggttgctccccaagtgaatcttcacaacagcctttaaggttggcagctactgttgttcctattctacagaagagactgaggttcagaatggatgagtagtttacttaaagtcttacagagaaggggaactaaactggactccagtctgtctgattaaagagcccttgatcttaatcattatcacagactgcaaagtaaatgttagtaccagggacaccgtgggcagagggacctggaatgatatggcttcaggaggagtgtagttggagggaagaaagagtacggaagtcacatctgagatgtggttctgggttgtgtcttgtccctggtttcctgtatgactttgggcagattatttcacctctctgtgccttgagagacttcgtttgtgcaacagggatgaggctaagaggccccacagccaactctgggccatgcgaagtgtgaggatggcagcaggaggaaaataggcaggagggtaggggctctgagtactgagggagctctcaggacccacctgggccctgctgctagttctatggccttaactctctgttaagagcatttatctaaagggaaggtcatctctaccaaagttgcaataaaaacaactctgagggaaaaaagtatatatgaaatatttattttttctttttctttttcagatggggtctcactctgtcacctgggctggagggcagtggtgcagtcttggctgactgcagccttgacctcctcagctcaagcaatcctcccacctcaacctcctgagtagctgggattacaggtgcacatcaccacgcccagctattttttgtatttttagtagagacag

SEQ ID NO: 53312 - DNA, 1055 bp, Homo sapiens
gcccctctgggcctgcctggttctccaggtttccaggtccaggcctcggtgaggacacatggatggaggcccaggtgggcagaggacgggaaaggggcacaatgccaccggacagactgctcccaccctggcccctaggtccccccggccctactccaagtggcgtgggggcctggcctgagatcagaggtccacccgcgtcagcccggcccctgctcgcgtcaggaggcgccttctcagtgcagaacaatgccggctctttgaagggctgggcagcaggggatgggtgtttctccaaacacagggcctcctttgcaaaacaggctttgattcccaggcccggaggccccaggtgcctgttgggcggcaggcggaggctgggggctttgtttggcaggaagaggggcctcgaagactcaggaacaaagcctgggacagagctggacaaggctacagcccagccttgggcaggcgggtcagggctgagatgccagtgggggcgcggctccgcatgtatcagcccccaccccctcctcagtctggcccactcagggtggccctggactcctctctccgtggatcctggctctctcacttatgcagcaggaactgttggatttccaggctgtcatgatggtccacaggctccacaaatccctgcttggggatgaagtgaataaaactggagtccaggactttggatccaggcggcagggaggaaggaggcctgaacgagaatccaccagcctgtgctctgggcttaggtcactaagaggaatgaaggctgccactttctgccaaataccatgctcattactttacacacacgtgtctctgatttaatcctcattttcccaggcaacaatgatctgcagggcaccctaggtcctttctggactcatctcatatactctcccctttactcactgctgtcagccaccccggcctcctcacagcaaagactcaagtttgcggaaagactgaggcagcctcaacactgcaacatagaaactctgcgtgagttgtgcacctgctggcttgccctgtcgccttca

SEQ ID NO: 53313 - DNA, 1566 bp, Homo sapiens
ataggtgagctagatgagtttgtctagagaggctgtagcataggattgtggggccaaggatgagattctgggttacagacgtgcctaaggggctttgcttatagaaaggaaactgagagcattgctgggccatcaggttcatcaggctttacagtgctgtagtgatgtctaggaccattcttttccaggcccagtgctaaacgacggtataaaaaccagaagtttggttttggtggaaagaagaaaggctcaaagtggaacactcgggagagctatgatgatgtatctagcttccgggccaagacagctcatggcagaggcctcaagaggcctggcaagaaagggtcaaatgtaagtgagcccaggtgcccgggtgaggagcaggctcagcctcccctcccactcccaaccctgccctctcccttcagttctgttcgtcctcaccctggggcagaaggcaagctgctatgtgaccagatgtggtatgtctttttctgtagaagagacctggaaaacgaacaagagagaagatgaagaacagaacacactaaatagcatctttgaatacaaagaaccaagaaaaaggaatgaagactcgcaatttcacgacacactttgatcccttctgttggtgtcatgttgtaaacatttctttcaataaactaaagaaaaattattaaaggaacacatacctttggttaaatagtctagactaaaagattgagaagttactttccattgctatctattgataatttagacattgagttcaaattgccttcattttatgataaataatgatttaactgacaccttctcatttcctttgtctcatccttctaaatagttatattacgatcaatccctgtaaagctcaatgcccatattttacaggtgtgagccaccgtgattttctttgtggtacagcttttggtttttcctccagttaaccttcaccttacattcttctgcttgcctaattttccttctatattcttagttctttccagatgctttgtcattttacccactttataatttttctcctacaacctagttatgccacacaactgtcaccttttttctagaccgtttaagttggcaccattatttccagaatcccatgttttcccatcttagcatatgccttcttttgctgtgtaccattttttggtatcttactaagaaagggaagatgagaggtaaactttttatctccttgcatttctgaaattgcctttaatttgggctgataggaatttcctccttagaattttagaatttcgcaggcactgtttttaagttttatttcagttctacttttggggggagatatatttttgttttttaaaatctttttttttttttttttttttttttgagacacagtctcactccatcgcccaggctggagtgcagtgatacaatcttggctcactgcaacctccacttcccaggttcaagtgattctgcctaagcctcctgagtagctgggattacaggcgtgcgccaccacacccagctaatttttgtatttttagtagagacagggtttcaccacgttgg

SEQ ID NO: 53314 - DNA, 1261 bp, Homo sapiens
ttcatctatgaagaatatacctagatctgagaatatacttagagtccctaacacagtttttggcacgtagtaaatgtcagagggtagtggtattaatcatggtgttgctattaagacaatgtagacactggagtaatggtatggaatggctgtaacggtccttgtgttcatatcacaggtgcaaacggaggttcttcagaagaggcagcaggagaaagcccatatgatgaatgctattaagaaatatcagaaaggttggtacatctctaataggggaacgagggtagcaggtactttagagttgatttgaacacttagtgctttggagccttcttggttgatgtggacctgtcggatcaaagttttgggaatggtgttggagagcaggatgtgactcttaaaatcagtgtagcaaataacagcctcatatggtggtttaaacttttattcttaaaatacaatggtgctgatcaaaactacttcttcacttacaggcttctctgataaactggatttccttgagggagatcagaaacctctggcacagcgcaagaaggcaggagccaaaggccagcagatgaggaaggggtgagaagggttttggcatggtttctttggttctgtgaggtgcgatggggccacaggtcacgagtatggcagacatagcacctccaccggcgcagccatagagtccagagagtgcagctgctgcctggggccaggacccctatgactgtgtgatgggcccttttagccatgtcagtctttgaagagtaaaagaaggcactttttaaacttcttttttttttggacagtctcattctgtcactcaggctacagtgcactggtacagtcttggctcactgcaacctctgccacctgggctcaagtaattctgtgcctcagcctcctgagtagctggaactacaggtgcctgccatcacacccagctaatttttgtatttgtagtagagacagggtttcaccatgttggccaggctggttgtgaactcctggcctcaagtgattcactcacctcagcctcccaaagtgctgggattataggtgtgaaccactgcacccatcctaagaaggtacttttaagtatgtggcaccctttaagtgaatgctgagtaaagttgattccccatcacacagtgcgatggttgagagttcagacctagggttcagatcccgactctaccactcagtaggagggcagttttgaacgagttaccatgcctttctaaatgctaattgc

SEQ ID NO: 53315 - DNA, 1076 bp, Homo sapiens
cacagtagagttcgcactcctatgagaatttaacgccaccaccaatctgacaggaggtggagctcaggtggtaatgcttgcttgcctgtcactcactttctgctgtgcggcctggttcctaacaggccacagattcatagtgggttcgtagcggtctgtggcctgggagttgaggtcctctgactttaaaggatactggaggcgagtgtaggttatatgcaaatgctgcaccatttttatataaaggacttgagcatctgtggattttgatatctgtagtgggtcctagaactaatcctctatggatactgagggataagtatatttaaatagtaccctggggtctcaagctggattttagggagcttttgtcgtggtagtagttcaccttcttactgtgaactctgtacaaattctcactgacaacttctcatcctttaactaaaatgtgtatgtttgactgaaaaggctaggcacctggtatctgcctgggtttttattgtgtatgtggtatactagaaaaggacactgaggccgcatactggtttccagcctcagtctactgacagtagaaatggggagaagtttgtcttctttcctgggctacaaataggcagtttgtataatgaaacagacagcacactgggagcgggaaggtgactttcaatctctggcttcactctggcacttttggtaaagtgctcagcctgtgggccccattgtcctcaggggttggaactgatgatttataagttccgcagtttaaagaacagggaatatctgttccctgctctagcgaatcctaagtagtggtcattccagattcaaatgacatgaactgacagcattttgtgttgtagattcgacagaagctgcagactaaacaggctgccatggagaggtctgaaaaagctaagcaactgcgagcacttaggaaatacgggaagaaggtgagaagaaaagtgtgcagggaacaggaagaggcggagtgtgtgttagatgagattgccgtggtctgacttggtcccctgaactgaacggaactgtgtgttgatcatgtatttaccgtctctcag

SEQ ID NO: 53316 - DNA, 1104 bp, Homo sapiens
cctcagggagcttagagtctgatggacagggagctctggcagggagtcagtctggtagggagtcagtccagcagggagccagtccagcaaggagctcactgccagccagccatagtggaaagggcagcagcccagagaatgtgggagcccagaggatgcccctgggcagactgagcaggtcagagaagggtctggaagcaggtgtgatctgagattagatatgaaggacaaaagagagataactgaggaaagaacaagagcaaagacccagggattggggactcaggtttgggtgccaggacagtggagtaggggacccagggattggggactcaggtttgggtgccaggacagtggagtaggggacccagggattggggactcaggtttgggtgccaggacagtggggtaggggacccagggattggggactcaggtttgggtaccaggacagtggagtgggggactggggaaatggtcagaagaggtcaaatcgtggggcctttgaatgaaggccaaagagtttgcacttcatatgatggggcaagagggaattgttaaaaaggaacaaggtagtcagatccgtgttggagaaaggacccctagctgctggccggggagcgggagcaggagaccctcgaggactctgtacctagggaccagaaatgatgaggcctgagctagtgtgctggctgggaggatggtgaggggtctgctggcaggtattagacggtatcgggaagtggggaggtggttaggaagtagactttgcagctgatgggatgtggggctgggacgctggaggagtcatgcgggcctttgctggttttcaggctggagggactgggtagatacctccactgagaaacagaacacggatgaggggcgctttggtggtcacgtgtctgcccctgtgggagctccaggatgagtgtcctttctccccagaccggatcccccagatcctcaacatggcctcagaactggagttcaacttagagacgatgccccggatcaactgtgcagctgcagggaaccccttccccgtgcggggcagcatagagctacgcaagccagacggcactgtgctcctggtcagccccc

SEQ ID NO: 53317 - DNA, 1067 bp, Homo sapiens
ctggggagcctggtcagactgtcttctctttctccgccccaggcaaatccagttccaaggttcagaccactcctagcaaacctggcggtgaccgctatatcccccatcgcagtgctgcccagatggaggtggccagcttcctcctgagcaaggagaaccagcctgaaaacagccagacgcccaccaagaaggtatgtgtcccagaggggcttaaggcacgggacctgactgttctttggataataccatcttgctccttcactaccctttatgccaggaacatcagaaagcctgggctttgaacctgaacggttttgatgtagaggaagccaagatccttcggctcagtggaaaaccacaaaatgcgccagagggtaagacccgaagttcctggttcctggagggaggtgtcagttcatctccagggctgagcacagatatctgtctcctcttcctatctaagattgagggcaagggaggtgttgattttcccagcgtctagactcactccgttgccacaggttatcagaacagactgaaagtactctacagccaaaaggccactcctggctccagccggaagacctgccgttacattccttccctgccagaccgtatcctggatgcgcctgaaatccgaaatgactattgtaagtgcatccttatcctcgcctcatgcatggagaaagagggcctgggaccacacaaacaaggaagctcatgctcttctctccacctctgacagacctgaaccttgtggattggagttctgggaatgtactggccgtggcactggacaacagtgtgtacctgtggagtgcaagctctggtgacatcctgcagcttttgcaaatggagcagcctggggaatatatatcctctgtggcctggatcaaagagggcaactacttggctgtgggcaccagcagtgctgaggtgcaggtgagacgtgtccagtgctgtcattctcaccagtcccaatgggcttgcacagctggaggatattaatgccaagtcccaatctctgatcctagtgggcttctctctctagctatgggatgtgcagc

SEQ ID NO: 53318 - DNA, 2595 bp, Homo sapiens
aggtgagtagggttgggctgaagcctctgcagaccctcacctataatctggggactgttaaggggagaagggatggtaggattggactgggttaatctgtgacccctagagctccttgtctggctctagtacctgctgaccccacctttattccatctaggccgtagcatggtgtccctggcagtccaatgtcctggcaacaggagggggcaccagtgatcgacacattcgcatctggaatgtgtgctctggggcctgtctgagtgccgtggatgcccattcccaggtaatcttttgcctgttcctgcctctcccacatgcattcttaccgggcaactacattcactccaatggcttcaccaactctatgccctggtgattcccaaacttctaactcagctctcactcatgagcttcatttccaacagtctgtggctatctccaatcctatgtcctataggcaccaccaccttgatctgtcccaaattaaccttgtcacttccccttgcctccctgaaatgtgttccttcctgtctcacattgctttggaatggcagaacctgctcagaaatctgagaaacctcctagaatttttcatcctcctcaccaggatctatcagttttacctcaaaatatcattgacatctgtcccctcccctcagcctcatccttccaagtggaggcccactacaatggcttcctcactggtgtcaagcattctttgttatctcctgcaatgcatcctccatgctgtggtctgttatactgtactgtccttaaacctgtgatggcttcccatcacttatggcatataatccaaatccattagaaagatacttgaggctctctccttccactccccccacattcagccttcactgtagatatggactctagagccagatggcccaagttaaaattctggctctgtcatctactaaacttgaatgtgacctttggcaacctattgaacttccttctgattgattcctcatctatccaatggataatacagatgctccctgatttaagtcccagtaaacccactgtaaaggtaaaaaatggttacatcagcgagtgtctataatttgcctctcaaggaacttttgtatggactatgatcattcaactctgagtctggagcatgtggcagggtgcctaacactagaatgggctcagttctgatttaagtagccttggctatatgtcatgcccacaccagctcctctccacaggtgtgctccatcctctggtctccccattacaaggagctcatctcaggccatggctttgcacagaaccagctagttatttggaagtacccaaccatggccaaggtggctgaactcaaaggtaagtggctaggtgaaaagccggacataaaaggccacataatgtatgactgaaatgtccagaataagcaaatccagagaaaaaacacattaatggttgccaggggctgagagagggtaatgggaaatgttgaaaatgtcttagaattagttttaacagttgtacaattttgtgaatatactaaaaatcactaaactgtacactttaaaaggatgcattttatggtgtgtgaattatatctcagtaacaccattgaaaaaaaagggaggaggccaggcacggtggctcacgcctgtaatcccagcactttgggaggctgaggcgggcagatcatgaggtcaggagatagagacaatcctggctaacatggtgaagccctgtctctactaaaaaacacaaaaaattagccaggcgtggtggcaagcacctgtagtcccagctactcgggaggctgaggcaggaaaatggcatgaacccaggaggcggagcttgcagtgagccaagattgcgccactgcactccagcctgggtgacagagcaagtctcaaaaaaaacaaaaaggtaggtgggtggcccagtgcctcctttatggctatggctgcatcagcattcgtatgtactgttctcatttgctccaggtcacacatcccgggtcctgagtctgaccatgagcccagatggggccacagtggcatccgcagcagcagatgagaccctgaggctatggcgctgttttgagttggaccctgcgcggcggcgggagcgggagaaggccagtgcagccaaaagcagcctcatccaccaaggcatccgctgaagaccaacccatcacctcagttgttttttatttttctaataaagtcatgtctcccttcatgttttttttttaaatctgtttcagctaatgcctttcttctttcatgacctatgtcccagcagccttcctaggggctctactctactgggatcagagagctagatatgtcctgtgggagcctggaccatccatccctcttgtttgtggacagggctaagcgtgttgtgttcccccacctcctctgttcacatacgtatacacacagcctccgtggtttcctctgtcacttttaattaagacacaagttgagtaagcagcctccacaggctgtattcccaggcccccgcccaccctgacctttggcccagaagctactgcttcagtgtgtggggtggaggagtgagactgggtccacagtgacatta

SEQ ID NO: 53319 - DNA, 1506 bp, Homo sapiens
caccagaggctggactctgctgaccctgtcttattgtccactcacaggaggaatgggctctttccatgccatgataaactcttccgtgcatgtcataatgtacctgtactacggattatctgcctttggccctgtggcacaaccctacctttggtggaaaaagcacatgacagccattcagctggtgaggggcttggcctgacttacctataaccatccccccacattcctagcctggatcctgcctttatccagtctgtctcacctttgaccccatctctccctactcaacgtttgtctctttctctaccccctcttcccctctagtcctctcactattccctctgaccctggtctttctctatcctagatccagtttgtcctggtctcactgcacatctcccagtactactttatgtccagctgtaactaccagtacccagtcattattcacctcatctggatgtatggcaccatcttcttcatgctgttctccaacttctggtatcactcttataccaagggcaagcggctgccccgtgcacttcagcaaaatggagctccaggtattgccaaggtcaaggccaactgagaagcatggcctagataggcgcccacctaagtgcctcaggactgcaccttagggcagtgtccgtcagtgccctctccacctacacctgtgaccaaggcttatgtggtcaggactgagcaggggactggccctcccctccccacagctgctctacagggaccacggctttggttcctcacccacttcccccgggcagctccagggatgtggcctcattgctgtctgccactccagagctgggggctaaaagggctgtacagttatttccccctccctgccttaaaacttgggagaggagcactcagggctggccccacaaagggtctcgtggcctttttcctcacacagaagaggtcagcaataatgtcactgtggacccagtctcactcctccaccccacacactgaagcagtagcttctgggccaaaggtcagggtgggcgggggcctgggaatacagcctgtggaggctgcttactcaacttgtgtcttaattaaaagtgacagaggaaaccacggaggctgtgtgtatacgtatgtgaacagaggaggtgggggaacacaacacgcttagccctgtccacaaacaagagggatggatggtccaggctcccacaggacatatctagctctctgatcccagtagagtagagcccctaggaaggctgctgggacataggtcatgaaagaagaaaggcattagctgaaacagatttaaaaaaaaaacatgaagggagacatgactttattagaaaaataaaaaacaactgaggtgatgggttggtcttcagcggatgccttggtggatgaggctgcttttggctgcactggccttctcccgctcccgccgccgcgcagggtccaactcaaaacagcgccatagcctcagggtctcatctgctgctgcggatgcca

SEQ ID NO: 53320 - DNA, 1008 bp, Homo sapiens
ggaacagctcttcccaggcaagcaggatgtgtggggagcagatgcctcaaccaaactgcctcctccccctagttcccagtaattccttcctttcactgttctgtcctttctgcaatgaggcattgcaggtgtcttgtctggttctgtgtcttatctctgtgggatgggggtgtgcagtgggatctgtctgacatccgccctctgtacctccccagagtccttagccaggatggaggctgttgtgaacttgtaccaagaggtgatgaagcacgcaggtaagacgctatccaccagccctttccttccttctttcccgggatccctggatctacggctgtcttctaatggagagttcctatgaaacccttgatcctgtgacctgacctcatgtctgtagacccttcaaatgaagacccttcgaaccctgtgactcttcctgattcctttgacccttattcatagatccccggatccagggctaccctctgatggggtcccccttgctaatgacctccattctcctgacctacgtgtacttcgttctctcacttgggcctcgcatcatggctaatcggaagcccttccagctccgtggcttcatgattgtctacaacttctcactggtggcactctccctctacattgtctatgaggtgggcccctgggatgccgggctttaatttctgtcagcaggataaggagcaggccatagagccagagcatggcatttctcctttccagagaggttcagatccatgtcctcagctagcgaaggggagggatggctgggaagggagaactctggtggtctaatccacatcccttcccagttcctgatgtcgggctggctgagcacctatacctggcgctgtgaccctgtggactattccaacagccctgaggcacttagggtaagtaggggctggggctaggtcataagcaacctggtagatatgaccagtttggggcctgtgctcaaggcccagtttagggaggctcttagaatag

SEQ ID NO: 53321 - DNA, 1066 bp, Homo sapiens
ctgccattccactgctttccctaattctcaccctaatttccctagtttgtggtcattttgattcttcatcttttcttgcccacattccctacgtagatatcctttgttcatttttttttttttttttgagacagggtctcactctgtcatccaggcttgagtgcagtggcacaatcacctctcactgtgatcctgcaactcaggtggtcctctaggctcaagtgatcctcccacctctcagcctcccaagtagctgggaccacaggcatgtgccaccatgcccagctaatttttaaattattattatttttaatggagacagggtctctatgttgccctggctggtctcaaactcctgagctcaagcgatcctcccacctcagcctcccaaagtgctgggattacaggtgtgagccaccacacccagtctatccttcattctttttgccagtttctctgggctacatttcatggccttagatagtgccattttagtgtctcttccatgttaaaagatccttcttaaccctacatcccctctcactgactcactcgcgccatgctcttgaaacaaagtgcttagaatcactgtttcttttacctcccattcacttttcaacccctgtgtttgggcttctacttccaccactcctcagaaactcagagatcactgttgacctaatggctaaatccagagttttttcaatcctcatagtaatgtatctgcagcatttaatgctgaccatttcctttagtctctttctcccccatggcttctatggcacatgctctccttgttcatcctcctctctggccattccttctctgcagcttttggacttttatacttcttcctgcttcttaaatgttattctctaggacttgtccttaacccccttttcttcttcttctacctgctttctgtgaccaccacttttatgtgcataatttaagcgagttttattttcagctcagacctctttgctgagctgcagattcctgatggatatctctacctgtatgatccacagctggttgaatgtccaaatccagttattctagccta

SEQ ID NO: 53322 - DNA, 1053 bp, Homo sapiens
ggtatccacaaagctcactgaccacaatacatagcagtaggggagtctggtcaccagctctaaggcaatgccagacctttcccccacttaaactgttccggctcatcagcccactcaggtgttatcttctcacctcttcccttcccactggaaatgtcagtattaactggcatattgggtagagtttgagctgtgcttctctgaaattcctggagcatcttttggtgactattgtcctttactccaccaaaagattccctcctattgaatggcaccaaccccaagtttttttgtgtcccaggcaaatactgacttcatccccaccatactattaaaatggattccttgtcatccaagaatggaaatatcctcttgccccaacaggaacatatgcaggatgtcacctacatcttgttcccctaagcaaacactccttcctctagagggactcctctacattcatcaccgtaggagcacatgctgtcgtttttatcccccatcctcaaatcatctggagtacacaaatctcagtagtgtctcccactttggggtccatacagcctattaaatgcctcaatagagagtatgtatctcccacccctaacatactcattccctcaggagggaatacatatacagttttcctttgaagaaggggacatgacctatttactggctcagatttaggatttgcaaaaggtgactattggcctactctggtaacattcctctgtttttgactgtcctgttttgcttggagatcgtgctttctcctattcttgggtcccctggagaaagagattaggccattgtctcctaggtttgtgtctaggatggagaaagaagcagcagctgtgaaacgtcaagagcttactacaggacagagttcatcctgctgaaggcggaagcttatccaatcaatgtcagcataaggcccattgcctaggatctctccctctccagctctgccctgagcctgggattcagtcattgctgaacctctcttttgctcattgtgccagtcaccccattctgttccccttctggtgttta

SEQ ID NO: 53323 - DNA, 2054 bp, Homo sapiens
ttaggtagagaaatcagcagtcagatcttaagaccatttggtaggtgcatcaggaattgacacgcaggccagttttccagtcctacatgtattcttttctctgtatcctgcctctcttgctcttggcttcctgccttctctcctactcatttttagaacagtctagatgcaggcagctagaagagttatttcctccaagctgtctaggaaaagggacaattaaagagagattctgcacttattatgatataaaaaaagaaaaacaatgagagaacatagtactcttttacctgtgacgttaaatgggagtcacacaggtttagctatctgttctaggagtggatgaacagactattctcccatgtcacttctttcctcctggacaccttcagggagacagctgggtgaagaatcatacttctgacctctgtcaaacagggtcagatgccgcagaggttctgagatgataaaggaagtgacagagggaacctgaggtaccacatttctgatttgtcatgaaagtcttaccttgcttaagatgacttttttaatgttcctttcagggaaaatgccaagtggaataaaaaccaacatcaagtcggcttccatgcatccctaccagcggtgagtgtggctggcaacctcgactccctggtgctctttgcagagttgggcagtgaaattaccttttgctcaaggctcacctagatgggtacaataaaaagaacatgggctttcagcagcagacaaatcccacttccaccactgactagctgtgtgaccttggacaagtgacctaatttttctgagcctgtttctcatttgtaaatggtgataatacctacctcatagggttgttgtgaggattaaaatgaggaaatgaatgtaaagcacttagtacagtatatgaaataatgggtattcaataaatgatagtttctacagatccttctccccaccaccctccacagtccttgatccagaacttaccctaatctgatactgcctcacgtcaatggtgagctgatggacacaagatcaaataaggctatgcttattttgtgctgccagaaactgtagcaacctctgtgttcttagaggcacactgtttttgcaggccctcctgcctgggtttcattctggctatccctctaaggcgcaaggtgaagaagcttctgggccaggaaggaaaaaaaaatgcccacctgcagctctggtgaagcttgggcctgctctcctttccatcctctaaggagccaacttggcttttacctgtcaaatagtcataaagtcccctatcctttaccccaccttatacacacgaggctttctcaggaagtggctctgccaggcaggactatgtgggaaagggtttttccttagcacacgaaaaagccccttcccctggattcatgtttcttattttggagggagaagggaattgcacttcacactgccatcagggtttagttgacctcataatggtgcccactttctcgactttggccaggatttccttcaaagaaaacgactttccttcatttccctaagcctgtggcccaaatggtggaccagaatgatggtgggagggggcaacccccagtagctttgcctgcttttataaagttgaacaaattgaatttagacattcaggctaacctgcctttcttagtactcctttgttggcatgggcaggggttgagtcagcagaagtggaccaaaggattcctctgaataaagttatttaaattgatgttcactggctcagggttgtctgacagtaatttatgagagcactacatagggatcagaggggcagtttcaagagtgctgcaaggcagttctaatttgttctccataaaaaagtttccgtatctttaattagctttgatctaaaaatcctgaaacttccctcctgctcataccttccagctgccttttttctgttctgtcacacactggtactttggcatttgttcagtgccaaacaaagttctgccaggctgtggcagcaaaggactggaaaagtggtcccagatgtcacatctgttacc

SEQ ID NO: 53324 - DNA, 2110 bp, Homo sapiens
gtgggggtggagcttgcctgacaggagacagtcgggctaaatccggagggaggaggcagcacctgtttgcttggcgtgggaaaggattaggttgtaatacggggaggctgagatgcagtccaaggaagacggctcaagaaggtggtgggttggctcaggccctgtcctaagctgctggatggaggctgttggttgccgatatagcaggggatctaattggaaagaagcccaagcagtgagggaattgtgggccgcgatggctgaaagctaagcagcttataatcagaggccatggtggaacccgggatcaagtttctgtcaggcaggtttgcaagacagttttgcatccctcttcccagcctgtgccctatagttgttaagggtgaagaaatggagtaaaacaggagaccaccgatgggaaggaaatgctttgcagacccccagcattttaatttgtttgtccagtgcttagaagcatgtgtggtttttgtttttcatttgtcacttagtttcttgcagctggtagtctcaataaatgttaatgggttgactgagcttgtgaaagaggcacgggaatattgacacagagatagatgattgcatattaattcagcaaggagaaggttgaaacaaaatgatgagagcagatggaaagctggagtcgttggttgggggagggaaaggggagagcaggactggtgttcagagaagtcttcatgagtaggcagatttcccagagactgacaagacagccaggctcacagatgctaggatggaggaagctggagtgcatgtgctacagaggtgcacatgagagaatgatctcctggcattaggtctgtcgaaaatgtctcagtgagggagtgtagggtgtacctaacacagagaaaaaccaggcatagattaggaggtgatggggaaaaggaatcagttggtggaaggacttggggtcaggcaaacaggttggaaggtctcagggttgatgctgtctataacccaaataccaaagatagaaaacaacctggctatcctatgccaatgagatcctgtgttacctgactggtgttgcacaccatctccttggctttccagccctcctttctatgtgtcatactcgtttatctgggtgaccaacctgttcctattggtgcagagagaggagaagcagcttgaggcatcattagatgcactgctgagtcaagtggctgatctgaagaactctctggggagtttcatttgcaagttggagaacgagtatggccggctgacctggtaagagttaccagggcaagctaggaagggcttatgggtgggggggcctagcctcctgatgaataggacatttctaatgatgtaaccatttatcagtttgcaaacatcttttgatttggaaagagctgggtttcctaacatttagcaagtggattccatggcaaggaagtagagaaatgctcagtttcctaacccaagttctttctagctttcaattcttaccctttgacttctctggtgaggaggtcctcccactacagctctattcgtgctggatctcttgccacagatgtggctgagtcttttagagccaacctactctgaagtgtggatcttatttccaggctggaaaggaggcttttacccggtttctgaagttttagttataacagtgtagccctggttcctattttgccactgttcctcaccccattcaaacaatgaactgggttttttctacgtctgtttcataaactgaaactatgtccctctttcatagccctgtcatccctgttagtctgttcccacttaggctagtcatagggctatgagacttttggaggtgaatccaagtgttcctagcctgaaggaactaggactattttactaagaaccacccagggaaggggtacaacattcttacaccttgttaccaccaccaggccatctgtcctggacagctttgccttgctttctggacagctgaacactctgaacaaggtcttgaagcatgaaaaaacaccgctgttccgtaaccaggtcatcattcctctggtgttgtctccagaccgagatgaagatctcatggtaagaggagaaaaagaatacaacttgggaa

SEQ ID NO: 53325 - DNA, 1006 bp, Homo sapiens
ataagtgctgtaaaggagtgaattagggtgtttaacagtggttctcaacctaccttgttaagaaatggggaggcaaggggttgtgaataggaagactcagaagaatgacatttaagctgaagcctgaagaataggtagaagttttctaaaagaagaggcagagagcattgcaggcaaagggaatagtgaagatcttcaggtgagaaggagcccagtggagccttcagagaactaagaggaagcaactccttgtgtggatgcagtttgacaatgagaatagctagcacttactgaatgcttactgagtatcatctgatactcaaaaattatctgaaaataagcacttttattatctgtgtttcacagatgagctaactgaggcatagagagtgtaagtctctgccaaaactatatagttaataatcagcagagcaagcatttgatcctaagtgctctaacactggaatacatgcttttaactgcgtggggattggtgagagataaggctggagaagatgcagcttgaggccatgctagaggctcaggactttgatgtatagtggtaagaagattttagccagttcaagaggggaaataatccacattattttgtgggaatgtgttaacaaaagacagcacaagggttagaaaaggctgaacaaatcagaccttaatcacaaagggacaggcacaaaaagacaaagcaacaaattaatgagatggaccatgcttcattcttcctggtatacatggtatgcagcacagtgcctggtaatgttttattcatcttggtataaatggtatgtagacctcaataaatattccaaagaatgatagccttcctctcctgtttaattgcaacgacatccctatgaagatattcttatccacatactatcaataaagaaaccgaggcttggaaaaattaagtaacttgtccaaggtcacctatatagcaaatgatagaatcagatttgaatccaggtccctgaccccgaaactctac

SEQ ID NO: 53326 - DNA, 3010 bp, Homo sapiens
aaacacagattctttcagggaaaaaatgtgaaatccatttgtttgcatttttttttagccccagatctcctccagtggatctgagaaggtgattatgcgtggctttgacctctagttagcattttgtacaatcagggataaagctgcctaggcccactagacttccctgtctcatcactttgggtaccccagaagtagccaggcaaatggcagtcctgtgtgcctgatgactggtcatgtaatttgattgaggtataaaatatttcataacagtgatggaaaaatgtggaaaggggcccttcttggcaaaagatggagaagccctacttcagtacagtctgaagcttcatctgatgccgaactcccttcacctctgaggttcagtatctgagcacacacagggaggaagcacagtcaagactcagccgcatagtaggggaattgaggttctcacaggattcggcctgtctggcctgagaagtgctgggctataaattctggctttgctatggatggggcagcaatgccatctgccccattctgtcttttctgtaacttggggcaggcagaagaccagtccccagactcaggggacctactgggccggaaggtaggcgtctccatggtgacagctgatcttgggctggtcagtatgattcgtcagggcatcttggcactgcagttactaccctcgaactctagtgcaggtcagtagaaggaatattggtgggactggggaagcagggatacaggaagggtggggctgactgctaacaaagatagcagttccagggaatcagtgggccccagggaagaggatctgtttccttgtttgcaaaatgtaagtctgtattagtgtgtatcaggaaccctcgactctgacaaccatcagagaccctagaaggagtagagctccaaggatatcacttaggggaggttatgatctggcattcaagaggaagaagcaggagggtaagggagaaggaaaggtgtttgaagtttataaaacttcacagtttatgaaactgccgacattggtgggaagacactgagccgttcaggaccctgtcagttgggtgcctccctgtgagtttggtctggccagtgtctccaggtctgatctggtgtttcctgctccagggattatcgtgatcacggatggggtgaccagtgtacctgatgttgctgtctgtgagacactgctgaaccagcttcgcagtggcactgtggcttgttcctttgtccaggtgaggactttttaggaaggacgagagagatatggaatatctcacacaaagttgggatggctgattactttcttacaggcagtgatttcccagataaagtcaattacttagttacatggggggaaggagtcatatctagaaggtaggtagcatcgtgggagaggactcttatttttttcctctttccttaggattttggaaatagctgttaaagcaaaaagaatgcagaatttgaaatctgacagtcatttccagtcccacctccccttgtagattagtcattattgttttgagtgcaagggtcagaaaaccccgctcaaactagcttaaccaaagggggaaaaggcatagccagggactgcagctaatttggattgatggactgtagggaaggaggtaaaaagctatgggaaacaaggctgaaggggtaggcacaggccagaacatgaaaatctggttctgctttattaatgaggttaagcatgattctgtgggtgatgcagatagatagaaggaaagtcattagttgggtttatgttttataaaggtcactcttgctgctgggtgaaggacgggggaagtcggggaggctactaattgcagtgagagaggatcagggcttaaattaggggtaagaggattgagaaaaatgaagaggcagagtcaacctgacttcatgattagcaagatgggggtaaggagatgagagagaagcgggcttaaagttgtctccaagtttttgactccagtgatgactgggtagcagcagagcaaaaggaagagaagcagttgtggtagagtgaggataagatgatgaatgcaagtttgtgtatgttgtgttcgaggtgcctgtggttcaacacagacagttaagaacatcacctttggagttaggcatgctggtctaaatcctgactgcacttactaactgtgtgacattgggcacatcacttcacctctaggtcagattcatttgtaaatggagattgtaaaagtacttatctcactgggaggtgagatgcatttaaagtatgtagcattgtacgtaatcacttaagaaatggctgctatttgtagcaggtagcagttgaatacacagatcctgatattcaggagacaaacactgcttgagaggtagagatttaagatttatcagggtacagatggtaattgagaacagaagagggtcctggaagaactttggggaacaccagtgttcaaggtctttcataggaagagggcccagcaaggaatgaagaatcagccaggaaccagaagattgtgatgtcagagaaggtcagaatttttggaagaaaattttactggatctttctgctgcttctcacaatggtaactacactgtgagaagtagcaaaaagatcaagtaaaatgaggaatgaaaagtgccctttggatttggtgattaggaggtcacggggatctttttcagagccattttagtgaagaggtggtgaggggattgaagagtggatagaaggaaggaaatagggacaagtgttgacaaaagaaatttggctgttgagataaacagcagagcaagagagagaatggtaaccagagggaagtacagggtaaaggagtgttgtgttttgtttttaaagctagagacttaagcatgtttctaaggatctgtagtgaagaagagtttgaaaataaaggaaggaaaaaggaggctggtggagtaaagtccctaaattgacaggagggcattgtcttaagaaacagattgagggattcttttg

SEQ ID NO: 53327 - DNA, 1050 bp, Homo sapiens
tcagggtatatgtagtttgctaatttcccacctacagctattgtattcaaaatgtagtccacagaccagcagaaagcttgtttgaaatgcagaatctcaggccccaccccagacctactgcattttaacaaaatccccaggtgtttttcatacaccctaaagtttgagaagtgttggtaagctgaagtctctcaggatgatgacaggaagtcagtgaaccagttgccaaaatctttagtgaaggaggtggtgggcctttaggtatcgaggaggaagcaaagaggatgctgtggccggttagcatgggcatcagacagaagggcttaaggaaggaaagacacagacagtggtctgtcctgggaaaacactggcctacttcccactctgtggtccagggaatgggagcagccacctagcccagtctctttctctcctgttcttccttctcctatgcctctgtcagagctaggtcttcagttgctcactttttccaggtgggaggagtttactcttatgactgcagttttggccatgtgcccaatgtggaattaatgaagttcatcgcaatggcaacatttgggtcctacctgtccacttgtcctgagccggagccaggcaacctgggtctgactgtctaccaccgggcatttctcctctattccttcctgcgcagtggggaagcactgaaccctgaatattactgcggtgagaggcacactgaggtgggtgtgggaaggagggaatatagaatgggcccagagatgatggggccctggaggactgaaagtgtaactggggctggctctgctggcactgttacctcacagtcatttcagcatagccccttccccctacagatctgtcagttggcagataaccagtttctccttccccatctccactggtcttccaggctctcagcaccgcctatttaatgagcacctggtctctgcaagcagcaaccctgccctggccttgcgccggaagaagcacactgagaaggaggtgccagccgacttggtcagcactgtgtccgtacggcttcgagag

SEQ ID NO: 53328 - DNA, 1118 bp, Homo sapiens
cggagtccacccatggttttgtttgctctttggagtttgtaccctggtcctctgcaaatgctcctatagtgctgtccttcctgtcctcaggtgctctccctccagcccagtggttctgactcatcccatgcccagtttgctgcctactggaagccagtgctgtccatggatgcaaattcctggcagcgatggctgcacatgcatcgcctggtgctaatcctggagcatgacacgtgggtgcccttagggctgggccatagttggggtggagtatcggggtcagggggatagggaatgatgggaaggggagcagcagatgagctcttaccaactgtggccaaggaaaaactatagccttttccttgcctccctgctcttcagtccccataacctcaggcaaggcctagaagagagtgatagtagtctattccttttctccaagcctggggcctggaggtctaacctcagtccacacccctcttcctagaccaatccccaagcacttgcacaccccgggcagcaatgggcgctacagcactatccagtgcaggatctcccactcctccctgacctctctgctgcgggactggagcagcttcgtactagtcgagggctattcttatgttaagctgctctccaggtgggcaaagtgatgtcccttcaccccccgcccccccacccccccgccacctcatcccatgtctccctctaaccccagacctcactgctacttcctgccaaccttgggctgctcactgactcccatttctccccagtgccccagaccagccccccaattccttctacatggtccgtatcatttccaaggccccatgcatggttcttcgcctgggttttcccattggcacaccagcaccggcccggcacaaggtaagctgggccctgactgactctgaccaaggagccctagggtgtaggatagctccctctccccaaaccccacagggccaggtctaatagagggaggagcccccagaccaaggaagacctggagaagagggctgtgtctcactttgtctgtgagccccttctcccagacctgtaggagatgggagtaagaggatgtgaccacattttcccctcagattgtgtcaggc

SEQ ID NO: 53329 - DNA, 1010 bp, Homo sapiens
gtcaggccgctcagcctcttctagcctggcgtcactgtcccgctacctctaccatcagcgctggctttggagtgtcccgtcaggactggcccctgcgctgcctctcagtgccattgcccagctcctctccatcctcactgagtatgtcatccaagcctgccaggtcactcggggcaaggagagagcaagtgtagactgggacactagcaaaaagcctatagcacacacttctcctctctaattcccagtctgaagtatagagcagcatctgctactgccctccctgtctcctcccatcacccgatttgttttgtcctctctcatcctcactggatttgttataccctgagggaccgccagtctaagcagggccagcagcagacttggctccttgaggactgctgggaggtgggtgtatgtggggagagcttgtagtctcagtgtctcttcttcccttatcctggccttgccccggcctttatggggcttcagagtccgactttctgaaggattccacttcgcctgcagtggggaaggaatcatcaacatggttctggagcttccaattcaggtacgtgccatcccccatgacacctccctgccaaggtctgtcataatcccagggacactcacctctgagctgggttgggactgctggaaactgcctcacagggaccctgtggccagaggatgctcaaggtctgaggctgcagtcataggacaatttggtgagggaactgaaattctgagggccagagctaggccaggccagatctctgccttggctgggatttgcccaagatctcccattttgcccacagaatgaaccaccagggcaggctgcagctgaagagaagcacacctgtgttgtccagtacatcctcttccccccacactctacctccaccaaagacaggtgagacaggccatctgtgagggccgcctctgcagagtcagccttctccccaccatcccctagaggtctggctcccatatcctgagatgatctt

SEQ ID NO: 53330 - DNA, 1011 bp, Homo sapiens
ctgaagagctggaacccagggtatcctgggctaagaggggttgactcctgacctctgatgttcttcctgtagctccacccacgggatgctgcctgcataggctccatgctgagctttgaatacctgatacagctgtgtcagagcaaggaatggggtcctctgcccccagagccgagggtctctgatggtgagtggggcaggcggcccactggtggagcaggggagtgggtagggtaatctgcgtctcactgtgtcctgtccttcctccctcgtaggattggatcagggaggagacacctgcgtccatgagatccctttccattttgacctaatgggattgctgccacagtgccagcagctccagatgttcttcctcttgcttgccagaggtaggtgaacctggtaccctttcaccccacacctaaagggccagcaagcctggaagtattagaaaataacaaacagatgggtcagcaagtgagcagatgagtggtgggggcaggaggagcccatgaggctgaaggaggggccagctggtcagggctgagccgggggcaccgggcagcaggaggctcttggtgctgagcagagtgtgtgtcgggcagagccagagggtgtccctttcgccgaggggtcctgtcctgccaacgacatggtgctgtgcctgctgcacagctgcctggggcaggagctgagtgaccgggagatcccactgacccccgttgaccaggctgccttcttgagtgaggtgctgcggcggacctgccacgttccaggtgagttccccacatcctcctgacaccagaccctggcccagcccttttcccccaccctcacagggtgatttctgtctttgagttttggctttccccttcctccccctttcttcaacccagagtcccgcctctctgctggccctgccctctttcacccatctctacccccattgtaggtgccgaggggccactgctgggggttcatgggatcccgaaggagcaagcagtcggcagc

SEQ ID NO: 53331 - DNA, 1042 bp, Homo sapiens
ggagggtgctgaacctcgggaacgagctatcctagcttctgaatccaggttaggattatacttgaatgatggataagggggtacacagaccaagtccctataaacaaggaccttccagtccaggggaatgactgtgcaaggtagtatctaagcacctgagaagcagtagtgctttgtcgccggctcacggactcccatgcagccttcctcaccaatttggcacaggcagcagtctccctcccaggctctccccatctcccctgctttggtgttgagtgatgagctgagtcagggatagggagtcccctggtgctaaccgtgaacgtagagacttgttctgaggacatccacacaatagtaggaatctccccaaccaatctgtgaatttcatgggggccaaaactgtattttgctcactgctaagtccccagctcaccttaggggctcagcaggtccctgttgaagggaggaaggggaggagagaaggagaaaggcaagcaggcagacagctatgggtctagcatctgcagtgtgttagcgttggggaaacagaagaactagaaggatggatatgctgatgactcctagattggaactccggtccggttctttctctggagctctagatactcactttttgtgccccccaaatgaatgcattttcttcccactaacccttgatttttcttcattcatggtgaaaaatatcaccctcaatctagtgatccaagtcagaaaactgggagttatcgctactctgtttcatagaaatccccatccatcaagaaatatgaaagttaaggctgtaatatgaaatattacagtcactcactcctgtaatcccaacactttgggaggctgaggcgggaggatcacttgagcccaggagttcaagaccagcctgagcaaccaggggagaccttgtttctacaaaagaatttaaaaattagctgggcgtggtggcatatgcctgtggtcccagctactcagaaggcaagtggtgatggcgccactgcactcctacctcagcaacagagtaaga

SEQ ID NO: 53332 - DNA, 1034 bp, Homo sapiens
ttccgcacagtgccttccaatccccactacttcttctattgccctccatccagcaggcgagaagtgagtggctctcttccttacctctctcgtgccctcaacccagaggcccacccagaccctcttgagtcttggttccctgaggcctggatgtggctcttgtcttgccttagatcaagctgtctaaggcaagacaagtgtaatcccacttgcctaggatgaggcaagtgggattcttgcctcatcatcttgcttcattcttttgcctaggatgaggggcctcgggacacagtagacagaaaaatcagtgacctggagttttcagaggctgagcttatgggagaagaaggtatgtgggcaagtgagtcaaggtggggaaggctggctgcttcacgccgagattcaagggttccactgccagcctctctcattgaccatgtgacatgcactactaggagacacatctgcctgctgtgtggtcactgagagtgacccagagctagaggtagaataccgggagagccgtgaatcagacctggggcctgctgggctagactctgcctcgctgtcagacgtagacactgtgaatcctgatgaagactccttcagtatcttggggggcgactcacccactgggcctgagagcttccttcatgacctgccaccgctcttcctgcacctcacgtgctccgtgcggctacgtgggcagcacagctcagtacctgtgtgcagcctgcctacctgcctgggtgagtttgaggcagcccgagggaaagccaaaggtcctggaacagcctgcctaagtgggagtggaggggagcctagggttatgtcttttaacacatagatcttggaatctgtgcttgtcttagagccctcagcaactgctaactttccccctctcccaggccaggtgctttccagtctggagggccccccagttggaggccgagttcccttgagggacctcagtgtgactctggatgtcttcatgctgactttgcccctggaagtggagctccccacggcctcgg

SEQ ID NO: 53333 - DNA, 1241 bp, Homo sapiens
tccgctggttgttggaagatgagatggtgggggcactccgaagagggggcatcccacagagtcctgccctgcaccgcgcagctgcccatatccatagttctcctggacgctccacctgccttcgccaaactctgccactgagttttgtatttgggccagagcgttccctcacacaattcaaggaggtaagttgccctccaaacactgcagggtcaccttggggcccgtccttccctgggccccaggcacaggactggaaggccctctgttagttcgaactcatagagttatccctcctgtctccctgctcaccacatcatctgccctaacccctgtgcttggcagcccaactcactggaaagaaacccagctcccaacctggtcactgctcctgttgaaccttaggcaagtcactgaatcttttcttacctcagcagtggggatgccagcatctgctttaccaggtagttaggagcgtctcatgaggaagtgtagctcaccatgtgtagggaggactgccctgcctaaactgtgatcttggctcctgctctctaggagttccgccgcctccatctccctggccatgttcttcttgaagaccctgacagtggcttcttctttgtggcagctggccaacagccaggtgggtcccatggggagccttcttcagcggcctgggcttggcacagtcatgaggacagggctgaaggcatcgaaggggaggtgagtctcacctgggaatggaggggggtggtgggtgtgtggggcctatacctcagtcctgacttcctattcctcagaccctgacagccagcccccaagcacctgggtccccagaggattctgagggtgtccccctcatcagcctgccccgcgtgccacagggaggtaagagaggacttgggcagcagtctggaggccaggaccagatccctgaccatgcttccatttttggagggaggccctagacaggattgagagaggctccaggcattttccttctctatccagggagtcagcctgggcccagccggggattaagtctcatgtccagtcagggcagtgtggactcagaccacctaggtaagctggggggacggggtgaaggactctaagctgatgggaggtgggcttagggctgtactgggaaaggtctggacaggagacatcagaagggactaatctgaagtgcatcaagccagatgcacctggaggatcagatgagtcaggcccagcttcgg

SEQ ID NO: 53334 - DNA, 1023 bp, Homo sapiens
ccagattatgctgctgatgagagctgtgcgccccgtgggtacctggcagccacaatgcagtttgtccctggccatttctcctgtgacgttgtgtggggaactgtgatccgagtccattcacgcctcaaaatggggcccagcatgggggtctctcggggtatgtgattggcatgagagggcaggtgagcattggaaggatctggaaaaggcagtttcctgagcccatgttattcccccagccatccaggccctgcgctctgtgctcaatgccttctctgtggtgaaccggaaaaacatgtttgtttaccaggagcgagcaacaaaggctgtgtactatcttcggtatgtggcccttggaaggtgggtagggcatgaattaaggatggcctgggaggaggcatgtccaaagacatgctgctctttcccaggctcctagagacatcctgcagtgaccggccatggaaaggggatgcgctgcccccttccctcgctctgtcccgaagccaagagcccatctactctgaggaagcctcggcatgtatcactcccactctctgatgcccctgtgttcctcttgcactttgctctctggaaccggggccctgaccacagttttccctgtagggtcctcgttctcccttagacatggtctctagccgcagttcagatgctgctcgtcctgtgggccaagtggacagacatatccagctgctggtccatggtgttgggcaggcaggtaaggtctgaggagggggtaggggagtcgccacatgaggttccagaatcctctgggacttctcttagaaccttgcaagcattacactagaagttatgtaacagtctcagcccaagacctgacacatgttaagtgagccataaatactagctggaggctccagaccctctgggacttctcttagaacctcctattactctgccctgggtccctcctctagttcctgctgtgctcgggtctttcctcaagcaggagctgcatgggaagggactggcttctgccatgtt

SEQ ID NO: 53335 - DNA, 1101 bp, Homo sapiens
gggtccgagggcaaaggctatgaacccattgcaatgctccatctctcaggagccaaacccattcctgctgccgaccatggaagtggagaccctcatccggagtgcaagtcccccgctgagccgtgagcagggccgactgagtgggtcctctcgtggtgggggtcctcttcccctggacacattcccctttgacgaggccctaagggatatcacggctgcccgccccagctccgtacttggtcctgtgcccagacctcctgatcctgtcacctaccatggacaacagttcctagagatcaagatggcagagcgcagaggtgagggtactgggccaggcagcagggacaggaaatctgtggagtctgggaggaagggagtgacaatgcctggggctactactaatgccctcaaccctcagagctggagcgccagatgaagatggaaaacctgtttgtaacctggcagcagcgttctaccccagccaccatgcccatcagtgtgagtgaccccagcttgcatcttccttgagtatctgtgatcctgccccgtcactgctccatgctcactgccctgtttccccaggctggagagctggagaccctgaagcagtcatcccgcctggtgcattactgtgcaacagccatgctcttcgacccagctgcctggctgcatgggcccccagagacctctggaccccctgacgggcaggtaaggctgactcccagacttctagcagacctttgcttaccccacagtgacccccctcctccatccccagcaggatggttgacagtggggagagtcttccttgatctttactctcatagcggcgccatcgccctgagtcagggtctgggagccgagaggcccccacaagctgtgaatccttggatgtgtcgcccccgggagcccgtgaggagccttggctgaaggagctgagcttggctttcctgcagcaatatgtgcagtatctgcagagcataggttttgtgctggtaccactgcggcccccctcacccgcccgcaggtgagcccgtccctgttttcccttctgtcttctcctcctgcactgcaagtgaggccccacaggcccttcctctc

SEQ ID NO: 53336 - DNA, 1078 bp, Homo sapiens
tcagatactttcacacagccctcatgcgtgtcctgcagaccttgtatgctttatggaactcatgatgacactcatacaaaactgtgtccattttcacaaagctcatgcccacacacatcttgtacacttacacacttgcatacatccccacatgtgaatttttttggagatggaatctcactgtgtcgcctaggctggagtgcagtggcgcgatctcggctcactgcaacctccacctcctgggttcgagcaattcttgtgcctcagtctcccaagtagctgggattacaggtgcacgccaccctgcttggctaattttttgtattttagtagagatggggtatcaccatgttgcctagactggtcttgaactcctcaactcaggtagtccgcccacctcagcctcccaaagtgctaggattataggtgtgagccatcacgcccggcctgcacatgtgaatcttgtacatgctcctaagcctctggatctaggacttaatgattcctgtccttatcatcccactgacctctcctgagatttgatgtagttctcggcccagggaagtccttttctcaccaaggacctctgtgctaggcctacttgcatcactgtccttggcctgttcttggtcatgttcacccactggccagtactgacaggtctgagtcttgggaagtaggcagcccgtctgttgccacctccatctcccctgagctcagggacaactctgcagccaccttttcatccactgtcaaatctcagattcccgtgtttgtggcccctgctctatgttcctctccagattctgtgttctctgccctttcccagtggctgtatgcgaaaaatgagctgttcaccttacacatagctactttcgtgtctccagatttgtgagtttatcaaggcatgttctccctcctctctgttttcagttagaaccttttcaagccagtagtccagaaatgccagttccaactctctcatgtttctgtgaccagctccccactccccaggtttccctctcttccaggcattaggaagagaaggcgtgcctgcccctcctgtgatcccatctca

SEQ ID NO: 53337 - DNA, 1021 bp, Homo sapiens
aggctccttctcctgccctaaaaccaagactgatgggagccccaaggtaacttgtcatataatggtaaagttactgatgctaaattactttcccacggcctgaggtcattgaccctgagtgatgtaccgaggtcactgatcccagactgacaccattaaagtcagggtccaagggacttccaccctactgattcgaggctggtgagcccccaaaccttgcccccttttttgtttcttcagagcactagctctccggtaaccacctaccacctgcagcgggcactgcctgggggcatcatcctcatggaactggcattccaggtaagcaggaggagcactgagtggagacagccagacccacctgtctctcgccttcctgatctcatcttcaccttccctccagggctgttacttctgtgtcaaacagtttgccctggaatgttcccgaatcccaatggggcaggctgtcaactcacaggtatgtgaatgagctgcgggcacagtcagtgcaccccagtgtgctgtgggcagcatggctccatgtcccatttgctgggcagtagagtaatgcagtaggcgggctggcccagtgattgattcactgctatggcctggctaggtcagtgctcattctggtgccatgactgcactcactacaaggctgaccccatcggtcatccaaagcgtgttcagctgtagccctgaggcagcacagtgcctggtctggcctgtagtcatctagagtctgtggcagaccctgatggaatctgggatagagcaaaatggcccagtttctgaaaatggccctagtttcatggagatagttacaatacagtatgaaaaagggaggctagaatggggaggccttcccacagaaaccattctggcagagggcgttccactaggccacagcagcaggggaaatcttgtgcttcttcccacggaaggagggaaatgtgttttgggcagccagtgcagccataccttaaccctgtctcctgctgctgcctccccagctgtc

SEQ ID NO: 53338 - DNA, 1154 bp, Homo sapiens
gccattgcgaatggcccggccagggggcccagaacacaacgagtatgccctggtgtcggcatggcacaggtaaggctgagaggggcatccagcatgcacgctgcaggagctggggttgggacatacttgcagtagggagaccaatgttttcttgggcaggggtgaggtttgttttattagaaccccagagttgacatctccccaacccgtcctgcacagttctggctcctacctggactctgagggacttcgacaccaggatgactttgatgtgtctctgcttgtctgtcactgtgctgcaccctttgaggagcaaggagaggctgagcggcacgttctgcggtcagcagatcccctaccttgaacatgcccatttcccagcctgccccaccctgccctgtgtgtctcttgctacaaccaccactctcctgccctgctccccaccccaggctacagttcttcgtggtgctcaccagccagcgagagctcttccccaggctcactgctgacatgcgccgcttccggaagccacccagactgccccctgagccagaggctcctgggagttcagctggcagccctggggaggcctcagggcttattctagcgcctggaccggctcctctgttcccaccactggctgcagaggtgggcatggcacgagcacggctggctcagctggtgcggctggctggagggcactgccgtcgggacaccctttggaagcgcctcttcttgctggagccaccggggcctgatcgactgcggctaggggggcgcctggccctggcagagctggaggaactcctagaagcagtccatgccaaatccattggggacatcgacccccagctggtaaggaactgtgggctcccgaaagagctgggataggtgccaggaattccactggcagccagggcagagggcacaggaatctgaggtgactggcacagaagactcaggcctgtggctcctccctcaggactgcttcctatccatgacggtctcctggtaccagagcctgatcaaagttctcctaagccgcttcccccagagctgtcgccatttccaaagcccagacttgggaactcagtacctggtaagtccccttgagcttcctctgaaaagggaaacacagcagaaatcctcaccaa

SEQ ID NO: 53339 - DNA, 1074 bp, Homo sapiens
aagggctttggactcaatattgggtttagggcaaggtgtgggctcagtatcaggttcagatctgtatggggaggaaatggggtcctagagtggtattaggttcatgctagggctgggagccactagaaggatctggatgtagtatcagagtttggtctgtctatgttcattattggggttcgggttcaatattgaggttccggtcggtttcgacttggcgttgggttgtggcctgtctgggcctcagcggctccgcggctctacgagcgagagtgcacgaggggaggggcgccgccgggggcgcgcacggcaggggcaggggcgcgggcgcgagcgcgaggggagcgcgcggctggagctggcgcgggagcggcgggagcggtggcggcggcagaggcggcggctccagcttcggctccggctcgggctcgggctccggctccggctccggctccggctccagctcgggtggcggtggcgggagcgggaccaggtggaggcggcggcggcagaggagtgggagcagcggccctagcggcttgcggggggacatgcggaccgacggcccctggataggcggtgagtgaccccccggccccccaccagccccctccgctcccgtcccttccccgctctccttgccctccccgctagtccacccggcggagctgggggcggtcccgggggggacgagggcgccgctgaggccgggccgcgcccccacctgccgcgcccgcagcctcggcgaagccccccctccacgccccagcctggcggctcctccccgctcaccccgcggcagacgcgcccccagcgctgctggctggctcgctccccgccgcccctcgccgcctccctccctctccaccgcaccttagccgcagcccgccccccccacccagcgcaaagtttcccgtttgcgttcttgctccccctcatcggtcccgcctcgtccccccttctagcgcggacgcgctccgggggcggccctcagaccccccagccccgggctccgggcgggtccaggccgcgcccccgcccccgccgcacaggcgccccctcccagccggcggg

SEQ ID NO: 53340 - DNA, 1238 bp, Homo sapiens
tatagtttccttttccagctgctcttcctcttccctctttctttcctttaacaagaaaattgttttaacataattccttccttccttcctccctttcttccttcttcttgcaactactgatacctcccctttatccagctttgtgtgccctgggcgggttggcttggtgtacaaggctgccaagagaggagggggtggttgggtgttggtgaaggaatttggcggggcagagttagactgcagcaaacggaaactagctacacatcttttactgggaagtgtatggatacgcagcaaaatactagccctggcagtttgggcacagtccacccttttttccatcagcctgaactatgggagtctagctttgagggtcctccctgggggcggggaggaggggacccagacctcctgcagtagaggggttgtgatacacaccacggctcctccactttccagcttcaggcctcaaagaggcccctttctccctgagtctcaatttcactccctgtaaaatggggtagctaatccaacccggactgggtcccagggctgttgtaagaatccaagggaactgtgtggcagtgcatcgtcagcagtggcagtcacttcccttgtgactgacactgctgtgtgcttggttccagcttgcagtcagggccctaccctcgagaagctcgtggtccttgggggagcaggttgcaccatgggattgcaaaagcaattcagttacctgtcattgattgctgactgtgtgccagaccccggggtaggcgctttcggccccggctgcctttcttcctttgggactaacagctatgtagaagaggcagcccacccctaaggttcaggcatctgctcaactaaagcagctgcggttctgagttgggttagaacattgcaagagttcatcaagagacgggggagagttcggaggtcagggtgaggtgagtcccagaggagaccaagaagaagtgatgtgaactaggtttggagggatgagtaggagtttgaagaagagagaaaggacttgagatagataaaaaccagtatgaataaagactgggaggtgttgtcacttgtgaagtattcagagatgtggcagatcacagagggcattgaatgccctgttaagtacctgtaattttactctgagaacccagagagaaaacaccaaaggtttaaagcttggatagggagggtggagtgtgctgtggtcaggtttatgtttccagaaa

SEQ ID NO: 53341 - DNA, 1098 bp, Homo sapiens
gggagaggaggggcaacagaattctaccagggagactccagagtcagttggctttgcccctcactgctccttgtcactgtcttgtctctctgtcctctgtcccacgtaagcgtctctctgaccctgtttccctgtcctcttatgggggtgagttagaagctcaaggtttggactggaacacactgtacatcctctggtctcactcactccctgtacctcctactcaggtttagagaatggcccgaaggcctcctgcgctctttctccctccaccgtgactgttgggctgtccttgtgggtgctggggaataagtgaggagcttgggtggtcactggggtcagaaggtctaggtggtcattgcacagcccaagtggggggctctgttgaactaggctctggatggtcagtgaggatgactgggggtcagaaagcgtcaggggtgggcattagggacagcagtaaataccagctaactggctctgcccttctctccattacaggttgattgtcctgggctgtggctggctgtggagctagagccctggatggcccctgagccagccccagggaggacgatggtgccccttgtgcctgcactggtgatgcttggtttggtggcaggcgcccatggtgacagtaagtctgacccctcaaggtacagatctcccaggttgaaaggtggcatccttcccagcaggactctgggatggggacagaccggctactaggagagacagggtggccagaaaccctttagaccttctgtcctagagagcccccactgcttggagagcctccttctaaggaatacctgggtacttaggagcatctttaggcaccagagcggggcagtcgaatcgtgaccctgtcttatggggctggggtgagacctgtcctggattcatgtggtcattgtgtgatgtgcgcgtgtgtgtgctgtgtgcactgttgcagatctgtgctgaaggcacagtgtgagctacagccaggggtcggcatgggaatggggggtggcacgcagggcatgcgtatggatgtgtgcccaggacgcgggtgtgtccataggcccaaggagggtcaaaagcgggagccaccca

SEQ ID NO: 53342 - DNA, 1683 bp, Homo sapiens
ccctgtggacaccttgaggagactgtcagaaggcaataactaagtcgggggggagggatgggagaggcagatttacaggaaagcattcacctgggaagatatccagagagacttaggaactggactgtctaggcctttgggactgctgctggtatgtgggggctgggagagagggaggagtctcggttcctggccggagccccggggtggatggtggtgccatcactgagatggagagcagggggagggacaactctcagggagagctggagctcttcccagcagctctccagcacgcctttttcctggagcttggaattgatgtggggcgggcaacagaagggtgcagtggtagtgtgaactccagacttggaacacctgggttcagatcttagctctaccacttaccagctgtgtcatatgggacaaatcccttaacctctctgggcctctagaaacagatacagttatagcactcacctcatatgcttaacagagttaaaaaatgttaaactctctgaacagtgcctggcacatactaagcgctacataaaggtgaggtgtccttgttttctttgtaggtctttctctctgcccccatgactgccaccttcctcactggccattcctatagtgactgtgctgtggtgacttggtgtctccatctcttccaggcaaacctgtcttcattaaagtccctgaggaccagactgggctgtcaggaggggtagcctccttcgtgtgccaagctacaggagaacccaagccgcgcatcacatggatgaagaaggggaagaaagtcagctcccagcgcttcgaggtgcgtctgtggtgggaaggggtcggcagggctcagggtctgcccacactctctcctttcagtgtccctcctcatggaccttttggaggtgggaggacaactgaccctgagcaggctcctgtgtcctgagtaggctgtgaccccatgtctgtcctctgacaggtcattgagtttgatgatggggcagggtcagtgcttcggatccagccattgcgggtgcagcgagatgaagccatctatgagtgtacagctactaacagcctgggtgagatcaacactagtgccaagctctcagtgctcgaaggtacgtgctagggagacgtggcacggtgggctgccgggctgaggcgtgggaagagccagccagccctgatcctgtcctgggcccatgtgcatttggcagaaaggaggactggccacctcggggtcagtgaaagtcagtggtggacagggatagtcattggatctggcctggattgtgcggcttatgctgaggccagccatgtggggcatgatgcctttgtattctcctgctgagccgggtcgttggttgggtggggtctggggtctgacttgaggtgtggagctgcagctgtgtatcccttgggttacgtggttatggctgtggctgtttggcagtgaaccggatttccatgtggagcctggccgtaggtgtcaggcaggtgtgttccttgttgcccctgtgagctgagggctggggctctgtccgtggattttagtgtcttctctcacttggtggcttctccattcattcacaaacactccctggaccaccttgaagtcctctgagcaccgaggaggaggaagctgtgtctaagccaagtcttgaggacaggtgggag

SEQ ID NO: 53343 - DNA, 1034 bp, Homo sapiens
gactcttgcccctttcaggggcctgcaggcttcagaggtgccctcccactccctgggatgccagcccctccccatcaattcccaccagcctcacagccccttggtgcccagcaggaggagggagagacaagctgcccagcagggcaagattctggccccagccacggccgcctgagacagcccacgaagtgttagctcatttaatttaattaaaactcaacaagatggaggcagctgtagcgcagttaattaaaacagccataatcaaggcagcaaacggccggcagtgtttgtggccgctgcccagcgcagcacagcggccagcacggttcggctcctctgcattttctcatagttcctccaggcaggctccccaagcagccagacgctcctccctgctggcctgggcccctccacagaaccacatggacttgtctggcagcagctctgggaaggctcgctcacacattggttcatctagtatttatatagtgcttggggtgcccggccctgggccaccccttccttgcctatcactccactggatgccactcaggccccatcctccttgtcctctcggcagcagctaacattcctccctccttcccaaccacactcccatttttccctagcctttcagggctctgtctcttgcgacttccctcttcctagtgccccttccctgcagcagcatcttcccttccaccaagccctgcctttgccctatggacacagccttgccctggacgagctcaccccctcctaaagctccaactgccatctcctcacctgcaactctagctttagtctttccagcccaaacctcttacctgagctctagatccaaaattcgacctgccttctggtcaccctgaccagtggtgatcagtgatgagtgatgaccttcttttcagacagctgtaccctctttccataagtggcaccctccaacctggaacatgggtctcaagttggtttgagagctctcaaatgtaccaccctcgtggctctcaaattggcccccttctcccctc

SEQ ID NO: 53344 - DNA, 1682 bp, Homo sapiens
gatgagggcatggcgtgcttgtgaatcccaggcccgccagtctgcaggctgctcccacacctggctctgactggcttagtggggctgcggggccaggaacactaacagggatgttgattgggaaataggctccagtactggcaagagtgtggcagaaactgaatggagctgggggttggggtacagtccctggcagagcaaaggtgggtcttgctggactgtggggagcatgagattgtgctccaaagcacaaccgttggttctagacaggaggccactgggctcttcagggagagcttcctggaagcagcaggggtgccagggtgtggcctggatgagcttcgacatctggtcaacatcagccacagatgctgtcgagacctctcaccgtgttccaggccacactcgacatgggccgtgcctgacctctcgcttcgtgtacccacaggtgccttgcagatagagagcagtgaggaatccgaccaaggcaagtacgagtgtgtggcgaccaactcggcaggcacacgttactcagcccctgcgaacctgtatgtgcgaggtaaggactcaggcagtgcctggcccctgtcaccacagagctgtgctgcacctgccgggctctctgcccagagcccttggtgcagacacgcaagggactgccatgggcccagtctcttctccttcctgcttctttctgcagcagcagcaacagctcccactgggcaagttcctggcgtctgccactacttcgccttccttccttgcaggcccatggggaagcagccactcttgggagcatttgtatcttttgtaggtcttgccgcatgggcccggagccccatgggaatttggagccatccaatccgacttcttggtgtatgtgcatgtgtgtgtgcacacacgggcacacttatctgtgtgtaaatgcatgcatacctggcctggctttccttcagtacatcctcctgcctgccgcagcatggtgggctccagaaccaccatggctctgggctttggggtagtaaggcctcaggaacggaccaggccaggtgagcctatcctctggccaggtcttcctggagccttcctggaggaacccttgtgttcagctgtgagcccctgtggttatgttgcctcgggtgagcacctggtgtgttccagatgttctttgctgggagcgagtggacagtgtgctttctggaagtccaagttcccagcagagaggaacctggggactgttttggggtttccaatctctgctatgctcacagcctaggggtgactaaagctggccaccttgccctttcctgagaacacactgggtctggtatacatgtgcccagaaggggccctgagagccccttctaccctcatactgtcccctcacctagccttcttgtacagatggatgtcattaaaagttaaactgttgaccgggtgtggtggctcacgcctgtaatcccagcactttgggaggctgaggcaggcagatcacgaggtcaggagatcgagaccatcctggccaacatggtgaaaccccgtctctactaaaactacaaaaattagctgggcgtggtggcgcgtgcctgtaatcccagctactcaggaggctgaggtaggaaaatcgcttgaaccagaggttgcagtgagccaaggtcgcgccactgcactccagcttggtg

SEQ ID NO: 53345 - DNA, 1364 bp, Homo sapiens
cactgccattgtctccacccatctgactctcttcacctgtgtccactggccgcaaggcttcgtctcctcatcagacttggcttcggtgtctacctcacatctcccttctgtcccccaaattctcagggctcccagtgtcgctctctgaggccacgcgactgctacatttaatgggacagtacacgtgaagcaccaggcacattgccaggcacacaggaagcacttgctagtcagtagcctctgcagctagcactcggctactagtcagtagcctctcggatagcactgtggggggatgtgtcatccagttacatctgactttgttcacagttgcctgcagctccacccacagtctagcaggcccaggcatgctgggtgggccagagcctttctccttcaccacctgactctccctgagtgactcattctctccttccatctacagctctctgggtgtacagctgctggggccagggtggagccctgccctcctcagagcctggcctacctgtgccaggactaccagccttccccctttctctagggacctggctgcgggccacagctgtctaaaacagggacagtgcctttttccccacaggtgcccagacatgctccttacaccggtggtgtgtgtgggggtggcttctagtggctcctgtaccttggcaggtttgtgggctgggtgggccttgaccccagagcccggtccacagggtctgtctgagctgtggggtgcgtgtgaggcatgggggcctgcctgtgccccattttcacctgccccggccccaccctcggcctccctggcgcctgctggcgggcctcagccctgtccaccatgtcctccatgagtcctgagtcttttgtgagtgatgtggttcgtgtgcacctgtgtgcatgtgtgtgtgcgagggggcacaggagtctcgtctcgtctccgtgctgtgtgggcagatgaaggttggcctgtttttactctctctgtgtttctccttgtcttttttttattccctcctcatcttcatcgcactctgccatcaacccaaactctcatctctcagatcagcgagaaggttggtccttttcacttcttatccatctacagttcgcccatcgatgggacacgcctgtcagtagggcccagcgggctcggtcagctccctcaggctcactgcgccgtgcctgcctgccagtctctgttgtttgggccggcgggcaggcaggaccagggatgggtgggcagacccctgacctgcatgttcctgctgcttgggtccctggtgcaccacgtgtctgcatgtccccttagcctggttcccctgcaagggtggtggggtgggcatgctgcatggcatgaaactgta

SEQ ID NO: 53346 - DNA, 1120 bp, Homo sapiens
ccctgctgttgcttctgtcaatagactgtccagggtgaggcctgttcctttttggaggccctgtgcctgcagcagtgggtggaggatggttggggctgctgcagtgagatgccagccactccagctgttggcatgggggtggctgtctgggcaggtctaggatgcgggtccctgttggcacttggaatacaaggaggttgtcccttgcctgtttcccccacccttcctctgtagacataccctgacctccctcacatggaaaatgtctcagtctcagtaacgtttctgcgtggctgaagcccagtgtccttgtgagagtgaaggtggtgtgcccaggagcctctggacctgaggcccttgcttggtgttgcaggtgaccctaaaggccactgttgacctctcacacttatgcctagcccctagagctctccctgccccctgcatctaggagggaaaaaataaacacaactcttctgtgaagcgcctcaatttcctgacagccgcaggagttggaggctttagaagacgtggctcagggcgttggcctgacctccagggctgatccatgaagtccgccttttggcctgaagaccctgtcctccagggacaatttgggggtaaagtccagtcaagtttctaggttggtgcccaaggtttattggccaaggacctacttccttctgctggggctctttgtcctggtatccaacgacgtgattaggccccatgattccaccaccgactggggtcaagcctgcaatcatgacctctccctggcacaggctgtctaaacccatccttacgcccgctggagcagcgtcctctcctgccagcctctgctaattctgatgcttctccccagagccttctgggtcttttttcaggcctgtcagctagggctcgaaagggtgacagtttttcatcacacagacctactcctactacgtatataaacttggtcatgtggcttggttttaaaacagttcccttgactgtaattggcaggtgatagcatctacagcatggaaacctgcacctagtaggtgcttaagcatagcttcccttcccatgaagaggaggagacagggcacccactggccgagaggacaggagagattta

SEQ ID NO: 53347 - DNA, 1088 bp, Homo sapiens
accctagggcctgctttctctccttggtgctccagccaggagcaggcagagataggccctggagaacaccctgggttgtggtcctgaccaggcctggaccttgtactgagtccctgtgtgaccctgggcagacaggaccttcctgacaggcctcagtttcctaggctataaaatgggagcttggttgcaagatctctcattgagtaagtcatcgtgctccagacagtccctgagtgtgggggccacttctaggctggaagtgggtggggtgggagtggatgatgagctggggtctggcggtgccacccctcctgtctctgagcatgggtttggctctgaccagaggggcttcctgaatgaggggcccctgcccttccatgcagtcgtgtgtcctgcccggcctgtgagtgcctctctccctcctcctgcagtgcgccgcgtggctcctcgtttctccatccctcccagcagccaggaggtgatgccaggcggcagcgtgaacctgacatgcgtggcagtgggtgcacccatgccctacgtgaagtggatgatgggggccgaggagctcaccaaggaggatgagatgccagttggccgcaacgtcctggagctcagcaatgtcgtacgctctgccaactacacctgtgtggccatctcctcgctgggcatgatcgaggccacagcccaggtcacagtgaaaggtgagtgtggcaggtgctgtaaccagtgccctccctgtcatctgggaggtcctggtggtgggcgaatgtgagctggctgccatgggcacaggcatggctgagggattcttgccctttcctgggtgtccctgccctggggtcctccagcccttagagggagggagggatttctgttattagccggcttaatgataatagttaaggcatattgagtttcttggtgggagacatcatgctagcaagcacagttgattttgtttttttctgttttaccctgggagataggtgctcttattatttccatttttgaaacgagggaaccgaggcacagagagggtgtatcacttgccccagggtcacataaaaataaatgacagagcagggact

SEQ ID NO: 53348 - DNA, 1699 bp, Homo sapiens
ggtgcggggataccgcgtctactatactccggactcccgccgccccccgaacgcctggcacaagcacaacaccgacgcggggctcctcacgaccgtgggcagcctgctgcctggcatcacctacagcctgcgcgtgcttgccttcaccgccgtgggcgatggccctcccagccccaccatccaggtcaagacgcagcagggaggtaggtgggggcatgccggctgggcagccaacagcagagaaggggaggctgaggttgtggcggtgcctttccccctccctcggctgtgaggctgggggctcttgggaggatcaaggtgccgtattccatagatgtgtggtcagttgggatgtaggataagggtgtgaggttaggacctgacttcctcggctccctcctccctgggcacccctgacctcacgcagatgaggctgacctgcctggtgtggggtgttgcagtgcctgcccagcccgcggacttccaggccgaggtggagtcggacaccaggatccagctctcgtggctgctgccccctcaggagcggatcatcatgtatgaactggtgtactgggcggcagaggacgaagaccaacaggtgtgcagcgggcagagaagcactgagggggtctcctggtccctgagggtctgtgatgggcttaacccaggagggtattttctggattctgtggcttatgtgggcacagcctctaaggtttctgctggaggcttagtggtgcatgcgtgtcatgtggcccgcacagcctgtatgaatctggagtcattgtcaccctgtgctaggggcaaagtccccagggtctgccttgggtttcctaggctctgtggctcatatgactggcagagccctgaagtttccccagaagccatgcgtcccagatggctcctgtggtccatgtggtctgtgaggtgtctgtggcatgggctaagccctgagttccttttgtgctccatgtggccttatggtgtggagccagtcctggagccgtggtgggtccagaggtgtcacattgcagcccatgttggggaacaacctgtgagtgactttgagctcagagctgtcagtgagtgctccctgctcttcccagcacaaggtgaccttcgacccaacctcctcctacacactagaggacctgaagcctgacacactctaccgcttccagctggctgcacgctcggatatgggggtgggcgtcttcacccccaccattgaggcccgcacagcccagtccagtaagtgtctcccaagtccgctgcctgttacacctgggctgggacacacacacacacatgcacacacatccttccccctcgaccaggcaggtggggtggtcaggtctgctggccaaaccgaactctggcctgggctctgagtctgggcctcgggagagggccaggtaagtgcctcccagtctgtccagtccaggcggctgctgccctccctgctccctgcccagcctcctgcccctcctcccgcccatgccccacacactgcccaggtaagttctgtgtctgtgcctcatctccgcccccactctgtgctggtcacactagcttagctgatgggccatcctcggtgggtctgccatgtcccagacctgctttggcggctgtttctcctccctatggccccgcatctcgtctccccatcacccacattcccttcctcatactccccatg

SEQ ID NO: 53349 - DNA, 1045 bp, Homo sapiens
ctagagagggccgtggagctgagggtgggattttgttttgttttgttttgttttgtttttgtttttttgagacaaagtgttgctctgtctcccaggctggagtgcagtggcatgatcttggctcactgcaacctccgtccacctcctgggttcaggtgattctcctgcctcagcctcccgagtagctgggtttataggcgtgcccgccaccacacccagctaattttttttttgtaattttagtagagacagtgtttcaccgtgttagccagggtggtctggatctcctgacctcgtgatccgcccgcctcgacctcccaaggtgctgggattacaggcgtgagccaccgcgcccggcctgggatttttcttttaagatgggaaaatttcaagcatatttaaatgctattggaaacagtcaataggaaaaaaagaaaccgtggaaaagagggtaactggtggagccttgggaggtggagagaaggggaacagtatgggtggtgagagagcttagccttggacagggtggctcaactctccattctcatgggtggaaaggagagaattgctgcagatgcaagtacggtgggggggttgtagcaagagatggagggagctgctgtgaaagcctggtcttctctgcagtgtgggagacatggtcatgcgccaagaggaggcaggcaaagggagctggaggtctggggagcatggaggagggggactgtttcatgtgaggtggcagagcgagccaggcagggggcagaaacaggcagcatggagagtcctggaggatgaggcctctagggacgtgtgcataggacgccagcctgcctcagtgccgctgtagagaaggagggggagagctggattcatctagggcttggcagcggccaggaaggagcatggaaagatcaggaggcgagggaccttgcgatattggtgagagtgtggtaggtggtagaccgtggaagctgaacatggagggtgggaaggacaaggttgatggacaggcatcctgaggagctggcgagcaggctcagtgccc

SEQ ID NO: 53350 - DNA, 1980 bp, Homo sapiens
gtgataactgtgtgtgtatcaccgtgtgtgtgtgtgagagagggaaggagagagagggaggcaggtcagagggagtcaggtgtccttggcgagagtggcagcagcctgcctggagggaccctgggatggccatttcagcacctaaggggtagcctgcccgggtgagtctccagtccactgtgactcagtcattgtgcctgtgatccccaccctccatctgcttgcttcccccccatttgtcttccccagccccctccgcccctccccagaaggtgatgtgtgtgagcatgggctccaccacggtccgggtaagttgggtcccgccgcctgccgacagccgcaacggcgttatcacccagtactccgtggcctacgaggcggtggacggcgaggaccgcgggcggcatgtggtggatggcatcagccgtgagcactccagctgggacctggtgggcctggagaagtggacggagtaccgggtgtgggtgcgggcacacacagacgtgggccccggccccgagagcagcccggtgctggtgcgcaccgatgaggacggtaggcagtgccaccggggcgggaggggaggcgttctgcctcagacaccacccaccaagctccccagggccttcctttcctgaacacaggcccaggtcaactcatctttctggttcaggtgtaatggcctaaagtggggggatgtcacttacgggataactgaggcccaaatcccagcctttggggctgtctccaaagcagctgaaaccttcacaggctaagatgggagaagcagccctgtctaagatttgaaaggtcaagattgggcagattggtgtaaaagatactcaaagtagaatcagcaagactccacgttggctggacattggcatgattggggcctaggaggagtcaggacaggttgtgctgactaggggtggtcaaagacctggtgccccacctccacctgttcccccatgtcgaccctccccaccaagtgagaggcctgggccagaggggtgggcagggccagtcctgggctcttacccgtggcgggcagagggagccttccgtgtgcctcaccagggacagatgatctaaggaaactgtatcagggcctttcctgggggagtggggtgctgaggcaggaccctcaagtttgctgtgcccacctgagctagggttgatacctccaggcctgacttccttctctacctgaccccccagtgcccagcgggcctccgcggaaggtggaggtggagccactgaactccactgctgtgcatgtctactggaagctgcctgtccccagcaagcagcatggccagatccgcggctaccaggtcacctacgtgcggctggagaatggcgagccccgtggactccccatcatccaagacgtcatgctagccgaggcccaggtgcagcattgggtggtggtggggtggcagggtgagcacagaccagcatgcacaagctcccttttggggcccagatatgtccctcttcccctgcctgccctcagcagtgctgtgactgcctttccttggttgtgagacccgagatgctttgcagcatcaggggttaggctggggttttttgggtgtgggttttttgtttgtttgtttgttttgagatagagcttcactcttgtcgcctaggctggagtgcctcctgggttcaagcaattctccttcctcagcctcccgagtagctgggattacaggcgtctgccactgcgcctagccaattttcgtatttttagtagagacagggtttcaccatattggccaggctggtctcgaactcctgacctcaggtgatccgcctgcctcagtctcccagagtgctgagaatacaggtgttagccactgtgccccaccaggtcggggttttgagatgtgcctttcccctagacagtgctgggctggcatccactcttcccacagaaagggtagagagagtgctccagggctgtcttacccc

SEQ ID NO: 53351 - DNA, 1053 bp, Homo sapiens
cctctagcgcaggacagggtccatgtgatgtgagaacctccacgccaaggcttggttgggacagcccaggtctccccgcaggcaaggagactggaagggacgtgggcccagccacaccctataaagtggccatgcactaaggacctgtccagagtctcctctcatattctgttccatgcttcttgcaaggactttccaacagagtgtcccaggacaggaggaacttaggccacccagcatggaggccagtggacagaggccagaccggcactgtgggggtgcttgggctggaggaccccaggtacttccggcttggagacatcctggaccatctccctgtgatgtttcatggggcctcagaatggagacctcacagtccctccacctgtccatctagaatatctacatgcaccaaaggcccgcaacactgccagccccgaaacattccttcctaccttaatcctcagacaccccgaggaaggaacgggtataggtgatttcccgtgcctgtgggctacagcccaggctctgagcttggcactcacagccttcatagtcttgctgactggcttgcccttgggcccaccctggccatgtgccctgttcacccccaactcttactgttgtgggacacttctcatgcctggggtgattgtgtaatgtatgatcacatctgggatgctttggcgggtggaaggagacactgaatagtcaattccatggcaacaagcacaggccaggactgtccgaggcaaaccagggcatatgggcaccccattcacccctcagtgtcttcctttcccttggcctgagctgttgaacccacccttcttgtctggcagcctctccctcccagcaagcccaaaattgtcagagcatctgtagctgctttgtgttcttagggccttctgtcagcgggtcctctccctgcaggctgcctgccctccctgtctccctaccctcctcagccctggcacacccagttggtgctcagtgaggcagggattcaaatctttgaaccgggagttgttctggggtgctacccccatgggt

SEQ ID NO: 53352 - DNA, 4486 bp, Homo sapiens
gcgtgcggctcctgggatgggcggggtcctcccaggcctgcatcctacctgcctgcttcctctccagcagaggccaccattgtatagccccaccttccacaacccctggccttgtgtgccccggggctcccctcaggctagggtcctgaggtccctgacaaggtctggcctctccctgcattcttgtgatgggaacgaacccctcctcctccctcaggaaaccactatcagcggcctgaccccggagaccacctactccgttactgttgctgcctataccaccaagggggatggtgcccgcagcaagcccaaaattgtcactacaacaggtgcaggtgagtgaggggtcaggacggacctgagggtggggcagcaggagggcagcgccagagcccagcccgtggtccttcagtcccaggccggcccaccatgatgatcagcaccacggccatgaacactgcgctgctccagtggcacccacccaaggaactgcctggcgagctgctgggctaccggctgcagtactgccgggccgacgaggcgcggcccaacaccatagatttcggcaaggatgaccagcacttcacagtcaccggcctgcacaaggggaccacctacatcttccggcttgctgccaagaaccgggctggcttgggtgaggagttcgagaaggagatcaggacccccgaggacctgcccagcggcttcccccaaaacctgcatgtgacaggactgaccacgtctaccacagaactggcctgggacccgccagtgctggcggagaggaacgggcgcatcatcagctacaccgtggtgttccgagacatcaacagccaacaggagctgcagaacatcacgacagacacccgctttacccttactggcctcaagccagacaccacttacgacatcaaggtccgcgcatggaccagcaaaggctctggcccactcagccccagcatccagtcccggaccatgccggtggagcaaggtgtgtgctgtggacatggcatcccttcccgagtgtggctgcatctgggggtctctgctctccttgagccactgacctctggcgactgtgatccaccagcctctggtgtgtgacctccaatctctcatgactgtgaccactaacctctagtgaatgggcaccacattcttgatgcctgacctctgctgtccttaacctactgacctctgctgtatgaccttctgatctcttgtgaccttgacccactgatctcttttgactgtgtcactattcttgggtgtgcaacctcctgatctttggtgtgtgacactaatctcttggggccatgacccaccgacctctagtgaacatgctccaccacgctctggtgtgtggccacatgcttctcatgaccgaaacccactgaccctctgatcactctggcctggtgtccatcggctcaagcttttacactcgcgtttctggagattctgaccctggttgctgtggcatcccccgccctgtttggtgctcactgtggaagagcttgggctgggagttcaactgtgccgtttgaagctggctgggagtggggcgcttggtactctgcagccatccttcaaccccctgttccccaaccagtgtctcatcctggccattcaccttccacccttccagcccattcaccccacctcatatacccagcagagctgactctctctatgcctttgcagtgtttgccaagaacttccgggtggcggctgcaatgaagacgtctgtgctgctcagctgggaggttcccgactcctataagtcagctgtgccctttaaggtgagtaagggccacggccagctgagcctggcacacacacaggcctgctgggtgctgtctttccagtcctaacccatgtgcatccggctgtggagcaggaatgtggttgtgtatccgtgcactgtgccttgcagcccgtggtagggaacctcacccaaaggcattgattgcccctcccgtcccccacagattctgtacaatgggcagagtgtggaggtggacgggcactcgatgcggaagctgatcgcagacctgcagcccaacacagagtactcgtttgtgctgatgaaccgtggcagcagcgcagggggcctgcagcacctggtgtccatccgcacagcccccgacctcctgcctcacaagccgctgcctgcctctgcctacatagaggacggccgcttcgatctctccatgccccatgtgcaagacccctcgcttgtcaggtgtgcacacgaggtatcgggggaggcggggcagggctggaggtaaccagcagtgacagtcctgattcctgccctgcccacccaggtggttctacattgttgtggtgcccattgaccgtgtgggcgggagcatgctgacgccaaggtggagcacacccgaggaactggagctggacgaggtacctggggaggggatggggacactgacagccccattgcagtggtcagctgtggccttcctgccctgagcactgtcccagtgactctcagattcactccccaaattgaaatctctcttctggctggcagcccgcccctctctggagagagggactctgaggaaaccatctgggagtattcacagaactcccggagggcttacgaagaatccctggggtgggatgtcgtggagatgcctctgcaggtctagagaatgccaagccctgtagacactgcagagcctcgcagatctagaagctatggagggcttagtgagccttatagccaggagtccctgaatgtttgaaatccttcagtcctttctcatagccagtgtggcaacagcctggttagggtggggcagcttacacacagggctgcttctcatgggctggtggggaggagtggcttcacggtgtctgttactctgtaggggcagtgggttgggcaggtgtgggctctgacacggaaggtgagccttgatctcggcccagggagctgacatcccaggccacagcctcagggctggccggcatgctccaaggcccctcatgacccccatgctctgctctgccagcttctagaagccatcgagcaaggcggagaggagcagcggcggcggcggcggcaggcagaacgtctgaagccatatgtggctgctcaactggatgtgctcccggagacctttaccttgggggacaagaagaactaccggggcttctacaaccggcccctgtctccggacttgagctaccagtgctttgtgcttgcctccttgaaggaacccatggaccaggtctgcctgagccggcttggctgtcagcaccctgattccctgggcctggcctgagacgatgccagtctcaaacaccacaagaccccaggtctttatcagtttgggggcttcgagatcctggggcagcactaaagacccaagatctgtcccggggatcctaagacgcggccctgggacccagaggccagacctaatgtggctccagggacccagtcctgccaggtccaccttgtagggtctgggagaccaggcccagggtaacccagacccagagccctttctccaggattaataggcagagggtggggggttctcacgctgagctcacagcctgctgttctccaccgggccacagaagcgctatgcctccagcccctactcggatgagatcgtggtccaggtgacaccagcccagcagcaggaggagccggagatgctgtgggtgacgggtcccgtgctggcagtcatcctcatcatcctcattgtcatcgccatcctcttgttcaaaaggtgagcactgccctcagagctccgggaacggccacctgcccctcgcctttcaggccctctccgggtgtggtgcctgtggagagcgtgcagccttgcatcctggaccctgagcctcaggctcagcaggaaggcaggaagggcaggagcagtgtgtgtgcctacctgtgtctgcaggcctgcatctgtcaggtgagggagcctctgcagcagcctgggcgtgaggaactaaagcctcagagggttgtctcatgtgcatccctggcacgtctgtctgtctctgtgtttctgtggataagagtgcgtctgtctcctcttcagttttaagacaccgccatctcctgagctcctacctcgagtcctttccttctgccaccattcctggatgattccccagccctactctcctgcttaggcctagagaggtcgagctggaggcccacaggccatggatgctcactaacagacatgactgatggcctgctgtgcccgtgccatccgcagcggcctcagcctcagtgtgtctttcccactcagttctctatcggcagtggccaccacctgccctaggagtctcccttcctatccgtgcaccttccagcctgaaagggatttccaaagatttaactttgtcactctcagtttaaaaccttttgatggctgcccacgtaaagcccaccctctttagcctgacagccaaacacctggctaatctgacc

SEQ ID NO: 53353 - DNA, 2951 bp, Homo sapiens
agtccactccttcctcccagggtggatggacctgtgggcgggtccctaaggagtgtcccacagatgcactcatccttcccacttccacctgcattctgggtctgtccagagaggtagaccccctccctgtgaatgtcatgtgggtgccatataaggggcctgcagggtccccatgtcattagagggctgagtgcttggtggaaactgtgaccgttcctttcttctgtccttgcttgtctttcgggacctagtaaacaagaaaggtaggagttgttccttctctcttcacacacctccccctctacttctaatccttgggccagcagggagggatgacgctttgaccagaagtcccctggcctatggctttaagcagcaaactgtccagtcagctcagcaggctccctggttcaggactgagtcctcattggtgtgaggaggcagtttctgtctcactcttgccagttcaactctgcagaggatgcttcttctctggggcacatacataatacagactgcattgctttccctgagcgtacagagctcaccagaaccatcacccggctcccagttctctgagaagttgcctaagtgctgcgagagacagtctcgcacagagcaaagagcagtcactgtgtggaacagcagagaggcatgtccttgtacccacctgagcacactcactcaaattcttctttccgaagcacatgcgtctgcagaccacaagtagcctctggctatttgttggcagctgaatcctatggtctgtctctgaccctgtccttgtagatgggaaaactgaggccagtgagagaggactctgcccagctagggtgacgcctttcccgtccctcccctgctgccctgggcatttaccctgatactctgagggccaaaaagctggggccctgtctcctgtgctgtttgtgtattttatgtgtcatttgcatgtttgttcccggtggttcctgctactcagctgggtggccttggagatagcagtcactgtcctgcagtgacctgccttctatccaaaggagctgctcgcccctgcaaccccttcctccctgctgcactgcccctctgctcacgccacactcctgctctccctaccccctccctgccctgtgttctctcatgtcaaggctgttctggccctggctcctccgcgctcagagatcctgggaagaggtggggcagtaggaggacagagccgtggacatgggggctccttggcagccagccatgccatgtgtcactgtctcagcctggacctcaggttctcaccagcctcccttctgtctctctaggaaaaggacccactctccgtcctctaaggatgagcagtcgatcggactgaaggactccttgctggcccactcctctgaccctgtggagatgcggaggctcaactaccagaccccaggtagggcactcctatggcctgtgtgcccccagcccagacctagcaggcctgtgggtctgttctgcaggtctcagggtcgccactgaagttcctgggccgcatgcacttgttcctgctccttttcttcctttctgcccttctccctgtgctcatccactttggttggaatgactggggagcccccatatcctgcagctggacaggtgccccaggccaggaccctcttaggtggcaaagccacttagccactgccttgtcttcagtcaaggcctctgaatatgggctgaggacctcccagagcccacgtctctgccacagggtggccagtgtctggcgcacgctctgacgcctccacatgaaagaggggcatgttagcagtgggagatgcctcaccagacatctgtggggagatgaagtgcctgcacctgagccttcctggaggccgaccccaggtttaccataccacgtacctgccccttctcctagccactctcatggggctgtccacctcttccttctacctgaaatgttactcctcccaacacccagcagacacagctcagacctctcctcttgcccacacccccacagggttaggtgtctcttcttggctccaggaacctccctccttcttccttttgacgcctctcacagtgagctgggattacctcagtgacagtctctgagctctgtggtgccaggaactgtgtcttgtcatcccccatcccttgtattcagcgcacgatgggttcttgttgaatgcctgtgaaatgaacacacagacaaatgaaggaatgagtgaactaatgcatacacacagggtttgtgtatgtatgagctggttattctgcatgtcaaattaccccaaaacttagtggcttaaaacaacaataattatgtattatctgtcacagtttttgtgaggcaggaattcagacaggggcacagcaggaacagcttgtctttattccagaaagtctgggccctcagccggaagacttgaaggctgggagctagagtcatttaaagcaggggttggcagactatggcccgtggccaagtacagcccaccacctgtttttgtaaataaatttttactggctgggcgtggtggctcatgcctgtgatcccagcactttgggaggctgagccgggtggatcacctgaggtcaggagttcgagaccagctaatgaaatcccatctctactaaaagtacaaaaattagccaggtgtgtggcccctgtcatcccagctactcaggaggctgaggcaggagaatcacttgaacccaggaggtagaggttgcgtgagccaagatcgtaccatcgcattccagcctgggtgacaagagcaaaaccccatctcaaaaataaacaaataaataaaattctactggaacagacacacccatttatttatatgctacctacctatggttgcttttgcactgtaaaggcaccattaaatagatgcagtagataccagatgtccacaaagcctaaactatttacgctctggcctgtt

SEQ ID NO: 53354 - DNA, 1017 bp, Homo sapiens
ggacacccagtctgtattaactgggagacagaaggagccttgacggaacttgtccgcagccccagcccctcaccgccccctcctcttctccgccagcccctcgcaagcccgctcggcacctccactgtgtgtgatggtgctgtaagcagaaaaagttaacgggctttcttttcttgccccgttgtttttttcgtttgtttgtttgtttttttctctgcaggttccagtgtccccagttgcccgaatacctcaagttagttttcaaagttcccgtgtttgggggatactttggcttctgtgtctgtttccactccttacttttgtttaccccatcgcctccatccttccttgaattcttctctccccttccctttcttctcccccaatcccactgtctcctaacctttttccttccctaccctcccctctgcccaccttgcttcctccaggcctgttttctctcccaccggccccgtctctgttctgcctctctggcctccagtcccggcctgacacccttccttctgcgtgcctctacctctcatctcctctcctctgtctcacacccccctcctggtctctgcttctctctctattgtgtctgtacttcatgaccactccatctacacacttggtgcccgggatgacgatggctgtgagtctcccatggtgactgccaccggtgaggggcaggagggctgtctgcaggcagatgcgatggagcccagctcctgtcacgtctgctgccaccgacctgggcgtcccacccctcctgggaggaaggaagcctctcttccatcttgagagacctgccaggcagggcctagtgcccccactcagcaccccgccaccaaaacaggctccacatgctcatggcacaacaccgccctctgtcctctcccaccctccgccatccctgtcgccgcatgtgctgctgtctccatgccaccagttccaagtgctccatggtcacacatgttcacatgtgcacatacatgcgttggggctttctctgcc

SEQ ID NO: 53355 - DNA, 1022 bp, Homo sapiens
agggagggatcctggactacctgagaggggccaccatcccttccatctgtcctggctcatttcattaggtgaatgcagggcttcgggagggactctgggtgttcagagccctcagcagtttcgggactgcctgagagggggccaccacctgtcctagctcatttcattaggtgagtgcagggcttcgagagacccttcacctgccccatcccagctcagaccactctaccaggcaaggggatttggtaccatggtcagaggagtccccagtccatcacttttctgataggtgatgtggcaacctgtgagctccatggctggcaccacgagatagagggcctggctgtggcctgtggagtgaaggcaggatgtgagcatcaccgggaaggctgggtcccctgcaggagaagcaggtcaaccttggctcttaccccaccccacccgctttctccattctctgcagtccatcgaccctggacagcagttcacgtgggagaattcaaacctggaggtgaacaagcccaagaaccgctatgcgaatgtcatcgcctacgaccactctcgagtcatccttacctctatcgatggtgagccaagggggtgcccctcccatccccttgctctcccccttgctagctagggcaacatgtcattctacagaggatgtccacgagtctcaggggtgcactgaggcatggtgggctgggctggggaccctgtagtaatgccctcccacctcctttcttatccataggcgtccccgggagtgactacatcaatgccaactacatcgatggctaccgcaagcagaatgcctacatcgccacgcagggccccctgcccgagaccatgggtgatttctggaggatggtgtgggaacagcgcacggccactgtggtcatgatgacacggctggaggagaagtcccgggtgaggctgcagggccctgccaggaggcgggtgggaaatgcccagccacaaggtgatacagggcaccttcttctgtgccgctttcttctgtg

SEQ ID NO: 53356 - DNA, 1879 bp, Homo sapiens
gtgtgaccgccatggagctcgagttcaaggtggggctcgggtgggcctgcttggctccagggcctagactgggtcatgcagatgacccccacccccacaggaagcctggcctgaccaatccctgcctctcaatagttgctggccagctccaaggcccacacgtcccgcttcatcagcgccaacctgccctgcaacaagttcaagaaccggctggtgaacatcatgccctacgaattgacccgtgtgtgtctgcagcccatccgtggtgtggagggctctgactacatcaatgccagcttcctggatggttataggtcagcatgcatgtcactgccccaccatgccctacaggggcctaggcctgtgcctggctggtgggggtgggcagcagagtagggccagcctagaagaccagagagggctgggtagagcagtgaggacttcctggaggaggggtgatctgagcagggccccaaggggctaggcagcctaaggggagactctaggggcagcagcacctccagcatgtccagtcttatgtccaccccagacagcagaaggcctacatagctacacaggggcctctggcagagagcaccgaggacttctggcgcatgctatgggagcacaattccaccatcatcgtcatgctgaccaagcttcgggagatgggcagggtgagcccaccctttcccccagggcccctgtcatacctgggagaacaccagccacccttgggggagctgccgcctatgttactgtctcctttgacaccccagctgcttgtcagcatggcctcaggcgcccgttattactacctgaggcatctgtcccagaatcctgtgaagcctggcacccctcccctattccttctcacctgattatgggggcccgaccctctgtccacaggagaaatgccaccagtactggccagcagagcgctctgctcgctaccagtactttgttgttgacccgatggctgagtacaacatgccccagtatatcctgcgtgagttcaaggtcacggatgcccgggtgagtgagtgcattgagtgtgtccataacgctgcctgtccacacgctgggtggatggctgcctgcatggtaccttagctcaagcttcagaaatctgaggcggtgggtgggtattagggtgtgagcacatctccccctgtggcctcgggtgcagtgacacagatgcatgcctgtatcatggtactaccctggtctagtccagaggggtggctgcctaaggcacgaattctaatcatgtaccccacccacctttcccaggatgggcagtcaaggacaatccggcagttccagttcacagactggccagagcagggcgtgcccaagacaggcgagggattcattgacttcatcgggcaggtgcataagaccaaggagcagtttggacaggatgggcctatcacggtgcactgcaggtgggactggccccctggagggctggggtgggtgggcctgaaggcctggcagacccactgcatgaggcaagcaggactcctgacccaactgtgtttctgagcagtgctggcgtgggccgcaccggggtgttcatcactctgagcatcgtcctggagcgcatgcgctacgagggcgtggtcgacatgtttcagaccgtgaagaccctgcgtacacagcgtcctgccatggtgcagacagaggtaacgcagaccaggctgcagggccagggccttggcagcagcgctgctgggaaccctaggctttagcaacagtttgatgcccacaggcatgtgcattcattcatgctgccaacctttcacgtggcctgcgataggcatggtggtgtgtgcttatggtcctacctacttgggaggttgatgtgggagaatca

SEQ ID NO: 53357 - DNA, 3099 bp, Homo sapiens
ttcgaggctgcagtgagctatgattataccacggcactccagcctgggtggcagagcaagaccctgttgctgaaaacaaaacaaaacaaaacaaaaatgctgcaacattgcctgtgctgcctgggggctcaggggattgatgagtaagatgtgttctttcattcggcagctctctgctgagccccagtggtgtgcctggctctgggcaaggttgcacagagcaatccttatggggtgcccagtcaggagcagagaaacatgattgggatggcagatggaaggcaggtagatgtgggggcctgagagaatgacaggagagagatgagccttcagaggctctttcaggctcccccgcacactgcctgatgtagctgccagggtccagcacctgctcttggccagcagaggctaactccatggctgcagtgtgagtgtcagctgtgtagtgggggtgtccactggcgcgacccacactgaccagccccctatcctggcaggaccagtatcagctgtgctaccgtgcggccctggagtacctcggcagctttgaccactatgcaacgtaactaccgctcccctctcctccgccacccccgccgtggggctccggaggggacccagctcctctgagccataccgaccatcgtccagccctcctacgcagatgctgtcactggcagagcacagcccacggggatcacagcgtttcaggaacgttgccacaccaatcagagagcctagaacatccctgggcaagtggatggcccagcaggcaggcactgtggcccttctgtccaccagacccacctggagcccgcttcaagctctctgttgcgctcccgcatttctcatgcttcttctcatggggtggggttggggcaaagcctcctttttaatacattaagtggggtagactgagggattttagcctcttccctctgatttttcctttcgcgaatccgtatctgcagaatgggccactgtaggggttggggtttattttgttttgtttttttttttcttgagttcactttggatccttattttgtatgacttctgctgaaggacagaacattgccttcctcgtgcagagctggggctgccagcctgagcggaggctcggccgtgggccgggaggcagtgctgatccggctgctcctccagcccttcagacgagatcctgtttcagctaaatgcagggaaactcaatgtttttttaagttttgttttccctttaaagcctttttttaggccacattgacagtggtgggcggggagaagatagggaacactcatccctggtcgtctatcccagtgtgtgtttaacattcacagcccagaaccacagatgtgtctgggagagcctggcaaggcattcctcatcaccatcgtgtttgcaaaggttaaaacaaaaacaaaaaaccacaaaaataaaaaacaaaaaaaacaaaaaacccaagaaaaaaaaaaagagtcagcccttggcttctgcttcaaaccctcaagaggggaagcaactccgtgtgcctggggttcccgagggagctgctggctgacctgggcccacagagcctggctttggtccccagcattgcagtatggtgtggtgtttgtaggctgtggggtctggctgtgtggccaaggtgaatagcacaggttagggtgtgtgccacaccccatgcacctcagggccaagcgggggcgtggctggcctttcaggtccaggccagtgggcctggtagcacatgtctgtcctcagagcaggggccagatgattttcctccctggtttgcagctgttttcaaagcccccgataatcgctcttttccactccaagatgccctcataaaccaatgtggcaagactactggacttctatcaatggtactctaatcagtccttattatcccagcttgctgaggggcagggagagcgcctcttcctctgggcagcgctatctagataggtaagtgggggcggggaagggtgcatagctgttttagctgagggacgtggtgccgacgtccccaaacctagctaggctaagtcaagatcaacattccagggttggtaatgttggatgatgaaacattcatttttaccttgtggatgctagtgctgtagagttcactgttgtacacagtctgttttctatttgttaagaaaaactacagcatcattgcataattcttgatggtaataaatttgaataatcagatttcttacaaaccaggactctgtctcagctgtttctggaaccaaagagtctgggccaaatcagtagctaggatgggttctggagattccctgctcctgaggagacggggagggtaccctaagtatttgtgccagtgtaggctcctggcatggctacccactttcagaaaggagtggttataaaccctgaaaaccaggccaccaagagccagccaggccagagccaccagtgcatgtgaagagcaccctaggccggggagcataccctttgcctctctttccctttaagattctgtgggttgcactatcggggcattgggactgcccctctcccactaccttggaggagagggatggccctgtggcagtagagactgaatgtatggaaattggttagtgagatctcctgtaattattgcaatgtggataatggacacaaaaaacagtgtgtccatctggcccctggacacacagctgcatcacccactgagctgtgcagctgctccactggtgagcagacaagtcctaccaggttgtcaaattgtggaacttctagggatacagatgaaggagacccagaacaagctgcgaagagaaatgcgtaagtcagcaacaaccacaccaaggcagcatctgacccagggaaggcttcctggaggaggtggcattcagagtgtttcgtagaatgagtagcagttagtttttttttgtttatttttgagatggagtcccactctgtcgcaaggctggagtgcagtggcgtgatctcggctcactgcaacctctgccccccgggttcaagcaattcttctgcctttaccctcctgagtagctggaactacaggtgcccgacaccacgcccaggtaatttttgtattttta

SEQ ID NO: 53358 - DNA, 1049 bp, Homo sapiens
gtggcattcatacattataaataaatgtatttatagtttgttaaaaggttgtaagcctaattagtggggagtacaataagaaggaccaaggccgggcacggtggctcacgcctgtaatcccaatactgtgggaggccaaggtgggtggatcacctgaggccaggagttcgagaccagcctggacaacagggtgaaacctcatctctactaaaaaatacaaaaactagctgagcatggtggtgcacgcctgtaatcccaactacttaggaggcagaggctgcagtgagctgaaatcacgccactgcactccagcctgggcaacagagcaagactgtctcaaaaaaaaaaaaaggactgggcgtgtgagggaagatttgattatttgatttagggtggtcaggggacacattgaaaagatgggacttgaggaaagacttgaatctggtgagttttgcctgagtatcttcgagatgagcatccaggtggagggagcagctatagcaaaggccctgggtgggagtgtgcctgatatatgagggtgggtgtggctgtgacaccctgagcaaggggcaagagggtagcaggggatgaggttagagaggaaatggggccagctcctttaccattgagaagactgcagaaatccagtggtggagagaagtggccagattctggttatatcttaaggcagatctgatagaatttgctgatggactcgatgagaaagagaggagtcaaggttgaccccacagttctggcctgagcagcaggaaggataaagttaccatttgttgagatgaggaaggttgtacagaagggttaagtaatctactcgagggtcccaactggaatttggtggcgttggtaggactcccagctctgcttaactccagggctcttttcacaccgctacctgcctaaagctagaaatcgtcagatgcattgagaaaaaaatatttggggccgggcgcagtggctcacgcctgtaatcccagcactttgggaggtggaggcaggcagatcacgaggtcaagagattgagaccatct

SEQ ID NO: 53359 - DNA, 1307 bp, Homo sapiens
ggtgtagtttaagtagagtctcttcagagagttgaggatgttgtgcttgttaaggaagaccggtttacatctgtgtgtacattaccttcctcaggcttcctcaggcccagtgctcatggaagggacgttgagggactgactacgtattagagccttgaaggccaagattatgccttgttcatttgaaattcttgctgtcactggaataggggattatgtcttgtaatgttcataatgcctaataaacccctgtaagtggtttacatgtttctttttactttcaaaaaggtactgtaccccacgctatagtgagtttgaagagctcgagcggaaatactggaaaaatcttacattcaatcctccaatctatggtgcagatgtgaatggtaccctctatgaaaaggtgaggctcactggaaaccctctgtgcagtgtttttgtaattttgtaatacctttttttcggcccggcacgtagtaggcacctaaaagctgtttggtgaatgggtggatgaacagatgatctacccccagctgatgttgctgtgctggcctaattgtgggccattttgcatgtgactgaattttatttctcctgctttacatgtgaattggatgatgtggtgttcttttcaagggttgttagcatagtcggtgggtggtagctgatgagttcttgaaagggtgggttggctctcagataatgaaatgaggcagtgtggtttctgcagaaaaaagatgactgactaatctaatgaaaggggtatacatttaagaagagaaatacatttagatttttcagaaccctcaaacaagattctgtggcaaaagctattttaaccacttttattggcttgaaatcctgccttaaatatggtgaaaggggagaatatttgggaatatcttcagatgactgaaaaacagtagggcattcagggattatcactcataattgttttcatattttaattttttttttttttgagacggagtttcgcttttgttgcccgggctggagtgcaatggcgcgatctcagcttaccgcaacctccgcctcccgggttcaagtgattctcctgcctcagccacctgagtagctgggattataggcatgcgccaccatgcccggctaattttgtattttttagtagagacggggtttctccatgttgctcaggctggttttaaactcccgacctcaggtgatccacctgcctcagcctcccaaagtgctagaattacaggtgtgagccactgcgcttggcccatattttaatgtttttatcaattattggaagagttaaaaaa

SEQ ID NO: 53360 - DNA, 1050 bp, Homo sapiens
tcaggagttgaagaccagcctggccaagatggtgaaaccccggctctactaaaaatagaaaaattagttgggcatggtggtgggtgcctgtaatcccaggtgcgcgggaggctgaagcagggaattgcttgagcccgggaggcggaggttgcagtgagccaagatcatgccactgcactccagcctgagcaacagagcgagactccgtctcaaaaacaaacgaaaaaacaaacaggtgactgtcatctctttattcatctttcctacactagtattcacaaagtaatatttgccctttgaaggtaaatggtgtcagttccagtggtagccgtgaaagtcaatgaggaatgctatggtcttcacgtccatagtgttttgacattattcccaatgtttgtcagagatgacagcttacttgtgacctactctgatttgtaggttcagagcctcggtttctatgcaaatgtaacttgccctggactgtcattgcctttgcagcatgttgatgagtggaatattggccggctgagaacaatcctggacttggtggaaaaggagagtgggatcaccattgagggtgtgaacaccccatacctgtactttggcatgtggaagacatcctttgcttggcacactgaagacatggacctctacagcatcaactacctgcactttggagaaccaaagtcctggtacagtctgcctgcagtcggcaccgggcttctatgctagagcacgggctcatgttcattgtgcgtgggaagcacctcaggattgtgttaaagggcagaccctggttcaggcttggggtgacattccatgttttaaacacactttcaagtgctaagatgcttgctgttggagctctggtgctcggaccaccttttgagtagggaggctttagagagcagggtgctggcagttacccaaagacacgggggctcttccaggctatcccactgctttctaattttttttctgaacaggcctgaggcatttcttagcagcagacttccaagactagagtcactctctcagatgacagaaagc

SEQ ID NO: 53361 - DNA, 1003 bp, Homo sapiens
ctcaccgtcctgggggcctaagtgcagagcctaaccaccctctgtgaccccgagttagtgcccaggtagatttgccccagtagcatgtgctctctgcctttttttccctgcttcccttcatgtttgaaggtcctgcaaggataacatgccctcagcctgtgaaccaaaacaatctggttataaaccatcttgcacttgtttccatgtggagggaggagctaggacgtgggggtgagttggaagcagcaaggtatgctcacctggtgctcttctggttcctgctgacagtgctcctgtagaaaggacatggtgaagatctccatggatgtgtttgtgagaaagttccagccagaaaggtacaaactttggaaagctgggaaggacaacacagttattgaccatactctgcccacgccagaagcagctgagtttcttaaggagagtgaactgcctccaagagctggcaacgaggaggagtgcccagaggaggacatggaaggggtggaggatggagaggaaggagacctgaagacaaggtaacccagcagcccttttgtcctggctgcgtgagggagggatgtctgggtaggtcctgtaatctgtggagaggctgtttcttgttttttttgttttgttttgtttttgtttttgtttttgtttttgatggagtctcgctctgtcgcccaggctggagtgcagtggtgcgatctcggctcactgcaagccccgcctcccgggttcaggccattcttctgcctcagcctcccgagtagctgggactacaggcacctacagccacgcctggctaattttttgtatttttagtagagacagggtttcactgtgttagccaggacggtctcgatctcctgacctcgtgatccgcccacctcggcctcccaaagtgctgggattacaggtgtgagccaccgcgcccggccgaggctgtttctaagatgccgtttgtgccttggctaagggagtgttcttggtaaaggctcca

SEQ ID NO: 53362 - DNA, 1051 bp, Homo sapiens
taatgtcgtgatttaagtctgcagtgctattggtggctgagccaggggatctgtgctctgaggagaatttatcctgggccatatgggaaagaaaggaggaaccgttccttggtacctgctatatgccaggcactttgccagctactctgcataccttttcttaatcctcacaacaaatctgttaggtgggtggtaatacctgtattttccagatgattgaacaaggtcagagaggtgaagtcccttgtctcaagtcacaaataagaggtgtccctgagttttgagccaggcctgacaggctctggccattcactttgggttgtgtgtggatgtgtatgaatgtgtttgagtaagtggatgtatatgtgggctcttaaaagatttgccctctcccttgcagcctggccaagcaccgaatagggacaaagaggcaccgagtttgtcttgaaataccacaggaggtgagtcagagtgagctcttccccaaggaggatctgagttctgagcagtatgagatgacggagtgcccggcagccctcgcccctgtgaggcccacccatagctctgtgcggcaagttgaggatggtcttaccttcccaggttagttgactatggtgtattttccacaaccctaactcatatatgtgtcccgtgttagatgccatattgagtgctgggtcagaaataaaaaaggcagagtgacaggtccgtgagcagatagcatacttggagtgtgagaagtgctttgggtagggatgtacagggaggactggacacgtagggaaaagctcctccctctgcctggtcaggggtcagggaaacactggaggttttggtgaaggtgactcttacaaggtaagtaggaccttcccaggcggacagagagagaggagggatgtagaaagggagtcccagatgggaggagcagggcacaggcatggagatgggaatttttttttttttttttgaaatggagtcttgctctgtcatgcaggctggagtgcaggggcgcaatcttggctcactgcaacttctgcctcctgggttcaag

SEQ ID NO: 53363 - DNA, 1029 bp, Homo sapiens
tcaggcttcctccttaaatacatgttgtcaccaaaagctgattcctgcttttgtgcaaaatggctcttggtgggtctgccactctgagtgatcagtcatgtcagatgccactggacccccactacccaagtgactttccctgactccccagccttggagcttatgtgggtcaagctgcagtctttggtgaggggtgggagatagaagaagccagtgcagaaggtcctctttattccctattcccttacctttagtttttaaaaatgtatcttaaaaatcttcactatggaaaatttctgacgtacgtacaaaataccatcacgagcccccgcgtgtactcatcatatatatgattaacatttggcacatttgctttctgttttctttggctgcagtacttgacactcagtcatattcacatttccctagtgttgccaatagtccctttttatggtaggtttgtctccttgttgttgatactcataacttttctcggtgccttctctgaatctcagggtacggttttggtagacttctttttaccttgtgaatgttcctctttccatcccactgtggttgcaggctaatgagctaataactactgtgtttccttctcattgcctctgattgcagttctctgtgccttcttatggcagcttccataaaggagggctttttcagcctggaaaccagagtctctttaactcccagttgccacctagcaattcttccttcgcagaggccccgggccatttcatccatcctactgttgactactgttcactacagttcatgctgtcctcttgctgagtcttcctgacattcttgtttctagttgcaatcacaatcacaaaaagcagctaagaagtagcaagagctcactgtatattaaatactttgtttatcttttttgagacagggtcttgctctgttgcccagggtagagtgcagtggcacagtcttggctcactgcaacttctgccttctgggttcaacccatcctccccacctcagcctcccaagtagctg

SEQ ID NO: 53364 - DNA, 1008 bp, Homo sapiens
ccctctgtaatgaggatggaatgagtaaatggaaggtcaggtttgttttagtaagaagccaccatcagaattaattgactgggaggaataagggacagatagtcaaggtttgggggcagaagctgagcaactttgtccatccctggagaggtcttatagcactggatctatatttgtagacaactgggttccttagagcacccttatgttcccccacccccactttaagcatccccaagctgtaatctgggctgcctgctgttcagtttccatgccaccatctatgtcaagggccttttttaggtcagtctggtaaactgcagtttttggtaaaagcaccctggctggctgacactgccgaaactgtagagttttcattacctactgactgagccacagccatatgtctgctgcagaagttcttgttagttcaagctactttgaaaagtgagttcccaaaacaaggtgggagaacaattggttcttctctgtacagaataaaccctatcaggaacactaaccttgaccctggtgccagatgttggatgagggaggaaagaactcaggagccttgagttccagctttcttcaggcagggccctgggagtctgcctgctatcccgccctgtctgcaaaaagagccctctggggaagggtttattactaccgttttactggtggggctgctactcatccaggctcacacagctgctagttggtcgaaccctgacctttctgttatatactgagggaatttagaaactggagcaatcccagggaaggcagcaccatgagaagggtgcggatgccatggtagcaggaggagtactgtccaggagatgaggaaatgtgaaaagatattcaaatctttgaatggacctgactactttggtcagaggcagcatgacggtagtggaaagggctcagacttcggacttggacaccaggtctccctccctgaggttagagatcacgtcttgtttttctctgcattgccaaaacaagtat

SEQ ID NO: 53365 - DNA, 1051 bp, Homo sapiens
acggagtcttactcactctgttgcccaggctggagtgcagtggcatgatcttggctcactgcaacctctgcctcctgggttcaagtgattctcctgcctcagcctcccgagtagctaggattacaggtgtgtgctacgacgcccagctaatttttgtatctttagtagagacggggtttcaccatgttggccaggcttgtctcgaactcctgacctcaagtgatctgcccgcttcagcctcccaaagtgctgggattacaggcgtgagccaccgcacccagccccacaatatcctttaatcttcagtccatgcccatctttccctgcatgtcccaagaatgtgttttatagttatttcttttgaactctaatataaatcaaactaaggtcacatactgtatttggaagttatgtttctttactgttgtatgcccctccccctacttttaaaaaaatttcaattcaagcataacaattcagtgatatgcacacattttaactgtacagctcaatgaaattttacatatgtaaactgtataattttgcttcctgcaattttcacttaacgtagtgaacattttccctcatcattcagtattcacaaatggaatgatctggggccacttttggctttgtaaatggaacagatgtcagtgtgttaattttttagttgtgagtgtgagcctgcctgtctgtttctgtttcttccattctatcttggtcactcctgtttggccaggataaagaaaaaaatctgtgcttgggttctgggcaccatggctcctgattacaactgaacgatggggcatataggggttgattttaattgtctgcgttggtgtccttagggtacactgaggcggcgcacaatggcagctgccagatgccttcagattaaacatgactatgagggcagcgtagaatactatctgcactgagctggagttgccagaaatgaagaaacaggcacctaatggaagtacagaccagagctttccttggctgcttggaacaggtttcaggggcctttgggaaagcacctctgtttggg

SEQ ID NO: 53366 - DNA, 1812 bp, Homo sapiens
gtaagtggggcttgggtcagaccttaaagattaaagagtgagtcagctatggaaaaagggagcagaagggagaggtcatttcagcctgggggagaggtttgggcagaggccgagagagagctgtgattactggcagattagggcacagccggggacgttttcaggaagcacttgggtcctatggtaaagaggtctgcatagagctttccagtttattctcactccctgagacctgccacacaccattagcctgcagctctgttcatttttcaacagagtggtgtaagaagcatgatccggtgctaacctagggcagtgggcagtggcctaggtgggcagtgggggtggcactgcttccacatactcagaggagagacggttctggttctcaccttcctgggtcccaggcatgtgctggtggaagtcagtggtcacccaggtgagggaggaagcgctgtcagcaggcccaaaagagaaggccacagagccttgggcccagaggtgactgagggagcctttgccttttggcaggtgggtccacgtttcatgtgctgtggcaattctggaagcaaggtttgtcaacattgcagaaagaagtccggtggatgtgagcaaaatccccctgccccgcttcaaactggtaagggcttgtagactctacataatttcccgacttacaagtttctgggtagaagagaacagggacctcctgtaccccttggttttggttagagtttgtgattctcactctgtggttagattccttagtggaggccaggtgtggtggctcacacctgtaatcccagccctttgtggggccgaggtgggtgaaccacttgaggtcaggagttcaagaccagcctgggcaacatggtgaaaccccgactctactaaaaatataaaattagctgggagtggtggtgcgcacctataatcccagctcctcgggaatctgaggcaggagaatcacttgaacccgggaggcggaggttgcagtgagccgatattgtgtcactgcactccagcctgggtgacagagcaagactccgtctcaaaaaaaaaaaaaaaaaaatttccttggcagataaagttgtaaccagacctggattagagcaggctggtgtgtccttgtattttgggaaggggctggctcttgcttgcttggctttgcatttgggaggggaacaacagaggaagctgcagtgccagttcctgcaatcactggttttcttcccctgtgctacagaaatgtatcttctgtaagaagcggaggaaaagaactgctggctgctgtgtgcagtgttctcacggccgctgcccaactgccttccatgtgagctgcgcccaggctgccggtgtgatgatgcagcctgacgactggccttttgtggtcttcattacctgctttcggcacaagattcctaatttggaggtgagagagggtgtcattctagaatcctcttgacagttttcatggtcattttctctgcatgttttccatttgttgtatcagcaactatttcctcaagcattctgcattatgaagagtgctaatgagttaagagattgagaggtggcccctgtccatctccactccctgccttgtactccataagccagtgacaccaaactgcttgtagttgattcgttttgattatctctttacttgtctgcctctccatcagaataaactccttgagggtccatatcttattaatgtggtcatccttattacttaacctagtgtccgggacatgcagaacctctgaaaatgttgagaacaaatggggagagctcccaagagttaaccat

SEQ ID NO: 53367 - DNA, 1051 bp, Homo sapiens
cacactcattcagggaacagcaaggggggccagcatggctggggcagagtgcctgggcaggctagcaggcgtgcttggaaatgaggccgtcacatactttgtgatcctgtttgcatcaagggcaagttcagaatgagaagggcatggttgagggcaccagagatggcaatggcagggcccttggaatgggggacagtttgttgtgtgtagctggagacatctgggaaacctaagtctttgtgccctagccctgagggtaatgctgcaggtgctaagatgtggtgcagctttgcctggcggcccaggcctcagggcacctattgagtctctccttcgatactttgatgtcagttcttggcaagatcagaggtccatgttgttgttcagagagttctgggtaagataatatggtataagggccagttgtggactagctaaatttatgggaagagctaaatttatggaggaaatgtggtactggtctcttccaatgtcctggctgggatggtgggtatctggaaaggcttgttttagctcccatctcttctctcctttttacttttactttcccatgcttatctttccctgataaggaggaactaattgatcttcatctccatatgccaggcctgcaaactccacgtgtgagtaaccaaagcctctgtttttttccagcgtgccaagggggccttgcaaagcatcactgcaggccagaaagtcattagcaagcataagaacgggcgcttctaccagtgtgaagtggtcaggctcaccaccgagaccttctatgaagtcaactttgatgatggctccttcagcgacaatctttatcctgaggacatagtggtaatatctgcaaggagcttctcaggcagtttggaatggggggatgtttctaaggtctggctggcagactgtgtgtgtatgcctgcttcttctagccaggtccctggtcccatcaccatgtcctcaaacagaaagaatcatctgtaccagtctttctttgcaaagaaaactgcgtgctgctagggtaccctattttccctagaag

SEQ ID NO: 53368 - DNA, 1039 bp, Homo sapiens
agctggtattggcatatttgattccaaagcctgggctctcctattgcactagaatgccctcaaggataatttagacggcaacagatgcaggtttcaaggaattgcagaaaatactgattcccaggtacttctagggaaaatagggtaccctagcagcacgcagttttctttgcaaagaaagactggtacagatgattctttctgtttgaggacatggtgatgggaccagggacctggctagaagaagcaggcatacacacacagtctgccagccagaccttagaaacatccccccattccaaactgcctgagaagctccttgcagatattaccactatgtcctcaggataaagattgtcgctgaaggagccatcatcaaagttgacttcatagaaggtctcggtggtgagcctgaccacttcacactggtagaagcgcccgttcttatgcttgctaatgactttctggcctgcagtgatgctttgcaaggcccccttggcacgctggaaaaaaacagaggctttggttactcacacgtggagtttgcaggcctggcatatggagatgaagatcaattagttcctccttatcagggaaagataagcatgggaaagtaaaagtaaaaaggagagaagagatgggagctaaaacaagcctttccagatacccaccatcccagccaggacattggaagagaccagtaccacatttcctccataaatttagctcttcccataaatttagctagtccacaactggcccttataccatattatcttacccagaactctctgaacaacaacatggacctctgatcttgccaagaactgacatcaaagtatcgaaggagagactcaataggtgccctgaggcctgggccgccaggcaaagctgcaccacatcttagcacctgcagcattaccctcagggctagggcacaaagacttaggtttcccagatgtctccagctacacacaacaaactgtcccccattccaagggccctgccattgccatctctggtgccctcaaccatgccc

SEQ ID NO: 53369 - DNA, 1018 bp, Homo sapiens
cccatttgatacatctttgttgaactggcctaagttcatgccagcatctgtgctctatacaaattgtggaaccagtgggaaggatgggtgcattttaggtgcttgaaaagcaagggactcaacctccagtgggatcctcagattgctctccgagctgtctagttggtgagaagcttccctggaggaagacccaatctcctttggctggtagatccctgaggtcaaagtggacaaggatggggaaccacagagcagggaggggggcaatgaataggtgcaggacttgggtgccccggagctgcaccggctggcccttaaacagccaggcacttcctgtggcatggccctgtccaggtgcaggagaggcttaggtcagttcagctgctctggatgcttccttgtgtccctgggggttgagaggtggttgctacttggtatctcattgtggagaaagggaggtgcaggaggtgatcttttctatgtcagctccctcctggggcccagggagggaagttggcctttttttttctttgcccacactccacttggggattcccaggggatgtagcaagggaggctgggcagaaccaggccttagtggattggtgagagaacactaatccatacatctttggaagagaggaacacttcaccagcctttttacacaggatccctacctttctcgatgaccccactgcctccaggggtgggcgctgggtttaatcccagcagtttttactcaacagctgaccagttttccagaaactgcactttttttttttggtcaacctaataactcttaggaaactgcaactcaggtgatccaaatcacacagaccggcccgttctctcccctactggctgcctatgcagtcgggtcgacctcaagagaactggccccagccaaaagcggcacctcccggcctgccagtcccttcctgccttaggcagctcctcccagaagcctttttgtagggcaaactgccttccctttgtaaggtagggcctttggatcca

SEQ ID NO: 53370 - DNA, 1028 bp, Homo sapiens
gacaagacagggaaactccatctcaaaaaaaaaaaaaaaatcccatacaaatttaaacattgttgctgggcgcagtggctcatgcctgtaatcctagcactttgggaggccgaggtgggcggattgcctgagttcaggagttccagaacagcctgggcaacacggtgaaaccccgtctctactaaaatacaaaaaaaaaaaaaaaaaaaaaaattagctgggcatggcagcgtgcacctgtagtcccagctgctctggaggctgaggcaggagaattgcttgaacctgggaggcggaggttgcagtgagccgagatcacgccactgcattccaccctgggcagcagagcaagactccatctccaaaaataaaaaatttaaacattgcttaaatgccaacagtttatatggcatttagctattcccaacccttgctcagaagtgacacaaatgtgtgtgaccataatatactcatcagatggggttgctaaaacatacacacttctcctcggcctgtcattgctgacttcttccccctgaaattttgctcctcctcagtcatcttctgatgatttttttaaagatagtaatggaagtttaattcatatttattttccattagattctttatatgatcatcctggcttgacatgagttcctcctctctcaactcctgtagaacttaatttatgttactctgatgaaatgtcatctactgccttggcccattatttgtctatgtatcataaatttcctcttccttgatgtcagtttttcttgcaaagtaactgaaaggtggcatgtttatgtatttttaacacagcttaaaaactcactgaacccttttgtttggaatatgttaaatcaggaaattctgttactgaggatttaaagaatgtagcagttgttctctttggtctcgggattcccttaaagtttaaaaattattgagtattcccaaataactttcatgtttgtgagtattgtctgtcgatatttaatgttttaaaaatcactgagtacaaaaaa

SEQ ID NO: 53371 - DNA, 1048 bp, Homo sapiens
ttaaacaccaagagaggtttataaataggaggtgtggtatttttcttccaataccctgctgaatcactttgagtgcccttcgaggtgtacatcccgtacatcccctctttgagggcaaatggcctgggctgttataatggcttcttcttgctctgtgcttagccttctccagtcagttctccatattgctacacgagcaacctttctaaaacatagatttacgtcatttgtttatgtacgtggttcctcattgccaatgggataaatttcagactccttagcgtggcttgtaatccctctcctgcccttctgcttcagcttcccagagtcagtttaattcaggcaacgcctctgaagcttttcctgagcctcccagacaattattaattcccataatctcataacatctgttccttgtttattccataactgcacgaatcaccctgctccttgagggcaggcaccactccctgtgtgtccgctgctttactcaggtgtgtaacaatgacttttgctgggactgataagatggcatagctggtagcatagttccagcatagttactttgcaatagtccagcatagtttttctaaaatatgtctttcctttctgaaaaaatacatgagcagataaacaatatggaactactgcataggcctaaaacatgtaaagtctcagaaataatagcaaggaaagggaacatttatattttgtttttcttttttcttttctaattttttttttttttttgaggtggggccttgctctgttgcttaggctggagtgcaggggtgcagttacagctactgcagccttgacctcctgggctcaagtgatcctcccaccttagcctcctgaattgctgggattacaggtgcacaccaccatgccccggtaatttttttttcttttgtatttttttgtagagatggggttttgccatgttgcccaggctggtctcaaactcctgaactcaagtgatatgcccaccttagcctcccaaagtattgggattacaggcgtgagccaccgtgcctggcctgtattt

SEQ ID NO: 53372 - DNA, 1048 bp, Homo sapiens
tttttagttgttctcagtgggaagtttggacaagatatatagttccttgtgtagttagaaatacaagtttctgatttctttttcttttctttttttctttcttttcttttctttcttttttttttttttttttagacagagtcttgctctgttgcccaggcgggggtgtagtgatgtcataatggcttactgtaacctcaaacttatgggctcaagcaatcctcctacctcagcctctcaaatagctaggactacaggcccatgccaccatgcctggctgatttttaatttttttctggagacaggatcttactatgttgcacaggctggtctcaaattcctggcctctcaaagtgctaggattacaggcatgaaccaccatgcctagccatcaagtctctgatttctatttcacttaaaactttatgtatttacttttacaaatataaacattaaaaataaatatatggataaataaataccttgtcaaagtattccatctgaacccacttttcagagataattattgtcaatagtttggtgcatattcttttatgtatgtactagatacttagtcttattttttttttctttgagatggcatctcactctgtcatccaggctggagtacagtggtgcaaccttggcttactgcaacctcaacctcctgggctcaacaaatcctaccttagcctcccaattggttggggctataccaccagtacaggcacataccaccatgcctgaataatatttttttatttttattattgagatagagtctcgctctgtcgcccaggcttggagtgcagtggcacgatttcggctcactgcaacctccgcctgctgggttcaagcgattcccctgcctcagcgtcccaagtagctgggactacaggtgcgtgccaccgcacccagctaattttttttttttttttttttttttgagatggagtcttgctctgtcactcgggctggagtgcagtggcgcgatctaggctcactgcaagctccacctcccgggttcacgccattctcctgcctcagc

SEQ ID NO: 53373 - DNA, 1034 bp, Homo sapiens
actctaagttattcttcatttggaaattctctctatagatactttaagagagaatatatcaataagatgagtgctttgtcttttaagaactaaactttttcttttctaggtcatttaggaaatcgtaaatcatgtgaagatgggactcttggtatttgtgcgcaatctgctgctagccctctgcctctttctggtactgggatttttgtattattctgcgtggaagctacacttactccagtgggaggaggactccagtaagtatagtcactctagctcaccccaggagaagcctgttgcaggtcagttactggtttttcgtgtggctgcgtctcatattcttcagagatgggcaatgagagtaaactgaacatttctgggactttggcctagaaattgcctgccattttagctggtataggctgagaactttgatgttttttaaaaactgcatgccatgacaaatctcagttccttttacaaacttggtgagaatgtgctattcttcaataaaaacccaaactatactcatacttctagttcttgaacgcttttgttctttctaattgctgtagcatattgccactctattttgccatttattgccttagggattagtattgaagttggtttccatctgcccttaaaacattcatctttatgttgaattttcaacataatattgtctctgttttgttttccctaaagaaacgttgtctactgaatctttgtagccgttgctgctattgaacttgcacctggctacaataatggcttattttccctacccagtaactcctaatttttttcttctctttgtgcactttgtctcatgtgttacatagtgttttccacatagcctgaatcccactggtttggtttctgtttacctgatgtggcctgtgttttggttctaggcttgcagttgaagggcttacattgatcagcaccagcctttgcacattgttttcttggctgtagcttgaaatatcacacagtgaccatagtggttttctttttggttattttgtctg

SEQ ID NO: 53374 - DNA, 1030 bp, Homo sapiens
ttgaacccaggaggcagaggttgcagtgagctgacatcacgacactgcactccagcctgggtggcagagcaagactgtctcaaaaaaaaaaaaaagatttttacatgtttaaagggttgctaagcaaaacaaaacaaaaaaacagaaggatatgtgacagagactgtggcctacaacgcctaaaatatttactgtccacctacagagaaagtttttcaacccccaactgaaatctcctatttcaaactggaaggctagttccttccctcccaatttccacatgcaatgatcacctcccatttcatagagaaaataaatctattgggcaatctacttcttactctcccatccctataccaaaccactgcggtttgccagttacccataatacttcattaagtcaaactgcaatgaatttgaaaggtcattgaaaacctccttgttactgaattcagctccctattttttcagtctgtattttactggctgctctatgacatttgataacgtgtggcttccattctcacggagttaactgaacctgctctttctgaaatcgccagtagcatcctaattggcaaacccaaagaatgctttccacaccttatcttctcctttcttttgctacatttaacattattgcttcccatctatttctggaatatttctactcccttgtattctgtggtagtattttctcttagtcctcaccatcccacatccgatcagtttcccaatcctgtccattctccctttgaatttcatccggcccccaacagcctcacgtgagaccctcattgtctgtcacctggcttaccacaaagctctcctgctaggtcttagcctccttacgctctgtcttacacactgccgctagaatggttttcctgaagcaaaaatctgttgatatcattaattttctgaaaaatatatagtgtctttctctactctgtctacttttactcaataaaatccagactcctaacttggtattcaaaaccccatctggtctgcttttctgccttatttt

SEQ ID NO: 53375 - DNA, 1053 bp, Homo sapiens
cgtaggtactcatggcatgcattttgtgcactaacatttccccaactatatagtctttttcctttctttgacatcttcattttaaaattctagtgtacattgtaaatttcaataggccactataagccttttttggggaagaaacaatgaacaattgagtatataagtagaagaaagggcaagatcaaaggggaaatgttagtgcctttaactagattcaggaaggaacttttattttgctttgttttaattccattttcactagaagaaagaaaaagaagtaaatttgtcccctaatctggcaagaaatgcctctaaagaatttggggcctgtccctgccttgagacgtctctccctctggcaggaggcaaggggtactgggctgggcagggtctcctggctcagtggatgggtgggcatgggcctgggaggctgggctgttcgactgagttcccttccagttgactctgctttgagggagggtttgggcagagccagtgggagcttgcttttttattataagaaggagaaagaaatgaacttgtcctcttgtgttgcagattcagtggttctttcctttgactccgctggacaaacactaggctcaggtaccaactcttccccctctatcatctttttggccttcaatattagccatattttttgtgaagcctaatcaagtatgggtttgctggggagggcagtggaatatcccagaattgggggaagtctcaagaagcctttctagagactttatggtcagggaagcagaagagggacatatccagagaacttttccagttactttaaaagtgcacagaggagttacagtagatgctccctcttcattcagagttgtcaagagtcacataaaaggatgtctgttttctgtgcatatatcctgtctcagaaggtggggcagagggcattgaaagaccccaggctgtgggaatgctggagcagataaccatcagggctctctactagaatgctgggctggtgggagcatcccagtttcctgaggacatacactccattgcatgtttacatgc

SEQ ID NO: 53376 - DNA, 1003 bp, Homo sapiens
ctgacagcccatttggaactattgccaacttcttcctccacccaagccatggcatatattacatatgtttaatataccccatgacttttttttagagattgtacagtgacatttcttaagaaatgatagagctgttttggctagggtaggtcctcattccatttactgccattcccttcgtacttagcaattcatcatagcccagagattggagccaaagaccactttaaagaagatctggcagcagagctgcttctctgggtaaatggagttttcttgcctcatggactatcctgcctatgtggctttgtgaattataattcgaagcacggcaatttctgatagaaccaagttcatgtttttatcccataaaataccaaactttatatacctcaataatgctccttaaattggtgttcatgggcaatatttgtggttgtcatcagtagcagtcatttaataagcatcttctttgtgccaggtacagtgacagctgattggaatttgtggtggttcattacaatgaaaaaaggaagtgggtcactcacaacggaaatgccagtagcatgttaggctcatcatgtacaaccgtattccttgaaattccattctggggctcagtagcctgaaggtgaggctacagtaggacacctggcttcaggaaccttcaagaagctctctcttttgtcctggaacaggatgtgactgcacagcctggtgctcccaactgcacgtcagaatgtaggtaggaagtaatacttatgtgctatactaggacaaataggagaggacttggagttgtctacatagggcattgtgaaaacatttgtgatttttttttttttttaatattacagaactgtgatgaacaggccaggtatggtggctcacacctgtaatcccagcactttgggaggccaaagcaggaggatcagttgagcccaggagtttgagaccagtctgggcaacatggtgaaacctgtctctacaaaaaaataaaaaa

SEQ ID NO: 53377 - DNA, 1142 bp, Homo sapiens
caagaaaagcctcgtagggtctgccaggcttcagctgtggcaggaggtagagacgggtaggccgggtggttggaatcgtgagtcagagggcattatgagaagggtttgacagaggactgaggttgagagaaatggggtccgtggctcattgtagctggctatgcattttcctgggagatttactagctctttagttttccaaagattattcctattgttcgcaaggggactttatttgttcaggacaacacatttcttctggtaatgctccttgtaaccatgtgtatcacatgggagtcatcattttccacaaaccccatatcctcagtctctgtgactagaacagaatgaagtactggtacaagctccgccagccctagcctttccccaggagtttcgcccttgggagcagaggggcgaggggcgaatgcaatcccttgccagtggcaaagcagaagatgtttgcctacaggttgctggtggtcacattgcctcatttacgaagaaagctcaccaggagagagtacaggcaatagagggaggcccggatggcctccctctattccagtcactttcggtcacccctgagaccctctgcactctggccccttcctatgttttggttatgtgaaccactaaatccatttgcactaacttcccctgagttagtgcaaccagtatgttgagcatgcaggaaatgtcaaggatcatcacagacatcttcattttgtctcctactgttcccttaaaatgttttcatgtcttcaatacatctgaagtaataaaaattccatggtcacagtgagttgccatttccaaacttagagtgccccatcttgtgtaacagtcacagctttcaactcacagtgccggcaggtgcctggtggggaaagggcatgccctgcctgtctttcctcttccctcctctcccagctactagctgctgcctctgacctctccgtgattgctgttggagggagagagaatgagcagtagagacctagagtgtttgcactctctggacctgacaaatagttaaagctgactctggtggggtgcttttgtgagtgttctgatgacccctttccattttaggggcctcttctctgcggttcccccagtatgggtaatgcccatgccac

SEQ ID NO: 53378 - DNA, 1032 bp, Homo sapiens
tactaggcttcttggtctctctagcacctagacagtattggcgtatgtttgtcaggtgcccgttaaacactgaatgcttggttggatggatggatggatggatggatggatggatggatggatggatggatgatggtaggatgactgcgtactttcctatttgacaagcatgccttgagttgcagctctctctactctgtgtgttcatgtccctgcaagcctgctcacatggccgatgctcaataaatccttgcagaaccaccttactacctactgtgattcctttctattgttagtcatctttgtgcacctgtgtcccctgccctgtaccaggcggacatcatgaaggatcagaattgtgtctctttccttttctgtcttgcataagaccttttccacagttgactctgatgacgatggccacacctacgtacaagacatcaaaccaggggctggttggttttcccactgaatggtctggcgtctggcttcttggctctggtgcctcatactatgagttcaggcattgtaaatctcccaacttttacacattatgaaggcaactatgaaggaaaaagtgtgtgttctgtataccaggctagtagagagatgtcagcctcatgttaacatctagggaatggggtatttgattgtggtagaaagccataggcttcactcttagaaaatccttaatttagtactctggaaaaaaacaaatcaagtataagccgtaagcaagtgaaatgccaccagaacggaagagatagagtaattaccaagttgaatcacactgatgaacaaaaggcatgttctctaggacatactacagtatttaaactgtcttcagcagtgaaaggaggaggatgaggaggacgctcatctcctgctgtcctgacagttgggtcctgcagagtaggctgttgtgtagctttctgttgtgtatcaggccagttctttgaactatgtgagttaacttggtctttagcacagtaaattggcttggcctcatttgatttaactcacaatctaagg

SEQ ID NO: 53379 - DNA, 1126 bp, Homo sapiens
ctgctgccacagtgtggtgttttacagttgccatgtgggcaagagcatggggactttaatgctcagtctaatttcataaggaattccatgtgaagacacaaaaatatgaaaatgaaagcaaacaactcttaacccccagagccttgtgaaaaaccaggtcatttgtaatagtgtataaacatggagcagtctaaatatagcctgaggtgagtttaacacttctaaaacagcctgtcaagttccctagggctgcaaggggaaagcatttattgagcacctactatatgcccagtggtgcactaggtactttctatgttacctgttcccacaacatttgcttagataatctaatccggtatcatggctttaaatatcatctatatgctgatgactcctatatttatatcaagcccagttctctttccccacactccagactcatttacccaattgcttccttcatttggatatgtattaggcatctcacacttaacatgtccagaaccaaactccagattcacacccctgcctcccagaatcttttctaccccaggaaatggcagctaactacatccttccaattgctcacatcaaatactgtagcatcatttctttgacactcaaatctgatatcagcaaaccttattagctttaccttaatatcctcagatccagccacttctcactacctctgtatcatcactctgtccaaaccaccatctctcacctaatttttgcactcctaactagtcttccagattttatgcttgcttctctgtggtctatttccacactgaagccaaagtgatcccattaaaatacaagatagatcttgttactcctgtgatcagaactccccaatggctccccatttcttgtagaatgagagccagaacctttatagtgctcatcaaggccctacatggtccacaccttcgtttcttgttgctctccttcttgtttattgttttatcctgcgctccttgctgtgattcggatattccagacctgttcccgcctcagactcttggcatttgctcattcccttgtctggaacactcttccccagatacctgaagagattgcgcactctcttgcctttttagaacatagttcaaatgtcacc

SEQ ID NO: 53380 - DNA, 1535 bp, Homo sapiens
actattcaacttagctttctgttttttccaaattcacagtcagttttatcctatgttttaactataccgaaagctttgtaagggcaagaactaggaatgttctgctcacagatatattcacaatgcctagtatagtgtttatgtgcatagtaaatattcagtaaatatttgttcaatcaatcgaggacagaaggaagagggtatgagtaagaaagaatagagccacctttaataacaaaatccagatctttcaaatattgttattagaagatttttagggagacggagtacagtggtgaggactgtcaggtggccccttcctttatctaaccctgactttccccatctcctggagagactgtcacttgaagaacttctgccaccatcatgctgacttcagatggccagcttctctttaatgccttaaaaaaaaaaaaaagaggaaaggggtgtgtgtgtggtgggagggatactttctcttggcttctctaagcaaagctaaaaatatttcactaaagattaaaagaggacaacagagaaattaaccttgagaggacaagaaatccagaggagtagtctggtttccaaaatgcagaattctgtctcttctatagctagcacaagccagggccatacttacttcacaacaggagagcatagcattgcaggatttggctaggttctttgcttcatgacatctagcatttttcacagcccactgttcaaagactttctcctagacatcttgagctatgtgatcaagactgaaaaagccaaattcccactttgcagctcaccgaggactctctgcacggtggtttttggccttgactgcatattggaatcacctggagagcctaaaaaattactgatgcctgcatcccaccctctagagattttgaagtcactgagcgaggacacagcctttgcattaggatttttaaagctgcccaggtgagtctaatatgcagccaaattgagaaccactgctttaataaaagattctgtttcctgtctcaggaagtctccacttccccaggtaattgataccaagaataaatctgcctgtacataggagtatgtctatgtgtgatgattcataactaagacctcactacccagagattctgatttagttggtcaggaattgggctcaggtacctttatgtttaaacattctcccagattattctaatatgtcagggtcaagaaccatgaagcaacctcaggcctgtcactatatcatatctgaatataatataacaactactgcagaatatcataacaattatgttagggtagtggaattgcggctactttcttttgattctaaatattgtttttattacacctttacaatgaaaaaatatatttggatgtttctgtaattttttcgaactttcattatgggctatagatctctagacactatttttggaaatccattttatattagtttttggttaccaattttttctctagtttttcttaatggtcttttaaaatctcagccaattgaagaacttcctatacat

SEQ ID NO: 53381 - DNA, 1083 bp, Homo sapiens
atctcctgccacaaacaacaagtatctgtattattagtactcaatgccatggctttttggaaactgttttgtggaaacagtgatcttctcccttcatttctccagtaccattcagctcatgctggatacatcatttcatgaggctgcgctatccttcctgagacctgggagtatctcaaagatgggactgctttgttggtcatgaacacacaccagtgtcagagagtgcagggaaagtgtaaatggtaatttgttttctggtcatattaaatgtatcatttgacattttatagtgtaaacagaacagtgcatcttctaaccatggcttctcctggactccttcagccccatatgcctgggtctaagggaggtactactttgtagaggattgttgtaaagctgaattagatcattagatccgctgtctggtgcctggtttgtgctcagtgaatgttacttctcttgtgtctttcactaccacccagaaagaggatgtgtttttatttttaaggaaataaagtgtggaagcaaaattgaattggagagtcacagcagatctctggtggagtgcctccgtgaaaattgtctgttgaagcacttggagaacttagtggggagcatccctccagctaagaggaaataaattacaaggctctggagacaaatgtaacctggagttaatgtcagctccacaatcactgatcaaataggaaggtggcctggtttgatgaaaaggtattgcagtgcctagcagcaagagcagaaaggcagggcctccggagctgagaaataccacaagtttcagatggctcagatcaagcagtcccttttttcttaaagtgatagaagacatttgacagtgcttcagcatttgtcgtagatggctgtacacgtatcatgatggcaaaagctgtagagaaacctgagtctacattggaagccacaaagagcaaagagtcagtgatgtctagggtagaatggattggcacagcccacatgtgggtagatgatgaaactggtgacaatgcaagcaagacccagcagaccttggagtaacaggtcagacaggtggcagtcagagga

SEQ ID NO: 53382 - DNA, 1098 bp, Homo sapiens
acagaagttgtccttaaggagaaacatttccatcttggggcttgagaggatctatggcagtaaaggctatttcaaaaaaaaaattaaagtgaaaatatttaatgacagaataggattactcaagctaggcgaagctgcttctgccatttccctcctcatgtcattatcccagaaacaactctctagtacttggagaaaggcatcctcatgaggaaggtagaagatggaattgaagaattccctcctctgtggatggaaagagctctgtgtagagaggctcatctgcacgctcatgcatgtccccctagcatggtaacactggctttgattaagctgctgggttgttaggcagtgtgctaagtgctgcctacatggtcttcttttctcataaggaatgctttaaactaaattagcacatgaaacgagggagcaggcatggtaggggctgatctgagtccagtcctctctgagatggttctagaaactagactgatggttacacaatgtccatcactgatctgtagagtcctcaggaatcactgtcaatgactcttccccagtttccctggccatcaccccacttcccccttacacttcctgttgattaaccttccaaggcaaggtaaccaactgatttcagtccagcattttattgggtacttgtatattctgtgccatacatgctttgctaaaatgatcatattctatgagagaaagatatttaaatggacaattactcttcagtgtaatggagtgtaatgctaggccttaactatgtcctagtcatcattgtatccttaatcccaggccagttagttagcatgtactgagcaccagcgaggggccagacaccgtactcagtgccagcccttctttctcagcataactcttaacaaaaaaattttataaagtaagtactagtataatcccacttttaaagatgtgcaaattaagggcacaaaacaatttaaaagacatgccccaaatcacacagctattaagagagccaggataaaaatccaagcagagtgactctattgtctctaaatatttgttgcctgtggaaatgagaggcagaaaggggaaggcggtaggaga

SEQ ID NO: 53383 - DNA, 1068 bp, Homo sapiens
atgtagtctggcctccactctcgcttctctcctcctcagaatgctcttatccagaccaccaaaaagcactgacaaatccgacagatagatagtctttctcttttcatgatgtctctgaagcatttggcagtattgatctcttcctccattttgaaactctctcttctccttaattatttgttcaaactccctcccagttctcctacctctctgttccttctcagtctctattgcaagagatcttcttttcctgtgcccatccttaaatgttgatgtttgcctggtttcggttatagctctcctctcttctcactccactgctttagctaacatcatatgtgctgatgactctcaatctttttgcagcccacatctctactgatctctagacccaaatacccaacttcctgctggacagctccacttggatgactcaaaagcatcacaagctcagtgtatccaacgcaccgaatttccaacaaatctaatcagcctatgttcttatttcaggaaatggcaccactatccattctcacccaaacaagacatctgggagtaattcttttcccttcccctcttaaccagatatctaatgagtcgtcaagtcctggcacttgtgtactgtcttctttccgaggtcagttccttcccctgagccctgattctccaacctctcccacctctgcaggaacctggatcttcattctcttcactggttccttcttatcactatttaatcatattcaggtctctctcatctcttaaaaagttgccacattgatcctattattctgtaaactcattcaacaaagtgccagatatttttctaggtggtatagcttcagcactgcataagttacataaaacctctcccctcagagatcttacattccactggcagacacagataacccacgcacataaagtgtcacgccatttttagagcacctaccgtgtgccagacactgtatttcattacttcatttagcctttacaatgggagcggatcataattccaaaagacacaatcatgaacaccatagtcccaaatgctgaaatcctaaaaga

SEQ ID NO: 53384 - DNA, 1008 bp, Homo sapiens
aaccgtgacccacactcaaggctgtggggaaagatagctcatccaggaggcctgggctcctgacgcagccctgtctccagtgggcctgctccaggaaagttgctaactctcatagagatgcattcctttgctaccgctcagattattgagaggaaacacagggttcagagaccccagcgtggccaaggaaagctgttggcaaaggcacagctgcatgtagagtgaggttcaggagcaaagggtgagccttgctctatccatctctgttccagtcctcatcaggtactccacagaggagcatttgctaaaggaagaaaggtaggactggccatttctgccatgcatctggatcccaagggccatcctccatgagcagcaggtctcttcctgtctagccatgagcccctttccctaacccctggagtgctagatgcagaaagggagggcagtggagggatgtaggctatgtgggttacagtcaccatgttctccctagccagaggttgatcattttttccagcctgtaactgggcctaatttcagaccttttctgagggtaggttcaggaagtagaaagcttttgagctgaggcaaaagtggtcttactgtacttagactgtcatctgttggcactgcggtgaggctggtcggaggacgaggggtacatctttaccacctggcctcaccgctgtttcaccgatccctgtggcttgaccttgtgtgcctgtgccaggttcacagcatctccttcatgctttctcagcaaagatggaatacagctgggagctcctctgcctccgtctgggcaagtgaagagagcttaggttttgaaatcaggcaaacctgggttagaatcccaactttgctactttgctagctgtataaccttggacaagcccttagtcatgttaaacatcagcctccttatctgcaaaatgcgaataacagcccccatctcatgggcatttatggggataacactaaataatgtccatgacatgtgtgtcc

SEQ ID NO: 53385 - DNA, 1027 bp, Homo sapiens
ggttgtgacaggtccctatccagtgggcagggcccattgttgtagctattcattcattcattcattacctataatatgctaggtgctgttctaggtactaggcatgtgatgttaaagacaaggcatggtgataaaactgtcacctcagctcgcccaggaggcgagcagaggtgaaaaatggcagaaatagtaggaataccagcctctgcgtttgtatgggggctggaattcttattgtgggacagttctccctatgcatctcgacaatagtctgtgacaggtttctatcactagcttgacccatcccatttgatcaggtgttcagagagagaggattctgcccctacagcctcacccaaggtctccaaagtcaggaacaatgtttgagcccctggactgaagaaggcagctatagtattttcctgtaggaacagagtccccagctaggactaagggggacctgcatgggaaattccaggagcagtctgcattcatgcattgcccagtctggggcgatgatgatgattgtgatgtcatctagccacgtgggtgcagggtcttctgacttccctggtcagcagagttggctcacccttctcacttccctgcagagaaacacacagaggccacattcaggaccccagagatagcaaacaagcagataggtctccccttagtctgtgacttggatgctcttcattgaagaaaagacagatggaataggtttaggggaagataatgggctccttttttgatgtgttgagcctaggtgccagtaggagatcttggacaagatactccaggtgcagttggatatataagtcttgagctccggatacaggtctaagtttgagatggagattcagcagcccccagttagaaatatgtgtctggatatctggaacttgaaccctcctgtaaacagtcgcattttccagccttttctttataaaacctgcctgggactgtaagcaatgattggatgcagagcagatagtggtcagcaatgactgcccttgtgcccctt

SEQ ID NO: 53386 - DNA, 1115 bp, Homo sapiens
tggttggatccatctgacttttcctgctcctacttctgggctgcttggcaccactgccttggcgacacacaaacacagccttggcgctactgtggcttcatgctctccagcctctgtgcacagcttagcaatccttgtccctgtcccaggggagcatgaattggtctggttggccctggaaaatccacatggtggaggctgtcaccccaagctgctcctgtctcttgcagcccacaggcatttacggagcacctgctgtgtacttggctgagagctaggggtgccacaaagtctgctggggaactgggcaataacattagcatgtgttaagtgctaaaaggtcagtgtgacttaccatggtgactgtcccaaatctttcctattcataagtccctacagtctacaccctcacactacaaccccaaatcttcccaaggaaaagagtcgatgtggtgagcattttctcaggttctccatacctctaagctcacctgtcagagtagccatcttcacatcctcctccctttccacggaaaagatatcctgtcttctgtcttcctcccctcatactctggatctatccccttcctctcctcccgggcttcattccactgttacgctggctgtcacctaccccctccctctctccgcttgtctcctttccatctgaatacaaacatctcagttcttcaccatcccacttcatctccagcctccattccacttctgtcctctccttcactaccaagtctctttagaaattgtctgatctctgtcttgaacacttgctcacttctttccctcctcaacccctgcagttggttctgtcctctccattccccaatagtgtgttccctaaggggccagtgactttcatgtattaccagaagcaatgcggttaatacgaacgaggatataaatagtgcccatcctgaggtcactgtgagattaaatacgaaaatggagagagcacttagaacagtgccaggaatgcagtaagaactcagttgtcattgctattattactgttgttattattgtgacgttgatcatgtatttcataactgcctctctgtttggctgcctcacccattatccaccaaggcagggactct

SEQ ID NO: 53387 - DNA, 1112 bp, Homo sapiens
gaatatagaatgtggacatatattacatatattttcttatgattatttctctacctgtctctatcactagcttcttgaggaaaggaccaagcctaatttacttttaggttctgagctcgtactcagcacaggacctagcactgagtaggcaagcagttgttggatggggccgtgttttccagctccatctagtcccatgtaagatacggaagcaagagcttcctgaacaggcttggaatagtacttgttggttggcacctgatgtttgtctctttacctctgagctacctctctcaggacatatgatgcccacctgctcttaaacttaccatcctttctccttcgactcctgctctcccataggacccatctcccatggaattcattcaagtggtcagcaaggggaacgcagcaagacacatatttgacagggcatttagaaagtgttcgcattacttgcttagacatacaccaggctcttcctgtgcatggccctttatggtggggctgcagcagctagatcccaagcaagaccatgtagactctagaacacctatctccctacgttatgtctatcccaccactactcagagaaggttctaggaaggtggatctgtgggatttggcttcatcctgttggatgacagtctcaccttgtgggagccaaggcctgtggttgaatataacggactgatgtgctgtggtccctggtctaagaactcattgctgggctctgccttccctttgtctcatgggctgcttgcactcgtcacagtcattgggagaagtggctaaaaggctggccacccaaccaaccaggcacagatgtcaagctgaagccatctgttaccctaatccagcaaacccatatctggaagcacctctttcagttgggttggtaggaactaggagaagaccctaccctagatctgctggtgcccacacataactactccctcacctcactccttaataagaccagtcagctttcttgccagtctgtggatacaggcttaatattccaagccttagaacatggtttaggttgatgagccagtgttgaggacattcaccttatacgctgcaccttagccacatttttgagcattaag

SEQ ID NO: 53388 - DNA, 1098 bp, Homo sapiens
gaatcgcttgaacctgggaggcgtaggttgcagtgagccaagatcacaccactgcaactccagcctgggcaacagagcgagactctgtctaaaaataaataagaaatgataaatgtttgagatgatggatatgctaattaccctgattggatcacaatacattatatgtatcacaacatcactttgtactccataaatatgtacaattattatgtgcctattaaaaatttttttaaaagtaagaatgcattttttccaggcctatagagaaggaaagtggttgggaaatagagcagaggtgtacatttcaggcagagataatgcatgtgtaaatgcaagaagacggacatgtctacaaatagtgctgcgctgggagtatatataacagtagtcccagaggagtaaaatctagattgcattagattggagggtgactaggagatgaggaagtggagacaggatatccactgctcttcctagaacttttgccatgaaaggatgaaagagaggctggtagctaaagcgggtacatggccaggacgctttgtcgaatttgtttgtttgtttgtttgtttgttttcacaggggagagacctgagccttattgtgtgcataaagagaaacaaacagaaatggaatccatagcatgatagaaagatctactttggtgtcatagggatggggtaaggaggccaaatttaagaataggtaaaggggctgatagatttgtgggtaaggaagccagaagctgagggagtacctatctgatggtcttggtttttctgtgaagtaagagaaaagatacctgcttaaagagagttggaaaaggatagagtttatggagagtagagaatgtttggaatagctgctgagcaaagttgagggcccagcgcctcataaatttgtggtggcatcagtgcactttagtgtatatgtgtgtgtgttctcgcagcccctcaagtataaaaggtacaacagtgtaagattagataaatctctggttggattttgcctaatgtgtgggacaaaagaacagtggaaccaacgggtacaggaccctggcaagagtgagattgaggagatggatgggatctagcc

SEQ ID NO: 53389 - DNA, 1036 bp, Homo sapiens
ttccctgctcctttggcccttgaccccacgcccttgtccaggaccaggctgggatagaggaagaagaccaatgggcttctggcagcatttctgagagaaggcctgaaccatacaatgggtagctgggccctgagactctccagcatctctatctaggccctgacacttccccaggaaaacagggccatggaaaggcttgggtgccaggcgtgggtggtgaggagggagctttggtaagatgacattctagggtaaaggttccccaaggggtagtggtgtttaggcaggcttcaggggagagggaaaagtgggccgagcttggggctataccaggaaagcaagaaaaggggaacgggacaggaggctctaggactcaaggctcccagcagccactagagagcttacccatcttgcttctcccatccctgaccctggggcttcctgctctagggtctgttggtttgggagctgtcactgccttctggacttaagccttgcccccttcacctgcccccgccacccaggccctcagtcccattgctgggctagtcccagccccagtgtgttcagttcttaccctcaaacctctggtatctgaggactgggatgtcctgccaagtgctgacagcccgtgggggtgcaagtcaggtggagtggttccacttacctgctccacccaccctgtgtgtgtactgtatgtgcatgtgtggatgtgctggagaaactgcccatgtccagggaaggccagctgggcctcaacacctctgcacaccaccaggcagcggtgggtaggaggctgcacagtgtgtggctcacctgtccaaggcaggggtcaggcggtactctttggtgactgacaagatggctttgatcagattgtctgcagacagaggagagaggtttctgttacagggtcacttacctttctataaaatgtttactgataatcctactggaagacacaagtccctaggggctagagtgaaagtggaagtggagagagctctggacacaaggatgtattgggccactgccc

SEQ ID NO: 53390 - DNA, 1042 bp, Homo sapiens
gtcctagagcctcctgtcccgttccccttttcttgctttcctggtatagccccaagctcggcccacttttccctctcccctgaagcctgcctaaacaccactaccccttggggaacctttaccctagaatgtcatcttaccaaagctccctcctcaccacccacgcctggcacccaagcctttccatggccctgttttcctggggaagtgtcagggcctagatagagatgctggagagtctcagggcccagctacccattgtatggttcaggccttctctcagaaatgctgccagaagcccattggtcttcttcctctatcccagcctggtcctggacaagggcgtggggtcaagggccaaaggagcagggaaagagacctggtgggcagctctctgtacagaggtctccgcctctctcccctcagcctccgctgccgccgctgcatcatcgtgggcaatggaggcgttcttgccaacaagtctctggggtcacgaattgacgactatgacattgtggtgaggtgagctccccaaaatggcacctcgggtgagtgtcgtggccccaacccttagtcctgagcccattgagaactgtctgtctggctagttgggctggaggtcaacggaagcctcaagaactctgggttggagggctttggaacagacaactagcgggggcacctggggagaataggtccaggtgacctggactccctattctccatgcctgggatagtctggggtcatggtgccttcccaaacacaggcccaggctctgagtgggcctgctctctgtagactgaattcagcaccagtgaaaggctttgagaaggacgtgggcagcaaaacgacactgcgcatcacctaccccgagggcgccatgcagcggcctgagcagtacgagcgcgattctctctttgtcctcgccggcttcaagtggcaggactttaagtggttgaaatacatcgtctacaaggagagagtggtaagctctcctggcaccagcttcttcccctcttgccctgggcttccgcaactcct

SEQ ID NO: 53391 - DNA, 1085 bp, Homo sapiens
tagacacttttaagggagaatggtaggaaatagagtctgtcctggtgaaccccagtgagcctaagggctgctgtctcactctggccttctgccatcctcctttcacatcgtttcctctgcccatgggcacctgtcacagcctccctcagggcaagagctcctaaggggcagagcttgatcccattggtttttacccttcagtgctcagtcaccataaatgatctggaattggctcaaacaccagttcctacttcccactggacagactgggaaaagccaggcagttcaaataaggccaggccaaaggggtgggtcagagcctgtcatgggtgttatcacatgttccttccaagaacaccaatgtcagttaattcaaggttcttaaaattcatccaagggagtaaggaaagaaagaagaaaaggaaggaagccagctagagtcggagaactcactatactcaggctactcaggaagcagacagcagggccttgcttttcccaggaagctgaggagctctccgcctggcctggccttggcagcaggcagattcaaggtaccagcattgcaggacgaggcacaggcacaggctcactcttgatgacatctgtgtccgtcctggccacacccagggctctaggactagccttgtattggtgagaactcctacccagggtgggtgggggtgagtgggaagggaagacaggagacagggaggagtcctctgaattactgtgggccttccttggctccaaagtgaaagataatttggacctttagagtgagctgccagaggaatgccggggttgcccgtggcctcacctctcccatctctcagagtggacctgcccaggccctttggctgcccaagggacctcttctttagtgtccttctccaccccaagcccaaggctaatgccttcccaggacctcacccatgctctgcctcacttccctggcatctgagacccaggaaaatgtgagaggctgcttctccaggtcccctcctgtctggtgccctagtcaccagcttgtcctgctcctgtagggatgtttccagtcatacagcctctgggcttctggagag

SEQ ID NO: 53392 - DNA, 1037 bp, Homo sapiens
aggttcaagtgattctcctgcctccgcctcccaagtagctgagattacaggtgcctgccaccacgcctggctaatttttatatttttagtagagatggggtttcgccatgttggccaggctgctctcaaactcctgacctcaggtgatctgcctgcctcagcctcccaaagtgctggaattacaggtgtgagccactgcgcccggcccttgccactctttagcacccgccatgtactctccactctggctatatggacctatggatcctatttcacgcctctatgttctacctgtttccctacccatggatgtatgagatgctcctcttcttataagcctcaggagggcagcagctgtcttgttgatctctgtaagcccatcacctccagcagtgaggcatagttggtatacataagtaaataagcagatgtggaaactgaggcccagagtgcaacagtaccttcgaggagagtcaggattctaactccaaactcctgcctctcagtcaggctctttcctctcaactaggctacctcctttcattgccctggaaggtctttcttttaggttcagacccttgcatccttttgctctcttcttgcctctccagggcatctctttcctcttagccatgtttgatcttctttatgcagttccaagatcattctccttgataaagaaatgagaactgaacagtccctggcgctctgcctttcagttgcctgttggcatcacacggaccgccccaagccggctcttctttttgttcatcgcttttttccaaatatagctttcaaaaagttttctgaccctctcctcatagcacacatcaaaataaatcccaaacggactaaaaagcgaaatataaaaatacaaccaaagggaattttaaagtaaggatagaaatcaaatccctggagggaaagaactttcaagacacaagtgctagaagaaatcaaatttgataacatattagaatttcaagttaacacaaaaagactgccgcacaaccttgaaaaacatatttagaacatat

SEQ ID NO: 53393 - DNA, 1032 bp, Homo sapiens
gacgagtcccctcaccattctgggccttagtcccctctgaaaaatgggacatgggcaccagagagactcctgagagctcccttagtgctcttagaggagacaggggaggtctcctttatctttgacccctaacccctcagacttccagaggcgggaactgcagcgatgatacaaatggtgtggtggaaagaatgccgttttggagtcaggacacctgggtttgaatccacttgcagccacttgcaggctgcttgaccttgaacgtatcgtgtcgtatcgtttcaccttgggatctgtacctgtgaagtgggtgaaagttaaagagataataaagtaacagtcgtgaaaccagcctggagcctcctcacacaggcccccagctgtgcccaatcctggttctccctgttcctcccgagcagcccctgtgctttctccctcctctttggtgtgtgcagggcaggcacaggcaggaaccccaggtgggaagctgttggggcctgctgggcctggagaagggacaggggctgtgctgtgctgtgcttggcacaggctggcacctgctgttcctgtcagtccacatctggcccacccaagaggggcttcccctcagctatgcctaaggtcttggccatttctccacccgtccgtttcctactgtctcccaccatccctccctttacctcccttacgcacaccccacttctggagacaggagcaggaaaaactggggtcggcttgctcagcctgactggggctgaaacagaagtttgccacaaggttccaatgtttgaactgacctttggaggacagacagtttgccagagaaagagatgttgccacagagttgggagccatgaggagggagtggctggaacagagacaatccaccaaaggagcagcagcggaagacgctgaagagctgctggtcactgggcgccctgggtggaggtcaggtctcctttagtaaccgtcactgatgcctctttgctgtctgtgctgtgccacgccctgggctacagaggtgaatcagat

SEQ ID NO: 53394 - DNA, 1651 bp, Homo sapiens
gagggaggaagagagagacttgaaaggaggggaagctgtgccccagaatggacactgggatgtcggatttcagaggtgatgcctttctagtacagtgcagagaccctccggtaagaatgatcccgttttatggttaaagaaacaggcttggagagcttgttgcccagtcacccaactctagtcaacagcagtgttggtctgctatactctacttgctcacgctctgtctccatttttcaggtccactctagaacagtcgatggagagagccaggagagagcagcaagggaagtgggagcacaggagggcagacaggagagagggcaggcacctcccagcccctcagctgctgcagatagggaggcagggcagctgcactgctgggtcttcttattggcccaggagccccctcaggccacagcagcacacccacagcatcccacatcctgtgcctgcccgacgactcccttcgtatcctcctctgttacacactggagccccaccacacgctctcttcaccatcattccccttgtccctgtcacacactccatttccccaaacacagatgggcttcctacaccacaggccctgggttccccattaaacgcctcatgctcccgcctcactgtccctacttggggtccctgccactcccctaggctcatcccttgctgtgtgcctcgttgaggcccgcttttgctgtgtccacagagtgcatcggatggcttctggaaatctgtggccactcgagtgcccaaggagccccctgagattcgaatcctcaacccatatttcatccaggaggccgccttcaccctcattggcctgcccttcaacaatggcctcatgggccggggggtgagatatctgggccctgggagagggaggaggaaagctgggtcagaagtgccttggaaggaagggtgggtggtgggtggggcagtgcttctgcaaaatagctttctggggaagagggctcagtccttgggcatggaggctagctctagggagcttggctgaagtctcagctgtcccagccctccagctgaactctgcatgccttctctcacccctgcccccgtcttctagaacatccctacccttggcagtgtggcagtgaccatggcactacacggctgtgacgaggtggcagtcgcaggatttggctatgacatgagcacacccaacgcacccctgcactactatgagaccgttcgcatggcagccatcaaagaggttcggggctgggtatgggggcaatccctgggtggggatgagggggaggtgcataaatgagtagtaaagggaggagccagtggctggtctggctgcccagaactccccagaaggtcctgacaccaagcatcctacgtgccctctccacagcctcccactgaacccagggccttctccctgaactttccttccaagggactctccgtgccctggtcctgcacctccctccccctcgctgcattccccagtcaggaacactagtctagcaccagctcagccatcctctctactgcagttcctgccttcccccagaggacgctattttccctcaaaaaacccacaactgaacactgcctctgggtctcaggacttctccatatctcttccacccttccccacagccaagcactgcag

SEQ ID NO: 53395 - DNA, 1036 bp, Homo sapiens
acacaactgattaccagtatctgccttcaggtttccacagtcacggagtattggagagtggtgacgaagaaggcaccgagccctggaaggggcagtaaaggtttgagcaaaggcccaactgatcacttcatctctcctttcagtcctggacgcacaatatccagcgagagaaagagtttctgcggaagctggtgaaagctcgcgtcatcactgatctaagcagtggcatctgagtgggcccagcacatggccatagaggcccaggcaccaccaggagcagcagccagcaccacctacacaggagtcttcagacccagagaaggacggtgccaagggccccaggggcagcaaggccttggtggagcagccagagctgtgcctgctcagcagccagtctcagagaccagcactcagcctcattcagcatgggtccttgatgccagagggccagcaggctcctggctgtgcccagcaggcccagcatgcaggtggtgggacactgggcagcaaggctgctgccggaatcacttctccaatcagtgtttggtgtattatcattttgtgaatttgggtaggggggagggtagggataatttatttttaaataaggttggagatgtcaagttgggttcacttgccatgcaggaagaggcccactagagggcccatcaggcagtgttacctgttagctccctgtggggcaggagtgccaggaccagcctgtaccttgctgtggggctacaggatggtgggcaggatctcaagccagccccctccagctcatgacactgtttggcctttcttggggagaaggcggggtattcccactcaccagccctagctgtcccatggggaaaccctggagccatcccttcggagccaacaagaccgccccagggctatagcagaaagaactttaaagctcaggagggtgacgcccagctccgcctgctgggaagagctcccctccacagctgcagctgatccataggactaccgcaggcccggactcaccaacttgccacatgttctaggt

SEQ ID NO: 53396 - DNA, 1040 bp, Homo sapiens
ccctcaagagccagggactcggtttcccccgcaggcctccctcccctgtgactccctccacacagattctggggacagagctgttacctgccactaggatccccgcctgagagctcctcactgacggctccctcctcggagtccccttcattgggtctcctaagagcaccaattttggtctctggcaagcctcccacccccaaacgaggtggggaggcctcggcagccatgcccgccctgggccccccctcaccccaccactccctgggcacccaagccggggtctagcagggggccagcagccaaggggctggggcaggagacagatcagggcccacctccctgccagggagggagcaaagatggagcggcgggaggagcagccgggggctgcaggggctggagcagcaccagccttggacttcactgtggagaacgtggagaaggtatgagggctctggggtgggcactccagtgacagagcagaagttctggggactgtcactgatggcagagctcaggcctgggctgggtgcccgctggtatggtgcccccagagcacctggcatttgctctctttctgggcaggcagtattgcagtgccctaatgggctatttttgtctttccttacaggcaggtcccctgtggatagatactctagggtcttgggatggtcccttcagggtgctgtgacttagccttccgtccagactggctatgttccagctccatgggaactgcatgagcagtgcagtaggaaactgggaacccaggagacctgcagctcagtctcctggaattatactgatgccaaaccatcctggacctggttttgttgagccaagggctcagaaaataatctggaactaaaacaatctgggttgttttgactctttggagaagggtccttcctttattggatggaagccagaccagtcctgagcaggcaggcctggggctgtctccctttgttttgtgctgagtccaagggtcctggccctgctgggagccttacagggctcctccctactcgcctgcc

SEQ ID NO: 53397 - DNA, 1088 bp, Homo sapiens
catctggactgacctagggatgatcctgggggagctgaaaggagctgttggagttgatgggagcagctgtgcctgggagggtcaagtcccctcaagctgttccatgcccttctcagacttagcttcatccctgtgaagctgttccttccacctgggccttgccctcaagtgcctcccctttggggagatcagcctcctcttttttgctttcctgtggagattccctctctgaacccataatgttttgctgtaaggagaagaggatatggtagagcatgggcaaggttcaggctctcaagatatcagcaggaccccaggcccaggaaacactgcagagcgctgagctctccctgctcagccccccagtcagggagagggagcagccttgcaggaccaagtcacgcctctgttctgggctctggcaggatccagagtggccagcacctgctcagtcctgtgctgtcctgcaggcgctgcaccagctctactatgatcccaacattgagaataagaacctggctcagaagtggctgatgcaggcccaggtctccccacaggcctggcacttcagctggcagctactgcagcccgacaaggtaccagagatccagtactttggggccagtgctcttcacatcaagatctctcgctactggagtgacatccccactgaccagtatgaaagcctaaaggcacagctcttcacccagatcacccgctttgccagtggctccaagattgtactgactcggctgtgcgtggcactggcctcactggctctcagcatgatgcctgacgcttggccatgtgctgtggcagatatggtacgactcttccaggctgaggactcaccagtggatgggcagggccgctgcctagccctgttagagctgctgacagtgctgcctgaggagttccagaccagtcgcctaccccagtaccgcaaaggcctggtgcggaccagcctggcggtggaatgtggggctgtcttcccgctgctggagcagctgctacagcagcccagctcacccagctgtgtgcgtcagaaggtgctcaagtgtttctccagctgggtgcagctggaggtg

SEQ ID NO: 53398 - DNA, 1071 bp, Homo sapiens
tcatctcaatctccccaaaagttgtaacctagctggatgtggtggctccacctgtaatcccagctactctggaggctgagcaggaggctgagtctcttgagctcaggagttcgagaccagcctgggtaacacagcaaaaccccatctcaaaaaaaaaaaaaaaaaaaaaatcttaacccattccggaatcagctctcagtccaactggagaacacaattcaacccataatgctgaccttctcatacgtccttctcagagttcttctgggggtccctgatctaaggttcttcccaacattgggaacatcaaatctgccatgtagaccctgaccctttttttgcttaggatttgataagggaaggggagctttgatggaagacaaggagattatgcctttctcttaaagccagtgtggggttgagcagagagctctgatggattttctcacctcatgcctctaggtacgtgaacacactcctgaaactcatcccgctggtgctgggtctgcaggaacaactgcggcaggcagtgcagaatggggacatggagacctcccatggcatctgtcgcatcgctgtggccctgggcgagaaccactcccggtaaagggtggagcagcttggggtgggatagtagggccctctaagaaatggggttctggaagtccctggaaaggtagaatgacctgactctctccccagggccttgctggaccaagtagagcactggcagagtttcctggcactcgtcaacatgattatgttctgcacaggcatccctggccactatcctgtcaatgagaccaccagctccctaaccctcaccttctggtacacactgcaggtgtgtctgtgtgacctccagtaggactgggctgtggtggaagaaggtggatcatgggcttctatgactgctggtgaggtggctaattctcttccctggctctctcaggatgatattctatcctttgaggcagagaagcaggctgtataccagcaggtgtaccggccagtctacttccagctggtggatgtgcttctgcacaaggcccagttcccttctgatgagga

SEQ ID NO: 53399 - DNA, 1522 bp, Homo sapiens
ggctccatgctaggatgtgtttgcattttgtatgtgtttcagtgtgtgagaccttattttgtatgttttgagtttggtttgggaagggaacagaaatcacctgtaagtagtatgtgaattgtgttgggtgctgagatgaatgtgtgccttgatgtgtgctgtatgttgatgtgttgtgtgttttgtgttgtttgttgatgtgttaggccttgatggatttagagcgtggacgtgtgttggaggtgtgtgtgttgggttgtcggagtgtatattatggaggataggagtgtatgttgtggcattggtatgtctgtatcagagtatggtttggagatgcatgttgggctgtgggggtatgaagttagtgtgatgggggcttctgtgtgttaggggatcctagcacgcagaccccctaacctgtgaattggggtaaatggagtgtttctttgcttaatcattccacagatatttattgagtgtgtgatacatgctgtactttgctaggtactgaggatatgatagcgagcaaaaccaggcacagttcttgctctcctggaacttacaagtctagtttctgggggatgggtagggtgggaggagggaagaatagggagtgttctgggcctggatggatatgtgtgtgggtgttttcaaaggtgtatctttgatgcggagggtgtctgaatgtgtatttgtggatgggtatgttggaagagtgcacagggggactgtgggaaggctgagggtgtaggtgtgtggacatggtttggggatgtgcaggtgtttggtgtatgactgtgtaatgagggtgtgttccagatggggagagtgtgtgtatgttagcggtgttagagaagtgtgtaaggagggcatttcaagtgatggtgcatgtgggggtgtttgcacatgagtaaacatggggggtagaggggatgtgaggggctggagggtagaggtctatgtggtatgcactgggggcattgctggggagcagcagtgtttgaggatgactggagctgtgcagagcatctcctgtgacctgaggatgtgccagtcatgtcctggtaccactcggggcaggccatctgcccccttcacttcatctcttccccctcacccacagcagcactggctccttggtgtgtgtatggccgaagagggcctggacacagggtaccctgggtgaaagatggggctgaggctccaaggctcctgctgtacttttcttctttttgagcaggagctggagggtgcctcaggaatacaggagggacatgggaggagggctgttgggctgagggctccctgtctggctgccatctcttcttcctgctaccctgttcacaaactgggggtgcttaactccctctgtgaatcaacatgaagtcactgctggcaacctagagcctgcgagacatctggccctgatggagggggagggaaaggtgtctggaacccaaactttctgcattatgatccccacccccaacctctctcacgtacacctgcgtgttcatgtaca

SEQ ID NO: 53400 - DNA, 1002 bp, Homo sapiens
gaatctggttaaatacagttaacatctacatcccaggaccagtgcaggacctgcagtatttcatgaattaaaaagaaacacaaagagaaaaggtatctggtttatttaggttgctgtgatctccctgagaaataagagtcagtatagaccaacgctgtccaaccaatagaactttctgccatgatggcatatcctgtagctgcactgtcccctcatgtggctgtctgaacacttgaatgactaatgtgactgagaaactgagcttttaatcttaattaacttaaatttaagtttagccacatgtatttagtggctactgtactggacagtgcaggtctagctagaccagtggttctcaattgagggcaattttcccccacagataacatttgccaaggtctggagatatttttggttgtcacaactgggggagtgcttctgatgtctagtgggcagaggccagggatgctgctgagcaccctaccatacaccagacagccccacaacaaagaattatctggccccaaatgtcaagtacgagtttgagaaaccctggtctagactgtctagcacctgccttttgacaaggacagaccctcaactgcagcctgggaactgggattggccaaaggtcctgggctgccctcaggaagacagatgggtccagaggcctcagggaagtccctaagccctttattccatcagccaaacaacacgcattactgggcatgtgctgagcttgtgccagtgccaggacaggacagagacggatcctatcctgtgaagggctgcctgctctccctccttccagggtccttcaaggatcttggcagggggatgggaggttggtgcagggagcactaaaggtcctagcagccattcataagtccatctatgtctccagccccacatggtatcagccgcttccctcatcctcataggcgatggcaatccctcgtcttccactcacagcttctgtcactggcgtctgacccaggcggg

SEQ ID NO: 53401 - DNA, 4281 bp, Homo sapiens
tcaccaggacatcgcgggagcccagcaaacgcgcttccctgccactgggttagggaaggcttgccggaaggacgatttcggaggacagcaggtgttagccaggcagcggagcgagcgccaacaggcgcactggggcggagagacgccgtgagcaaggtgaggcagagggcacgcgcggcgccacccgccacaggctaggacgcacggctgccagagaggacgccttaggggcccgcgagcaggctcgggaataaaacagggctggcagggcgaggtggagagactcgagaaggaccggccagatgtcgaagttcctagagaggagggcgcccaagcctccgccgagacgcgtgactacaactaccacaatccccagcgcctgcggttccagcgtcgccttgctctagacgggcggcggcgctgcgcggggaaccggcgtggggtcacgtggtaccggcgcatcacgtgggcgagttaggtgacgctgcggggcgggcggacagactgcgggacggacggtggacgctgggacgcgtttgtagctccggccccgccgttccgacccccgccgccgtcgccgccatgacggggctagcactgctctactccggggtcttcgtggccttctgggcctgcgcgctggccgtgggtgaggccgggtcctggcgggcgggagcagcatcgcggccgagctggccgggtcggaactcggcggggaagtggcctgcggggaatactggccccccgcgcgctctgcacccgaggctctggggacttgcgcctgcgagggcctctgactccgacaaaggagacccggatttccagctgcttgaggaggggtgcgggcgggtaggggccgcgagggcagcactcccccgtcctgccactatcgctgtctcccctcgctcccacgtctcactgctgtcccccctttcttgctcctgaccggcccgctcggtcacaagccggctgctccggttcctcttttcccagtcgctttgccctcccccacccacagcttgttgggtaaacagcggaacggactgggccggcgggatctggctggagcgcttgctccctcggtcccgcctcggattcgggcttgcgggtggcgaccctgcctgcgcaggtgcttggtctgggaggtggttttagcgagggaatggcagaaaatggaggcctaagcagaggaatctgtctacacagctgtactgtcacctgggggcagcctgaggacgccccttcagggaggtggcccttcagctcggcagctactttaggttgaagaacttctctctaccgagcagcccgtaaccccctttttctccctcactgctgcaggagtctgctacaccatttttgatttgggcttccgctttgatgtggcatggtaagggagggcagggggaggattccccttgaagcttcttccctgcagcctctcttcttttctctggtctgagtccctcccccacaccactgcctgcctgggacatggacctttgggaaatacgcggtcagttgttgcctgtagaactggtggtggggttgaagggggtttgaggggttaagattttgtgctccgcttccctgctagagctgaactgctttcttctctgcttccacaacaggttcctgacggagacttcgcccttcatgtggtccaacctgggcattggcctagctatctccctgtctgtggttggggcagcctggtgagtattggggtggtgggactgggggcaggggctgagtcatggcaggtggtgtcactggggtcttaggcatgctgagggcagtgacagcttgggctctgctcatcagttttttatccttccaccaggggcatctatattaccggctcctccatcattggtggaggagtgaaggcccccaggatcaagaccaagaacctggtcaggtaagtgtcagggtccttggacttttgtcagaaccagctgtgttggcgctgcctgtgtgtttgatctgacatactgtttctgacaagccaccttgtgggatgggatgttataggggaaagattgctggggacttactgggcaggaaggacggtttctttctcatttctttctcctttccactccttacccctaatctctaccactaccagcatcatcttctgtgaggctgtggccatctacggcatcatcatggcaattgtcattagcaacatggctgaggtatggaaggccagggtggtggcgggaatccattccagtgtgttctacacattccttagagattggatggggtgcatcaggatggtttctgattacttttcttcttccctcagcctttcagtgccacagaccccaaggccatcggccatcggaactaccatgcaggtgggtggatgggcgtatgaatgcaaaatgctgggacttcatgcctgcttccactctcccccatcccagcttgggccatcattttgatattctctcacctactttttctgctttgcagagtggggatggtgattggccccattagcccatatctcccccattcctggcttagcctcactgcacccctctctatcctcccaggctactccatgtttggggctggcctcaccgtaggcctgtctaacctcttctgtggagtctgcgtgggcatcgtgggcagtggggctgccctggccgatgctcagaaccccagcctctttgtaaagattctcatcgtggagatctttggcagcgccattggcctctttggggtcatcgtcgcaattcttcaggtgatgaatccccttgggaagcctctgtgtccttgtccccaacctagccttaccctccttctggagaagctgaagtgctctccttctctacctataactatagattcccccaaacagcttccacctcctcatttccatcttctggttttctcctacaggggctctctatttttgtctctgatttggtgtcactgacaacagccctgttctttttcccccctttctaatgcgttgtatctgtatagcacttagtcctccctctttctgttctctcattttatctgccatgcttttcatgtctccagtctgtatttgtgatctagactagaatggaattttgtctgtctatatcagtctgtcatggtgtgtttgactgtctctcggagctatgtgtatctccctctcacatgcctgtcagtaggacaccattgtctaaattgtgtgtgtctagtctgtctgacagtgtgtgagtttgtgactaaggatcagcctgagggtctgagtgtgactgtgggtgcttgactgagttgattcttagtgactagctttatccatatgccacttctctccgtctgtcccacagcgtaactctgtggttgtctgtccctgtctgccttgtctgtcacagtgtgtccatcctggttagtcatatatctcttgtggtctgtccatccaaccatgtgctagatgtcatcttctatcatttgtcactgccttacctattcctctgtccctgcctgatttctcctgttctttttttgcagacctccagagtgaagatgggtgactagatgatatgtgtgggtggggccgtgcctcacttttatttattgctggttttcctgggacagctggagctgtgtcccttagcctttcagaggcttggtgttcagggccctccctgcactcccctcttgctgcgtgttgatttggaggcactgcagtccaggccgagtcctcagtgcggggagcaggctgctgctgctgactctgtgcagctgcgcacctgtgtcccccacctccaccctcaacccatcttcctagtgtttgtgaaataaacttggtatttgtctgggtcagtgcagcttctgttgccctcttgcgtcaccgttcacagaggaagggtaaagaggcctgtacgcctcagcctcatgccaatcccttgtcagctttctgactgcacacttctgatctgcacagagcttgctcctaggtggggaggcacgggtgctgggtggactctaacccccaaacagacttgtttggggatgagggagtgtgcagataggggcccctgggtgtgtttgtgcctgtagtccttctaggcccgtttgctcagggctctgactgaccaccatgcccgaattgtctgacagcatctacttacctggttgtacagtcgggcaccatcatctccgtccttgtgaggcctggagcctaggcagtggtctctgcctccagtgatggtcctgtccttctagcagcagcccctcccagaaacctctactctgatccttgttccc

SEQ ID NO: 53402 - DNA, 1070 bp, Homo sapiens
ttggcagaagagggactggtgatggaagccttcctggaggaggtgatggtaacctggagtttgaaatagttactcatttaacaaatatttgcctcacacctaccttgggcacagtgctacattccccaggctaatagaggaagccagcctggataaggagaatcatatctggaagattctggaatgtgaacatgtatgatacataccgagagtctgaaactatttggttttaagatctctgaaggctgatagtgacagtggggcgggggaaagtcacgtctggatgttaggggtttttcttctgttgccctttcaccatgtacatgtcaggggtcttgaatacctgatgggaggttaacttttgtcccagaggactggggagtcatggaagaacctgaagaagggagaggcggggtggggtttgtgtttagaaggcacactgtttgagcttcaggaaggcgaaagcctggcatagccgctgggtggagcaggagagaaagtcagcccggcctgaaggaatcgatggagtccaagggagcatagtggtacagggcctggggatggaggtgctgtgtccccagcttgagcaggagggtttttctactctgaacacggggtaggagtgggggaggtggtttgtagccctggtgtggggttggtgcctgggagaagcatgaggcactggggaggcacagggagctgatgaaaaagtggttctgatgaaaactatggtcagcaggaaacaggtaagagaccaagaggagaggggcttcagggcatctggggaggagtggagctccacagtacacgccaggagccttggtcctgtttcaggagtagcctgcctgagtgccaccatcaattacacatgtctggcttggttgtagatgtggcaagatagcaagaagtttctggcttaaagaactctgtgaatgttggattcatggattgggtatgactactctgggtctgccacccccagaaagtttagcacaagtcacagagcagcgtcaggaagcccttgtttacatttcacacaccctttaggcccttctcccagccagcctgat

SEQ ID NO: 53403 - DNA, 1023 bp, Homo sapiens
ttggagtcaaccctccttcccgaccccctccccctagcccagccccagtcactgtcagggtcgggccagcccctgcactgcctcgcagagtggcctgggctaggtcactccacctctctgtgcctcagtttcccccccttgagtcccctagggcctggaagggtgggaggtatgtctagggggcagtgtctcttccagggggaattctcagctcttgggaacccccttgctcccaggggaggggaaacctttttcattcaacattgtagggggcaagctttggtgcgccccctgctgaggagcagccccaggaggggaccagaggggatgctgtgtcgctgcctgggatcttggggttggcctttgcatgggaggcaggtggggcttggatcagtaagtctggttcccgcctccctgtctgagagaggaggcaggagccccagggccggcttgtgtttgtacattgcacagaaacttgtgtgggtgctttagtaaaaaacgtgaatggagcagctcccttgtctgtttgggggtgggggtcgggtccctgaacgtggttaccctgagtgtgttgtggtggaagggcacttggggaacctggcccaacaagtaaacctgacccgggccatcctggttctccaagcgctgccactccctaggctttcactggccttaaggggaagtttgtccttgcactgcttccgggacagtggaggcgacgaagtaataaacccgtggacccagatttctcaggtcttaacacgttccctgaggcctaaaggtgcccagggccgagcccaaagtgcttgggtcagggctcggtggagcgccgaggtgagtctgaactcccagccggcacgcgccgcccgccggaccaaacacgggagggggcggggccctagagtcgcggcgtggtttcccgggtgatggccacgcggaagaggtggggctagggccctggttcccactgcctggtttctgggcccccggcatccgagtcggccaaaagccgggcagaagaga

SEQ ID NO: 53404 - DNA, 1110 bp, Homo sapiens
gtagccttgggaacagagttgactccctgggaaggcaagaaaggctccagaaaggcagagccgaatccttcctggggtttcctcccatgagtcaattctttttttttttttttgagacggagtcttgctctgtcacccaagctagagtgcagtcgcgcaatctcggctcactgcaacctctgcctcccaggttccagcgattcttctgcctcagcctcccgagtagctgggattacaggcacctgccaccatgcccagctaatttttgtaattttagtagagacagggtttcaccatgttggccaggatggtctcaaactcctgagctcaggtaatccacctgccttggcctcctaaagtgctgggattacaggtgtgagccaccacgtctggccaagataacttttttttttttttttttgagacggaaccttgctctgtcgcccaggctggagtgcaatgaggcaactctttaaggctgtctgaagatggatttctcccgaggcctgtcaaaaactaacctttcttccgtcccatctgacattaatccagtgtgcaccagcattgccatgagactgttccttccacgtggctgctgccccccagctcgccagccccaccttgccactcatgcttcccacaagatcctgggctggcctggacccctcatttcagaggtcccgacttcgctatttccctccatttcaattcaaataacaaacacatcttgcaagtccagtgctgtgctacatgctgggcacagagggtaaaagaaacacagtcccaagccctcggggaactcactgactcatagttgacgaacttataagcaaataagtgtcatatgaaataagagtactcgtagagatttgcacaaaacagaaaggaggaagcaactttttcattcttttgagagagagggtcagaaaaggctgcagagaagaggtgacatttagcccggtgcagtgccgaagatttgtagaatttcacctggtgaactgctgtggaggggacagctgggagtgcaaggaggtgcggctgcacatgggtgtgtggcaggcccagaactcggttcaagtgaatgacatgacaacaaacccagctgccctg

SEQ ID NO: 53405 - DNA, 1049 bp, Homo sapiens
gaactaagggctgtttcctgctcccacagctcctccacttcctccaacacagtgaatggaaattatgcttcttcctctgtctactaaactgtgcggtccttcaagctaggaaaagagcctgtcacctttccatcccccgtgaggactccagggcttggccaagatggaccgttaaaactgattgacctgacagtcctgtctgatactcagcggtgagactgtcaaggtgggccagggttctgtggctgatgtctcaacatctggctcacaagcagctcagaccagcttgtccaagccagccctcctgtccccgcaccaaacctgcagcctcaccagcattcgtcctctgggtcgggcaccggtttcctcccactgcaccagcagaaaccagagactccttcttatccctccccctacccagtccgattcatcaccaagtctcgccatgttgccttttatatttctctgaaatctgtgcacctctcctcaccctattgtcaccttcctaacctgagccccttcatttttggcctggctccttccttccttccttccttctttccttccttcctttctttctttctctctctctctttcttttttctttttctttttcttttgacggagttttgctcttgttgcccaggcaatagtgcaatggcacaatcttgactcactgcaacctctgtctcccaagttcaagcaattctcatgactcagcctcctgagcagctgggattacaggtgcctgccaccacgcccagctaatttcgtatttttagtagagacagggtttctccatgtcggtcaggctggtctcggactcctgacctcaggtgatccacccacctcggcctcccaaagtgctgggattacaggtgtgagccaccgcgcccagcctggcctggcccatttctaattgacttcctctcttcaacttcagcctccctccagtcctttctccacactgtatctagggggatggtttcaagatgcacattccaccaatggctcctccttgaagttgatcttctgcttaaaagctttca

SEQ ID NO: 53406 - DNA, 1043 bp, Homo sapiens
ccggcgctccgcacccggcagccactgcagatctcgagcaggcggcggggccgggccgggcgggagagtggggcttgcccggagggccgggaggggccggtgccggcccgggggcggggccgtggggcggggacctcggcgccccggtacttttccaccgcaggggccgggggcggggccgccgcctccacgccagcttaggcccacacgtggcggctgatgtaacgcccgtgcccccacatctctctccccgattaaagcggacgcgccccacttcgaggaaccgggacgctgcgggcggtgccgctgctcccagaccgaccgcgcccctgcccgccggccggaggcctccgcgcctcgggccggcggatacttaaaggagccgcaccccctttcgggcctgctctccgcaagccacaccccctcgcggatcactcttaaaggagacgggacgcttgctcgctgacagcttccgcacaaagcgcggtctatttctccgctgaaaggagcgtgagggtgcggccgttgggaaataaaggctgcagggcgaggagtggggaaagagaaaaacctgaaaggttaaagactgccaaagtgagggagcatcagaaggttggagagtagtgggtgaggggactggttctagggactaatgggcgacactgagcatgcccaagtgtttccaaggaccgcagagaaaacgccccctttacttggcctatgcggcgactgcggctgtacctgctcagttcccggctctggggacacagaagaatcacgcctctgccctggtagaactctccatctagtggggagccagacttgggcacaaggaagcatgcctcaattgctacgtgtggcaagcgtgggggtacagtaggaaggctgacagcaacggggaggacctaggaaggcttcatgaagataatagcattgggataggttttgaggatgggtaggatacatacaggtggaagtggagacaagggtgctcaaaaaacatggaacgggtgccggggcaaaggcatgaagcaggagccctc

SEQ ID NO: 53407 - DNA, 1156 bp, Homo sapiens
aattaagcatttattctgcctctaaaagaaaaaaaaattcaaaattaccaaataattgcagttaaatattacttcctactttacagaagaatacaaactaataaatgtagaatgaatggtggaattagaaaatttattttgctgccaggtgcagtggctcatgcctgtaattctagtactttgggaggccaaggggggtggatcacttgaggtcaggagttcaagaccagcctggccaacatggcaaaaccctgtctctactaaaaatacaaaaaagtagccgggcgtggtggtgcatgcctgtaatcccagctactcgggaggctgaggcatgagaatcgcttgaatttgggaggcagaagttgcagcagtgagccaagatcgtgccactgcactccagcctgggggagagagtgagactctatctcaaaaaaaaaaccaaaaacggccattcatactgcagtcggtcagtattcggttgttggattcagtgtgctatcggacccaaagggtgatggcaccgctaggatgaagctcgtgagatttttgatgaaattgagtcatgaaactgtaaccattgcattgaagaacagaacacaggtccatggaacagtcacaggtgtggatgtcagcatgaatacacatcttaaagctgtgaaaatgaccccgaagaacagagaacctgtacagctggaaacgctgagtattcgaggaaataacattcggtattttattctactagacagtttacctctggatacactacttgtggatgttgaacctaaggtgaaatctaagaaaagggaagctgttgcaggaagaggcagaggcagaggaagaggaagaggacgtggccgtggcagaggaagagggggtcctaggcgataatgtctctcaggattactgtttcaaagtcatacgggatttgggatattttttgtacaggttgtgtttatgtcagtttttaataaacataaaagtgggacaaaaaaatgaaaaaaggaaaagacataaaggaaaaggaaatttattttgccatccctaaggaaatttaattgaggaaaaatttaaatttggtgttaaaaccagtaggtgaatggctggtagggaactggacactggatacacaaaaggcagaatcacacagattactttc

SEQ ID NO: 53408 - DNA, 1027 bp, Homo sapiens
tggtcgatatctggtgtgtacccgcatatgtcgtctaagctcatcagaacggaagaaagaccatgaacaactttcccagttgcaagaatatggcctctcacctgggaatgacaagggagagatggaatttagaatacagtaggaaggaaggggtctaactctgtgaggcagagcagtccaggttgaggattcaaaagggaaggtccagggaaccagggaggggcaacacaatcaggagtgcccgccccagtcatcttggcacagtcctcctgtatggcaagtcggggggccagtctagcttagttccaagcttggaagatgaaaggctcatcccaaacaattacccaccagtggcccaggacaaatctaaagcccagagactcctccatccccaccccacctgacacctccttcacctgtgtgcttgcgctggtggctcacgaggtgggagcgtttggtataagcttttccgcagttctcgtagttgcagcagtaaggccttgcctctgaggagccccttctaccagtcccttcctgaggcctggagttcttctctactgtctgtggagcaggtccgggctgctctggtagaaatgggccttcttgagagtctggctgactgacaagagagtcctgagatcctaaaaccagcaatgactgggactcagctgggggcatcccaaggtcatgggcatcttgcgggggcaacatctgagccatggaggggagcactgcctgggcctcagtggaaggcacagtcgggcccaacaatgtttcgtcagaaggtactgtcgagaggccagggtaaggcactggagggttcccagtgtgggacattattgggattccagtggaagccgagactggcagcccattggggggcatccttagattcccaccgaagggcctggctacccttggaatattgggctctcctacgggcattagttggggcccactgaaaatcgtcatctcttgctgagggggagacattctctgacagtaaatcatccgggaaggagtgaga

SEQ ID NO: 53409 - DNA, 1277 bp, Homo sapiens
ctgcccatgctgaggagagccaacatgagtcaacccagagcaagacgatgcctcccttggggtccacaatgatgacttctgcatgcactaacatccctgggacagttctcacccaggacttaacaatgcaccctcttaaagcccttgaagacctaagtgagacttattccatgggccagaaagtgacttcctttgatcaggtaaaacacacagcaggctcccagatgacagatgttactgtcaccccaaagtcatcacccactgattgccagaagacaaccatcactgcaagcaacatgacaatctccaatgaaagtagccagctgaacaccccaagcagtgaccagaccctcaatgagagtcagataccagccctgcttggagatcagatgaagaccctcagtgataaccagactctctgtggggaccaggtgaccttcagtagtgaccagaccctcactgatggtcatacagtgacttccggtagcgatgagaccctctctgggggccaaatgacaaccagtctagacctctatggagggcaaatgatgacttccattgataaccagaccctctgtggggagcagatgacgacctccagtggtaaccaggccttctacgggagacagatgacgacctccactggtaaccagaccctctgtggagagcagatgacaacctccactggtaaccaggccctctatggggggcagatgacgacctccgctagtaaccagaccctctgtggagagcagatgacaacctccactagtaaccagaccctctgtggggagcaagtgatgacctccactggtaaccaagccctctgtggagggcagatgacgacctccactggtaaccagaacctctatggggggcagatgatgacctccactggtaaccagaccctctactgggggcagatgatgacctccactggtaaccagaacctctgtggagagcaagtgatgacctccactggtaaccaagccctctgtggagggcagatgacgacctccactggtaaccagaacctctatggggggcagatgatgacctccactggtaaccagaccctctactgggggcagatgatgacctccactggtaaccagaacctctgtggagagcaagtgatgacctccactggtaaccaagccctctgtggagggcagatgacgacctccactggtaaccagaacctctgtggagagcaagtgatgacctccactagtaaccagaccctctgtggagagcagacgacgacctccactagt

SEQ ID NO: 53410 - DNA, 1002 bp, Homo sapiens
aatcatctgtggtgaaggacatttttctattttatttctaaaccatcagagactgataaagataataaaattataaagacaaaatacaagtccatgtttcttcatattagattcaacagcatacaattgctgtaaaattgttacgtaagtttttcagtgtgtactctcagtttccattctcatcatagaccaggggtaagtgtaaacagcactggtttgcagactatcctttaagtagcactgttcaaagagatcacgtcttagctgcagatggagaattgattggaagcggattgaatgtgggcagagatcagtagcgaggctatttctctgatccaggcatgtgacagtgggtaggccgacggagaagtggcaatggagacagaaattttggaggtaaaagccacagatttggtgaaggggaggagtcaaggggaaagataggaattaagatgcctcccaggtttctggcttgagcagctgggttgggtgatggtgatattgactgaaatctggactggagaagataatgtttgagagagggccatgagttcagtactgagctaagtttgaggttccttggggcctccagtaggagatgtccaaaaggcgaccagttttggagctggttgtggtctttaactgagaagagagacttccctgatgtagtctagcactgactccttccttgggtctctgacagactcagctcgtggtagtgctatttgtctctgggggaggtctgtggaagaagggaggaaggggcattggcagggctgcgtatgttggtagtaggattcaggcccagcttctgtagagatgcctgaccttggcaaactctgggggagtggcaagtcccactgtgcccactgggtggcagtagtgcttcagatgagttgtatggactaggggttgctgggcctttctccaggtaattagccatctgtcctactccagagttgacctttggactccacagaagcacttacatgtgggcccctc

SEQ ID NO: 53411 - DNA, 1089 bp, Homo sapiens
ctggtgtgctagggggccctgccacaccagcatcaggcccaggcccggcctctgctgagccggcagtgactgaacccggacttggtcctgaccccaaggacaccatcattgatgtggtgggcgcacccctcacgcccaattcggtaagagtctggacaggctgggaggcacgcctgggccctgcgagtgagcacatgcacatgggtgtaggggctcctctccctctagtgcctgcagcaggaacgatcatcacttctgtgcgagtctgagactgagggtaggagtgggttgaccagtgggcgtccttgtccctgagcgtgtgaagcacatgcactaagcctgactcaggccttggggggtcactgacctcaatgccttctgtgtatcctcagagaaagcgacgggagtcggcctccagctcatcttccgtgaagaaagccaagaagccgtgagaggccccacggggtgtgggcgacgctgttatgtaaatagagctgctgagttggaccaggctgcttccttttcctttccttcacttctgatgcccctagtgggaagggtgggcaaggaggggattgtcacggccactccacagcgtggcagataggtttgcctgtgttcaggcccttagcagctctctgaccactaaccactaccagtttcacccaaattcctgcacctcagagcacctgtggtttacactcaagatggctttgcacacagcttgtactgatagtcgccgcgcttacacagatgtgtgcatattgagtgagggtgtcacaggtgctgcagtgacggccagtcacacatggatggctttgtgcacagaggcagtctggagcatgctctacctaccttcacatcctgacagctttggcgcagcagcagcctcacacacacagatggctttgcacacacacccagtgcctcgtttccccgactttattcagtggcacgttcacagcggggatgggggtagacacaaggtggggcctgatctgtcctggagccctgggggcaccacacaccatgcactatggatgggagggggcacaggaggggcttggtggccccacagaagcctgtgta

SEQ ID NO: 53412 - DNA, 1181 bp, Homo sapiens
ccctgagcattagggcgggcccacaagggagggagtgccggggctgcatgcccaggccgcactgatggtgacggatggtttttcattatagcctctcaggtcctgcccgcaccctgtgtggaaattctatttattccctaatttgtaaaaattccctctttatctgatcccaatcagggcggggtaattggctctctggggcagcggctggggtccttgatgaagagctatgtggatgtacccagcctggcccccacccagcctgccaccagggcccacaattaataatgatttgcaaatggcagacaagcaataacacagaaagatgtggtgtccgtgctgcctcttcatttccttcccttgcagataaaaatggccacagaacaaaaacccagcactataaattctagaattagttattcactgggataaatggggcctggagccaccagccactctccctgccaccgttcttgcctgctttccctgatccaggttctggccccatgtctgttcttgagcctggcccctgactcttctgcctctttggctcgcagcacaattcctcagcttctcccaccactccagctaccttctcctgtgtggccaagacttgggagtggtcacctggtctaggcctgtagcttcctctgcagtggctggagccagcaggtgggattcaccctccacctcctcttgtggacctccctggctgcccaacgtggtttctgtcctcattctgtattggggtttgaatgacgttgacatgtcctgccaggcctgggagtctggataagggtttgtcttgggtatcatctttggcatttgggaccaatcatgtcctttgcctcgccaaatctgagttgagttcctggtggccaaatgcactgcaagcgacataaggggtttgatgctatgcttactggtcaggcagttctgggatgctggcaaaggggtttccaggcactgtgccctcccggccaggcacatccccccctccaccccactgcccccaagtggctgtgagctggcgggtaatgggtgtgtaatggcctcatttccatgcctggcctccaggagcggcggtaagtgtttgattgccttaatttccaaacacatcattatcccagctttaccagcgcttaataaacactttatgaggatttttttaaaaacatctt

SEQ ID NO: 53413 - DNA, 1046 bp, Homo sapiens
gatgttgagggcaggggatttgagatttgtggaaagtagagaaacttgaaattgtcactatgggtgaagggagagagagtgcacactgatcaggaacactggagattggctgggcagttttatatacccagctgaggctgatgactctgattttgtaagtggcactagtctatatggttgtgattttctctagtcatacgctccaggtggcaggcacagagaaggcagagtctgggtttttccaggcaagggtgacaaggaaaagggaataagagagttgaggattggcaagaaaaagactgaaatgatggaccatgcaatccaggctccaaaggcagacatgtcagttacgttgctaggacagaaactatgacttttcccttctttttcactaaatagaacccctgtataattatagaaccgctgtataataatcagtgtgtacctagttaaaagactacgtttttagttttccagacagctaggtacagccatgtctctgagctctggccggtgaaacaaaaggaaatgtgttgtctgggacttgcaggaatgatacctaaagggaaacagctcatctgggaaatacgctattcttgccttttcccgtcttccccctttctttttcctggaatgtggatttgatggttggagctccagcagctattttggactatgaaatagtctgaggattggaaaccacatgccgagaatggcagggcagaaagaaagaagaagtctgaatagtctgatgattttgtggaactgaggggtgtttagtcaacttatattgcaagccatactcatagaatgcctttcttagtaaagctatatttcttccctctctgttttcactggggttttagtctaaacttgattcttttagcctttttcctaacatagcctgtgtcctgagatacagcaagaaacaatttgatcaaatgtttcaagagagcaaaagaaaaaaacggttaccaacttcccagcctgaaatagcagcgtcctctttgtccttcggcctgcctcctttattcagtgagttctat

SEQ ID NO: 53414 - DNA, 1044 bp, Homo sapiens
ggaaaccaagatgctagaagggaacggaggtggggaagggcctgaaaccttcagggctttggaagctggagacaaagaccatgacagggtttcagggcctgggcatgtcaaggctttgggtggcaaatgtcagggctggagtaggtttgcgtgtgatcttgcccctctttcttttcctctagtccttccttccttcttttcagtatgtatttcttgagtgtctctgtggataacacctgtgccctcaaagagttcatggtctagcaggaggtgaaggagaggcagttacgataggcggagaattggctgctgtgggagcacacagaagaggttcctaacacaaaggcgggatggggggaaggcacctagaggaagcactagcaagcctgggtcctgagaggtgaaggcaatgagccaggtgagaagtgaggacttgaaaactcaaggtgcaaatgagcctgaatttggctgtacaacaggggagtgggactgatgagaccagagatgtaaacaggtccagaactcagacttttataaaggggtttggatgcattgggagctgagtcaggcaaggtggcaatattgaacttaatggggattagctgagcagtcctgagagcagtgaggagccactggaagtggtgctggtggtggtggttttaatttttgactcttaaactttttactttgaattaattttacatttgtaggaaagtttctatgtatcccttacccagctttccctcatgttaacatcttacataatcacaatacagttatcagtaccagaaaattaacattggtactgtgctacattaaagggcctcttaggccgggtatggtggcacacgcgtgtaatcccagctacttgggaggctgaggcacgggaatcggctgaacctgggaggcggagatgcagtgagctgagatcacgccactgcactccagcctgggcaacagaaagaaaccctgtctcaaaagccttattttaatttcaccagtgtttccattaatgttctttttctgctccaggttcattgaagg

SEQ ID NO: 53415 - DNA, 1084 bp, Homo sapiens
gatgatggagccttccctgtgtttagtcattcattcagaaaatgtttgctgaggtcttctgggtgcccaggccaataccagggcttcagaggtgagagatgctcctttgtgggaggtgaagtgagcacttttggctgaggcacgtcaatgttgccagccgtgttcctggttctaccatagggttgaggtgccagatccagccctgttcttccatggaagcacctaagccttcaggatgctgagaagctcacgcaggtcttctcacaagtccccgggccaggcgctcccctgagtcccctgaccagcccatttgagggttaatgcccttgactacctcaagggtgggcaagaagagcaagtaggactcctggagtccctggaggaggtgggcctagcacgagggacagccttagaaggccacaagcacaagatcaagaaatcaccagttgctcaagttggcagaggtagtgggagtgcatgttttggaggtggtgagtgaaaatcctgtgttcaggagggctccatggtgacccatcaggacagcttgatcattttggcggaagagtgtccccactctgagccttgtcagcttagggggagtccctgtctacttgggcacagactcacagcctctgtcctctgctgccctctcctgccccccttaagccactctcctcctgctccccacactccacgcccttccctcatctcttggaacctgccacaccttcttttaccttattgccttcccatgtggctttattttcccccagagccccatatttccaccccacaacctaattaactcttcctcatccctcagagctcagcttaaagtttgcttcctcaggaatgctttccctgactcctagacttgatcaagtccccctttccccgtgtactttttctcagcaccctgctctccccatttgtagcatttaatcacagttgtaattaagaaattatttgtttgaaagttgtttaatgcctgtctccctcactagattgtaagttccctgaaggcaagaaatgtctgtttcatttggcttatatccccaaagcatagcacagtgtctgacacgta

SEQ ID NO: 53416 - DNA, 1056 bp, Homo sapiens
aggcccccaggaggttccttgggccccagagggaacatctggcaagaggccaaggccaggccagctgagccccagggcagggtaaccctgcccctcttgcttctgaggcaggagagtgaatggggcctcccagcaggaatttgggctctggactctgggctctaggggccatatcccaggcctgcattaaccatcacctcctgcagccgcttagttcttttctatcctggcctggggctgagggttgagggtgtgattcattcacactcatatcccatcacacagtgatctgcagcagtcacatcaagaccttttgccacaagatggagataatgcagagtcttgcagccccacagcagtgtcacacaccccaaagcagacccccacaccagatatcatagccacacataccatcacaggccatacccacagggtcttgcacataagcacctactgtcccctgccacagggccctgagttcttaagcccctctcccagaatagctaagaatagcagttagatcttatgtccagggctgggggttaccaggccccttccagtctcccaccctaggaaataagcctagagagttggtagtgaccagggagtgggaggaagctggattgggggggggagggggcagcagtggggagagggagggtgggagcagagataaatgttagctcatttcttccgtaattagttactccctcatccccgcgttgtaattgtgaacaagctgtaatgtttaattagtctgtaaatgaaaccccaatttcataatggcctggctgacagggctaagtgagcaggggaggaggaggaggggactcttcctcccctcctcctgcagggtagatgcaggctgtgggatcacttccttttcctttcagccccagtctggcctctgtggggggaggctatgtgatggggttcagtcctatactctcgctgtgaatatcccttccatgggcccatcttaccagaggaaggggagaggaggctctcaggcatccttcctgcctccccgtcactcttgggttgggataggacagt

SEQ ID NO: 53417 - DNA, 1234 bp, Homo sapiens
ctgtgggacatccctccctatgctttggctccagcataggtgctctgtcctcagtattagctgtgccccctggggctgcccctacccttctgcagggttctggacccttcctcttagctcctcccatcctggacactactgaccaggcctaggccccactgggcaaagtggggcctgtggcctgcagagaggggaatttgtttggtctggtctgaatcacaccagtgtcattctacatttgctgagggccaggtattagtacagagggctttatatctgttctctcattgaattctcaaaccccgtgataagggctgtcatctctactggatgtgaggaaactgagggtccagaaggttgtcatgaccgattgctgctcagcaaggaagtgagagagcaggaatttgaacatatctctcctagtctagggttggagttcttcaccaccacgagtactgctttccttccattccaccagctgcagacacgcgacatgtcaccacgcctggatccatttaagagagccatccttgtaccgtaggcagagaagttcattcagctactagcctgtgaacacagaccctgactcaaacctcctactaggctaaaccagcccaagccaggctgaaccaggccaaaggggactggaatcaaataggccctgctctcaggagctgtgtgtctgagacagttgggctgtagcaagaaggacacacagaggacagaatgtacccagcagctgagccagcgcagaagtgtgtcccagcacacggcctctaggcccatgtagctcaaggaggggctggtgtagcccaagccagcctgctgtggtggctgagggtatagctgtcccagaggcccctccaaaactgggtccctgctgtaccctcccaccaggcagggctgggagctgggagtgctggagacatgtccagggacacgtgtgcaaggggagcttgtcctaatgaggagaacatggctgctagttaggcaaggggcgggcggggagccgcagagctgattgaaggcaggggcaggggtcagacaattaggcccagatcctgccgtttgatgtgagttctgaggcctcaaagcctcccttcagccggctccctccactccctcctctccctcctctccctcctctttcctttcttctgcccaaagacaggaaggatggaaacgcttacactcactgttactattattaaacgctgtggcaggccagccagac

SEQ ID NO: 53418 - DNA, 1945 bp, Homo sapiens
ctcctcgttgaggggggtgcggggggtgctggctaatgagctcgtctgcagtacagctttgccttccctccttgaagtttcccgggtccctctgaagacctcgggcccaggattagcacacaccaaacgccagcccccgtcttgcccagcagggagttccttctgatcaccctattcctgctaccataggcaaggaaagggggtggtaccaagatagagccactgtggcctgggggagggggccttgcacctctgggaagcctcaagcccctctgcatcccttgacagagtgaccgtgtccacctctctgcagagggttcttgcttcccagagctgcagtcttctcctcccatcccctttctccatgacatctagcctggcagtgtccccattcctgtgggggacccccactcaaggcaaggaagaatgtgaggaccttggctgagggtttaggaggtagcatttagatctgataggatgtgggactttctggctcaactagagagcctcagaatcagtgagattcatgaagtcttctgggcttcagatgacctgagtggtgatgcattgatgtgaggcctctacagaccttgatgtccttccagagaggtaccttgcctgcttcccccagctttggccaccttcagggctgggaggggaggagtcagcccagctgccttgtggggaagggcagagcacagtactactgtacactactgccccctcccatccagttctttctggtgtggccctaagaaagtgagaagctagggagatggatggtcatgagaagggttaactctcccatcattgacagggtctgcactggcctgcctggatagtgcctggggagagggtgctggctccttccttcctgagctgacccccttggagccccagagacatctgaggaattggttcttgccagacaccagactgttcttcagtagcaaccatagatggaagaatggctagatggatgggtgagttgatggactagatgggtgggtgagttgatggacagatggatggaagaaggttctcctgtatgtatgtatgtatgtatgtatgtatgtatgtatgtatgtatgtgttatgtgtgtttgattctttaggaagtacaatctttgtttccccaccttcctagccccaggccccggcctcgcctccccttgtctctctctgtatctcctgtcaaaccatcgcagacttaaatgacaaagaaatcagaaagacagatcaatgccggccaaattagcacttgcagatagactctgcggggatgtcagcgccctgacccctggtgatcttgcagcctccactgctgatattatgcaaattgcatccatctggcaggacccgcgtgctggctgctcctactcagaggagtaatgggctgggggtgggtgggagtgttagagcaagagtcagtgaagtgtgtgcatgtgtgtgcatgtgtgagcatgtgtttgagtgtgtgtgagggcgtgcggtgcccaccaagcactgggcggtgattgagtgattgacagggcagataagggactgcattggattcctgtgggctgggggattaggagcagccacagatgggagataaccggacttcatttcagtttattttcctccttatcccctctccccaccttcactccctgaaaacacaatatctgtagtttgtgttttcatcaatatttgcaagtcattaccactggtttaaggtgagagacaatgtcagggcccagaccaggccagcccctcccccagttcctggtaccctgagaatcaatccctagagtggcacagacagccttcactccagtggcattcacagcagcccctcctttcaggcccacagtactcatgggacaatccacacttcatgggccagccctgctgacctaccccatctgacctaatgccaactgacattccttaagctggg

SEQ ID NO: 53419 - DNA, 1237 bp, Homo sapiens
atggcctgcatatcttgtggggagaggcatgggctttaaaagtgagtggtgggcacagatgactacaggtgcagcggggtagcaggtgtgaggatccagaccatatgttggcagaccatatgttggcaggagcacaggttgctgtgggaccacctatgttttgtgggcagctatctgcgtctgttggctgtgcctaagcagtacccaagatggcaggagctggggggagcatgaggtgctgggccctggtactatgcttagggtggccccgtgaggctggtggtcacatctgaaggttaggctctgcaggtgcatgtgtcagtacctggggaagacgtgccagggctctcagcagggccaacagcgggagagcccaggctgagggagagcagttttaattaaccgtttttaatatcattttggactttggctggtatgtgaaggtcccgctggaagcagcatttgtaaaaattaaatccctcttattaggagcttggcagacccatgtgcatgcgccaccccctctcccgccccatgccccccctgaggaagtgctggatgaggccatgtcacagcagcaattggttatcacgccttatctgggaatatgaaactgtgcggcatgacacccacggccgcagtggagacgccaattcatctcgccctcgctctgacaagccagactgcccttcctgaaaggcatctgtcaggcgggaccgggttgcctcctttcctggcaccttcgctttcctgccaagggcccagctttccctggtccagcctggccctcctggggctctgctgtcctccgtccccctttcacacgtcccagtctgtggaagatcttggggagtcataattacaataataatctaatcacggtgacgcggtggggcaagcatctaatgttatctgaagtggtcttcccgcttagctgcgataagactcaggatgacgtgcagataacgttgagctgccctgtccccgagccataagcagagcggaggggcctcggcagccctgccgcccgcccgtcgctttaagctgggaagcggcagcacctgctaatgcaagtgtttaatatttgatgggctgggataaagcaggatcaccttcgaattgaattgagtgtcagccgagaatctattactgaaattcgggtgtgatttgacagcaaagtagacgatgttattcttcactagttactgcaatcttctccccgacatcacttaaatat

SEQ ID NO: 53420 - DNA, 1036 bp, Homo sapiens
catgtagaaaaaaataggaagagagagtgcagagtgggtgagtacacagatacgatgaccaaatgcagaggagactatacaggagattgtggggaaaatggcagagagctaggaaaactgagtagagtgtcaagaagggagaagggtttcagagatggagcaggctgcaaaatggcgaaggcaggtaagaatctgaaactgtccacagatgtggggcagcatggcggcagcttgaccagactgcagggagtgaaggagtgaaggaggaagggagtggaggcagtcttgagaagttggtcgttaacaggagaacagcagtagctggataggatgtgaaatgcatatagaactttaaaaataatctaaaacttaacataggtttcagagagccaggcagtgttttaagcactttacagacagtaatcctcatttaatcctcacatcaattctatggggtagaaactattataacccccattttacaaagaggaaaccaagacacagagaagttatgtgaaagtgatagaaatctaagcatatgcttgaatgttaatgaagaagccagcagagaagaggaggttaaggatttagaaagacaagaaatactagatggagcaagggcctgaggaggtggggaaaggatggcctgtaaagcacaagtacggtgttggccttagacaagaagcgtagtgtctcccctgttagaacaggggaggtgaaggagcaggtggggaaggatgcagatgcatttgtagataaggggcatgcagaaagagctctgcctagtggctttattatctttctggaagtaggaaggcattagggttggtgagtaccattgagggttgctaaggctgtggtcttggatctgtagtaaccactttctgtatataagaatgactttttctggcattgttgagctcaagagcaagtgtggagaaatggagtcatggttggggttttccagaaaaggtgtgctctaggacaagtaggcagggtgttaaaaattgggggatgggtggttgaagtgatagat

SEQ ID NO: 53421 - DNA, 1110 bp, Homo sapiens
aggcttctttcctgaggaaccacaagatggaccagcaccctggactgtctctgccagccctggatgtggaaagctctgcccatgactgaggcactgggagtggggctttggcccagctggcaagtgccctgcagtccctgtctcctgatcgggtcctgatctgggggagctaggatgggggtgggttggggggagtacattgagccaactgccttaactgaatttccatacctcctgttgttaattatagagatgtaataatgcgattagtgcacgattaaaaaaaatccctgatatgattaccatggatttaatatcacatgatatatcattatatcgttatgcagtgacagatgtaattgaaatacacttattggagccgggggtggtgtttcattcaatccccagcaccccggggaggaaagggctggctaaaaagaagcggtgggagaggaaattgtaatgaaaacaaagaaaactcacaatgtagctctcaccctgggcagctggctcagactgacctgctgccttagactctgtgacagtgcacgtggagccccagacaggccaccctcttctgcagggactgaggcagcatggctcaggagctacttatcttattctcaacccagaaacttcactgtccccaaggcccctctgactcagcggtgaagccaagaaatctgagagcaagaaagagaaaactccacctgaaaatactcgggaccataatacttgggatcaaactgagctggtagctgtcttccactcctgggacccccagtaccaaatgctgtgggacttagacctgtggcatagcccctgcctttgctgtagtggtggcccagtgcactagaggcagccatcatgttggaggcagtgagcagtaaggttaagtacacagagacgataattatcccactcaggttccgttgatgaagagaggcagcagcagctctggggcccctgaagtatgttggtagccggagaacactgtacacacaacagaactgccatctggggttagggaggatgggcttgtgtcacctgatgcaagtgtccatccctttgctgctttagctgtgcgggtcaagcctctgctggacccga

SEQ ID NO: 53422 - DNA, 1092 bp, Homo sapiens
atttcatgcttgattttctgtgctcagggactctggcgttgatttgattccttccaggccttagcatgcccccagtcaccccacctctgcccttcccccaccccacctccaatcagtcagccaggcagccaggcagccagccagcttctacttacctgttctcagggaagcattccccacctaagtcagactccccttttctctcctattataaaagcttatgtgtcttgttggaacctttattacagttcctttgagcttaagtctcttggagaaagctgtggaagctctctgaggacagtgttgtgctctgttgctatatatgtgcatatagcctggcatgtaataggctctcagtaaatgtttgttgtgaatgagtcagtgtgattccaaagcgtgcactctccatcatattacagtagagtgaagactgatttgaccaaggaagatacaggagccaggatgttgggtgcaccccaaagagaaggttctttgggccttagctctggaggctggaatttcaaccttctcatcctttttttccctccaaacatcagagaagagaagggcttcatctgattctaaaggtttttactttcttcctgggtgatcttatctactcttagtttcttgtaccactcatctgcttcttaggattctgtctcagctcagaccactggtctgagctcctagcctacaccttccctgggtgccccacctatggcccactgaaggccgtgtgggtccttcttgctgatttccttcagtgttgttttgcaaatatgtttacatgtctctccttctagcctgggagctccttgagggcagtggcttggtctgcttgacctgtgtatctctagcacccagcacagggcttggcacatggtagttcctcaataaatgggtgttacatgaacaatctaatgaagagggagggggatctgggatgaatgttttgaacacccttcttctttttcccagggggaaagaaagtgaaggcgtgtatgctgtgtgcaagcatgcatatacctttgtatgtgaggggtggctgggtgggtggtggtggcggtagtgccgcatgctcaataaagg

SEQ ID NO: 53423 - DNA, 1096 bp, Homo sapiens
gcatagcggggcgcagccgccagctctcctcagagcggctctctaaggtagctgcagtctctggccgctgcctgctctcgttcgctctccttttttccctctcctctttctcagctctctctattatggggacttgctccagctctttctctctcttctgtctctccttttgttctctctttgtctatttatcacactgtgaaggttgaaagagatgttattaatctgggagaatgaaggcaggattagtggtatgaatcggattttgagaggtgtaatgatagaaagactcgctcggctggcggcctgcgtgagcttgataaatggggagcactccagactgactcgcgccttcctccgcgctgtgcgccctgcccgctggggcgtgccacgctctcagatctgccagccggcccaccccgctcctacctgaaccggagcaaaaagccaagggtaaagcagacacaaatatctcccatcacacttggagacatcattgcttttagcacccttttcaagtcgaggcctgtcgagttctcaaaggactgtgggcagagggagtggggacctagacttcaggctagaacagcacctgcctgcttctaggacctgtaagaaatggatgtcaggggtcagggagtgataaaaaacaatccctagaccaatcaggtaagaataccagaccctatgtaaatacgtggttaagcaaagtgctgttgagagaaatgggtgtggaggtcagggtggggcatggaggagtgggaaagagaaatcatgaagggcttcctgaaggtagtgtcctagcagacaggatttggagaagggaagttgagcgttccaggtggggaaatatagtataagcaaacatgtggggcagaaataagcctgactcttggggtgggggtgggggagttgaatgaagtacctcagatctgatgaatttcagatcaagaagagacctaagaaatccagtaaagtccctcatttttcagtgaagaaactgagacccaggggctagagtttccatttctgaaattcttttttatccaagccctgttgttatttctaaaggtactcccttctagccatccagaga

SEQ ID NO: 53424 - DNA, 2541 bp, Homo sapiens
tgcccctaccattccagtcagtagcccatatgaaccagctccatggaagaaaaggaatttctagaaccagtagcttctgagagattagtaaaaccaatagttctcttttctttgtacttaactcaccctaatagtttgagcccataattagaattgggctttattaggctaattaggaggaaggaatgatggcaggagggcatgtggagatgcatcagcgtggtgggcagtaaatctaggcttttaataggtttgttccataatcagctgatttggaaggctgactggtggctgcccccccttccttgtactgccaccactccttgaagtggccttcacactttgccgtccttgtcctcgatgctggcagcagcgctgggatatgggggctcaggaaggagggaggagaccccacccggagcttcattgcctatgcacgcgccgtccagcctggcggcatgattaccttgctgagaaatccgtccaggcgcggggctgctgatagcaatcattgattaagagggtaattgtcctgaaaattcagattgatcagaaggcagaaatgataacttgtgtaactgtgtttaaagccacgtcctgtcaatagaagagactgagatgtatcacgccaagaggggggcagaacggatgggtgtgtgcgggtgggcgggtgctgccatccttctctcagggctaagcaggatgtttcttgtcagtaacctggactattggagattcaatcacttttatctccccctctctctcaatccaaatgccttttcatattaggaaattagaattggccctgctcatgcaagatttattagctctgctgagcagtcgcaccgaagagtaaatgatttcgctttgctggagctttttacacattaggacccaacttctcctttcctgctctgtgctactggctgtctagaggagggagtgagctctagaactgaatactcagggagtgagggaagagcatcacttggatctggcttcttgatctgccagagacagactgacttttggtatctgactgacttcctcctacctgatccccagacatgtcccctactggggtctagggttgtctctctcctgaggagatgaggtttattcctcagacttgaatgcctgggtggtggcttatcttgggaggaagggctcagggctcagagagggctagaagagttagaggaagcaaggccaggggaggggcaagagtgtgtgttgggtgaggtttggcaatagcagcatagaatagggaggacaccatgacttctcttctcagagcccaagcctatactcctctcaggagtggggccacaagggccagagcatctttctgagcccccggggaagctgtccaggaagccacctggttgcttagagagtgtggaagctgtttagaacaaagctgagggtgtctgggcctgctgcctgtctgtatctaaggtactacaaagttgactccggctgaggctatctgatctgccaacaacacaggctcttagtggaagaaggaccagagatccattccaagtttctggaaccctactgtgaccttgggctgagaggcagtgtgggcctgtgtggccagttggacccagcctgccctgaaagccagggcaccagctggctgggcttattttagggaggacagttccccttcactgagactgtacaatctccttcttgcttttcgttttcagcccctgacctccttgggtcgcttgggcccatggatgaacatcagttactatcattcttccccctcccttttccaagtgtctgatcctggagggctagtgaaatagaaaaaagtgtgagaatccttctgatgtaggagctgagggaaggttaatggaacttctggattttttaatgaaagggatcccaaggactgcccatttcaacatccctttccccttgtggtttgctcttttacttggccctgtgaagcctctttttttctgctttcaggttatttccccaagtggaaatgtgactgggcaaacttgagagctgtggctggaagtgatggggttcctgggagtgaacggtgggagtaggcagcagccattctggcccagagaaaggctgagttttggggcaggaaatagagggagggaagcagggaagcttttgggaggaaagaatctggagagtgtcagtaagatgttccctagatgggacctgctctaaatagaccaccaggccaccagctttctgctgaaggtccgcttaggtctttcctgtacctcacaaggcattgtcctcagagaagccttgacacttctagaaggctcctcccgctaggctggattgggcagggcagatcttccctctgcctgtgccatccccactgaccctgcgcctgccacaagcgtgctaagggatagggtagtcttggcagcctggtgtagccccacctcccccactctgctagattgtgagggcgtgggtgcccagatggaagtgctgtgccatgggcagcttcgacttggagatagagaactcagaagacagattcccagg

SEQ ID NO: 53425 - DNA, 1152 bp, Homo sapiens
ggacctctggactcagaggtgactcagacctgatctccacctgtacagagctcctggtctggtagggaagatggatgggtcaataggcagatgggggaaaaacacaatagaagtggtaagtacagtgatagaaatatgtatatagggtgtgtatgaatcatctgtgttaaaaattattttgaattcagctctgtactgagtaaaaatttacaagagacagaggatccatgtaaacacgtctgtatgttcctgtgcctcctgcctgtgccactcgataagctttgagctaccccgatgagctagtccctgctagtgcctgctgtgacttcttcaaaggccctaaagcggggccctcaagataccctagattgccctacttggaaaagagggtggccctcctggggagataaggtccaggctggcttagggagtgtttttgtgtgggtgtgggcaggtaggcttgagtttgcacaggcatgaacccaagcgtgtttatggcagctgtcagtggcctgtccccagcaccacaaccaggtcttatgttgctaggcctgggcttggcacctacttggctgcaagcaggcaggcgggctgcaggcagatcccagggcaagcctgaggcctccccagtggtgtgtttgctgtgcctaattacccggcagttgtttaactatgcaagctgcatgcctgcctttattgcgctgtgattgctgagctgcctatggggagtgtcataaaaagatataaaatgcccattatctgtccaacgccctcctcctggactgtgggtgtttgtgttttattttatttttatggcttgagggaagctctgcaggaaagaaagggagggaagaagaaggaggggaggagaggcccataggaattgggggttgggagaatgagcccctttctactgtggtcaggagggctctcctaaccagaaggatgatatggaaatggcagatctccagggtcaggacaaactgcttaggaaataagccccagatcttcccctcttcatccacctacaagtcttgtagcttatgtttccaccttacctaagtatgctagcttctccctgctttaggcccactgccttgggtgcaggacagggttgtgagaatggtctctcattcccacccagttctttac

SEQ ID NO: 53426 - DNA, 1053 bp, Homo sapiens
aggtgggcagatgaggcccttgtccttggagggcagtatggtgtaacatagagaaatctggactgaacttgacgctagaaactaaagacgtgggctctggtgttgggttacttgccctttctgagtcctcagttttctcatctaacaaataagggagttggatgagggagtttcttcttgtggtctcttggcctcttctacctctgccactatgagatcattcatggaaacttaggctttccctttttgctcccatctaaacatgagacagatgcaaggaagacagcagaagttccacttttacccttaccaactacaatgtctggccttgggatggctccactgtcccattggaagaagttgagggtccagggaaggcagggcattgcttggcatcaggacaggagagctagggactcaggtattgtggaggagtttggatagctgtcacttgtcacattttgggctggcttggactgaagccaaatgcttttaggctttgggcttcaccatgagaatacagggtgagaagaagcttgttgtctccctgtttctttgtgggtggaaaggagaggggcctctgagtaccctaacggcagggagcagcctaggcccttcctctggtcttttatcctctatttgttgtcttggcagacaccaagtgatgcccaggtagagactaggaaaagtagctggatgtgtgttcacattcatatgtgaccgtgctggctcaacccatggtctttctgtgagttgacttggcctgctgtcacctgccttggaggaagagtggtttgagcttgggtgccttacctttccctggctgactcctcagggctgatctggatggctgctatagatgggacctttggctatctcagtcttcaagtgggattgtagtaggtttttatttatttttcccattaattggttttcagttctctttaatttctgaatttgaccagctggggcactagagaagagatgggcaatgtatggtacagtgccctcagccctaataaagacatttctctcttgttcgggctaacatcc

SEQ ID NO: 53427 - DNA, 2189 bp, Homo sapiens
tgttttgacaggaagagcaccagagccaagggtaggtatggaaggctctgctccatcttttctcttgagcaagataccaaggccctggatgatccagctcattgcaccattcctatctccacatctcctgtctctccataacattccagccatatcaaacttgttgtttttcaaatatacatgactgtctcacctccccttacatatactgttcccttttcttacatcgcctttccccttttagtgtgttgggaaactcctgttcatccttcaaaacccttgtgggtgatgctttctctgatgttcccccatctctggtagaaatagtcacttcctcctttgtatggcttcagaactttgtattgagtgtatcacatgcttttgtaattatctgcttacatgtttttgtttcccactatactgtgagttcactgaagtcaatataccacccatctctgaatttccagtgcatggcactggacctggcacacactaggcatcaacaagcattaatttaatccacactgaatcttgggctagactgatgagctccagagtctggatgcctattcctctgctggaattcccagacaaataaacttagagaaatgaagaaacttgcctaaaggcacatagccaggaagaggtgaagctagcatttgaacccaggtcagtgtgctcttttctccagaccatgtatcttagggaagtgggcagggaaggaattagaggttaaggtacgaaagacagaaattcattgccctgaatccttccttccatagcccaggacttaggtccactttgctggaaactgcattagttcttagcatttatgggactcaggtcccagaagggattgtgcctcctattgctgctgttgacctttggacagttattccatacagaatacatttctcgattgtgagtttgtaaccaagaatcaggacagtaccttgggaaaggtacctaagtgtggttttggagagctcttagagaagtaggcagacagagtacaaggagctattagcaatgtcagaaaacgccacagacattcccttcgttcttcaggacttggtggaacttgtattttgggtatataatgataaagtacataatggaaaaaaaaactatagtaaatttgtttttttaacgtggatttgtagtttattttattttattttattttattttattttattttattttttgagacagtctcttgctctgtcacctaggctggaatgcggtggcatgatctcggcttactacaacctctgcctcccaggttcaagtgattctcatgctcagccgccagagtagctgggattacaggggtgtgccaccatgcccagctaattttgtatttttggtagagatggggtctcgtcatgttggctaggctggtctcgaactcctggcctcgagtgatccacccgcctcaacctcccaaagtgctgggattacaggtgtgagccactgtgcctggcctgtattttattaattacaatgttatctgcaaaaacctggaaaaatagtatggctgtatgtgagatttaccccccatttagtcttcaggtgatacatggtatatacgctgagtcctggggaggtgggatgtggctcacagctagaaactgctgtgcaaaggaagagctttggagccagaggagtctggcttggatttctaatattgctactcactagctgtgtggtctggagcaagtccctctctgaacctgtaaatgatgattaatatctgtcacacagaatttaggctctggagtcaagtagacctgatatggaatcttggctctacacttactaactgtggggttttagaaaagtcacttaacttctttgagccttggtagctccctctataaaacaagaaaaatcatatccaccttctagagttgacctgaggataaaatggtagcactatgcccctgcccttcgcttgtccctggtactggccactggagatgagatgactaggctatcgggagaagaggagtcagggggacgggagatccaggtagacatacaggacattgtgggcaggagctaggaaaaagagactctcacagcagagttcatgtgagcattggcaaggatgagcttaatgctgtccttggaccagcttaccctcagctcacactgcgggacagagtcgatcatctcacaccctt

SEQ ID NO: 53428 - DNA, 1035 bp, Homo sapiens
catacatgccttcatgtatatgcacatattcctataagcagtcacctgcagaaatatttgcaggcatacccagacatgaaggtgtttatacatacatattcataaagtataaagataacatgcacacaggtaaacatatatatatctcttcatcgataaatgaatatatatattatatatatatatatatattttttttttttttcgagacggggtctcactctgtcacccaggctagaatgcggtagtataaacatggctcgctgcagccttgaactcccgggctcagatgatcctcccacttcagcctcccaagtagctgggactacaagtgcccaccattatgcctggctaatttttgtattttttgtagagaaggggttttgccatgttgcccaggctggtctcaaactcctgggctcaagcagtcctccctcttcagcctcccaaagtgctaggattgcaggcattaaccactgtgcctggccaataaacaaatattttgaatgccttctgtgtgccaggtactgtgtgagggcctggggatataagaaggtggatgttgaataaataattttagttgcattgagtaacactaaacagttcagagtcatggatcatgtaagaaggaactaacttagtagggtagggtcagagaataattccctgaggaaggatgtctaagctgagacctgaagaatgagttgaaattggctaagcacaatgtagcatgtggtgagaccctgaggtgaggagaagaagcctggcagcttcatgaaactagaatgtaagttctaagaggagaaagaatttgtgtcttttgttcactgctctacccccatcgctctgaatagttcctggcacacagatgtttaatccttatgtgttgagtgaatgaatgcctaaaatgtagtgaaggtggcaaaaggagagtggcatgagatgaggctagaaggaagtcaggagcctatagaccacactttgattttgaccttgatgtttagggtaagaggaagctgttaaagggtattaaat

SEQ ID NO: 53429 - DNA, 1459 bp, Homo sapiens
ctttcttttcttatatctgttctccctctttttctttttgttcttctcttttcttaacttcatccttttccttagctaatatgcactgaaatgtggttatttctgactgtggagagctgcttggggatccagctgctgggcagattatgacactgccctagttggtgtcccccagacaggcagagaagtcccagttaaggagattttggggggctcttgctcagagctgaatctgtgggcagagctggcttgtctctaggagagacatggcactagctgagcctctgggaaagtattctcctttgttatcatcatcaatgtggtctctgaccctcctaactggccctgatatatcactctggttgggaggcagagtacacttaagttggctttgttcctgccttgctccaggagagcctggctcatgtgaggaagagccatggaaactagagtccaattccctttgggcatgagggcagagactggaacttatgtagaatcaagcacctggggagttggtgctcaggctatggaccggcaaggaccatgtgtggctacgatagtgagccctggcagagaatgaatcacttagaaaactgtactttcctagcagagtatccctgctctagaggaatccttgctccaggaggcccagtccactagggagactcacccccataaatcattctgacctaagggcagcagtcctggaacagcctcaggaacctcatgctaccagtcagaggaagctcagagaaaggagaacacaccgggggtcaaggtagtggctcccagggggcttagagaagagagaggtcaaggggggtgaggctaggtatggcgaggatttgagtcttgacctgggcattcaaggaaggtgggatatggataggaggaggagagaatgctttctcagcagggagggcagcatgcttttggtgtgtgtgggggctggagctaagcaaacatgtggaggagcagtggaagagaaagctttataagtatttgtgccacactgacaatgaccttggacttagttccatgctttgtggcatcatttgtgaagttgtttgctttccactggtggacaggtgctttgcacttggtttgtttgcagtttgactcataccccctctcctgctgatctcccatgaaactgggcagctgctgcttactactcctcttgtgctgaaaaagctacgcactcccctggctttgggccttgctctatggcttgccttctgtctgaaatgtccctcagtcatcttcatcagacatattccctgccctggaagattcacctcaggtatcacttctgctgagaagcccagcagtcagtctcttgccttgaggttccttggcacttgggaaatcacttatctcagttgaaactgaatccatgtgtatttccttccagacatggccatctggatcacagagatgaagtctggttcctctc

SEQ ID NO: 53430 - DNA, 1036 bp, Homo sapiens
ctccctgcattctaattgctgcagttgtcctttgctctggagacttctcctccccattgtctgctgaggcacacactaatggctgtcctccctggcactgctgggaggcacggtggaggggggtggagaagagagctcattgctaccttcctttccccagggataaaggaatctagggcctattaacaagtggctttagctaggacgagcacagtcccttgccttcctggccccctccctaaacctagctggagaaggaggcccacgcagtaggcttggttgatggggccaaggggctttacccattgtcagtcctatagccagaatcatgggactagtgattcctttacaggctacaggaagccaggggacagacccttgaatgctcagctgatgaacatcatcctatgttcccatggtcccacacacagggtttggaagcttctaatgagtgatgtttcctgttgaaatttgttgcatttttcccaaagattggccaaatgcaaaagtctgtttggtcccctgaaagttgatttagatgattgctcgtggtagcagatgtgtcccattcattgatttaagagtgtcatgtgctatatatacatcttcacgaggacctttcagtaaatatcagttaccctccactgcagctcttctctcccaaggaatcctgttggaaattgccattgaaggtgctgaccccagcatatcccggaagtgctggcattccggtagtagcctaaagtcagcacctgttgagagctgctctgggccctgtaagtactgtgctggggactatggggactgccaagtgatcaggacagaaagaccagcacacatatacctaactatagggtaagtaaggtagagtatgaaaacactacaatgaaggcacaacacaaatgctgtgagaatccagaggagcactgtagagagatggaatggtagtattttttttagtactaaacttttttttcttttgaacagaattttaaagcccaatgtgaatctggttgaagatggggaaaagccctgc

SEQ ID NO: 53431 - DNA, 1137 bp, Homo sapiens
caccagttctcctagtgcagatgctatgcagatccaggcactgggaaagacaggtcacatgcggagacagctccataagtgtctcttcacagatgcagaggcacatgaaggctacaggggtgttggcacctgagccactatgctcctgaactggggctggcagattcaagaggcaaagatgccctgccatcatattcttcttattccccagccatgccaatagggtggctgcttctgcttggtctgaattaggtttctttggtcgggttcctaagagcacatgagaggctgtgaacaccccagtgaagatgatgagtcagggagcagaggtcttaggagttgaaggctggggaactcaaggcttcacctggcatagtggcccatgcctgaatgatttgtggactctgggggcttagctttgtagggctttgggaagggcaactatgagtgggtgggataaattctcagtgtccctggctaaagggtgacacaactcagacttgatagttctgtaaaactgtttcttccaaagcttgcgaggatgttggtttggggaagaaagccagccagcccagagaatcccgggagcctgacaggcctttttctctgcgatttctttctcgcaggcagcccgaggcagcctgtctctttgttaacagagtgacagcaatgtgacaccatggaaataattactaacaaatcacggtgctgactgcaaacagctctctgtcttcagaggcatgtcagggtgcattagagcaggactggaggagcggtgcatgtgggggctgaggcacagcctgcactcaaacactctcttcttccaccaccctgacccctttctgcaatatctgactttcttgctcttggcctttcccaactaggtcagctaaggggcaagctggacaagtggcatgtagctggtttggcttcctctgggcaggtagctaggactcccatctttgccaaggagcacctaggtagtgatgagagccaggagttttccattatggggcccctaaaaggtggaaggatgctctatttttctgatttactctctgccattgagaccagcttcacctgccagtagttttgggttttagggttacagaacatttgcttcaactggacccagat

SEQ ID NO: 53432 - DNA, 1775 bp, Homo sapiens
tcaggaagccctggattttctcactgccactgtgtgttgggccctccatggtgagtactgggtgagatagcccacaggcttaggccagggaggaggagcttggtcccaggagcagtgcgaaatgctttctctgagagatttgtgcctccagaactgagggttgggactcctggaaaagtgaacatcagagaataaagagagtgtttattgagcacttattacttaccaggagccctattgtgctgtttacacatatgatgtcatttagtccttaccacagttctgtggaataagttcattttataatccttttttaacaaatgaggaaactgacgcctagagaggtaagtaatttgtcaagggcacataacctgtttgtggcagggcagggatttgaacctgagcattctgactctagaaccatgtgtttaacgacagtcctgtctgaccgtcctccttcatgggctgtggtttggtgatacacggtgggaatgcccctctcctctcctttgtttgcactgagtggcagagcctcaggatgttttctgacaccgtgggctgttggttcctcatttgatatcggtagaggtgtggactgttaagttcatttgatatgggagcccagttggccaggagatgtggtggggatgattaggggctgcctgagagcctccttccagggttacaagttaatgaatcttcaggtctgttttaaggaaacctcagccaacttcactttggacacctctattctgtatttatgtttggaagcacatggggcatcgcaccgttgccccttgcccacaggtgtaccagttggtaccagcactgagctgcatcacctttgattagcagcctgctgggggaaggggcttgagtaagaactccctgccagtcctgacttgtctcatttcccattacttttatctgtcattgcaagtgcttgggctcccctcctgaactaattaagtttgcatgtttttagacatattgccaaatagggcttagcaaagcagaactgagctacatctctttctgagtagggaaggaaagagatatgaatgcttctccacaacggccaggaagaagcatggatgacatggagtgaacgtgtgcagatgataggcattgcctggccttcctagggacacagcaggcctgccaggcagccttctgattggccgacagggacaggtgaaagcccaccctccagctctcttagtgaattgggcattctaagggggctgagaatggaaagagggcaggttctgaagtatttttctcccaagcacaagcgaagttgaaagtcatatttagtgatatttgcatgaggaatttgtagggctgtgtgctgtttgctaccagtctgaatcaacctagctcctaggcctacaaccacctatgtggctagcagagtgcagggtgacctttccaagtctgtgagaagtacatcggaaacttggatagccaaaggccccaatttctctttttacctagaagaccgcaattcctcctcagccattggagtgggtgggtcagggtagtggagggaagtagaatagcgtgcccagaacctccccaccctggaggtggggttcagcatagtggatcgtcctagtgaggtaatggctgattgcatgtttttgtgtcagacggatgcctggagccttttccctagtgtgggatggcctgaggtctgagatgccctgtggcagtacatatttgggtcctatccaggtggcagttacaggggcaaattatgtcatggcctcctt

SEQ ID NO: 53433 - DNA, 1052 bp, Homo sapiens
taaggcgagtttttatttagtgatgtggatttaatttcccctctcaattttttcaagaaacaacacttgttgtgggtctggctcttggtcagcttgccttccctacctgacccactttttcttcgccttgcttggtgtttcttgaagcttcccatagggtttggtgttgtttctctgcttacccaggtagaaagtgccactttcaaagggctccatctttggtatggtggtggggttagcgctggtgtagactgagaagggacacctgcacaggcacccacttgaggaacttagattttagcctgtagcttgaagatccaggttcaccagccatgtagcacagcacggctgagaacctagactagaggctttcccagtgggccgtgagtctgagaagaaggaagattgagaagagggaaagactggagggaaagagctgacctgagggaggccctagcccttagtgcagtctgggaagaggcccctttggagagggtaggataatcagatgctgttctctggtggaataggggccaggggcctgctcagagtctggtgagaggaccctcacttaggctcagcctcagttttggagcaggaagttttcctcccccttgagggaggagagaggttgaacacataaatgcaggcatttgacttcctttttttcccctgccttcttgctggggtgtgcatactacattctggctgtgctctgcaggtgtggacctgaagttcacttcaggttttaggaggtctggagatggaaagatacttgcccagattacactatcactgttggagatggggagcatgcactcagcaggggctactgaggtttcttcgaggctgctgtcaagcggtcaagaccactgaagagactgctgctacctggagtgaaaggtgccacgatggaaccacgcacctgggcgagcactgtggggtagtgaccgtcctgtggggatgtggaagatggctggaagggtggcctagtgacgtgcttgctgcgggtcgggctgagtcctcttggcattgctcaacagctgactact

SEQ ID NO: 53434 - DNA, 1051 bp, Homo sapiens
gatgctgtttcttgcgctgtagcccgagggaataaggaagggcagtgcttggtcttagcttgtctcccaccctcctctggcctggaggttttcacagggggagaaggtccccctcccatgtctttctctatagggggaggggagaagagaaaaagcccgtggatctcattaggtgctttatttattttttaagaccaataaagccaaagctcagaccttatcaagcataggagaaagcagagtatctgcaggaatagcagggcacatctgcactggaggtgtgcagcctagaggaagtagcgtagtggcagggagcagggcaagataccttttttttagccgagagatcctgtcccatggaggagagagatgcagattgaatttcgtggggcccccaaggatggagccagggtcagagaggcaagtttaggctcacctcagtggcagagtgtatttcctgtccctgggagtgtgggaacctaggctgtgaccagtctggttgggagtcagagtttgggcacctgcggtagattgggagaagataagatgagctctgagatgcttcccagccatattgaccatcttttttttttgaagagattcattcctatgaccaagggagctccttagcatggactgctccctgttaaaccagactcaaggagacagagggaactcattctttcctctgtcccagccaccatccccagccaggacctggctcctgagggatgccagaagacaggcacctttttcctggaacatctgtagctgggatcctggaggaagatacttgctctgggccagcagcaaaccaggactcttgaggttatgggttttttttctcagtggccccagtcgaggaggagatgtggtcttgaggaggcaaccccctgttaaccctaggccagccctggagcagggtgcttaaagaattctgggtctcacccaagaagctactttctgctacttctgtatactttgtgggtaaggagggaaaattcctggtatcagcctgaatagagagtttctggcaggtaggagaccggac

SEQ ID NO: 53435 - DNA, 2830 bp, Homo sapiens
ggctgagccaccatgcccagcccagaactaactttaatttcatcccttctttgtccagtgccttggcagagctgaaaaggggtggtccatccttggagggattaatacaggagcctgaggccttccctgagaaggctttgtctagctgagccaactgctcaagcccctgtgtctctgggggctaaatgcaaatccttgaggagctcagctgtgagccatgctttactgagccacaaatgaaaatggctgttgtctgggaagcatggtgagagaaggagctgacctcactaggctcctcccaggctgatgattctaggatcactgagcactggagtggagtttgtgaaagccccaggatgctggagctccatttccccagctccaggtgggagagttgggtttagtctgcagtgaggcatcctgcagcagaacaccagagcagcaccctggttttccattttggtgtagtgattttcttgccccacatcagtgattttcctggggcccagggcaggggcttatggggtacacacaggtgctgacctaagccttatctccagggagggagggctcttggcaagggtgcattgctttcctgtgtgagtgagactttctttaagcccttggcattcagctcatttgagagacccttggtgggagccaagagaaggagtggacctaaccttgccgcctgaaactcagaccagacacaagactaacatttggaccctggagcttcctaagaagtgagagtggctgtggtccgccttttccaggatggtcctgatgttgagcctcagctccaggcctgaagatgtgtctaagccctaggcttaacaggagagaagctggaccagaatgggcagcggtgggcctgtgggtgtctgtcactaatctggggttggtaataagcctcctcctgactctctttggccccttcatgcctgaggcaaaacagggcaactgcctgctcggtttgcggctctggaagatgtagaggctctcggtactagttggggctgggtgtaggagggggctgctgagaacatgtattccatgagggcagagtttttacatttttcttcactgccggatctctagttcctgtaatgcggcccagcccgtagtaggctttctatgaatagttgttgactaaataaaaggaggagtcctttgtactccaagattattgaagctgctgactgagggcacttccccactcccagccccccagcccttagcggaccatcttttcttctctttgactcaggccctccctctactgggcagttctttggtcttccaggcaaggaaagggtgtggaggtgccagccgggtgggcatgctgtgggttaaagctttgcaaaacaacagtgtagttaatctttctaatttattttccttttagaccatgggaagtctgtaggcagcagctgttacccaattaaaatacagattaatataaaaacagtttctggaatataaaatagagtggctgtgtccttacacttccttaaaataccacctaataatgacttgatgaactacagaaacccacctagaggagctcagcgtttttaaaatgaaaatttctccctaaaaggtgtatattaccattccatgtaagtcaccatgagaaaataaccttcccttttagagccagcaatttctgtgagttgggtatttggtattcattaagtgtaattatagtttaattggagtttaatctccccccccccaacacactttaaaaaaaagaagtttccaagcaagtctgagatactgctctttctggaagtagccagggacatgctgggggtggtgatttccagttggtgtccaggacatgggggcctcatgccctcagatccttgtaggcaatctatccccagtctttttttttttttactttaaaccaaaccaaaacaaagcaaaacaacaagcttgtttgaacccaggcctgacctaggtggagcataggcctgagtcagaaattctctaggtcatagtctgaacattaggcctttttgtcttagtttccccattggttaaagatgactctgtctcttgcttggctagttcatattgatggcccacgtatgcagggtgaaggataggagcctgtgggacttcatggatgttagggaaggtgttagggagagtgtgggagggggcagtgctggatatcaaggctcagagaaggggtggacttgaaaccaagtgtgcctctcctgtatgagcactccccaagttttacgggaacttctgtgaagctaggagctgaatttacttgagactgtaattgtgggaagttattgagcctattgaatacaaaagacatgtaacatcaatttgtttgcaaactgaaagctgaaacaggtgtgagaacatgccttgtggaaacaggtgtgagaacacgccttgtggtcagcatgtgtatgtgtacacccatctcagggcaggatattatgggagaagcacacattgtgtcctgggtcctgggactttattcccaagtcttctaggtgggctctgaacctaaagcagtgccagatcagagccctttacaacagaaggagaaaaacagaaaggaaggggtcctgttcagccttgagtcccttcaccctggttttctacccatcggctatttctctttcctttcagctcaccgggattattcaagccatggtggatggtcagccaagcctgcagcaagtgctggaggtaggttgagtgacctttaattcctgacctctgaccccttcctgctgcctttctctccctcccctcctgagaatgtagccgtgtaatttgactatgattatggctt

SEQ ID NO: 53436 - DNA, 1185 bp, Homo sapiens
tatacttaagtagttcctctggcaggattttctctcttgtgcacaagaagttcttaaccccagtgtgtgtgtgtgtgtgtgtgtgcacgcacatgcgtatgacatgtgcacacacatgggcacatgcttggggagagaagcaggctcagtgctggacagtaggaagaaggattccagtttgaacaagtctctagcacacacagagagactcctacttttactgcttcatattaggaatgtgttagtacccttcttgaggtcccttcttagtttcagttgagagtcggcctggagacgtggttctgacagagataggatgggatgtgtttcattccttcccgagccctttccctttgacctctagaatctgctccagttcatcaagtctctatctctagcagctgggctgctgcacagtccctaaccatgtcttctttttgttgttgttatcatgaaaaaaaaactagagaaatactcattttgctaagtgccagtaaagggctttgtcttgcacctgtacttataaagggtgagatttattggtctctttgtctgaagagaaagagtgggtctgattatcagattgcacaccagagacaagtgcttatgtaatcaacaaactgtcttggtgtcagaatacgattgtgttggagataaactgtgaaaggagaaagcactggatgctgacatgctattggcactgagtttcctgggctgcttcctgtagttgctagtgttcttgatgaagccagctcattcctggacaaagcccttgtgagggtaggggatctcagtaaccagccatgttatcagtcagggtcaaaagccccttgccttgtggtttctgagtctggagaagtgggagttaatctgtaatccctcattgaaaggagccacagagcacacattaattcttcctctcacctctcctgctttaagtggctaaggtctctgagctctgtttagcctgtgagccctggttctcagcttagtaatacttggctttgctctagtacctttcattgtaaggagtgaaagctttttacaaacatgtattaacccaagtgggactgggcttaaactgtaacatgaaggatttaagttaggcctaagatagaacttcccagtattaatttgataaaattgtctcgttccctcatagcatcctgtataaaccttacacgt

SEQ ID NO: 53437 - DNA, 1030 bp, Homo sapiens
aacccaaaacactaatgaatccaaaacactcattctttgttgacttggagctactgttggaaatggttgattacaataacttatttttccttttctgtatctttggcactccaggaaatcatcgagttccccatcctaaagctaaatggccggaccatggagattgagtctacctttcacatgtatgtccagcctgtagtccatccacagcttaccccattctgtacagaggtaagggccctggaagtgggcagcaggggctgctgggaggggaattttggaatccttggtgctctatataggccacttagagaaagcatagggcttatcaatccttaaggcaagtgcacactagacctagcagttaggttttatgaagtctgccactccactcaggtcactgttgttactggggacccagggagagcagtggcttagtctacccctgcttccccagcatcccttcctggtgaccggcacttggagaccaggagcagaatggcatttctggggttcaagttctttccagttcagttttccttagggccccttggcaagaggtaaagatttcagccacttggaaggcagggttatgttcaggccttcttagctttctggcattgttactctgtcctcctgtaaagtggtcctgtgtgaagcgtaggttgagtttgtcgaaggtacattctgtcaccgagggaagagaagagtggtctcagtgaagcatgagacctggctggccaaggctgaaatctgcttatcctaggtgggtactgtacttggcctccttgtcagcaggttagtattggttgcattttacagattgtgaaactgggcctaactgagattttaatgattgctggaggctcaaaagagccattggcagaggggaggagcccctgcaagttctaactcccagaactgtgtgaagtcttctgtggctacttttccctgtgacatgtcatgtaatgcactcagtggtggccaacaggctgtggtgcaatcaggggttaagaatgtgtggtagcag

SEQ ID NO: 53438 - DNA, 1161 bp, Homo sapiens
agattgaccatttctccttgtgttttcccacccatcaatttcctaagtgcagtcaggtgtcatccgtttcgtgttgcttctccaggctgtctctggagagaaccactttaccttgattttaatgatactggaaaggtcttctccagaatgaaggacctggggaaggggtgctgctggagctgactattagggtcactgaataggcagagcccccttcctttctctctgcagtggaggccctttccacatgctaattttactcagagaattttgcttttatttattttttttattatttcctatttgtctcttccagatgttttcagggcagtttttttttgtgttgtaaactaattccattcatgttttaaaaatttatgaaagcgctaataaaaatgtcaaagtggtaaaaatgttagcttttcctctgctttgattaaattttgcaaactgtttttgaatattaaaaagcaataattttttttattctctctcctcgctttccctcttctctctggtacgcacgtgctctcttctgccctctccccactctggtgcgttcctcccttcccaggagcgatgtatgaggcgtgctgcacagccagcgttctgcaagcctgtttgcacaccaggaccttggtgctgtgcatctctattaaatagcggagacaaattaatcttagagacaccaaacaaattgtcactccttgtccttctcttccattatgtttcagtggactgggaaaggctagctaagcgattgggctggcgttgtagaggtagtgtgtgctgcctgaaaggtgggaggcgctagctcctattactgttactcttttctccttctctttgggatcccctttggctttattttttatctttttttgaaaaataagaactaatgaagaaacttaccagcttggttcaaacttcatacaaggaaatctatgcattggtctgatggctggttgtctatatggcaggagatcagacccatttcaggacagggacctgggcaagagaaagaagggcgtattcttaggggctcaagttagcaagcctctgctagagaaccagttggagaaactggggcagatgataccactgtcttccttcccatttccagaaacaatggggatgagggctgtgttcagtccctggaac

SEQ ID NO: 53439 - DNA, 1719 bp, Homo sapiens
tctctttctagatggtagacttgagttctctacaggatagccttttagactaagagaaccagatctttcttgacccttcatattttgaaagctgctagtcctactcttaagtctcattctcattttcccattttggagttccagctctgtccctcacaagcagtgtaagtgtcagcaagtgagttaacatctttgggccttagtttatttgtgaaatagggatgactatgattcccacctcatgagttaggaggattaaatgagatcattcctattagcacagtatctgccacgtagtaaacaataaatggaataaaacgattgcattttccacatgtcttggagagcactggaggccagctcctcttcaccctttgcccagacttgagcatctcagagagaggagccacctttcattgtattcatctctgtgtctacagccagcccctgcctggtgaatagtagatgcttaatagtattgatttatgacctgaagatggtgatggtgatgatgatgtaacctgtctgccaggattaaggagggtaaaataagaaaatgtatgtgaaactacacttttgtgaatggaaaaacaacactgtgtacgtccctccactaaggtatttatcacagtgtactgttctttgtttgcctatcttttccactcatagtccatgtgcttctccaaagtggagactacatcttatctctagtcctgctccagcccctgtctgatagcctacacaaagtaggcactcaggtagtttaattgaatgcaaatggcatacaaaggcaaagaattgtaaagctattattaggatagggaaagagggctggtaaatacgactggtccttccttccttcctggtgctacttttacacaaaactgtttctgaaataaacctcttcctaggggaatgatgaaattggctgagagaaaaggtcagggtcaggaataacagtttcattatctgagcaactggacatagaggctggcacttgggcacattgtcacaaatctttgtgttgggattaatgccactaacctgtagtgttggggttccatctctgatcattatcagctaaaaatcttcaaaatgtttgtcatgcttcaggtgccctggctgcagagttgtgccaacttggtgcagattggggcacctctcccactactgggctgtttgggccagtattttgaggttctgggaagtatggaagtactggctgggcaatatgggatggtaagaagtacctcagtgaggtccttgctgctctaatttctcagagagtcttttctcagaagcttctcttttgcatcctcagtagctcaagtgaatatgccagtgtgtaggctcattgttaataacagctcctcatgttgtggaggaagggcccctgcaaagtcacgttttgagactggtgcttgaaaccacctcttcttggtcttggggagaaggcttggctgatgagctagcattatcagagatatgtttataataggcccaatttgatgtgtcctgagccttgggtgtaggcaccctgggaatttcaggggcctacccccctccttttttttttttttgcgtggatccgagtctggcttgttcttcctctctgggagcatggcactgagtttcagcacgtagttggccccatttccctatgggtgaggaagctaacatcaggaaagtttgaatattgagctacagtatttgctgtta

SEQ ID NO: 53440 - DNA, 3042 bp, Homo sapiens
ataaatggtgagtgaaatcagggaccgtaaaataacagtgacactgagctgccttttaaagtttttgttggacataaaaaaaccgcctaagtcagcaaaggaatggggaagacctcattataaccaccttagaggcaatgaaaaggcttctttttactctttggatagtaacttaaagctctgtgttagatgctaggggtataaagacaagtaaggaatggtccctaccctcaaggagctcatagtcaaggagggcagacatttgtgtaacaaccattaggctgtatgataaccaccatgacatggtaagtacttggtacagtgggggcacaaaggatgggaatgatcaaccctgctcacagtgtgggggagggctgcatagttttcatgttataagaaattcaggagaccagaaagggccaagtggacctgaggccattcagaactgttatagcaggaagagaagaaggggttcacacagtaagccagaatgaaatggcctaagtctggaaaaactgaccttgattacaggcttgtttgtagaaatattgaaaatgaggtaaaaggagaataaagactttgaacctggcaagtatttcactgttcagttagttggattatctatatcagttttacgctgtttctcacattcgagctagaaggtgtcattgtgatgctataagtggaagtacaaaggctagaagaggcttaagagcattttacccaataaagtgtgggtaaaaggggtgtgggtgaaagtggatatggtgtaagctaaggctctgaggtattgtcaagaaggctaaggctctgaggcattatcaggaggctgatacctcagcatagcatttgggtgggctgctaggtctctagggagagtcaaaggctggggaatgacatgacgcctccccttcaccttccccctgcttaaaaaaaaaaaaaaattgggaatttggatctggatctgctaggacctaccttcaatagaccagggaggtttagacccttcaaaaagataaatagctggctgactaacattgagattagtgtggaaggaatgactgatgaagaggcaggaaggtctgggtaatgtggagattggtgggatcagaagcgactggagggcatgggggtggaggctgagcttcctctgagcattggcaacaggtacagccatagaaagcaaagccagcaggttggaaagcggggacagtgggggaagtgaaatccaagagtgtttaggttaagtccataggcttcacttctccctacctccatcctgccctgcttttcctctcccctcttgattatatttcttttgtagactgatctccattgtttgacatgaggaaactgatatcaggagaccctttctgcatctctgtatctcattgggaaaaaggatcttgcatcattttgattaagatgccattgggatgattattttttatcctcttatcctgggtgttcacgatacttaaaaaacccccacattcttacatttatgtgatgagttttgagctctagctgtgaaaattgagccatagcctaaaagcctgaaacaagagtgtacccacattgacaccagctacccccacccccagcaaaggctggcaggtctgcagcagaagggtgaacaggctggcacaggcagaaaagcgtttatatgtattgatgctcctgccacggacaaaaccctgttaggtgttgggagagtcagaaaggaagtaaatcagaaagaagaaatctggagggagagacaaacatcagggcagcttttatttggatgtagaggtgccttgggataggctgctgtttgggtcctgtccctgcatgtagttggccagtaaggagatctggaaggcctgtgggtggcaaaacaggtctgatacacaagtggctctacttctgttgtagtgtatagtcagtgtctagtcctggaaggccattccagccaagggctgatctgagggttaggtgctggcagaggcacttatttggagatgccgacgttgctgaaagtaaaggagtgttcatactctacaatgggggtacagttggggagccggaaaaggaaatttgaatgtattactgagtggaaaagaagaaacagaaatagatgttataagccagagtccatgggaatggaaaggaagttgttccaagaggttaaaaatgtatgttgggagactggtacggatgcagtacttgagagagatgctagtgggttggactaggatgttagttggttggcgatggtgagaatggggagaagttacatgttgtaacccttaggtgtgctaggaaggaaacaggcttgagaaccatgttcttatgtagctcataactcttttggagactagtggcctactgaggagtcagtggtactgaggtttgttaaggagtggcgcatggaatctatagttgttgtaaatggggtactctgagtagaagatccgtatcagggagaacataacaggcagagctgttatagttgagttccttagtggtaatgtgggtagttattcctctaggacctatttgatgcattgtttggccattggcctagaggaggtaggtagtgatggttaggtagataggataataactggctagaaagcttggaatcttgctctctaaaagtgtgataaaactgagagccatgatttgagattgcattgtctggaaatgcagggacatgtctgcgttgttcacaacactagcggcattttaaaggccagctggtcaactgaacgggattggtagttacagatgggtgggtagggctgatgagtgagatgaaacatggcattttgatcaggtctactttcactggaaaggtaatgtgactagagaaacaatgtcgggggcagacctgaaaggaaattcatggttgatggtgttgaatgtggtggctggtgaggatagcaaggagtccccaagtaggtgccttaggatatgcaggaattctgtgatcctgctccaaatttgtggccagggttggagaggcctttctcaggaccagaggcagttagatagacc

SEQ ID NO: 53441 - DNA, 1677 bp, Homo sapiens
accaaagcaaatgtaagtgaggaaaatgaggtataggccacagcacgttgggaggaggaggtaacctcagctgtctggatgaccagggagggagggtgcagcacagctctccccatccgaggagctgccatcctggcggctacccactttcctccccaagtcctctggccatccgtcaggctcctgcatagtctttttgtctctgctctgcagcagccctactgactgtttgccttctcatctgtattcaagtgcccataactttggagaaaaatgacgtttggggttgaggtttctagtgtttggtctttgtccacaggagcatttttttcctttttacggaaaccttgaagagagtccatctgcattttgagttagaactatgagtaaaggagtttctcgtttccagacaattgtccaggtgctgttatttttgaaggatatgtggggagggttggtggtaacagagatggctaatgtagaagagattcggagggtttccgtgtgacctagagttgccacatcattactagtcttttgtgaaagagacattttggaaaactttacaggaaattggttaagatccctacaaagcaaactatattgatttctttctccttcgttcgaggctgaaaggcaggaatcctcttaaccccacgtgctgcctccccgccctgcccaacacattgctctttgccccatgtttagcttctttccttctctctgttcttggttcctgccgtgactaagtggacagaaaagcaattccctggagaaagaacccacccttcccttcccatgtgcttgtcctggttgtagctcctccagtggggagggatggggcccaggcctttttcctggagagcctaatccttggattgtggtccctctgtctgtggccccagtcagcatgtacttttttctgtacagacaggcgaaggcgctgacgctattcttctaaactggaaaatgaaatgcaaaaccgacgttaatgtaacattatggttgagattaaatgcaccaaaatcaggaaattcaaagttatgcttcccacagcaactataacttagcctcatctggcgtgtgtagtattttgtgttagtgtggatggtgttatatgttaagacattaaagttaacaccataagcagagcacaaaatgcttgagggggctgagttatgatgactgtgtgagctgtaagtgttcttgtacaggctcccgactcctggaataatttttcccctgcccatcagagcaattattgcctttctttctagttatatctctactttaacacatctcttctttcagggtcactataaatgaattcctctattgatggccagtgatggtgggaatggggtggcccactaggcccctttgtcttttttgtcactgcctccataaatgtggtccttgcccctcctccttccaaagccatcttcctccacaggctgctgtttcctggtggtccctcataaggatgggcctccgcctggctcccactatggctcctcactagtattcccggaatgggaacaagcgtttgctgtgtccgagtcttggctgtattgcaacttcacgtgaaagccgaagggcctgtctgtatttggagcagacatagcaatgtagaagcaaaatatacatctcggggaatggagcactgatgcatggtgg

SEQ ID NO: 53442 - DNA, 1010 bp, Homo sapiens
agtgcagtgtgtgatcacagctcagtgcagcctcaaccttcagcctcaacctcctgggctcaagcgatcctcccatcttagcctaccaagtagctgggactatgggtatgctccatcatgcctggctaattttctgtttattttttataatgatggggtctcactatgttgcccaggctggtttcaaactcctgggttcaaatgatacttccacctcggcctcctaaagtgctctgattacaggtgtgagccaccacagccagcaggaactttcagtactcaagatcctgcatggtacacttctgtttttatgacagtgtgtcataccccttgagtatataggaggcagaaacagttttaggccatggcctatttggaggcttaatgtggggctcttttatctatctttgatttccagaagttcctgagttagttgagtcagcttattgggactatcttaaaggaatgccatcacgaaaaactaacaggtgtaagccctgttgtacttgggtgagtaacagcattggttataaacatggtaaaacatgatattttccatttgtcatcagttttgctgtttatttttgtactttattcagctaggtgaaactggagtggttggcttgccagttacaggctttggtgttctggtttttgcactcattttatttgtgttacatgttttgattcagattaacatgataggtattggttgaataggagactttttcatttgaaaacacttttttcacttaaatgtaatttagatggtttaaaatgttttagagggtccaaatttcaggaatgtggctcctttcttgttttaggaattgtttcctgacatagaagcagttttttatctggtttaggagaattatgcctcctttgtcctcgctagcaggagttcattttgctcattttggtgtggatgtgcaccgagtgatggttgttgtgaccctgaggcccagagagcagcctgaaagctttggtgggatctttaattgtgcatc

SEQ ID NO: 53443 - DNA, 1002 bp, Homo sapiens
ctttaaaaggagaatacgaatgatcttggaaattatagacccgttagtttactgtgattccagagaagatacttgacctgatcgtcagataatcaatcagcaaacagctagaagagcgtggggcactgagtaataacttacatgggtttgtgaagaagagcaaatcctgtcagatcaatcttaacttcttgctgtgacatagtgatggatttgagtggatctagggcaagtgataaatgtaatgcatcttgacttcattaaacctctacaatgctgtgatcaacagttgggaaggtgagtttggggccagacatctgtgttggactacccatcagaccaccttcaggaaagggacggcaggttgaaacttgttagtagcaacttaaaatctcccttttttatgggagagcttttttaaggtttgcaggtagcaggatcctgatgggattcagagaaagccaagaagacggattggagaagttgtcagtcctagatagaatagcatccttccattgaggtcaacataggtccggttcttattagagcccctgtgctgtttaggtcttctggtcaacaagggaagtggagaaattggaaaagctcaggaattggaccacaaatcattagaggcacaaaaatagaacttagaaaataaattgattatagttttggtgactgatttcttgttcagactgaataaattcatcatgtgaggagtaattattccaaggagtacgataacaacttgctcttgattttaatagggacaaaaaagaaagaagtttaaatggaagcaggaaaggttgagatttgggatgagaatgaactgccagaagagacagcaaaaggaccggaataaggtatacaccttagatcagccttccttagtgctgtctcagaacggcttgatggctgtccatttgacagagattctttgattcttttttttttttttttttgagatggagtttcgctcttgttgcccaggctacaagttgctct

SEQ ID NO: 53444 - DNA, 1026 bp, Homo sapiens
ccaagatgacctcaatgattcttaactcctgctattcacacccttggtagttcccctcctgcactgaatcaaagatattcctgtatagctaatagaatacagtggaagagataatgtacgacttctgagggtaagttataaaaagtattgcagtccactttgctcttttggaccacttgctctgggggaagccagctgtcatgctgccaggacactcaagcagccctgtggagaggcacatgtgtgtaggaactgaggctcttagccaaaatccagtgcccaacttgccagtcatgagaatgagctatcttagaagtgaatctaccagccccggtcaggccttcagatgactgcagccccggtggacatgtgacttcaaccttaggagggactttgagccagaccagccagctaagccactctcaaattcctgactcacaggaactgtgagggataacaaatgattattgatgttttaagccacaggttttgggatgatttgttatgcagcattagataacctgagcaagtaccattgttggtctgttggaaaggacaatttctttgcttgctttttttcattagtcaccagctgtgttcaaagaccttttagcttttaagttaatgctgctaggaggcttggattagctgcaggtgatattgaagtatgtggtgtttgctttgagggaatgattgggggctgatgtagcagttcattgtagtgttggtgcattgaatatgtctggctctaggactgtaactcttctctatagggttaggttatagagtgtgtgatgcatagacatgttgctctgggaacagctttcaatcgtaaggaggagggagagaaggggacctcagcatcgggcacttcgaaggtagggaggagtgtggtccatttaaagataaactgggtttgtctgtcatggttggttttttcaggaagggatctgtcttcaaaatggtaaattattttacataaagcaggtatgacaacctctagtgttccctttctcctctcctctt

SEQ ID NO: 53445 - DNA, 1792 bp, Homo sapiens
acttaaaatattttttggtcttagctccactgaatccccctgaaatctcattatagggatagggaaattgaggacctacactagcgtatatcctactatatatataggcaagttactgtagctcattcagtgagtcaggagagagatgggaagacagccatacttggcattatctgcttctgttcaggtggtagtggcctcattgcctttgagtacgcgctggacttcacagggtgctatccctctaccctatgtgaagggagccaggtgcccacttgcagccatcagaggcaagcctttggttgtgttggaatgaggcttcggaaagcacaaactatggccattactgtattgtacagtgagatttcttatttgaggattaaagttgagagaaatttgaatgttgagtattaaagggagaaagacaacatttctgctttgttccttttttctttttaaggaagtttgagttattcgtgagtaaaacttaggctttgatttttgtatttagttaggcctctgaggagcaggcattctgcaaatttaaggggaaaacttaaaggaaaagtgatttgatttttttttttttttttttgcacatgttcactcagaaaactttactagacttttagccatgttcctattactgccacatctgggttttctttttcttccctatttaaaaagtcccgcagtcattcagggcctcgagtagagaccgagtctaaggcagcaaatgagaaggcctaaggctgcagccagctgtgctctccaggcactgttcattcccccagggtgccacttactagtgtgggggttgggggatcaccagaatgtcagagcaaacccctgtgattcgctttgtttgccttcaccttgggagaggggaggagggtatgtggagacatcaagatacagactggaaagccaggggcaaatggctcctagtggagctgagaaaagaaccttggacattttctgctgcttgtctgagtctacttagcttccaggactcattgtacaacagggtcacctcacgttactttggacccatagctttaatgttaactgttgccacctgagaagtgactgcacaatttttctctcttctctcttttgaactttagagctccatttaaagatgcaggccagtgttgcatgttgttttgagaatgatctgggagactcagagctgtaataatgctgcaggtgctgctattagggtcttgaactttagtaacgaatactatgatttagaaaaggggcccagaaacactggggagtggcccatgttgcgtggatattcctgaagactagatggaacagggccacagtgggagggagtaacccaggctctctgttctttttttttttttctttcttttcttttttttttttttttttaaactttcctcccctaagttttagatgcttctggatgttcaatgctagcacctttacagactggagcagctcgattttcttcgtatttactttcaagagcaagaaaagtgctgggctcccacttattttctccctgtggtgttccggagttctgctccatatccaccagaaagctggcggcccacggctttggcgcatccatggcggcaatggtgtccttccctccccagaggtatcactactttttagtgctggactttgaggccacgtgcgacaagccacagattcatcctcaggtaactgttccatcattgctttagaaaaggtggggggggcaaggagggagggaggatagttttgcttcctgggacacaaaggagctttctca

SEQ ID NO: 53446 - DNA, 1017 bp, Homo sapiens
cagtaactgctgatatgtggaggcctgacctcctaatgtctactctcaagacttcctacgagagaagtttttttgttttgttttgttttgttttgtttttgaattatggtcttgctctgtcacccagactggagtgcagtggctccatcacagctcactgtagcctcaacctcctgggctcaagtgatcttcctacttcagcctaccaagtagctgggactacaggcatgcagcaccccgcctggctaatttttaatttattttttgtagagattgggtctcactatgtttcccaggctggtttcgaactcctgggctcaagcaatacttctgcctcagcctcccacagtgctgggattacaggtgcagtcactgtgcttggccaaaagaagctttttgatgtagatgaaatcaggtgagaaagcaaggcctgcaggcaagaggaccactggccatcagaatagggtatatatagtatgctctgtcagaggtctggagcattttagggttgcagaagacatcgatattactctctgaggctgccttatgaattaattggatttgtaggcccagaatctggggatccaggcttggccaggtgggcatagcccaataggatagtagtaataacattaggataatatatattaggctgttatatgccaggcactggtcttagtgctttacatgtgttgtctcattttgttctcacttaaggagtaggtgctattgttattgtcattttacagatgaggaattgaagaacacagcatgcccaaggtgccatgggtagtaagtggtaaagctaggattcaaacttggaagccctccttactcatcatgcttaattgcttatagtatttggtagacaggattgactgactgtatatactacgcatattctgtgcacactgtagaacattaggactttcagaagtctttacacttttttatggggttagagaagagtctaagtccttgagggactttggatccaaactagaatgggtaatttga

SEQ ID NO: 53447 - DNA, 2247 bp, Homo sapiens
cctcttgttttcccatcctgaggactcccttggcctgtgtgtgtggatgttaaaggttgaccccctctgctcacccctccagtaatggaggctataaaatgtctatttacccaagacaccagaacgactcctctgtggttcctctaatctggtgatttggtgcttctttggtctctcaggtaaatacagattgagtctttttataaaggcatattatttccctcattaaatgtgtgttttggcacatgtgttatttacctgatagacagtaatggctgcagaggagccattggtgtctgttgtgtaaatactctgcacagagaccatcctccaggggctctggcgcaggcctgcttctccaaatcgggctggccccgtggcagtcccatttacccctcccctgtccccactggggacctgggcccttcatattgaggagagaatcattcattttcctccttgccatgggctacttaatacctttaatttgctaggagacggaaaaggatgtctgagaataaatgtgtataaatcttagtctctgatgaaagatagtttgcagaaataggcagaatcataaactttcttttgagttctggccctcatttagatactcaaagtcccagttgatattataagctatagacttatagcctgcaaatttgtgactaaaacataaagacatcaatagaaaagagaaatccctaagacaccggagggtgcaagggcaagtgggatgctgctgcagggagcaggtgtgtttcctgagaaggctgtatggtagcaggagtgccagtgaagtgggcattgagtaggggctcttctgatggaaactcggctggatagagatactgtttgggctgagagatgctttgagcctctctaccagagagaacatgcagcctaccttctgtgggcattacagggagatctgtctcttcaaatactgtctgtgtgatatttttaattttaaaattgtaaccacattgcacatggattttaaaaaacaattttatttatttatttatttatttatttatttatttatttatttattgagatggagtctctgtcacccaggctggagtgtagtgatgtgatctcagttcactgcaaaccctgcctcctaggttcaagcgattctcctgcctcagccccctgagtcactggattacaggggtgtgctaccatgcctggctaatttttgtatttttagtagagatggggttttgccatgttgcccaggctggtcttgaactcctgacctcaagcgatctgcctgccttggcctcccagagtgctgggattacagatgtgagccaccccacccagctgattttaaaaaacaattttaaaaaaacgtttgaaacagcccaaatttacataaaagttgtaagtacagtagaaagaattttttccctgaaccatttgagggttaagttgccgacctaatgccccatcaccctgaatgcttggtgtgcatttcctataaacaaggacattttcctacctagtcaaaatacaaccatcaaaatcaggaaattaacattgatataaaacctctatataaaccttggaccccattaaagttttgccagttgtcctaggaatgttctttgcagcaaagtgatccagttcagaatcgtgggttgcatttggttatcaagtctctagtctcctttagactttcctcagtaaacgttccttggcattcatgaccttgatacttttgaagattacaggctggttattgtttagattgtctctcaattagggtttgtgtgacattttctcatgattagatttaggttgtgtagcttcaggaatataacagaaatgatgctttgttcttctcgtcgtgtgattttgatttatcccattattgataatgttcactttgatcacttgattaaggtgatgtctgccaggcttctccatcataaaattactactagttgtaattaataagtattttgtggggtgatactttgaaactatgtaaatatctcacatcaaagtttaattttattgatttatatctttatggactcatggttttctattcagtgcattataatccattactatcattgtttcttggccagtgggtggcttctgtatccttttggtatgttcccatcattatttgggtgtttccttgctttctgatacaagatgttatgcgctcatcttgtatttctcttgctgcatccctggaatcagccatttctctaaggacctctgttt

SEQ ID NO: 53448 - DNA, 1614 bp, Homo sapiens
tttccactctgtaagatggaaagatttgctcctgtggaattttgtttgagaagagacttcgagttccttgtgctgccgttcttttaattctgctcttgtgctcaggcctgtaatttttctttttaaatataaaaaaatatgaaaactagttaggatgatttggatagacttaattattgcttaaggttgagttacttttagttaaagttacactttgcctcaaaagaaaaactgcagttgatatgcattgttggtcctctgtcggatggagggaatcagtcatgtggggaaatgtgggccatcacacgtggtagagaacagggccccaaagagctgagcacctccgagcccttagtttcctcatgtgtgatatgcgaatattcttacccattctgcttgatacttgggaggattaaataaaatatgtaaatcatcgatacaatgcctggcttggagtagattttcagaaaagggtgtttgctttttctctttctcatgtagtaacagctcccttttattgagcgcttgctattgtgcaaagcactttttgtacatcgcacggttgaattgaatcccaaagacataggtattattattattatagctattattacaaataatttgtagtagagtcaggatttgaacctaggtttgtctattaccagtgttttaacactagattatataactccttgcttttacagcagttccccatcttgggaccaggagtataggaagtatttaacagttctgggtacctctcttctgggatcagatgctgtctacaaatgtgagaggtgcttaaagggatgatgctaccataccctgccctccatccatctctagtctatttatggtgtgttaggaagcaaggctttgccccttctcgtgtgtgatgaggttgcaactgacttgcaggactttgcaaaaagatgtcttcaagctttggccgctgaaaggagtttgcccaagctactgggcatggctgctgggttagcaaacagcaggcaaatcacaaacaattgcctctttttatgtgtttcttggagctgctgaaacagaccagttgaaggggagagcaagcctgctgtgacctatgatgttgccctcagaatttggtgttcctgaagatctttagtgattttagctctgctggtagtttgggattattagcagctgcttctgagttgggggagctctccatagctgtgccttggagcagaagcagctgtagctacaggccaaggcagggactgagtgtagagaagaggagactgttttgttgaggtgaggactcagttttagagttcctgcttcctttccgcattgggaccatgtggagcttccagggcatgtcaagctttgttttgtcttcaacctctagccttcaacaaactagacagagtcctcaggctcttggcctcttctgtgagactgcatagcttgggaaatgactagtgaggccttttccttgtgttggagcagtagcctgagaccctggccttggagttgagagcctgggttctattcttactatttcttgcagtgtgaaccttgggcagtccttttctctttctaatctcattttccctggctggttggactgtgttgcct

SEQ ID NO: 53449 - DNA, 1050 bp, Homo sapiens
atctatctatctatctatgagaccttgctaggttgcccatgctgggctcgaactcctgggttcaagtgatctcctgcccacaagtagctggagctacaggcatgtgccactacacctggctctcgtttggcttttgctaatgtatttgaccaaggcctttgggatcttggtttaatttaggttgcatgtcaccttttggtgggtggttagttccaacctgtctgttttacaaggatcagggaccagctaaagaggcatactctggatgattgatatccagggactcgagcttgtttgttcaatagctaagggccaggcactgtgctagttcctgggattgtagtggtgaacaagaaagccaccttccctgacaccatagagcttacaaattcatgggagagactgatagtaaaaaggcagttatgatatgatctgagagtgctatagtaagggaagtgtagaggctttgggaatactcagaaaggtctctaacccagacttgtagactcagggaaggcctctcagaggaagtaaacctcctcacatagaattaaacgaaccctcaaagaacacgggaaattaaaaaaaaaaaattaggtgaagacatgagggaccaagtgtcagagctttgttgaatttgagaaagttcaatgtggctgaaacagagtacttagtggtcaggggacaggaggatatggggagagatgaagcaggagctaagcagaggccagagccttagccttataaactcttaggattagaccagggagtagaaaaaagattagattagtgctctgcaaattttttctgtaatggataagatagtaaatatttaggctttgggtctctgtcacaacttctcaactctactaaactctgcagttatgcatgaaagtagccacagacagtatgaaaaggaagagcatggatgtattcctgtaaaactttatttataaaataaaggtgacagttagatttggcccatgggacatagtttgctgacctctggatcagatttaagaacagtaagaagccattaaagggttttaa

SEQ ID NO: 53450 - DNA, 1031 bp, Homo sapiens
gatgtggggcccctcaatgggggtttggattttgtccttagagctggattttgcaacaaatagtgcccatcgttgtgtctgcgagaggtctctggccacttcaatggcatttactcttgtcagacatttaatcagtctcccagcggaagggcagcaaaacatgaatcctattggctaaaagagtgtacgctattcaaactatagtaggttgtgagtggctaaatgagttttgattgtagagtttcttccagaaattggcttcatcaaattctgctttattctgactttatcatatacagcatgccttgttttagtgggttcttgcttggagcttagtttattatacctgaatctcctaccatttaaaagccaatttataaacagggacttggagtgtgactccactaatgtgtgtctgtgatcctggttagaaacccacttggctgccttttcctcaggaggtgggggttgggggaagggagctgccgggaagtgattgataaggtttcctttatagattctgtggtgcttcactggagctcagagcactttggcaacttaagcactccaaattaaaagctcattaacaattcctgcccaaagatcctgtaaataatcagctagctaggtcatagagcttggctaagagcttttcttccaacttgaaatttccaaataaaagtgcttttattccctttcattttaaaaagtgttttctttgtggtggggtaaattggtgagtggccttttcccaggggatctgagtagaagaaagtcttaaatgtgtggaatggtagacaggaatatattagttccaaccctaggtgtttctttatgcaaaagacatcactaacaggggcatctctgcaacttctggtcctttggaggatatgaattagttgaaaaggatgataggtatctattgatgttttgacttgggatttagttaccttgactttcttagagcttgaagcaggcttggaactatcctgaaagtgtttcctagtctatgtggccattttcagtatggc

SEQ ID NO: 53451 - DNA, 2028 bp, Homo sapiens
gtgaaatggaattctgaccttgaaattaatgagattctgatcagaagggtggggaaacttctttatttccaatgcggtgttatacaaattggagtccctttcctcttttattcatttaaaatagtcttcccttatagagtaccctgtgttctcctttttttttcttgtacacaagcataaaacctataggagtgtctgtgaggggagggtgttcgtacaccctcgttattatccagagttgcatttgtgactaatctttaataaaaaacaaaggtgcaaagtgaaaaggaggctgtgctaccctgtggtcaccctggagttgtgctttttactcccttccttaccttaggtggttagcacatccctcactgggtcatactagatagcgtttgtgcttttgattgcgaatttttggaaggcaggagaagtatttttctgtaaggaagggttgaagaggcactaagacaaagtctgcagcagctttcttggctcctgtcatatgccgacgtgtgtcggaatatttatggtctgttttatgtaaatacatatttaagggtcgttagaaggcctgattattcccactagatgcctttcaggtcctccctacagaaccgttttgaaataagtaatatttctcagataatcgagtgacagtatacaagactgcttccaaagggagagaaagcttcaggggcagatgggggcagtgacggggtatggggatatgaaaagacagaggatagaaagtgttcagacgagcagagtgataggatacagtgctttcgccagattgcccaaattaaccatatatggttgatatacacacacacacacacacacgtgtatatatgtatatatatttattcttaaaatttagagttaattgctgatatggttgactcatttttcagttctcttcatataaatatcttttcataaaatattttttaaatgttttaattaagtgcagcagtcaaactccgaagtaagcatttagctttagagttttgttggtgggtgggggtgggagatgagaatggtggtgtgtgtcctttacttagagcagaagtttttatgactgagttttaggtcattaagaaatcagttgtataatggaaacactgacagtttttactgctgcagccaccccctgctcacacactacatcaatctgcagatatgtccacttgtgagcccactggaaagagaggcctgcagacatggtgtaatgcacacatgttctttccttaaatctgggtactggtaggcaggatttcttttgtggttaaacatgcatttttatagacagaaatatagcgatttgggtcaagcatcatctttcctgatagatgattctggtttgcttgcctgtccatccacctggcttcacaggtgattcctgagggaggtgttgtgctctatggaaaaacaagcagcctttactctgcaggactgacttacttgccctggaaaatgggagaagtgttttgtgagaagccattcatggaggatgcataattccccaggaaggagactgaggtaactcctgcttattgtcactccttgaatcagtccccaagactcattgtccagggaaataatgctaaaatttacggaccaattacaagtagttcacgtgtgctttacatatgaaatgtctacagccatgtttcccagggcctttaaaataaacatttcctcattaaggaaacttcacaacaaaagggaagataagtattgtctgctgtcttgtgttagaatctgtacatttattacccccttagcactctggctcctgtcatgtgcatatcctgatggtcctcttcaggctgcccctgtgcccagattcctgcctgtgtgacacagtctttggccagcctgccagcctatccactcagcccagattggagttggcgaagtatacatgctcaccacagggctgagagggcccagaactgcccgcgtggagcggcgactggccctgtcttctggcttaccccagggatggaccctgggcactgaccacac

SEQ ID NO: 53452 - DNA, 1059 bp, Homo sapiens
acataccctttggtgggatgggagaagatgatttagtatctgctaacgcccaatgtgctttacagacatagtagtttaagaagagctaaatctgtgagacgagacagatgcacctactctttctgtgcctccatttcctcaggataaagtgggatgaacactagtatcaatctcttagtggtgttataaggattaaatgagttaatagaaaatacaaataaagtcctaggaacagtgcctcgcacaaagtatgccttcaataaatgttagctataattaatatgataaggggttgggcacagatttgaggtctcttaaaccaggctcctccaactcttacctctactcctaattgcattatggggacagtgactccagcaagccctgaactcttataagtctgtgcagtttatgacaagtcttcctacgactgaaaaatcttccaattgatattcaggagttggtacctataatgttgtttttccttcttggcttcagttatatgggggctggagcagggatgagtttagcacccacccaatgaccacctttttaaaatacccgaaaaggcacagagtggaaatgactagaattctacactaaactcctacccgaggaaggacagtaagccagaaggaattttttctgggtttagtaaagggcttgacgaatcctgttctatgcctctgcctggtcagccaactcagatagcaagtctgtggaccatttactgttcaccagctattttgaggagaggatgaggaggtgacagaatgcctagaatcactgggaaatttgaactgggaaggaaccattgcaggctgctttatttttccaattttctaataacttacataatgcttaagactgtgttttcccctttaaggggaaaaaattgcttttgctctatttagagctcatcacatttgtacattctacaaatactcttctcctaaatctcaacttgatgacttccaagcgccgttctcacagctggctgctttcgctcccactccactatcccaccccgccccatcatctttagttaacgatggatgc

SEQ ID NO: 53453 - DNA, 1050 bp, Homo sapiens
ggcaatgccaaaacatactcacactcttgggaccccagagcgccctctcgtctgtttacccctggcacctccctgggcctggaagctgaccttatttgttatgaagttcacacagaagtgcccagggaattagaaactgaaaacaaactcttcaggattctctatcttgcctaaggcaacacttatgtcccccagtaaaaggtgtaaattaacttagaaaagataggtcattcctttgaaaaactgacagttgtttgggtggcttagagcacaattttgcttattgaacgagcctcaatcttcagagaagtaagtatttagaagactactactgccttatggcaaatggaatagcacgctttgggagtggcatagcaaaccaaccaatgcggtagactttctgtttccaagtgagcagctaaagctaaagtcgattgcatagacacagctgtgggtgggccaactgcatgagcacagtttctgagccaagccgctaaaatattaatgattagctttaaggaggagcaattctgattgaggccactctcctgttagaaaccataattagcaattaaaatatattctaaaaactgttccaaccagcagcttttaaataaataattgtcactgctgattgaacttgttttatttccctgtgatttttcttatcttcccccaccccaccccgcataacttacaaccctgtaaatgctcagtagctgttaatatgagtctgtcaatacatttaccatggtgacttgggctgtatttggcgagcatttgaagaaatcagtcactggttggagggaggaaagacaagctgtcgatatccagggagaaatgctaataaccctggtgacaaatcgtcctctggattctctaagggttaagaaaaagcacctcttagacctgggagctcaggggtaagggatggtgacttgttaggaagtgcagacagtagctgtcatgatctgcaatgtccttttcattgtcttgctttcaacctctcaaaaccacagatgagttctggagacagacaggcctggattt

SEQ ID NO: 53454 - DNA, 1062 bp, Homo sapiens
tctcgcctcactgcagctttgacttcccaggttcaagcaatcctcccagctcagcctcctgagtagctggagttaccggcgtgcactaccatgctcagctaatttttttgtatttttagtagagacaggattttaccatgttgcccaggttggtcttgaactcctgggcttgagtgatctgcccatctaggcctccccaagtgttgggattacaggcatgagccaccatgcctggcctacccctctttaaaaataaacaaagccagaaataatcttgcttctttatgtctccccatctcagatgatagcactgttgttcacccaattgctttggctgaaaagttaggaaccctccctgtttgcttttccactcttgtacccaagggccctcttactccaccctcttgcctagtggaaataagacttctcaaataactggtagtggcccaaaccacattgaaccatttcacaattttgagacctagatattgaatcattaggatccagaacaaatatctctgctgctgagcttcactcatgtgtatctggctgccttctagacttttattcttggatgtcgtgtgggcactgaatactcagcaggaccaaaaccagatttaccatcttctcccactaaacctgtatctccctttgtattgcctattttgatttatcatgctaatgttattcaaattagaaacaggatccctccattacctcaccccttataactaatcaattttcatggcctaacaattctgcttaataaatacctccatctgtccctacttcttttcccatagttcatactctcctgctgtcttagcacactgttgcagtaggctcctaacatgctctggcattagcatctgctgtcttccagttcattccgtataccctactgataaaggtcttgctaacatgcagacttgttcatgtcacctgcctacctaacacccctcattcctatcacaaaaaaagcccacaagtcttcagcctcccgttccaggctcttttctcaccattctcctcttagcttttcatttataagcatatcttgca

SEQ ID NO: 53455 - DNA, 1060 bp, Homo sapiens
tgcttactatttgttttgctctttcctttgcttctgtcaaatctctgtttttgggatgtgagtttagactccttactatgattccctttagcgagggcataggacacaccaaaatgcctcaagcacaaaatgccaaggaggacacctcagtgacaggatgggaaaatggaatcataggagggagaggagaaaaataagaaagaggaaaacggagagcaaaagaaggggaagaaaagaaatgaaaataaaatgatgcataggaaggcagcggtgagtgcatggagctagcagtgagactttctaatagtcttgttgccagtctcctgggggctcatggggctctcaaagaaaaatttatgggatggaaaaaatgtggtagggatttaataaatatttgattaactgattgattaattcattaaggagcttggtattttaagtaggttataagaaacaagtttgttagaactgcaaaggcatgaactggagacagtaaaaacattgaaaaccacatggaaagatgaataagttgagagagaagaagaaccctgaaaactgatctaatggtctggaataagaagaggggtcggcactggagataatcaactagtcataaaactacataaatacaacacagattgttttggaataaacacgggaacttagtgaagatcaagggtgaccttctgagttctctagctctagcacgtgccatctgtccctgactgacacctgaaccgatctcagaacaccctggggccagacagctaagtgatgaggaaggagtggtactgagggagtgtaagctttggggtgggagtaaggggtaaattaaatgcctccaaagatccctctagctttcagatcttgtgatgcttgtgaaaatattgctagagtgtcatattcttagaataaggattctcttaatttggagaaaggccctaagaccttcaaggggaaagaatacacaaaagccattgggtaatccaagccaagacaattaccattagtctctggaggtgtttaatttaagagagaaagaagttcctttccactgaag

SEQ ID NO: 53456 - DNA, 1184 bp, Homo sapiens
gtagagtgtcagggccttttatcaagtgtggagtccttgattcctgaacaaccatatccatattgacttgtctacggattttggcttcggcttctttacaatagaacaagaaagccaggtgtgatggctcacgcctgtaatcccagtgctttgggaggctgaggtgggaggattgcttgagcctaggagtttgagaccagcttgggcaacatagcaagaccctccctctacacaaaataaaaaataaaaaaattagcagggcatggtgtaggcacctgtagttgcagctacttaggaggctgaggtggtaggatcacttgaacccaggcgttacagtgagctatgatcatgccaccgtactcccagcctgagcagcagagtgagacactgtctcttaaaaaaaaaaataacaagaaacttaaatattcttatgaaatagcctctgcacagactccattgttaggatttttccagtttttttttttttttttactaatatcataatggttaggacagtctctcaagccagaccacctgggttcaaatcctggatgtaccatttcctaacttgggtaagttgcttagcctttttgtgcctcagtttcctcagtaaccacttcagagagttattgtgaggatgaaatggctattttatataaagccttaatatactgcctgatacatagtaaacattcaataaatgttaactgttttctagttgtcttacccacacccaattcaatagcatttaaaaaagagatttacctttatgaaacttcccaaagtatctgatttagtgttcttagaaacaacagttctctttcttttcgcacgattggtttacataatgtttaattaaattatgtaaatgtaataactactaccacaggaataaagaaattttggaacaatcacagtgacttacactcagctggtaaaagtggaagtagtatatgtgtgtggaagagtggcctgccagccgtgagcattcagagcactgtgtccattaactggaacatattacagctggaatggaaagttttagttaacccagtaagtcagtagggaagaggctggttaagagagcatccactcttggacgacagcctctaccttgcagcttcctctctcccttgctcctgttataactgtgctttcatctcattgactgcctagatccaagc

SEQ ID NO: 53457 - DNA, 1114 bp, Homo sapiens
tgcttgcctagattgccgctatagcctactaactgctctccttgtctctggtctcatcctttcctgattcatcattcatagagctgccagctattatccgtatctcatcagcatccacatcatcattattgttacctattttgcattatacttactggtttatgtgcctggctccttcattatactgagagtgtctggatggcaagaaatgtgttttatttacctttgaatctccagcaccttacacagggtctgacacatagtaaaacttcaataaattaatgtgaaaagaaagaatcaaagaaaggagatggggtttcagttcaagtctgcgtgacctgaaaacccatactgtttctacactatcataatatatctttagtcacagctgtgttgctgataaaaataaggacacagctcaaaccctcccactgcgacaccagtggaaaagcaggttactgaatctagattaactaaagattcttcctcccatagtcacaataatccttcccaatcctaattcctctcaaatggaaaggtctagaagccataaaaaaattttaatggccataaatatattaaatatattatattaaatatataaaaaaatgatcaactttactcttagataaatccatgtgccatttttttttttttttaggtggaccctcgctatgtttcagaggctggcctcaaactcccgggttcaggtgatcctcctgcctcagcttcctgagtagctgagattacaggcatgcaccaccacacctggctgcaatatgccattttttacctatcagattggcagagatcaaaaaggttttaatagtgcacaagtataccttagagatgttgaagattcagttccaggccaccacagtaaggcaaatatcacatcaaagcgagtcacatgaacttttggttttctggtgcatataaaagttacatttatgctatattgtagtctattaaatgtgcaatagcattatgtctaaaaaacaatgtacacaccttaacttaaaaatatttcattgcttaaaaatgctaatgatcatctgagccttcagcaaatcatatttttgctagtggagagttttgccttaatgttgatggc

SEQ ID NO: 53458 - DNA, 1589 bp, Homo sapiens
taactgcgagggaggctgggaatgcagtcgagctgtgtgcccaggaagaagaggaagaagtgagcacatagcaaactgccgcacagtgggtagaactgacaaagacagtagactgctgagcaccagtgagtacgaaggcaacagccacaggatccccctgtggccgtgtctggagacatagcacgtacttggggctttaggtgggaggactggcagaggccactccatgaacgaaaggaggctgggcaccaggggctgagtaagaactgttttgaacagaatgggagctgactcacatctggaggagggttctcaggtggggtccctcggtattgctgtaactgggtcaatctgattgtctctcttcaacctttttcaaccatggtaagcacgaatgccctaagccattgactgtaattaatgaatttctctcctatgcatctggattgtacagtctagatgtacaagttgtactatccttgggagaactaagaaaatagttgctctgacagccgggcacggtggctcacgcctgtaatcccagcacttcgggaggccaaggcaggtggatcacaaggtcaggagatcgaggccatcctggctaacacgatgaaaccccatttctagtaaaaatacaaaaaattagctgggcatggtggcacgtgcctgtagtcccagctacttgggaggctgagaatcacttgaacccgggaggcggaggttacagtgagctgagatcgtgccactgcactctagcctgggcaacagatcgagactccatcaaaaaacaaagaaaagaaaagagttgcttaggtaattgttctgtctttgtggctcagttgaggaaccctggctgagaaacccctgcctgaagagatgcaaacagcattttatatttgaggcaaatgctctagactattctctccctccccccaatctcctgcgccctgaaaggaaacaaactgatgtcatgagaaattcctttctaataacaaaaacaaatgggaggtctcccgggattgttcctatggagagacagtggttgtgtaagaatgagaaaacagtgactcctgctcagggttctggttaagtagcaggtagaatttttccaacatcattttgaatcaagagaggcaccgaaatcactgtagtaaaatcttcgagtgggaaaaatataaagaaaacaaaatccaactaaggccgtttttccccaggaaaggcattagtcaggcagccgctggagccagccacctctcaagagcctgtttttcagtgtcactgcggtgactctccatgctctgggttttaattctagcctctaatctcagtcgcttctgtgataaattaattgtaataatagaggccccagttacgaggtctgcaccgtttgcttgtaatgtgagcgacaggtttagggcctgctttatttaagatgctggggtaattacatgggagttagcatatgcaggcagagatatgattcattcttccagccacaagcatgacacagctgtttgcgggataaaataggggaaccgtgttgttacaaaatgttccccttattatacctcattaaaaacaaggctgtg

SEQ ID NO: 53459 - DNA, 1038 bp, Homo sapiens
caccctattgaccctgcctgcctttcatgtcccccaccccatctcacctaacttctttcctaatgtagcttagattatcttctagtaattgtctccctgaatctcaccatcagagcttccctttctgctggaagctctgatgcacacaaacgtgcaaaaatatttaccatctattttaaaagccttccatttccccctgtagctacctctccatttctctgttcccctttaggtcaccccctctcctttcattctcaggtgaaccctcactagtcagatttttccctatccttcctgtgaaatggcttttgtccaggtcactagtgacctccctattgccaaatccaacagccagtcctcagtgcatatcatactcaatctgtcactcccgtcttctagaaacactttcctcactccgcttctaggacacaccctctgttggttctccttcttcctcactgcttgttcctcttgctggttcctcctcctttcagtgatgctaaactttggagtacccttgacttagtcctcagatttcccttctcctttatccgcactaccttcccaggtgatccctccagggcttcataccagctccatggtgactcccaaatttatatctctagcctagacctctcccctgaactacaaattcaccaactccactgcttactggacatctccaattggatgtctaacaggcagctcaaatgttaagtccaaaactgaactccttattctaactgcacaggatcaaatgattatgtcctttatctctaccctgcccgtcaatagccactccagtcttccagttggatcaggccaaaacattgaagttatcctggactctggtctcccacaccattcatactgcctatcagcaaatcctgttggttcccaaatctgacagcttctctccatctctaccacatgaccctggaccaagccactactactatctctcacctagacaatttcaacagagtccttaggttttcctgcttctacccttgttccggcccttttaatacataaatc

SEQ ID NO: 53460 - DNA, 1001 bp, Homo sapiens
taaaaggatgtggaatcctggccagtgcccagcatcacagtggtcagagagggctgggtatgcagaaggacttgggagggtggcagggttgctggtggcgggtgtggaggggtgaagggggcagagtctgccagctccttcctgatagtgggagagagcgatggtcttcagtggccagtgggactcttcctcttctcttcggtccatcacaccaaggcaggaaggccactggcactggccgccatgtgccatacacatatttcccttgtctgcacaggagtggagtgagggcaggggtggggtgagggcctctccactcggggcagccttttggtttgccagaagtggatcctcctggccttcatctgtttgcccctgggggtcatctatcagcctccagcaataccctgcaggccggatggcccaagccaagtgaaacctcttccctgtagcagaaagcaggtccagcatctcccaaaacgggcgctctgactggctgggcttcttcgatgttcagagagcttggccaaagcacgaacactggagtaggagccagaagtcctgtggtcttgtctgagcttccccactgacttgcccggtgtggtaaattcatagacacagaagttccttggaaacgttctgcctcggtttcatctgtaaaatgagggcaaaaatccctgccttatgggattattggggagatcaaaagtagctaatgagtgactacagactccagaaccaatcatagattgttgatcacggagtctcaaataacccatcatgccctcaggccaaaggccaatgactatttctgggtaagtatgagaagcaggtgggactggaggggcagctggggtggtacaatgacaaggagaagaaggaggcagagatcctccagccccatagctatcttggagcagaaaaccagtgttgctgtcctccatggggcaggcatcagggcagaccacaggctgtaacccaccttagaggaatgccttctt

SEQ ID NO: 53461 - DNA, 2365 bp, Homo sapiens
ggccaaggcaggcagatcacgaggtcagaagatcaagaccatcctggctaacacagtgaaaccccatgtctactaaaaatacaaaaattagccaggcgtggtggcgggtgcctgtagtcccagctactcgggaggctgaggcaggagaatggcgtgaacccgggaggcagagcttgcagtgagccgagattgtgccactttcctctagcctgggcaacagagcaagactccgtctaaaaaacaaaaaaaacaaaaaaaaaaaaacttaatcctgattagaaggtgaactctttgcagctagaggccatgtcttcattgtttagtaaagtgcctggcacagggtagatgctcaataaataatgaatgaacgaacaaatgaaccatgagaaactcacaggtttctaatttgaacagatgggcagaggcaccattcactgaggtagatgagggagaggaagagcagatttgttggctgggttgggaggggtggggagaaatgaaaaaagagtttagttttagaatgacatgcagagaaaggcacagttgtcaataagcgtgttgtgttttgagaacaatgagaagtttattcattcagtcatttatttatttagtcattaatcaacaaatatctatttaaagcttaatacatgtcaagcactacgctaggcactgaacatatgataataaatcagacaaagtcaagaaagggaaatggataagaaacacctattaaaatgcagagtggctcatgccattatcaaagcaagcatagggtgctgtgtgtggggcctcagaagcggaggctgcaagacttcctggggaaagtaacaccccagttgcatcctgaggaatggaggaagtaggtgctagccagactgaaagccagagaaagggtgttcgaagcagaggaagtagcatgtgcaaaagcccagcagcaaaagaaagaaaagcactcagagaactccagatggttcagcaatgtgggaatccagtgtcgagctcaaggtgctccacggacagtagtaagcggcccaagttgtgaacctccttgacccccctccctccatctctccatgtagagagaagaatagattgcacggaaagtcaagtgcaggtgtcagtcagtccctgtgactcacagtaggatgtgtgaggggaaatgaggagaaagtagggttgaaattataaccttggaccaaattgttaagagccttgtctgccataatggagggtgacttctaggggcagttggtaaccactgaaagtttttaattgggagggtggtggtgatgacatgatcagatccatatattagaaagataactcagggctagtgtgaaaaatggattagcagagacatgacaagaagggactatattttctgtcaagaaggcattcttcaaactggaaaaaaatagaatggtaagaagatgctgaagtccagcattgtgtgtgtgtgtgtgtgtgtgtgtgtgtgtgtgtgtgtgtgtgagagagagagagagagaaagagagagattgtaagaaactacatgagtctcgggctgggcgcggtggctcacgcctgtaatcccagcacttggggaggccaagaaaggcggatcacgaggtcaggagatcgagaccgtcctggctaacacagtgaaaccccgtctctactaaaaaatacaaaaaaaaattagctgggcatggtggcgggcgcctgtagtcccagctacttgggaggctgaggcaggagaatggcatgaacaggggacatggagcttgcagtgagccgagatcgcaccactgcactccagcctgggtgacagagcgagactccgtctcaaaaaaagaaaagaaactacatgactctcagttctgacgttcatgggcaacttaactccctgccatctgcctctcctgccttgggtttccctgacacattttgcctcctctgctcaaagagtcctccctgcgtcttgcccatcttaaagtaaaacttcaagttcaagccttccctactgctcttcccccagacagattgaacagtttcattctctaggctgctatatcattctggacataacaactacattataattcctgtttttctcatctgtttcctaaactagattatatactccttgaaggctaagactgtacaagtttctttgtatccccgacatcaggtattgttcatggcaaacactcagtgagtactggattggaatttataggaatgctaataaactgggatgatctaataatgtgatttgtttttgtttttgtttttgagatgaggtctcactctcttgcccaggctggagtgcagtggcgcaatcatagctagctgtaacctcaaactcctgggctcaaaggatcc

SEQ ID NO: 53462 - DNA, 1080 bp, Homo sapiens
ttcacacaccctcaaatctcccctttaaatcttcttttaatcttaacttccaagcacattactctcccctcttcctctttccctttactgataaacttgttcaaaagacatctcactcacattgcctccacttccccacctcccattcagtcagcccattcactcaatgagctctatcccacttcttcactgacattctgatcacctcttctttcttcaaagccgctcttcccttagcttctctgactcatctctttggatcttatctacttctactcctgctcattctccttccccagcttctgcttgatgtgccccttcagtatcgctgcttcccagagtacactgcttcacttctctccttacttacgcatcttcccggggtgagctcatcatgcctgtagtttcacctgccacctaaacactgatgaataccatggctgcaacttcagcctcaacctctctcctgagcttcatgcccatattccagctgccaactcactatctctccttgaatccttgcagagcacctccagactcaacatattcaatactgacatcattatattcttccaagcctgcaacttaaatgatccatcagcaccatctaaccacacaagcagaaacctagtttgacctagagtcttccctttttctttccccgttatctgtcctctttcaccaaaggaaggaggaaaggaaggaaggaaggaagggagggagggagtaaataagtaaaacttgggaagtaggagagaagtgagttccttgccttgtaccttatatcagaattaatgaattaagccaggcactatgatgtacacctgtaatctcagccactcgagatgcggagatgagagaatcgcttaagtccaggagttcaagaccagcccagaaaacataacgagaccctgtcttattttttttttaagtaatgcattaaatagatgaattaaaaatttaaatgcagggctgggtgcggtggctcacacctgtaatcccagcactttgggaggctgagatgggcagatcatctgagggcaggagttcgagaccagcctggccaacgtggtgaaaccc

SEQ ID NO: 53463 - DNA, 1075 bp, Homo sapiens
ccctgccccagcccctcccaggcccgctccagggccagccgcactgggcctcattcctggagggccctgtctctcggcagtgttgctaggtgcggtgagcccaggcgcctgccaccggctggccaaggctctgcctggagaccatcggagagctgggaagaaggagctgcattatttggttgatccctccctccctcccccagcctcagcacagtgagctttccggagggatggttctgagccagcccatccccaggccttcctctttgtgcagagacctccccgtcagaccccccaccttcgccggctaccccctcccccttccctccggttgagcagagccagagttaagcctggggttaatgcccagtgacacctgcaggttggctagtgttgttgacatggggctggggggaggggagggggtgatgggggagatcgttggtggctttattatggagaactcagcaggcctggggccttctattgtccaagtggcaaataaataaataggagaaagtaagtcttccccatggcttaccgacgggaggttaacagctggacatgacatgacaaattgggcatttttctttggggactgatccttacagcagctagcagggagaatgagagagagagagggagggggaagtagagagagcaaaagcaagccggagcacggaaggggctagtcacagaagtcaacgtggaagccgtgtgtgcatgtacaagagtacgtgaccggggtgtacaggaaacattgcatcatgttttgggcattaaaaaaaaatacatgcaagcatttcacatgtaacgacttcaggagtcaatcccagaaccccaaaagctgggtatctggctgtggggggagatatctctgggatctgccttcttgaacccctcccccgtcctgccaaatggaaaaaccaaaaggtcaacgccagctctgatcccaaagaatctccttcctccagatgagtgggattactgggcagtggcgagtggtggagcaagcagcctatctccagcctgggcccggggtgagaactcttgcattatgcccagttgcccggaa

SEQ ID NO: 53464 - DNA, 1039 bp, Homo sapiens
gacccctcgctggcaccccaaagctgggacttctgagccagctctgcccctgcatttccctccacccatgtctggttagtctcaaatccctctcccacatccactctcctctccagcccacctgctatggacaactgcattgctacagcagcctctccaggcgcctcctggcggtcctctctcacctgccccagtcccagagtcatacccctcaaggcagatgacactaaggaggggttcagcaagtaaataagcaaaggaagagaaggaagcagggcagaaagaagggagaagaaaaccaaggtgttcatgttgtcacacattgagagggatgcttcctccagggtgcctggcacattaggccctgggaatctgtggacacgagagcccccaggatgggaaaaggcattgccaacagccctgtgagacagagctgaagtgaagatgtctccttgtgtgtgtcacaaaaatgcaactggaccaagccttccccattttaaaaaacacattctttaaaccctcctcactccttgagcttctgtccccttcactgcctcactgctcaaaggcttttttatatttaaccacttccattctctccactggctcatttctgccacagtccttacctctttggtgaatctgttctcctaaagattgttcatccacatctccaagtccatgttggtgttcacccttcttaacatctcttcgcctaaccctgcggtcaccctcctgaaacacttttctctctcggcatctctcataccacctcctggttctccttgcagacagctccttctctggctctttgccctcctgccaccctaaataaaagtaggtgtttcccagtgttctacctttgaccctcttctctcggtgcacactttaatctgatgagctcatccattcctgcagctgcagctattatctttatttagaggactcctgaatataaagctccaaatctgacctcgtgctgctctggtcccatttttccaactgcctggtgaatatcttcagcgctttgtccaataga

SEQ ID NO: 53465 - DNA, 1048 bp, Homo sapiens
agagagaagacggtgaggatgcctaggattctggcttaagggcctgggacaatagcggtactgttcgtggtagagagaaaatgaaggaaagagaacaagttgcgagttgatgtgtgcgggtgctgggggtaataagactgtgttaagagtctgggttgagatactcagtatgcagtaggtagatgggcctagagcagctataccaaagaccacttcaagatctcatgactggataactgagaggatgacaatgtcatcaacagaaataatgaccgctgaaggtgaattatcatgggagttggggctacatggcggattgaattttgagatgtctattggacaaagcgctgaagatattcaccaggcagttggaaaaatgggaccagagcagcacgaggtcagatttggagctttatattcaggagtcctctaaataaagataatagctgcagctgcaggaatggatgagctcatcagattaaagtgtgcaccgagagaagagggtcaaaggtagaacactgggaaacacctacttttatttagggtggcaggagggcaaagagccagagaaggagctgtctgcaaggagaaccaggaggtggtatgagagatgccgagagagaaaagtgtttcaggagggtgaccgcagggttaggcgaagagatgttaagaagggtgaacaccaacatggacttggagatgtggatgaacaatctttaggagaacagattcaccaaagaggtaaggactgtggcagaaatgagccagtggagagaatggaagtggttaaatataaaaaagcctttgagcagtgaggcagtgaaggggacagaagctcaaggagtgaggagggtttaaagaatgtgttttttaaaatggggaaggcttggtccagttgcatttttgtgacacacacaaggagacatcttcacttcagctctgtctcacagggctgttggcaatgccttttcccatcctgggggctctcgtgtccacagattcccagggcctaatgtgccaggcaccctggaggaagcatccctctcaa

SEQ ID NO: 53466 - DNA, 1114 bp, Homo sapiens
aataaaccaatgaaatctgagaaaacaatgtcctgctacttctcttcagagctactgcccaccccctactcagggcgaaggtgggtctgtctgccagctaagatgctggtgtgggattctccccatccctggctggagacccctcattcaggcggcccctgcagcttggcgtgtttacctaacgtggtgaacacatgctctctctggaggatcattgttttccctctgaggcccttcagtcacactggagtcccccagttaagaagcagcaggaggaaggggaggaaggggtcactagaatggggaagcagaactgggagggaagagacatcaggctgatcacgctgggcaaggagggaagagagagagggagttccaaggcttcaggacctgctggctggtgaacacctcttactgttggaaacaccaggattctaggaatgatgggttgcgagcaagagactatcactcttggaattcaccctttttgagaaccacagaaaaggtggagagagaaaaattccccttggtgataaaagttcctcatgtgcgctctgcctccttcgcttaaacttgaccttcacttagcaattgttcagagagcctcctatatgcaaggcattgtgctagggactggggctaatgaaatgaatagttgggaaagatggccttgtatatcaacattgcaatgctacatcatagctgtttttgtttgtttgtttgtttttcccgagacagagtctctcactctgttgcccaggctggagtgcactggtgtgatcttggctcactgcagcctccatctcctgggttcaagtgattctcgtgtctcagcctcctgagtacctggggttataggcatgtgtcaccatacctggttaatttttgtatttttagtagagacagagtttaaccacattgcccaggctggtctggaactgatctgcccgccttggcctcccaaagtgctgggattacaagcataagccaccacgcccggccaatcatagctgttttgagagtgtcaagaactaagtacagtagttgcttactagaaagaaagggtttccacttatgtttggaggggttagggaagacagcatctctgagctgg

SEQ ID NO: 53467 - DNA, 1035 bp, Homo sapiens
tctgtccaccccacaagagtaggataggtgccacttttgtgtatttccacagcactcctcatacccactcttctaataaggttatcttcttgtaattgcctccctgcttgtcggtctctccaacaaaattgtgttcttagtgacatcaggattatattttgtttattgcttgtggtatccatggtgactagcatagtatcttgaacatgataagtgccctacaaatatttgctgagtataagaatgaatgaatgaatgaatgaatgaatgaatgaatgaatgcttcatggcatccagctacccagtcctgacattctctgagtctcagtttctctctcactaaaaacgagatgacttctttttcattgttgtactctctgcaaacctgtagaaatgaacccctagtggctatgagaagctgcctaggccaagggcgtgggattcaattgctgtttggtttctctacactctgcccatcaacaggaggaggcacttagtattgaaagactcatggtagacaaagtaggataagactgatgaaaactttctggaataaatatatggtccagttagtgtcccatctctgagaatgcctgctatactagtcagtgttctagcaagaaacagaggcccacgaatggggtaacaaaggaaagtttaaggaaaggacgatttataaagagaaggtgaagtacttcagagctagcaacgacaggggagctgttactacccctgggattgaaggagcatataccagcacccaggaagaactgcggctatgaccacggctgcaggaggagctgtgactttcaggaaaggaatgctaacccttggctggcagagaaggagccagggcaatactcaccccaactgcttctctcctctcgttctctaatgtcctccatgtgtcaaaccccataggaatcctgaaggcaagcaagcttggttgttggggcagaagacagaaatcagctttcagggcacagaacagaatggagaagggtgatgtgtgtatctgcagaagcgaacagatat

SEQ ID NO: 53468 - DNA, 1377 bp, Homo sapiens
gagatggagtctcgctctgtcacccaggctggagtgcagtggcatgatcttggctcactgcaagctccgcctcccgggttcacgccattctcctgcctcagcctctggagtagctgggactacaggcgcctgccaccatgcctagctaattttttctattttttagtagagacagggtttcaccgtgttagccaggatggtctcgatctcctgacctcatgattcgcctgcctcggcctcccaaagtgctgagattacaggcgtgagccaccgcgcctggcctgaatgtaccaatttatttttacctctgtgactgggcatatagctttccctttgcttagaatgtcttctatgccttcatctgcctgttgaactcctactaatctttcaagacccagctaaagtgatacacccttcttgaagccttccttgatgtcgttaattgtctcctcctttgtgcccctacccagaatgtatttctatcaccacatcattttctaattatctgtccacatgtttttctccccaccagactatgtgcttcttttgtgtgtgtgtttgagatggagtctctctgtgtcgcccaggctggagtgcagtggcacaatctcggtacactgcaacttccgcctcccaggttcaagcaattcttgtacctcagcctcccaagtagctgggattacaggcgtgcatcaccacacctggctaatttttgttttttcagtagagacaggtttcaccaagttggccaggctggtctcgaactcctgacttcaagtgatccatcagcctcagcctcccaaagtgctgagattacaggtgtgagccaccacacccagtgctatgtgcttcttaaagaaaggtagtgtatttccttagctttagcacagtgcctggcacatcaaacatgctccctagtcaattaatgatgacctgaatgaacaaatgacacccctctctacctgctgtcctctggtaaacctgccctctttttaatgcaactccctcagactggctggacctatttagggtatctccttccctctcttgccttttcctgtctgctcttcctgttctttttttttttgacagagtctggctctgtcacccaggctggagtgcagtggcatgatcttggctcactgcaagctccgcctcccgggttcatgccattctcctgcctcagtctccctagtagctgggactacaggcgcctgcaccacgccctgctaattttttccattttttagtagagacggggtttcactgtgttagccaggatggtctcaatctcctgaccttgtgatccaccagcctcggcctcccaaagttctgggattacaggcgtaagccaccgcgcccggcctcttcctgttc

SEQ ID NO: 53469 - DNA, 1055 bp, Homo sapiens
agagagactccatctgaagaaaaaaaaaaaagataaatcagattatattactgctctgctcctaacttttccagaccttcctatcacacagaataaaatccagtgtcctcttcccaacctacaagaccctacagtctggcccctcttccatctgctctctctaccacggccacattatccccatcgttccttgaatacactgagtaccttccccatcagagcctttgaacttatttcctctacctgaaacactcctccttcgcagatcctcatgactctcttcttcatttcactcagatatctgctcaaatgtcacttcttcagagaggcctttcctggccacctgctgtcactctcagcatctccttaccctgctcattttccttcattttgcgtgtgcctacctgacatgccactgtgtctttatttgttggttgcctactccagcagtagaaagtaagttctacattcactgttagatttctagctcctggaacatggtaggtgcttaataaatttcttgaataaatgaatgaatgtttgctctgcttttgtctgcacatgttctatcagggtgatctcatgatcttccatgtaaatgctacaccatatgccagcagcttctaaatcttaacttcaatccaaatcaatctcctgagcttccaactcactttccagccacctacaggacatctccccatgtgtcgtatgtctaacacacatatgtccaaaatggaacataccatttttctcccttctttagctcccatttcattaaatggcaccacaatcttaaatgcccatccagaaacctgagattattacccctcttcctttctcagacctccatctaatcaatccctaaattccgttcatcctacccttaaatagctctcagatcagtccacttccctccatttccaaggctcctagcctagtccaggccacattgccatctctcaccccagtgactgggacagcctccagctggtctccctgcctccggtccttcctctacaggatgttttatggttaatctaaaacataaatcctgg

SEQ ID NO: 53470 - DNA, 1016 bp, Homo sapiens
ttccagaagcagatatatatatatatatacttatacaaagattcattattcatgtgagaaacatttattgaggctctaatctctgcaggttctattctaggctccgtgtacccagaagtaagcagcacagtccttgcccttggcttctcgcaaagtaatcagtgaatgaatgggatgaagcctcacttctcccactgacaattttagcttcattttcatagctgttcaaacagatactagaaatctgtgccctctctgtttatgaagttcagcatgtcccagcttttctaacctgtccctattccaaatgttttgacctattgccataccatgtagtcacactggattctaatttttgatttagaaaatgtggtcattactggattatttcgagaatcaaaagaatcaaagaacatcacttctgtgatgtgctaagtgctctatcagtagaaggcattattcaaaactggcttagactagagaggcaggttcagccacttctttctttgtgcattcagggtaacctgtacgtccttccttcccagcaccaatctcctttctttttaatgtgttttaaggtatgtgcctctcattccaaattgtatctgacacagggcctggcacgcagtctaatttctcagtaaagatttattgaatttctgaatggatggataaatggtgggggcatagacaagtagacagcaaattatgatttaagacagaatgaaatgataattaccaccactaacattttttgaggacttactatatacaaatccaatgctagttcctttacatgcattctctcacatcattctcacagctacaacatgaggtacatagcatcgtgtctcttccagatgaggaaacagaggctcagagaggttaaatgacttgcccaagacaccaaggtcacctgaagacctgggaactccagctcgagcagcccaggctgctcaccctgacctagccagagggttacaggaaatgtcctttggcccttagattgtccctcc

SEQ ID NO: 53471 - DNA, 1051 bp, Homo sapiens
ccactgctgggctcagtgatactctcacctcagcctcctgggtagctacaggcacacaccaccatgcccagctaactttttgtagagatagggttgtgtcatgttgcccaggctggtcttgaactcttgagctcaagcagtccgtccacctcggcctcccaaagtgctgggattacagatgtgagccaccgcgcctgaccctatttattcttgaagaccacactcagacaatgcttcctctttgaagccttccctaataattaactactctctttttcatgctatgttccacatatgtctatatgtcgattattgcatacatcatataatattgcaattatttatttatctgtcttgtctgggagattctgagctctttgttttatttatttatttaatttttttactgctccttgtggagcagggctaccccgtaggcagtgtgcccagagtagctgatgctgagcttcttgagggcagagagattctctgattcatcctggaacactcaagaccctaggcatacagtctggcatagggtgggtattagtaactgttaaatgattcagggactaagtgaatgggagtgaaaggcctgcaggagaatgtctggaaaaaaagagagatggggtgggggaagtgtgagggtgagagaggtggggataggggaaggaaggcaattgaggcaatgccgaaaccttcttttgcttaaatgaagccttgcttcatggtcagtgagagtcagaggccctaagggtgtcaaagggtagaagctctcgaaatacagaagctccagaactgctctccttaccaaaatatcaagtggtcatagacctggtgggaaatgggtgaccagtgaccatgtgaacataaccagacagcaaaatcccatgcctagaaacactgacagacatgcacaccaggacatatggccagtcacgtgctcctagagggtccccagcagctcccctatcccagagccctcggcaggcctctctgtgggcccaagccccacccggaacccctgggctgcacgctttctctctctcac

SEQ ID NO: 53472 - DNA, 1028 bp, Homo sapiens
aggagtctgggaaggccacgtggaagaaggaaccctaggttgcatcctaaaggatgaggaagagttagccaggttgtgcaactagcccctgtcctatcctttttggttgtttagcaagcccaaagcagaaacaaataggcctattgggttccaagtgactctggaactgctgaaaatgtcacctctgccccacgggcaccggccactaccctggggtctgggcaagagggtgcacagctgttcccaggacatccctgggcaccagaagaaagcatgggccacagctaaatacatatctctcccctgcccgccctacccctacctcctcaaccagggatgcctattaatcctgacaaatgatgacttacgaacatgtaatgcaaactgattcatcatacattcaaatccgctgccccgccccagcgggaggccccagccagacaagtgtattacacggataatgtatttgacgtattaataaaaccagccgcattgctctggcccggagactggggaatgccaatatacgatgacagatcacatattgatgaaatccagatgtttggaatcatagtcttggggcctcgttcatattgactgaaggtaaaaaatgccatctgtcagcatgttaactcttgctgtcccatactcagcagaggcgccaatcatagttttaagagaaggaggaagggactgagtgaggggagagtggatgagtaattaggtggtttggatggatgacaggtggatgaactggagggtagatggttgtgctatgtataagatgagtggatgggatgcttttcatgccttatgtccttgacctctcaacagcatttgaccttactgaggacagtagagtccttgcaactcttcctttcttggcttcaatgacatcacactttccttgttttcattctacctcttggctgttccttcttagtccttgatgccttaaacttcctctaactgtaaacgaaggttctgttccagacactcttcctagtgtattctctctccctaggtga

SEQ ID NO: 53473 - DNA, 1010 bp, Homo sapiens
gaggccttagcacaatgacatttgtatcaagaactcctcaaagatggccatggacacagtgggtactacttacccaaaggtggttttgaggggatggatacatggggagaaccaaaccctcactcactgagtatccccttccccattcctcggtagaagactgcatcctttttcccataattattcagaacaggaggccacccctagcccattttatagggagtgaggaatgactatggaagatttgggaatgggtggaatcagtgaaggagagtgtttggagagattagagcaaaggccaaggtgagaatctgagggactcctgcacttggtgtcaagataaggtccaggaggcagggaaggagacagaggaggaacactcagtgagttaagaggggcacaggagagcatggtatctcaggatcctaaggaagaaagtttctaaatgtatcaggtggtcagcagtcaaacagggaaagactggagaaggggcccgttgtatttagaagtctggcagtgactggtgacctctaagagggcagttttgggaaaggagccagagtgacaagtatcacttccatggggtagacccaaataccctgcaagcctttcaaaggtataggaatggatcgtgtaccttcgtttagaaaactgctcacctgcagcaagctgggagaggaggagcagagcacctagccctgccttgggtgggtataggccttggccaaggagtcaaagccccaaagagaaaggggaggctgggggtgccaggcagctgcagactcacagaggtagcgagctacactcactgagtgtggcccagcctgcagcatttaatggtgtggttcaggaaagtcagagacaagcttccaagtcggccaccacaggtgacagctgacacctgagcatggctggcagggctggggacttggacatcagtgaggcctgtgttctaaggacaaacccctggcagacacagtctacctccgtccctagctccccacatatac

SEQ ID NO: 53474 - DNA, 1063 bp, Homo sapiens
gtgtgtagtgtggaggatgggttgcagagagagaagctagagaccaaaagatgagacgggaacagctgcaaatttcgagagctcgtaagattatgtatgactggagcacaacgacaaccaaggtaggtacaaccatggaagaacaactcagggctgacttgcctttgcccagtgccatgctgggctctgggttcacccaaataattcacacacggccccaaccctgaagtggtcagtccactgataaaaacttcacaagcgatgataacggcgcagagatgaatgtactcttacacaaggcaaagctatttttcagttagacctggaaggatgagtaggagatacagaggtggagatgagaaaattagcgacctttcaatgtacactttcaggatctagaaaaggattgagtgtgagggatggagaaagtggggtccaggacgactctcaactttcttctgtgggcacacctgagtagatagtggcttcctcttatgaacagggaacccaagaggaaggcctctgtttggaggatactgagttccatgttggccatgttggccgtgtgggtatgcagtgcctatgggagctccaggggccgtgcagcagacagctgacatgttgggagtcctctgataacagaactggatggcctaggggttgggcggggatcgcccacaggcgatagggaattcggacgccttgtcccctgtaaagcacccaacgcgatgcctctgccctaagggcagccgcgagaaaggcaggcacaggaggcgggagccggggccgggcgatggggcggaaggagccccgcagcgggaggggtcgtggagtggggtggaaggacttcgcagccgctaaagattgggtgggtaggcttcacgggcggtgggagggaccccggggaggcttctgccggttgctacccgagtacaaacggcagcttcctggtctctgtccggccgcccccgccgcattgtgaactttcacccccagcgcgcgacggcggcagatcacgtgattagggccaacatggccgccgccgccgcttggagctgaagtg

SEQ ID NO: 53475 - DNA, 2017 bp, Homo sapiens
gcccggagcggccggaggagcagaggggccggcgggagggaggaagtaggtttgtttacgggctgtttggggcggagcagctttggtcgggggtccggtgctggggcgggggccaggactgcaggccgcgcctgacgctctcttttcttttcttgcatctgcccgcgatcttctcccagacctttctgcgagtacgagccaaccggcagacccgactgaatggtgagtcctgcccggcccctccctccgccccacccccggcctcctccctccctccctcactgcctgccgctcctggcttgcctgggtctcttcgactctggggcccgttggcttcttcgcagtcacggcgcctgagtatgtgcaaaccaaagctgccgctctcagtttccccgtctgtctaatggaggtatggcgcccagctcttgcccaaacctctctaaaggccctgaagaaccctgggggggcaataagtgccggagaatgaggaacgagctacacaattctactcgggagctcagctttgaatttgcaaactgctgggacctcactatacaaacctgcagggcgctgagaatgtttttcttccagtttttaatcagtgcccagtagtgtgaatacagcccctctgctgagacttgacaatacagtgagatctggagttcccacggcaacaggaactaactcatcccagggctctttgagttatcagtcggcccacatttcacaaaggtgatcagcgtgggctcgacagctcttagaggccttctctgaaagcaggccgtgtatgcactacctagcagccccccttttggattcaaacctctggagcattcctgtttgctgaatacaattgaatgatcctagctttttgtgcttactggggtgtggtatctggggggtggctgtaaggggtttagggtctctgggtcagctggtaagtgagagaggccatggagttcaagatccccagctcttatcacttggtttctgctgccaggctgagccctagtctggaaaagggagaaattcatgatgggctggcgccatgttaagcaccattctcacaacgcctctgagaagagtattacacaccttttgtgaataagaaaacaggctctgagaggtgaaagtggtttgtttaaaagtacacagctgggatgtaactgagccatgattcaattgaagtttgtttcccaccaaagcccgtgtttctccaaccatgccatgctacctccttggcaaatgctttgattcttcctactcgtacgtagcctctggatagagaacagaactttccctaccacactttggtaagcttaattcaggatttagaagatgaatgggaaggtgaaaaccaaacctgccttccttctctgagaatttgcagatgaagcccagtccattggggtgctttccagggacaacaagggatcatctgctggcctgtgtgtcctgagcaaggagcgcatccagtattgtgcctttcttgaccattccatgagattcgtttccttagtcattgaacattgtggtatcatcagcaccttcttccccagggaggcattcccttggtgtaggcatggtagggaggaagctttgtgttggcacactgctccttactacacttctagaactctcagggtcctttgctcaatgcctttctgatgtttcacgtccattctccatcccagccctggctctagagtgtcaaggctacctaagtctgagattccaagagttagggcagccaaaatgaagagttctcgatctgtgtccacaaagtcaagtgaggcactaggacacagtcatgtcacctatagtgaagacacaggaaagtgaagagatggactgggctacagaccaagtttcctcaaactccatgcccagttctggcaggatggtagctttccttttggtttgggtctttctggggttgctctgttttggagttggagtagctccctgcctcaggctcacaacaggcaggagctggagccctagcacactcactggg

SEQ ID NO: 53476 - DNA, 2595 bp, Homo sapiens
ttgggtttcttcatctgttaaaatgggataatgcaatctagcttcagcaagtggtagtaaatgagctaccttgggtaaggtacttggctgtgagcctgacacacggtagaagcttaaattgtaacatagcagctctcacctgtgttcccctcctagattgcattcatgagcttcccgttagggtcactgtccatgagaaagttcttcctggccctgctttggggaacctttccctcctttgctggctctccccactccccatcagtctggtcccagagtagccatctctgatcctgctgtggcattctggaagggactagagggaagagagtttcttgttttgaccccttcctgcttcagtgacaggagggctacagagagggattagtgagctaattagaaatgattgcattgctcagcattaattagcagtgttgtgggcttgcagtgtgcactttggaactgagccccctgtgggacaacatggcaggcagccctctgcctccagggcctgccagcccctctgtactgattagaaatgatggaacaggttcgggtgggcacaataagggctgccttctcagggttccctgagccttctgacctggctgccaaaggtctgacccagaccgtcttacctttatgactgggcctcagtctcctcttctgtgaaatgggattagtggacctcagagaaattcttcctgataagattctaggtgggatgctaggagctgtacctcagggctcttggcccaggaaccaaagaggatttagctgatgagtgaacagcaggccaagtcaggccatcggaggggttaggttctagtcaagagatgctctttagagttgtatttcctgacaccaaaagagttcatggtcttggccttctggagagatacctagcaacatggagtgtctttgctcactggatttttattaaacactgcaaatagaaaggtatgggtagaccttgcaccagctgcagccaaagagtggacttactcactggcttagttagcaccagtctcctccccaggtgctcttggcaaagcccagtccccaaaggagcaggaggtatttcaagatgagggccagatcaggcactgaataaaaaggccaatggctggcaagaggtcaggatgtgtcagctccactgggaccctgggggctgcagtgaccgtctgcttgttctgtgctttgttttcggtttccccgtgcagctcggattgggaaaatgaaacggaggaagcaagatgaagggcaggtatgtcccctgtgcaaccgccccctggcaggatcggagcaggagatgagtaggcatgtggagcattgcctttctaaggtagaggggccatcaccacccaccttccttccccgctcccttcccccgacactagctgctgactgcccctgaatctgtgggctcttggggtctccatgtggtctcagcagcttcttcccttctgaccactgctctctccttttgctttcactctcactcattccctccttgggctccagcggaaaactattgggaagaggcccaggtctttgacctctaaattggtttgcttcaaaggagccctagagctgagggcccacttggcacaccacagctggggctagagctgtgccttcgttgcagactgtggggagcaggtggggatggcctgggcccagcatgatcctgctctgctcttcacagagggaaggctcctgcatggctgaggatgatgctgtggacatcgagcatgagaacaacaaccgctttgaggagtatgagtggtgtggacagaagcggatacgggccaccactctcctggaaggtggcttccgaggtacaagcagctgacacgtagacattggcactctggtgccaggcctctgctgggtatccatctgctggaagccaagaggccgaggctggtggctggtcatccatccgttccaccacgtggggactgctgctggtggggctcctttgtgaccgtgctgcctgcctgtgatgtgcatattaaaatggatgtatttgggtggggaaatggaattgtgaggctgcaagctaggagtgacgaaggggggctctcagcttcgggtgatgcattgaaggtgacagccaagccgcgttagcacctgcataaaatattaaagggacggttatgcatttatcactccatccctcttaaggctgataaatgagaatccagcaacctgctgtacacctccagcactgggggccctgagggcttccaggcaaacacattggattttcctcctcctcctcttcagccctatgtcagggaaatcagttacagaggagagtgagttatggcaaaatttgacctcccatgagcttcattggtgaatctaattttagctctgatcccatcccttctccctgggcgccctctgccctgaagcaagaggggcctgggcccagctgctccctccttcccttgggctctccccagttgctacaaaggagtgtgcagggccctgcccatctccagtgccctcccagctccttggaagagcaaggcttgacaccccccaccaggtcagacagcagaattggttgggtgcccagggtta

SEQ ID NO: 53477 - DNA, 1347 bp, Homo sapiens
acagctggtactgcagcttgtggtcattaagtgagccaatctgcttcccgtctgcctctctctctgggcaacacctttgggaatactgctgtgtatggtccctggggaatctcacagcagctgggaagaagttctctgccttcgtggggccgtgctacctgggcagatgctgaggagtggtctctgcagggccgtccagtgcagactggttccacgaaggggctaagagcccagatgagacattatgcctctgggcgtctctcacattacccaggtgtttgggggcaagccaaaacataaatcaggaaggttagtcagaccaaacagtctccctgagccggagctggagagtgttagtttgccatttcactcatcccgtactggagccttcgagtatctgaggccctagaagagtgagcagcagggctgacgactgtcccatgagttggacacatgggtgtccgatggcagccacacagggtcagtttcaacgtgctgctctggttagctctgttggcagctgcaactgctcacatcctccattgctgtggcaccttcttaggttccttggcacagacctggacctgatggcttctgggcaccagacagggcttatggaggataaagctgcaaagggcctgctgatttgacaagagtatttcccctgtgccgggatgcacttgcacagcagtgtgaggggctcttaggccccgggcgggtatccgttttccctgagtgtttacactgtgaggttgttcctttcaagaattcctgaggggagttcaaagggggcttttctttgagcgatttggagagcgagaatgagagtgagacttgaagagggaacaggggccggaggtgcctttatctgcagagaattgctccagctttcctgatagaagctgctgccgcctcttaaacagcttagtgcagtcaaaagacaggcagacttgaaaggctgttttacagcgagatcagcgggggccacgaggcagagagcggggcgcagtggagcggaggaggctgaggctcctcagtgggggggctatcaaagggaggccctggctgatccctactgcctctgcccccaaaaccctgtctgcaaaagctggccatctgtcagcctaccctccctggccaggactgataggccctaactcttggggggttgggtgtggcctcgccaggcgggctggtgtcagtgcagcgcattgatcgcccgccgggcgggccgggctgcaagccgggcagcgcgtgcttaatgtgattgaaaggcagttaaaatggcggtgaccttttcaggaggaattagattgcctgccaagaccggttagagggagtgataac

SEQ ID NO: 53478 - DNA, 1979 bp, Homo sapiens
ggattgatattttaggacaaaataaagaagcagacagagcaggtgagcactgaggtaggtcccactggaaacagatttttgaaaagactaaaggaaataggtattacttcaagaaagtaagttggaaggaatttttgctgcctaggaggcactctgaccttcccaattctagaagaaatacttaagctgtgtgtctaagttgttgattgtcctttcagaaccatagattttctaacctgctactgctctttacataaaggacagcacacagagcctagtgcgccaccaacattccactaaaagagatccgcagttagggagaaaagatgtttttcttgggtaccatgccaaacctgggcagagcaaggggcttctaggctagagaagcagactacaggggaacctaactatacagcccttaagacaagcctgcttccacctgtagtctaaggaggtgtgtgactaaggagccatgcctttcctctcctgtcctccatccagctcctggatcctggagaagagacctatagtggtgaaccatggtccctcctgtgtgttggttgccagtgagagttcacccaactgcattggggagcccagagctcctcacatctggaagggacatgctggaaagaggacatgggaatgattggtttcaaataaggtggcaatgatgtgggcacaagagtggtgagatggagaaatttcccaggaagcttcacaggaaatggaagcctgcagctgtatctttaagccctggcggtgactgcgttgctaaaatccagcatgaagcccctctgaaccaaacaggaggagtgggtagggaaaagaagggtgttaagacagtcagcagtgcagggtctttgtcctgctcaggtcctggcctgaagcgtttcttatctttcatgagttccttacatttaagccggttccaagtagctggatgagaagtcatgaagcaaacaggcagagcagctgtggcacaaatcttttctcttcttttcttttcttttcctttttatttatttatttttgagacagagtctcactttttcacccaggctggaggctagagtgcagtggcacgatttcggctcactgcaacctccacctcctgggttcgagagattctcctgcctcagcctcccgagtagctgggattacaggcatgtgccactacaaccagctaatttttgtatttttagtagagacggggtttcaccatgttggccaggctggtcttgaactcctgacctcaggtgatccacccacctcggcctcccaaagtgctgggattacaggtatgagccaccacacccggcctggcacaaatcttttatctggctatttcttgataaaacttcagcgccagaagtatggggcaagggggtaagaggtgttgtaagccccagggcatgggcacataggccttgccctagctgctgccttctttggtgtgctagttctcaaaagaagggagccccaggtgctaaaaatgtcccccagtgcagctctgctgttggtccagccagtgacaggtgttggaacagcacactgctggaggcggtcttggagtggagagggttgggctgctgccttgtgactccctaccatctttagttctctctgtcgcctgttgggaggggtgaggagaggtggcaaggagcaaggcaccttctgtcccccgtggcaactgatgggatttaatcgccttttggaacacaattgttaagctaggacagagggagtgcaggcagaaggagcaagtatcaatggttttaaacggcgtctgtctctctgcgtctctcctgacgtgaggcagtgaaacgcgttatcgaggaggcccggaaagtggctaagtgcgtttgacacacgccaactccctgcctccacactggataattgcattgtcaactgttcagcgaggtggcaggtgacactgcaggccgattgattgtcccgcatcgcagctccccaga

SEQ ID NO: 53479 - DNA, 1711 bp, Homo sapiens
tcatctgatcaattgattaaattaacactgattttttttttctcccttctcaataacccaggaagaaatgagtttatgggagaagggtcgtttttataaaacgtagacctgtgtttcatttctgcacttaactctctccctctttgttgctcagttttcactgtgaggagaaggatatttttttttgcactacccaccccgccaggaatggacaactctggcaccaccctgctgggtatcattgaccatcaggcttaggttgcctatgggtgggggctcaggcctttatgccactttaagctggggcagaactgtagcaagaggccctccctggtgactgaagggtactctgggccatcttggaggtcctgggggctgagttccttccctagatagcagtagtaggagtggcagcttgcctgttatcgctggagctacatggaagaggagccagagacttggaaaggagctgtctgtgccatcttgcctctgagtactggcttgggatattccagcagctgagaacatcaaacgactgtggagccttcctctccaagcgggagggggggcaagctggcgggggcgctgtctgcataaaacggctttatggccgtttctttttattatgattctgccagaagtcagcaagtgacatttcattaagaaaataaagtttaatgtgctgggaaagaggttggagcaggctggggcagcacaagagtgaaattggcagcagcagcctgttctgaacacctgtgggggtagggagaggttcccaacatctgtctcagctggaggatggggtcagggtcagagtgaatggctcagaccagaggcagaggccttttctttggcaaacaaagtgtgtcgtgctgtccatcctgcctcactggccagcggaacagaaagctgctgcccggctgggagctgggatctgataaggaaagttgtatcctgagagatttctctaggccaccagctaactaggacctaatagagcagtgtcgccagtgtttagccagtactgctggggtgtgctgtgtggcaccagccatcagcctggccagctctgctgggtgatgctgagatcacaacagtgagtcaaacttgggacccttgcagcttccactctggtgagggacagtgacaataggtggtaataaatatgattttggagttacacaggattctgggtggacaccagggaagggacacctgtgtataagaacgtgggaagccccatctgccacgcagagcaccatgaggatagggatcagatcttgaagctctctattctcaacatggagccaaacagaggatgagcccaataaaggttgaaagaatggcattgaggtgagagttctttcctttagcagggatttagagagcagctgctctgtgtgggcactgtgagttaatggtaggaggcatggttgggctgagtcagacttgccaaaggagcaggcatgtatattgtagaccaggagggagaaggttctaggcagagagcaggaggtgcggaggcatgggggcatgagaaagcacaggatttgggagaccacagtagctctgtttaatggagtatgagtcctgggccaggcatggtgggcagtaagactacagagaaaaggacttcaggctacagggctgctttctgcgttgagaagctggggcttttcctggcagctttggggtaccctgttttctctgc

SEQ ID NO: 53480 - DNA, 1979 bp, Homo sapiens
tgatggtggagtttgtctcccaaactgtcagagggtttatggaggtgccactcacccacaaggcgggaattgcttgtcaggacacctggccgtgtacaggagacagagctgtaacttggtgttttctcagcttaatggccctgctgctgacctgacctgcctgctgcctcaagtgtgtcagtgcctcagggtagagggcaaatgaggactgtcagggagaggtggattgcaggctgtgcctggcatctttccttcccgatgctgcttgcctttgggattggtggtgtctttgtgagaccagagactggtggggtagaagggagaaggatcaagactcagtgtttttcagggcttgaaaaatggagaacattccagatggagtgaatagcatgagcaggggtcttaagagcagcatatacaggctatgtttgtggtttggtgagcagcctgtgtgtgcacatgcttggggtttacagagtgaattagtagagagcaagagtaaagacataaatggacccagatcttcatggatctggctgaggagcctgggcttggttgtgcatgcagtggggagccatcaatggttttggagcaggaggaaaggtggtcagaactcagtggtaagcagaatgaaggaacagataagaggcctgaggactccctacaagacataccctaatgagagtataaggacctgagaggaaagagtggacaagcagaaatgtctgaaatcatcaggcagatactaagctgcttcctcacttctttaaggatttccttgctgatcccagtagccacagagtctcacattcttttgtccctggcagggctgtgctggctagtgaggtgtggtctgagacccactaggaggaagtggggagctggggggaacagctctatagcacttgaccctaggctatcaggaagggtggtcctggatgtcagagagatcgcctggcaggtgagcaggcctggtgtagccccagcagctcgcccctccctctgagctgagagtccgtctgtggctgtgccagatgcacctcaggggtcagccacttgcgtggcccatggcctggcctccgctcagcctggttgccttcatggactgctttgagaagtaggtgtgcatgcctgtcctccctcgtctgtcccttcttaatccctttataactgcacttgtccaggaatctgggctgagtgaggtggagatgaataattaatgtcaggcgcttcagacaccaaatatttgaacagctgcctggtgtttttgctggcaaggacctagcggccaaaatcaggatgttggccgggggtcccactctgtggctctgattggccttagccagcctgttctctcctctgatggacttgtcaggctggataatggggcataggggaggccccactcttttcctgtgaaattcctagacctgaatttttctgtcctcttactgttcttcctagacctggaagataggtggacagcaggcctgggctgagtgtccccgaggacgtgacataatatatgaatgggctagtttatgagcagagaccacttggagcagcatgcagtagcagagaaagatgaggtttgcagagtgaagggcctgaaatgtcagggtcaggggcactgaagtatctggctctatacatcccaggcccaggtttccctctgggccttatcaggtccaaagcctaacccctacctggaggcaacaggaggggcacccttggcctcgtcttgtccccaggccctcctcacaccctgcttcccacaggctctggcttcatcatgtgcagcggcaaagagaacccggacagtgatgctgacttggatgtggatggggatgacactctggagtatgggaagccacagtatccttggagcactatgggggctggtggggctgatagggcaggcacagggaataagaaaagtagctcttctagtattcacctgcaccaccccccgggccaga

SEQ ID NO: 53481 - DNA, 1017 bp, Homo sapiens
caaccctcatagcctgctgcaaactaggatccattgtccttgaccaccatgccagatacacagaggctgatgtcatcccctgcacaggcgaggagcctggtgaagccaaggagagagaggcacttcggggcgcagtcctaaagcaagtgtgggcacaggcttgggcgggtggagcagagaaacaggaagccctgaggcaggggttaacgcagtactgaccctcagggctgtcctgcccgccttcaggcctcactttgtttttcctccctcctttcctccagtggcggccctcccagcacgcgcatcacacctgagttctctaaatgggccagtgatggtaagtcctgccccaggttaggagtaatgggggagagggggtatccctagatggtggtgactgactcaagcccaacccctcacctgtgctgcccagtctggccggagtgtgagttgcccctctgtcccagcagagatgccatccaccagcaatggtgaaagcagcaagcaggaggccatgcagaagacctgcaagaacagcgacatcgagaagtaagtgtttggccaggagagagccctgggaccacagttcagtgggaggaggggccctttgctagcaggaaggcctgctgccagggcttctggccctcccaagtgcagctcagtgctgctgccctgggcacacggccggcagtggagcccagctggtgctaagcgtgactctgtgaattgatcactgggccacggccccagaagccttggcggtgggaggagcagtccacccgcctgcctgcctgcctgcccgcctgctgcggcggccttcgcccggggaatgtgatgtatggccgcccagcccagccggcacacttgattcatctccagtttctgtttcttaatcgggagctaaattggtttcatttttcttgtcccgggtggcactcgcagtggattttaggcaggaacattgggtatcatcacttctggtaggaatttttggcctgggttctctggcagaggaaa

SEQ ID NO: 53482 - DNA, 1030 bp, Homo sapiens
tctagttctctgatttggggtttgggagttagttctccattctggtgtaggctgcccccagctgcaggccttagtttccccatctttgacataactatataggactaggcaaattctcagcttagtccttggagtggaagggagcacagctacaaatccttgtctccttatcaggaatttacctgtaatccagatggggatggcacatatggcattgtgcaaaatgccagggaaggagcctgctgttcggaggcttgtgaggagggaagggatggtaaaggcttccagagccagagagctaaatggaagcccccagggaatcagccagtaccaggaggaaagagtcagagcctttcttggcatccctggaaagaggcaaggcagagggaatcatggaccctagggtgatggatttaagtgtccctgatacaaggacacagccactaaggagtcacgctctgtgttgctgctagctccccaaaggaaaaaggccagagattgaagttgtattgcccatgaaatgggaccactaccctccctgcactcccattaccactcacatccagcaatgacaggccacctgtaagctctcaagcttcctgagccaattgtctcccctaaactgcagaacaggtgcccccaggagactgtccttgcccaaagtccacgtcccttatgattcccccgcctcagtccagcctctgcttcctgattgagtacatctgtgaaacctgagctgttcgtacccccactcttccagcatcctcagcagcttcctgctgtccacgagataaacttcagctccttcaggtgtggcatttgaggtcctcttgcatgccatctcctttcttactgtagcactttgcctacatgtgggccttctagccagactgggctcttgggcctcttggcctctgtttctgctgttcccttggcctggagccccacctcctcctgggtgtagccagtatagtcatggtcaatcacacagttattagttgatcatggaatcagtctgccaggtttgaat

SEQ ID NO: 53483 - DNA, 1123 bp, Homo sapiens
ctggaccaaggagtgtagtggagctctctactccaagggggacattggaatgttggaagtcacaccacgagagatttgctttgagaacataaattcctctaggcgctgggagagtggaatagagatgaggggcctggaggcagaaaggctgtctggaaaaagttagtggtggaattggtggaagacatctgagagcctggactcatggtggtgaggagagatgccggagatactaggagagatgacagatttgggtggttgggaagactgcgaaggagtggttgaaaatggttccctggtatctggtgtagaaattcatccgaatgggaatggaggaatagagagggtgaggagtttagttctggaatgtggaatttgcagattcaggttatcagagaaagggggcaggcagggatgcctaggggacatttatgtatttggttctggaattcaagggaggcgtaggctggaggtacagatgagagatgccagcctgctacccaaccatgccttcctttttacagaatcaccgaagattcagctgtgaccacgtttgaggctctgaaggctcgggtcagagaacttgaacggcagctatctcgtggggaccgttacaaatgcctcatctgcatggtgagtagaaaagaacctaggggtgcccttggtcaggcttccacgccctctgggggagttggagagggtgggcctacctcagagtgaccccttctctgccccctcctccctaggactcgtactcgatgcccctaacgtccatccagtgttggcacgtgcactgcgaggagtgctggctgcggaccctggtgaggtggcatgggggtcggggaatgggaggccgctccgggcactgcccagatgtctgtgcttatgcctgagcctgcctgggggaagtggggagcatggcgcaaaggagaacagagccaggagccaggatatttacccgcaggatatttacccccaggctcgctgcctctcctccccaactgcaggtttaggaacttctccccctccatgagttcactgcattctcccttccccgccccggtccccgaaggcccactgcatcacacagactggtgaggcctggggtcaggaggaggctggc

SEQ ID NO: 53484 - DNA, 1403 bp, Homo sapiens
gtaatctcgttagggctgcggctgccacagctggacccagccttgttctcattactggggctcctgctgcggggctggccaggcggtttgatcctggcgtccccccaacacaggagcgtgcctgcctgctcacagaagctgcctatgcgtccccagcctgggctgacaggaccaaggtctcagcacacactggtgcagagagacatggctgcaggcccaggtgctcacatgcgcacacatggctcattgtgtagaccagagccctccctgttctccctgcagggtgccaagaagctctgccctcagtgcaacacgatcacagcgcccggagacctgcggaggatctacttgtgagctatctgccccaggcaggcctcgcctccagcagccccacctgcccccagcctctgtgacagtgaccgtctccctttgtacatacttgcacacaggttccccatgtacatacatgcacatactcaaacatgcgtacacacacacacatttacacacgcaggactctggagccagagtagaggctgtggcccaggcactacctgctggctcccacctatggtttgggggccatacctgttccagctctgttcccagggtggggcagggaggtgggggttgggggagtagtggggcacggctcctaagatccagcccccatactgacagacggacagacagacatgcaaacaccagactgaagcacatgtaatatagaccgtgtatgtttacaatgttgtgtataaatgggacaactcctcgccctctacctgtcccctccccctttggttgtatgattttcttcttttttaagaacccctggaagcagcgcctccttcagggttggctgggagctcggcccatccacctcttggggtacctgcctctctctctcctgtggtgtcccttccctctcccatgtgctcggtgttcagtggtgtatatttcttctcccagacatggggcacacgccccaagggacatgatcctctccttagtcttagctcatggggctctttataaggagttggggggtagaggcaggaaatgggaaccgagctgaagcagaggctgagttagggggctagaggacagtgctcctggccacccagcctctgctgagaaccattcctgggattagagctgcctttcccagggaaaaagtgtcgtctccccgaccctcccgtgggccctgtggtgtgatgctgtgtctgtatattctatacaaaggtacttgtcctttccctttgtaaactacatttgacatggattaaaccagtataaacagttgctgcctgtgtgttatgtgtgtggggtggtgggggagctaactaggggaggtgggctgaggcagttaaggggttaattcctggtggcaggatgggggaaag

SEQ ID NO: 53485 - DNA, 1042 bp, Homo sapiens
gatccgtccgcctcggcctcccaaagtgctgggattacaggcgtgagccaccgcgcccagccgattttttttttaaccatttaaaaatgtgaaaattagtttagctcgcaggccatacaaaaataggcagtgggctcagtttggccccggggttgtagttcgctgagccctggatcagaagaggaaagggcgtggacaaggtatttactttcctcacttgggctgtcttcgagtctctaaagaaaggtgcccttgtgttggtttgtccggtgaccccatggtgcctcctgcagaaaggcagctggagcagcacggggtgggaactggtgcatgcgtgctggcaggatgcctgggcctggcacccgttgttccctgcctgcagcagccggagtgctgctgactctggattgggcagtcacccccgcccccaccccagctctggtgttgacagtccacatctgtgtttcagagaacagccccagcccaggtgggaaggaggcagaaactcggcagcctgtggtgattctcttgggctggggtggctgcaaggacaagaaccttgccaagtacagtgccatctaccacaaaagggtgagtactctggtgccctctcccctgggctgccgtgagggctgaccacctttgaggcaggactgggaatggctttaagaacagcctctagagttcgagaccagcctggccaacatggtcaaaccctgtctctactaaaaatacaaaaattagccggcctggtggcacgtgcctgtaatcccagctacttgggaggctgaggcaggagaatcgcttgagcccaggaggtggaggttgcatgagcagagattgtgccattgcactccagcctgggtgacagggtgagattccgtctcaaaaaaaaaaaaaaaaaaaaaagcctgtgaggaaggccatggggttatagggacttggtgggattatccccacttggctgccagctctgtggcctggcgtgacccctttggtctcctgatggcttccccttccttcctccctgcattccacaatg

SEQ ID NO: 53486 - DNA, 1053 bp, Homo sapiens
cctctagataagagccctttctggctgggcgtggtgggtcacacctgtaaccccagcactttgggaggccgaggttggcggatcacctgaggtcaggagttcgagactagcctgaccaatatggagaaaccccatctctactaaaaatacaaaattagccgggtgtggtggcgcatgcctataatctcagctactcaggaggctgaggcaggagaatcgcttgaacctgggaggcggaggttgcagtgagccgagattgtgccattgcactccagcctaggtaacgagagcgaaactccgtctcaaaaaaaaaaaaaaaaaataggatgctttctaagtgtctgctctatgccaggtgctggtgctgtactagaccctggatttgagatccaggcctctttgcaggcctccttttctctgaatgtctgtggtacttaacactgttaaccatgttctatccacatgccaggcccaccaggagctcctttcattattttattaatcctcacaaccaccttgtgaagtagggagaacccttaatcctgttttacagatgaagaacagatgctcgtggggaggtaaagtgtcttgcccaaagtaattccagatttcagcttaagagccttactccagagcttgtgcatgccgagatttcagttgccattaggaggggctgcctgaatacgatgccatttctaggaaacaattagggacatgcacaaagaaaggggtgtccattaaagtatttttataacagcaaaaaattggaaacagcatcatatccaataatgggagatttggtcaccataaattatgaaacattctatagcctctctgaagccactaaaaataatggtgtagaaatatataaactgacagggaaaaatgttcacaatatattgccaaacggaagaaagcagattacaaacaatatgattccaattttattagatattcattttctactttttctacagtgagtatgcattacttgtgaagtaataataatttcaatttattgaactctttccttctgccaggcaccatgataag

SEQ ID NO: 53487 - DNA, 1032 bp, Homo sapiens
gagccagagtatggaatgagggttgggtccaggcgcggggaggtgacctcatgaacctgtgggttgcgagcgcagctgtagccccgcccctcatgcggccccgccctccctcgggccgccccctcatagggtctggcaggtcctagacttagagaggctcagagagccccgcccctcgtaagtcccgccccagagtgttcctccctggcgagccccgcctctgcccgagtcagctgctcgcttgggacctctttttctgtctttcctgtccggggtgctcaggtccatgccctttaatcacttctcatagctgaaggctgccgaaagctggatccctcctgattcctttgtttgggattgggcttcccacatctagcctatcacttattattttcccgaaggcgtggagggggaggctcgcggggtcaccgatcctcgcagaagcccgggactcagaacccttagccgtccctctccactcttctcggcagtggttaacagtgcagtctctgccgtcgggtagaactcgactgaaatcctgactccttcctttaggagctggattacctttggtaagctaccttctctgaacttcagtttcctcctctgcaaaaccgggataaggatagtaaccttcctcatagggctgttggggccatctggagattgtgtaaagggcctggcatggagtgagttcagtaattggcatttacgatcagcattgtttctctccttacattaaagaaagacatgtaggattctccacaaaattaggattgacagcaggcccgcatccatgacagtgtgagtagatcggggtccagagagtggaaagtttggtctctctgggaattctggcagaagggccttgaagtatgatcagcctgaggccagcgtgtccctcacttgcattagtccagcatcgccttcacgcctcctgtctcactgcctgcagcccagcctcttaaactgctaccacagtgatctttctaatgcaaaggtttgatcttatactctgctctccataaaact

SEQ ID NO: 53488 - DNA, 1050 bp, Homo sapiens
aatgtttctgaaggccctcagatgaggaacatttcatgctgactgtctagtaagcaagcccatcacatgctcacatggcgtgatggccagaggggctgcagggcacaattggtctgctctctcctatcctcccccaagttgtacgtatttggagggcagggactgcagtacagtccccttatttgggttcattgcttctgggaagcccgatctgctgtgcctcctaaaatgtggaactggccctagttccagttcctagcgtgctttggcgtatgcttaggcccctctgccaatctcttccccagtgctttgtacctggcttctcaacccagagccagggcagggactttgacaactatgaagggtggtgagcaaagagctgttgctgctgccgcataggggtctgagagcacttatatcttaacagtctgccctttttcactctcgtctcaaaccaggagtatgacagtagttttccaaactgggaatttgcccgaatgattaaagaatttcgggctactttggaatgtcatccacttactatgactgatcctgtaagtacatccaaagaacttctctttcttaagtgtacaattgagagacagaaaacttctctttacaggaatgagggcatgcaggaatctttactcacctttgagggttttattattatttttttttgagatggggtctcactctgtcacccaggctggagtgcagtggtacgatcttggatcactgcaacctccacttccctgggcttgagtgatcctccccacctcatcctcccaggtagctgggaccatagatgcattccaccgcaccctactgattttttgtatttttggtagagacagggtttcaccatgttgcccaggccaatctggaacttctgggttcaaggaatccgcctaccttgacttcccaaagtgctgggattacaggtgtaagctactgtgcctggctgaggttattttattttacttttttttgagacagagtctcgctctgtcgcccaggctggagtgcaatggcatggtcttggctcac

SEQ ID NO: 53489 - DNA, 1304 bp, Homo sapiens
cagtagctgggattacaggcatgtgccaccacgcctaggtaatttttgtatttttagtagagatggggttttaccatgttggtcaggctggtgtcgaactcctgacctcgtgatctgcccacctcagcctcccaaagtgctgggattacaggcgtgagccaccatgcccagccgaggttattttttaatatcctttggtgggctgaagctagtgaggcccacatggggaggggtctgatctttataaactgggttccacccccataccataggttggctagattcctgcattagtaaaaatcatgaaagtagtgctgaaactcttgtaggcagcagagtgagaaaaatgggaacaaaatccagtgctcccttcttgtgctctggagtatctaatggaggatgcaggggtcctagtgttagatcttggcctctgactgggccagacatgggattggaaggggtgggagttctggacaagctcgcttttgaaattgctctgaccctttgctgttggttgcctcctctcatccgcttgcagatcgaagagcacagaatatgtgtctgtgttaggaaacgcccactgaataagcaaggtaagtcctgttcagtcaggaagaggcttcagactgactaatgggccttctgtttccagggagcaccccctgaaatactctccttctgcagaattggccaagaaagaaattgatgtgatttccattcctagcaagtgtctcctcttggtacatgaacccaagttgaaagtggacttaacaaagtatctggagaaccaagcattctgctttgactttgcatttgatgaaacagcttcgaatgaagttgtctacaggttagtcccttgcatccatttttccctccttgtgcccttccatcccctttttttgtgggacatcgtggtaacactactcacagacgtgctgaattctgaggctcttcctcgcttcttgtgttttctttgggtcacaccctttggcagcttagtggcccatccttgagtggatactgaatgaggtatcacccgttacgtgctgaggcagggctggccaggctccaggggttcttctgtgccttatgcagccacaccattgcccactggggttcacagatttggggaactccagatctgctctatctgctttttttttttttttttttttttttgagacggagttttgctcttgttgcccagactggaatgcaggggcacaatctcggctcactgcaacctccgcctcccaggttccagcgattctcttgcctcagcctcccacatagctgggattaca

SEQ ID NO: 53490 - DNA, 1064 bp, Homo sapiens
cagactctcactaaccccatatgtaccgctaccctttcttccagatgtcatcaaggccttgcgcctggccatgcagctggaagagcaggctagcagacaaataagcagcaagaaacggccccagtgacgactgcaaataaaaatctgtttggtttgacacccagcctcttccctggccctccccagagaactttgggtacctggtgggtctaggcagggtctgagctgggacaggttctggtaaatgccaagtatgggggcatctgggcccagggcagctggggagggggtcagagtgacatgggacactccttttctgttcctcagttgtcgccctcacgagaggaaggagctcttagttacccttttgtgttgcccttctttccatcaaggggaatgttctcagcatagagctttctccgcagcatcctgcctgcgtggactggctgctaatggagagctccctggggttgtcctggctctggggagagagacggagcctttagtacagctatctgctggctctaaaccttctacgcctttgggccgagcactgaatgtcttgtactttaaaaaaatgtttctgagacctctttctactttactgtctccctagagatcctagaggatccctactgttttctgttttatgtgtttatacattgtatgtaacaataaagagaaaaaataaatcagctgtttaagtgtgtggaaagggcctgggatgtgtctgagccttttgggactaaggacatgactgtacctttggcctctgggtagtactgattctgtactccttccaggaggccatatccacacctacaattccaatgacaagctgaagactcctgtgacttgtttgatgtctatgagatgcttactaggcctgggaacagaaactcttaagtagaaggaagatggccgccgggcacggtggcccacgcctataatcccagcactttggaaggccaaggcgggcagatcgcaaggtcaggaattcaagaccagcctggccaacatggtgaaaccccatctctactaaaaatacaaaaattagctgggca

SEQ ID NO: 53491 - DNA, 3892 bp, Homo sapiens
cgcagacccccttcccccagcccagggtcggaggcgagtcgccgggggtcggcagaggtcagcagcctgcgagaccctcctaggctcgtggccctaggcgcggcagctgacacgtaagtctcgtcgcccgacgttgtttcggcgctcagaaacaacgtaaagtaaaggggcggggcagcgttttacaaaccgaaccgtgaatctttgcggtttctctttccagccagcgccgagcgatgggtgagtgtcgctctgcattgaggcgggtgaagggaggttgagctcaatcaggccccatcctgcttcacagcctactgaggagtccagacgccccgacccccggccagggacagccacgaggagtggtggccctcgggtttcggccgcccagcccgtctctgggggctgcgaaggctctgggctccgggttccgggccgcgggctgcgggctccgagcggcgccaacatggctgccgcgaggaggaggccccggcctggccgcacgtgtatgatgacaactcggtaatgctgcatactcccgagtgcgcggtggggaagccaaccttggagagctgagcgtgcgaccggcccggcgcgggggtctccgggagctggcgagtcgctagcaccgagtcacagtggctcaagcttccttccccgcttccacatgcaggcatctctcgggacaactggcacaagcgccgcaaaaccgggggcaagagaaagccctaccacaagaagcggaagtatgagttggggcgcccagctgccaacaccaaggtgggtgcgagcgtgggcctgtccgcctgggaggtcgccttcccccgctctccagcgtgctcgggtctttccgtgtgacagttgtgcgttctttcttgggctctgatttctctgtagtagggcctgggtgtcctgtccccctttagctgttggataagtaagtaccaaagagggaatgctccctcaggcccccaaacctggagcttaggatttcagagagaaggatactgtgtggggacttgagcttctggagagggtggcgcctcgcgtcatagtcagaagcctagtcttgttttttttacagaggcttaattttcagcatttggggtcaggctttcctcttggaggcaagtagggtgatgaaaaagaatccttaggcgtggttgtggccgtcttggtcacctgtgtgccacttgccaatgcaaggacttgtcatagttacactgactgttgcctcctcccggcccaggttcctctccctcacttgccttgctctccttggtaacctagttcctgtaaccttgtgttttccagattggcccccgccgcatccacacagtccgtgtgcggggaggtaacaagaaataccgtgccctgaggttggacgtggggaatttctcctggggctcagagtgtgagtgaggccctttgggagtgggtgggaaaacgcacctaaacggtcttaagattcaccaagtgggcctggcgcggtggctcacgcctataagcccagcacgttgggaggccgaggcgggcggatcacctgaggtcaggagttcgagtccagcctgggcaacagagcgagactctcagtaaaaaaaaagattcaagtgcttttagcaagtagtctgtggcttagaccaaggcatttgaagtttctccttgctgaaagatcttaaggtagctggggagttctctccacccaggctgtcctgctccaatctctttttttgagattgggtctctgttgctcaggctggagtgccagtggcgtgatcttggttcactgcagcctccgcctcctgggttgaagtgattctcctgcctcagcctcccaagaagctgggattacaggcgtgtgccatcacacccggctgcttctgtatttttagtagagacggggtttcaccatgttggccaggctggtctcaaattcttggctttaagtgatccacccgccttgacctcccaaagtgctggggttacgggcgtgagtcaccgtgcccgacctgctctgatctttctgaactctgcagcctgagagattggggctggtaaagactgcgggttgccaaacataactagaaacgtgggttagggggttgtggaagacgaactgatgccccatggcttgtaaaggctgagagttcccttatttctccttaaggcctcatggggctgaagaacctggaggagtgtgccagggccatttgtcctccagtttacttgatgccaaatttctcctgtgagcaggttgtactcgtaaaacaaggatcatcgatgttgtctacaatgcatctaataacgagctggttcgtaccaagaccctggtgaagaattgcatcgtgctcatcgacagcacaccgtaccgacagtggtacgagtcccactatgcgctgcccctgggccgcaagaagggagccaagctggtgcgtgttacttccctgtaggggttgtggggagggcagcctgactccagccttctcgtgatgaaaactctgtccagttctgctactgaagggagagagatgagagccttttaggctgaggaaggccagcactggggtgtgcagggttcgagaaagctcccagggcctgccttccttccctgagctcatatatttgtatccccttttcagactcctgaggaagaagagattttaaacaaaaaacgatctaaaaaaattcagaagaaatatgatgaaaggaaaaagaatgccaaaatcagcagtctcctggaggagcagttccagcagggcaagcttcttggtgagaaggctgttgtgttggaggtggggagtcgcagagattgagtgtgccgaggcacttttcccttgtctcagttcctttgactgccagccatgcagtctaaagggttcactgataacaggctgcgagcacaaaggggaacgtttggtcaccctattcgtatgaagctgaaatgggaagcattgggtagaagagtctgcataggcccgtgcttggagtctttgtatttggggaagtctctgcccaggctgagggggctgtctcagtgatgaaaactttgtccagttctgctactgacagtaagtgaagataaagtgtgtctgaggagacagctggcttcatgcttgcccccagggtacctgaacccacagagattcttaagcgggtggagaggtttgggtagggccaccttgtcgttgtgctaaggatcacctactctcttgcagcgtgcatcgcttcaaggccgggacagtgtggccgagcagatggctatgtgctagagggcaaagagttggagttctatcttaggaaaatcaaggcccgcaaaggcaaataaatccttgttttgtcttcacccatgtaataaaggtgtttattgttttgttcccacatttatgttgcctgaatatatgactgttttctctgctttatttccttgccctgcaaaactgatctgggtgggtggctgcaaccccttgccttaacctctgcctcctactgtcctgagccaggctcaccacactgtaaagtccctgttctcaactccatgtccctgaaggccagatttattatgtgggctatgtctatagtgggaacatttctcaccacattttggtggggatagggatgtggcagaggctatgagggggtatcccaaccttggggttcagtaatattgtgctggctgagtcatgattagaatctcaggctatattgcttataaaaaattttaaggatcttgtacccattgtaagattaacagtgatttctgccttgcttggtctccaagggtcacttctttgacttaaacttgccctgtcaaacacttatctttagtcctgacctgcctgacatctgcacttggattttttttttttttctttttttgagacagtctctgtca

SEQ ID NO: 53492 - DNA, 1062 bp, Homo sapiens
actgcttcccaggagggtggggaaggggttgtcacctctgtccagctcccctgcagtgcccagggtgggcttgtgaggccagcaggtgtcttgtgccttgctggaagtgagggtccggcaagtgatagggccctgccctctggaagtcctggacccagcacccagctcctgtgcctgctgggcctgctctggctgaccaggaaggctctgccaccgtgttgagtaattctttttttttttttttttttttttagcagagtctcgctacattgcccaggctggactggaactcctgggctcaagcgatcctctcacctcagcctctcgagtagctgagactgcaggtgtgtcaccacaccatctgttgggtaattctgaccctcggagctgtcaacccaacccagaggtcagggaacacagtaagggggacacagggaaaactagaagggagccttacccaatacaaaggacaagggaatgaggtctgctgagcggttgcagtaccgggccacctgagcatacacgtacctctgctcctgggtcagcagcagcctggggaaggcaggtgtaggcttgggttagagggaggtgggtggcccagtctccccacttgcgccagctctaagaccctgcccttaccggtaggtgatgctaagcacagcgtacaaggccccaaagaggaggaattccttgtagaggagcttgtagatgcttcccctccagcggagaagcaggccagagaaacctccgaagcgggcctccgccactttgagagtgtatgaaaccgtcatggtgctgggagcctggggcaggaggtcacaagagttgcccccagggctgtcgtttagttctccagacaacctcccttccactctggtctcacacaccccagccttcaccctgcgtcagtggacaagggggtaggagcctgcagagcagaaaagtacaccccaccccctgcagaactgagcagtacatgggcaaagccaggctagagttggacaaggtagaactgagatctgtgtcccttcatgcatgaggtttcctcaagctcctcttcag

SEQ ID NO: 53493 - DNA, 1106 bp, Homo sapiens
ctgacccatctatgggggcgaggattttccctgttgagtgggggtttccccggcctggctaaccggatcctgaccctgtgtgcctgtggaggagggaagggttaggagggcaaggagtttgaactctgaacctagggcaggctcagcttcgggggctaagaccctcgtatggcgcttaatgcccctctaagggctgaagttttccctgggcctgcccgggagatgggtggagtctcttctcaggccagctccagtttccatggaaacccacaggcttcccaccccgtcggctgcctgggcagactcccagccagggcctctttcgccgccgccgccgccgccagccagccagcttcttcccaggaccataggccactccagcctcagcttctcctggccccctccctgtgtctgttcctgtccccgagcctctggcctctgatgccttcaggagcttgggcctctcctgctccactcctaaacttcagcttctcagcaaacaggcctcccaagtccctgcttctccctctcaggccttgctaacctcaccagctctagggcctggccaggcctcccaggctccctcctccaccccaaccccttctcactcatggagcccttgggactggtcgtgcatgggaaagctgaacctttttccgcagcactccgaagccttgtcaacaacccgcgatacaggtgaggggtgggccctgcctgcgggtttttcttagctggctctgtgggccccaggactctaaggaggccctggtgagaagaggctgggaattagaacttggccatcctccctggtgaacttaggctatggggaggtcaaatgtggaacatggctactggtcactcagtgtctgtgagaccctgagggccagaggcaaggctggcggggtggagctgctgtgtgagctcaggcaaagcccttccttctttggactttggcccctggcagaagaaaatgattctcagcccctgggatccttagagatggtgggtcatgattcccctcctccctccactcactcagcttggtattgaggcctcactgctagaagaagaggaacagatgacctgttctgggaactgaggcttca

SEQ ID NO: 53494 - DNA, 2303 bp, Homo sapiens
ggccgggcgcagtggctcacgcctgtaatcccagcactttgggaagctgaagcaggtggatcacttgagcccagaagttccagaccagcctgggcaacatggtgacaccccatctctactaaaagcacaaaaattagccaggcatggtggcacacacctgttaattgcagctacttgagaggctgaggcacaagaatcgcttgaacctgggaggcagaggttgcagtgagctgaaatcgtgccactgcattccagcctgggtgacagagcaagacttgccctcaaaaaaaaaaaaaaaaaaagaaagtgtgatagagaagcgtgaatggtgccgagactgtatggggggactctccagtcccgccactagggagaggagaagacttcccagaggaggaaacatttgtgttcgatctggtagaacaaataggattttgttcctaggggaagtgggaagatggtattctagtcacagaggcaccaaaggagctagtgagacatttggtgtgtctgaactgtgaggagagggcaagacgagactgcagaggacgccagggcctggttcatgtagggccctcaagcttttggacttcttttaagcagagggcagtggagattcactgaaggtttccgataagggagtgaagaattggaaactcaggggagaagggattggaagaggtggagaggactcgctagtccagtcaggaggctagtgcagcagtcaagagatgagagatgtcacggatgaaattcaagtttctgctaaaaatagaagtatccttgagtcaggaagggaacaagtggaggaagataagcatcctgaaagaaggggagaattttgcatggcctttatctggttttgattagtggcgaatgtactagaaggtgggtggctgggcttggttttgctagtctccagttcctgtaagcctgctgtctcaggctctagcaattccctgcctcccctggcctgggtcaggatgggtctggggctgctgggtgactcaccgctccaagcctgctcactgcttctggggtggaactagtgtcttggagcagggacaccgccacccaacccacattcatttctgttcccagctgtgcctgcagtttgtggtgaaggtgctggatgtggacttggtttgtgaggccctgcaggtgggtgctgctggacaggcatggtaggagtctggctctgtgtgtggaaatgggctcccagcacctgggagcctgggcctgctgtgtctggcctggaaataacttgggtacatggtggtggtgggggtgctccaaggatgtttataggatgaattctgtgcctagatctgtgggatcctgggtgtatcagcagggtcaggtgcaggagcaggtgttgaaggggctggaggtctttgctggtcttctgtctgtcagggctggggaatggttctcagcttgacttggggtagggaaagggtggctgtagactttagaagtcaagctgggtcaggcacaacggctcacacctgtaatttcagcacttttggaggccgaggcgggcggatcaagaggtcaggagatcgagaccatcctggctaacacggtgaaaccctgtctctattaaaaatacagaaaattagcctggtgtggtggcatgctcccagctactctggaggctgaggcaggagaatcgcttgaacccgggaggcagaggttgcagtgagccgagattgcgccactgcacactccagcctgggcaacagagtgagactctgcctcaaaaaaaatcaagcctaggtcccaggtggggtttgaaggccatggcgtggtctcctgtagggaagagcaggttgtagagtgagtccacgtgtgtgtgtgtgtgtgtgtgtgtgtgtgtgtgtgtgtgtgtgtgtgtgtgtagcaggctttcattgggtctagtttcctggagggctgagggccctgtcagcctccccagctagggctagggtcaggcttgcagtggtgggtcccagtgagcaggctgggctacggcctctccagtctccaacctgatctccctcattctgctcgcaggtggccgtaacctttggcctggggcagctgcaggagcgctgcgtggctttcatagaggcccacagccaggtactgctcccttcatactcctcaccctacgcaccgcattctgctcctccctgacccatttgccggctcgcaggaggccctccggacccgaggcttcctggagctgtcggcggccgcgctgctgcccctgctccgcagcgacaagctctgcgtggacgaggctgaactggtccgcg

SEQ ID NO: 53495 - DNA, 1018 bp, Homo sapiens
actcgtaccgcaatggctctgaggatggggccctggcctacaagctgctcatccagactggagacgcccaggagcctctggatttcagccaggttgggagagggctggaggggtccactagtacaggggctgcaggcctcctgggcccaggccttcagccctctctgcctctgcagctgaccacaaggaagctggtggacagagagggactgattccacccgagctcttctacatggggctgaccgtgtgggtgagcagtgaccccctgggtctggcagcctcacaggccaacttctaccccccacctcctgaatggctgcacgacaaatacgacaccacgggggagaaccttcgcagtgagtcttggggggagctcggcaagagcctcagcctcgcccacacaagccctgagcctgaggccctgcccactctgccccgtgctcaccgccctgtccctctccctcttctcccttcccctcccctccacagtcccgccagctcagcccttggagtttgcccagttccccttcctgctgcgtggcctccagaagactgcagactttgtggaggccatcgagggggcccgggcagcatgcgcagaggccggccaggctggggtgcacgcctaccccagcggctcccccttcctcttctgggaacagtatctgggcctgcggcgctgcttcctgctggccgtctgcatcctgctggtgtgcactttcctcgtctgtgctctgctgctcctcaacccctggacggctggcctcatagtgagtgcttgcaggagtggggacagagacaccccacccttccctgcccagcctgtcatccctcctgccaggagccctctgtgagccctgtctccctcaggtgctggtcctggcgatgatgacagtggaactctttggtatcatgggtttcctgggcatcaagctgagtgccatccccgtggtgatccttgtggcctctgtaggcattggcgttgagttcacagtccacgtggctctggtgagcacg

SEQ ID NO: 53496 - DNA, 1221 bp, Homo sapiens
cctgggccatgaccaggccctcagggataaggcagggactcctctctgccgcacctctcccacttgtctggggaggcctcagagttagaagcccccttcccaagttctgacccgcctaggccctttcccccccagctttctctgtttgctctggcagtgggcagccgggtgagccaggagctgcattacaccaaggagaagctgggggaggaggctgcatacacctctcagatgctgatacagaccgcacgccaggagggagagaacatcctcacacccgaagcacttggcctccacctccaggcagccctcactgccagtaaagtccaagtatcactctatgggaagtgagtctggctgagcccctgagcagctgggggcgaggcgtgctgtgggggttctggagtgggaatccccttcttctgctgatctcctatgcccctggctattgcaggtcctgggatttgaacaaaatctgctacaagtcaggagttccccttattgaaaatggaatgattgagcgggtaagtgtcctgagagggagtagaggcagaactttttctgtagcgtgggaggactcagagaccgagcaagccccacagcctgcaatctgcccccttaaaactaaggagggggattgcagagggcatcctacaaaggttgtggggcaggactgacgtggcccggggtatccctggcagatgattgagaagctgtttccgtgcgtgatcctcacccccctcgactgcttctgggagggagccaaactccaagggggctccgcctacctgccgtgagtgccactcctggggccctgcttcatctcccgctggggactctcccagcagaaaggaggggtctggggaatgaggatgatcaaaaccttaccaaggtcctaattacctcccaggccaggaacagagagcatgggcttccccaaggctctctccacatcctccttctctttccctctcaaggaaggaagacctgacttatttacacaaaactaaacacaaagatctgtaagatctgagcaaaggagaaaaagatccccacaaagaggctttgctgggggaaattacctaggtgtttgctaagccattgcccaggccagaaagaaaacctgctacaggcatgtgcctgctggttgtatattagaaccaagcacacagcttggtaaggaactcagtggggcctttctgggccctttctatgtattag

SEQ ID NO: 53497 - DNA, 1288 bp, Homo sapiens
caggtgggcgacaccatgcctggctaatttttgtattattagtagagaccaggtttcaccatgttggccaggctggtctcgaactcctggcttcaagtaatccgctcacctcagcctcccaaagtgctgggattacaggtgtgagccaccgtgcctggccagaatgatttctcattaataatttcagcaggccaggcacggtggctcacgcctgtaatcccagcactttgggaggccggggcgggcggatcaaaggtcaggagttcaagaccaacctggccaacataataaaaccccatctctactaaaaatacaaaaattagccaggcgtggtggcgggcgcctgtagtcccagctacttgggaagcggagacaggagaattgcttgaacctgggaggcggaggttgcagtgagccaagatcgccgcactgcactccagcctgggcagcagagggagattccatctcaaaaaaaaaaaaaaaaaaatttcagcatgactctcttctttcctgagggctggtttcatatggcagccctttgataggagtcaaactccagtctgtttttccctgggaaatttgcattttgtagactccctcagccctggcccatacccaaaggcagaacccaggttggagtctcacaccctcgagttatttcaaatactggcaagtcctaggatccacagcagatgtttctcagagcttgcctgcctgttgagctcccacacgccatccccaccctacctacccccagccctgcagactctcacatccatatacactctaggccagccctggggtccagagcagatgtctcgctctgcctgcctgcccccagccccaggacacagatgtgcatacacgcacatacacatatccccacccacaccactgctgcctgggtggtcccagatgactcttggatttcctgccccaacagaggcagtctcccttcccttcctccctctccattccccacattctccccatctaaacactgcttgagcctccatgtttcctcatcctctctcctatactccagcataggataggctagaccccagcagttttttgctgttgtttgggggagggttttataagaggatggtagccaattcctaggcttttttcctttatttcagaatatcactcttgtcctatattggctgggggtgaggtaaaaatctttttttttctttctgttttttttttttttttttttttgagagtaagtcttgctctgttgcccaggctgtagtgcagtgacgcaatctcggctcactgc

SEQ ID NO: 53498 - DNA, 1182 bp, Homo sapiens
gtctggccagtgagaatgaatgtctgtgggttcacctctgtgtccacccgacgacaggtgtgtgtacatatgtatcctgctctcagaaaatgggcctatgccggccgggcgcggtgactcacgcctgtaatcccaacactgggaggctgaggcaggcagattacctgaggtcaggagttcgagaccagccaggccaacatggggaaactctgtctctactaaaaataaaaaattagcagggcgtggtggcgggcgcctgtagtcccaactactcgggaggctgaggcaggagaatctcttgaacctgggaggcggaggttgcagtcagccgagatcacaccactgcactccagccagggcaacagagcgagactgcgtctcaaaaaaaaaaaaaaaaaaaaaaaggagagaaaacaaaaagaaaagaaaggaaaataggcctatgccttcctcaggtgtgtgctggggatggtgggtgttacatcttccaagtctgggcctgtgtctgtgttggtgctccctgtcccacatccagaaatcaagaagcgagggctgggcagcagatatacagggtgagaagggaaggatttcatgcattgttgcagtgatgcctggctgacccttctctttccatcccagatcctagctgggagcctgaaggctccactctggcttcgtgcttacttccagggcctgctcttctctctgggatgcgggatccagagacattgtggcaaagtgctctttctgggactgttggcctttggggccctggcattaggtctccgcatggccattattgagacaaacttggaacagctctgggtagaaggtaagttgtggacactggccatagctgctcaggtatggtgagcccaagacaagaacggggtgaggagctggctactgagctctagcaggcctggccctggggctggagggtcacctgctggccagagtcctacacctgggcatctaggaacaccgttccctcccacaaccataaatggacatctgcagatgttagaccttgtgaattgggtgtatagaatatttgtctgtgattttgtacgttagcatttattgctaactttctatgtgtgtctttgacaatgcatcagggttttacaaaggcagctaaaacaagattcatctttcagtagcaaagaaagtaaaatatgt

SEQ ID NO: 53499 - DNA, 1071 bp, Homo sapiens
ctcggcctcccaaagtactgggattacaggcttgagccattgcgcccggccaacactacagctttctatgtgagaaaagaagttcagagaaaaggcctagcatatctcatagtcatttgccgtcttggaggagacaagttttcattctgtcacccaggctagagtgcagtggcgcaatcatgacttactgcagcctcaacctcctgggctcaagtgattttcccacttcagcctcccaagtagctgggactatgggcgtgtgccactacacggcaaatttttttttttttttttttttttagagacagaatctctgtgttgcctaggctggctacttctttttttaaaaataaaaaagttgaggtaaagctatagacagcccacacaaggctaatgactgggaaggccattagcaattacccaatcctgcgaatgagttcctgctgataagatcagacatcctacatcccatatgaactttttcccattattttggggtcacttaattttaattacttacggcaaacctgggaaaggtaattaaattgcagtcaagtgagacttgattaccctgctgctattatgtcttggctaagtggcagggtaggagcataaaattgttcagaagggagtttctcatattcgttatgtgcttgtctctgccagcagtggtgggctgctgaggcttgaaagcttgctgaggctttctggacacctgcccaaggtcttcagggcttgagggatgctaataggaccaccttggagaaggtgtaggcgagactattcagagaaagctcctgcccatctttctcatgttctggcattttatatgacagctgatgctcaggaatccacaatgtagtaaacacttcattgtcaaagcttgagtgtcagccctgtattctgcatgtttggtcccctggtcccaagcaacctctcctgcatttccccctaatccaaggcacatgacccaagcagcagtctagagtagcatcttcacatgctgacaggctagaaagccaggttctcacctaggttttccatgctttttgcagttagcaagtgtagacc

SEQ ID NO: 53500 - DNA, 1112 bp, Homo sapiens
catagctagtcccacatttacccatgactagcatctttcacgctggtctggaaagatgttcatggataacctgagtgggaagacttgtccagatcacaggtgcaccgctgtgtccacatcatgaaagagggaccctgctctcgagtgagcatgctgggaaaagtatcctttgaagtgccaacagggactatgcagcagacgggcctgaagggccttgggtggagtgtggaagaagagaacctagggctgggggcttggaattagccttcacattccagtgtagccgtgctgacaaggcctccgtcagctagtgtggctgccacgcacagtgctctgaccagcattctgtctatgctggagaatcatagacaggcgcactacctgtgccttcctaatagactggtagccaaagccccccatacctctaacctttccaggtttctcacactggagagggaatagtgtgaacttccccttcatgttttcttttggctgggggatagatgccttctcagggtctgtccttgatttcgaatttgtctaaaatggatctcatcctcacctcatgcgtggtcacagtggtccaggaggtgaccaggaacccaggatgcttatgatcaggatgcggggtgttccttgacctgatcaggcctcctttcccaagaggtggtatgtgggtatctcaaagactggtctcagtgcctcccagccaagggacatggcattactttcaaggaggagcattcaaagctaagagactgacaataaggccatctagaagctgctgcataaataatcttggtcctagggggaatgcagcagcctcctgctccccctcactcagacaggaagctatggctgagaactccctgtatctctgattgagcactgggttctacctaaggtgttttttttttttttttttttttttttttttattgatcattcttgggtgtttctcgcagagggggatttggcagggtcataggacaatagtggagggaatgtcagcagataaacaagtgaacaaaggtctctggttttcctaggcagaggaccctgtggccttccgcagcgtttgtgtccctgggtacttaagatcagggagtggt

SEQ ID NO: 53501 - DNA, 1283 bp, Homo sapiens
gatattttagggaagtacatttcctcttttagtttgactttctcttacagattttagtgggatttcctcagggttcatgttttgtgggtgagtttcaaaggaagaagtgtgagctgtaatctcttttaaaacttagagccaagcatggtggtgcacacctgtagtcccagctgctcaggaagctgaggtgggaggatcccttgagtctgggagtttgagaccagcctaggcaacatagcaagacctcgtctcttaaataaacaaaaaaacaacttgactgagtctgtatctgttctgttatctctctctcatttatttccttggttgggtgtttgttctgaagatatctacagttttataaaagaagccaatacactgaacctggctccctatgatgcctgctggaatgcctgtcgaggagacaggtgggaagacttgtccagatcacaggtgcgctgctatgtccacatcatgaaagaggggctctgctctcgagtgagcacactgggactctacatggaagcaaacagacaggtgagagcatgagttagaaaatcatggggctcttgtcctagaaacagactgagccacttgtctgtttcttcattaggtacatagtaacttgttaagaatccctgtcattcccaaggttgagcaagacctggcacgtcaagggagactactagggtactcaggtgcagcaaaaagggaagcagggggcctggtccatagtcagggcctctatggctccagggaaaggctaagatcttcaggaaggctaacttctggcctttgggtcagcaggttcctcctgttctgttcagcatggggatatctgcagtacttacttcataataagcaggtaaatactctgtaatcattactctgatgaagtaaacataggcatacagaggaggcttccctgagaaggtgaaggagcagagtatagagtggccagatggcaaagcctcaggaaaggaatgactttgagagagaattgtctgcaaacagcattaatgaggagtctcttgctagcccctccttttaaccttgaagtttgtgagatatggggaacaaatagcttccactgaaggagaagcagtgtcctcaaagataagccaggccttaatgaaggcagggggtggagagggggacagtaaagaggctgaaggtataaaggaactctgtattgtatagtaggcccaggaggaaggttttgggagggaggaataataagactaggaaaaggaaatgcagagcagtaaagggtttagatgagaata

SEQ ID NO: 53502 - DNA, 1096 bp, Homo sapiens
tgcacctccaaaaaaaagaaaaaaaatatatagggagagcctcagccttgacagctggatttttcttttcatctagtctcttaccatccagggggttagcccaggcttgtttacaaggtagcagcagcaggttctaagcatgacagcagaggctacaaagtctcttgaagtctaaactcaaaacacacactgtcacttcagctgctgcgctctgttagttcaaagctagttatggagcaagcccagatataaaggatagggaactaaccttacctttggataggaggagctccaacaagtttgtgaccctttttaatctactcgacatactattttgacttgctaatgagtaaatttgcctgttcctttctcataatatccttgcctggttttggcatcaggatcatgctggccttataaaatgagttggaattcctaactctagacatagcacctaccatagggtaggtgtacaaagatatttattggtagaatgaatgaatcaatgaatgaatggataagcaaaatgcctgtagatgagacagaagaatcagtcagaaaagtaaaaatcaactagggaaaaaaacgtgaatacttgaatatgacggactttttttttaatagaagttcagttttgtctgctttcttaagtttgtgtagcctttcttcttaggaagacattctacaattacctgctctgctcccaaagtgaaattcctattttgctaaagcagaacagaaagaaacctttccaagtttctataatttgtatcacattctgaagtcccagttactgtaatagctgcaaagaagcaatacaaggtggagggtctgagagggagagaaaaatgactaaagtgcaacatagctgaaaaattggctggctggaaattattgctcccaggacatcagtgattcaaggtttctgtgagccttaggacttgagtaggggaagcattccaaattatatccaaaaataacatctccgtgtttcttttgttaaatggctggctcataatgagacccttacagactttgttacattctcaagtttccatgtaatgtataagttgatatatgtctaagctgctatgtg

SEQ ID NO: 53503 - DNA, 1051 bp, Homo sapiens
tttataagattgaatgggtgccttgtacatacctgaggttacattgtaattatttactatagaatgttaagttcctaagaatgaagcattgtattctgttcatcctgttatttcctagtactgtagtaaagtgattgttctttgccatattaagtcatcaaactatgtgaaaatgctcttttaaactataaagagatgtataaatataagatcatatattccatagtcatagaaatagacaatgtggtggttttcagactgtttcttagaacctagggttccagagatgtctcagggactgcccacacagttcctgaggtacacaagggagaggtagagtttccagaccctataccagcacaattcaatgagaacaaccccatttattttacttgtttggctatgaaaaatgcttgaagagtattgtctgatttgtgtggttttaagccatcctaattttgtcttgtgatgatttgtgtaatccattgtcctttatgatattgacttttcccatctccatttaacagacagatgtgctggtgctgagctgtgatctgataacagacgttgccttacatgaggttgtggacctgtttagagcttatgatgcatcacttgctatgttgatgagaaaaggccaagatagcatagaacctgttcccggtcaaaaggggaaaaaaaaagcaggtaaggaagattggagtttgttttgtttgttgagttttcgtaattattattctcactcatgctttccctgaaaaaacatttattaagaatctactatacatcacagattctgtgctaggagttgatgacataaagtcaaataagacacagtccctgaatggaaaatgcttagaactattgattagattctttaatgtccttttgtatgcagagaggaacattcagaactatttgcattgtatttaaggctcaaataattgaatacgtatatctaagaaacaaacaaacaaaaatccaatttaaaattaacttttaaaaataggccaggtgcggtggctcacacctgtgatcccagcactttggg

SEQ ID NO: 53504 - DNA, 1051 bp, Homo sapiens
actttgaggactatagactggaatcttttccaagcattttaaaccaaaactgaggtctccattgcagttagcctttggtgtttattcaagcacacaaactatgccaggtgcagtggctcatgcatgtaatcccagcattttgggaggctgaggcaggaggattgcttgagtccaggagtttgagaccagcctgggcaatatagggagaccccttgtctaaaaaaaaagaaaagaaaagaaaaagcacacaaactactcttggggatttgactgggattggaccacataggaaaatgtaaaatgtgaccttcatagtcacaccaagtagctgaattcatgagttccatatgggcaggggtggcatgcaggctggtgatttggatcatagccattatttgtggaagcactgggtgagtagagaagcatggtagttaccttgccctgacagtttttttccaagggagtaaatgtgtttttctttctccttgtcataagaaatcggttgccagattgtgttatttataacaatctgtcatggaacagctgccaggaaaagaaaagaggctattcccagtagctctcctcacctcccgccccaccactacagccacacacacacacatccggttttctgatttaaccttttttcccctctaattttactcagtggttttggcttgatcgaaaatgttcttgtaatgagagatttctgggctttgccatggcttggtaattgggttttctgagcttaatttgtttactttagtcaagactaactggcagcagtttggattttgaattcctgggtgttttggacactttaaacactaaagtgctgccttcccttgaaaccttgcatgtttctatattgtcaagagtgcacacatctgctttccttctgagttgtgctttctgcccttgacattgccctggcttctctagaggagcaggcttgggatgaggcataccaatgactgttggaatagtgagtagggagatctttggagaggccagttggtctctgcagaagaggcatactgttggcattaga

SEQ ID NO: 53505 - DNA, 1056 bp, Homo sapiens
tgactcagaacccacatccactcaatgtgaactctactaccacgacctccccatattcctcacttctccatcacctccagcctgactccctgtctgccctttcacccccaagattttgcacaggttaaggccagttatggcctttttgaaatctgtaatagctcccctttccccaactctaaagcctagaccttaaacctgttcctagagctatgcacacccctgccccagtttaccgttcctccctcagggcctccgtgacactccatgaaaagaagttcttgcataccggaaagttgaataaatggatgaattcattccttcagaatgtgtttattgggccctgggcttaggcacagggtcacaaggagaaattgactttagtgtcctactcggagccaagaagatggatgtgaaatgcaagtagaggtttctcagtgacagactttgcacagttacatatctggggctgagcagagacgtaagggccccactgcgcagaaaagggaaaacaagcaaacaggctggcctggcattttctggcatggatatggtgatttggaggatgggagtccacttctggagccaagtgggcagaagaatttgacatcatagaagacagagacgggagggctgacaaaccagccaggtcagggttgttgacagaagtggaggaagtagtgtctttattaccctgcccccaacccgttgcagtcctttttgggtgtttgtttgtttgtttgtttgtttgggtctctgttgcttaggctggcgtgtagtggtgcagtcacggcttactccagcctgggcctcctgggctccagtgatcttcccacctcagcctcctgagtagctgggaccacaagtatgccaccgcttctgggtaattttttgcagagataggggtctccctatgttgaacaggttgttctcgaactcctggcctcaggcattcctcccacctcagcctcccagagtgctaggattacaggcctgagtagtcttcaagaacaagtacctggggccggcgactcatacctggaattccagcacttt

SEQ ID NO: 53506 - DNA, 1052 bp, Homo sapiens
tttaatgtgattgctgatttctgtttccccagtcttgtagctccttaaaggctggggctgtcttgagcagagctaacctctgcacctactataggtccaggctatagtatggacctggctggataagactgttggtatcatgagtgggacttgcgccaagcctccggatacccagactgtcagatgagaacaaattcctcatgtcaccgtaagatacatttacagcggagttttcttttgggcctttgttgttgcgtcgctacagcaaactttacggtgaaaaaaggtaggggtcctacgggcagcagccagggcagccctggagctgtcgctggagtccgatcatgtgatcttcaacatggcgacgctcttggttccctacagaaaggggcggagcctggactggggggcaggctcagattcaggttaaattgtggattgagctcgcagttacagacagctgaccatggaagcgaatgggttggggtgagttctccagagcacgcggtgtggctagccgggcttctaatttgagtcttccaactcaggactctatccctctactcccctttccccaccctggagacctcccaacctgaactccgttagctgggatcctgaatcctaaaaccatggatttttgagatgttcatcccagggccttaattcaagggatgcctcaggatttccaaccaggatctctattctgggaccatcaactctgatccctctttatcccccagcctgggtatttctcagcccctgaaccagcccagtgacattcccgtttctgaggctcactagttcgaagacccccaaactatccttagtgggccttcattccctccccccagtccctctggttgcttcgagcttggaagagtagagactaagtggagggaagaggccccagggcgggcccttctggagtttgtgcaccacctgataggcagagaggaggcggaacgggcggaaagccagggtttgggagctggcctggaggaggtagatagcggtcctggactgaatcggccttatgaacccgcgctttc

SEQ ID NO: 53507 - DNA, 1419 bp, Homo sapiens
gggtctggtatggcaagaaattctttatctgtcagtcattctgcatctccttagaccactaggcacccactgtgctgtaggctgaaccagctccctggcccagccagggcaatgcagaaaggagagatgggtttcatttagtgagagaacacaatttctgcttttagaaaaatgatcttttatgtgatccatgatttattcatagaaaagcactgtgaattcacacacttgctaaaaaagggcaactgtgatacagaaatgagagtggcttctctcttttttttaaccaacccattgggctgagacgtaggggcccttggctggacagtaagacttgagtagccacaaatggcaaatacaacttcttggtcagtttggagtaaaaaaggtgacagtttgtcgaagaaagaaaaagtaaagcagatggagaagttcttagttcacattctagctataccaccccttccctatcaaaccccacccccaactcaggaactaagacatgaaacagtaaacaccaagacactggttccaactgacttttctgagtgcccttgctacctcctataacaattccaggctgagcacaggggtcaggaaggtagcaggaacatgatacactatggaggtcagccagggctaagacaggactgcccactagggctagaaattaggaagggagaggctaagtgcagaccagccctagcctccaagtcagcgagcaatgagactgtgacaaaagccggcgaggaagcttgaggtagaaaggcaggggaagaaagcaagtatgaggcgagaagagaactatggagctaaagcagccaatctgatggcagagggagattggtgcttagaagcttgtttggtgagagaatgaatagaggaggcacagagatggggaacaaacgtttagctggcgagagagatttaagaggaatgggaaagagaaatctggcaaaaaggacacattgatgcagatcctcaaacatgaatacacagacatccctacatgtagaaatacgctcagttacacatataaagacacagatgcatggataacaagcatacacatggatacaaacatgtttatacacatgcactcgtgtacgcagatacacatactaaacatgcacaaacatgagtgcatttgcacaaagatgtgcatcctcacatgtacacaaaatgtgtatatcctcacgtagaaactcacagtccagtgtgcacatattcaaacaggtacacagccatagaactgacacatacacataaatatatatgtgcacaaacaggcatgcacagatgtatctatgtacatacacacatgtacttagccataaagatacacacacacaattatagatgaaaccacacacttgctaacacaaaggtgaccacagtagatgaatattatgaactcag

SEQ ID NO: 53508 - DNA, 1034 bp, Homo sapiens
ttgaatatgtgcacactggactgtgagtttctacgtgaggatatacacattttgtgtacatgtgaggatgcacatctttgtgcaaatgcactcatgtttgtgcatgtttagtatgtgtatctgcgtacacgagtgcatgtgtataaacatgtttgtatccatgtgtatgcttgttatccatgcatctgtgtctttatatgtgtaactgagcgtatttctacatgtagggatgtctgtgtattcatgtttgaggatctgcatcaatgtgtcctttttgccagatttctctttcccattcctcttaaatctctctcgccagctaaacgtttgttccccatctctgtgcctcctctattcattctctcaccaaacaagcttctaagcaccaatctccctctgccatcagattggctgctttagctccatagttctcttctcgcctcatacttgctttcttcccctgcctttctacctcaagcttcctcgccggcttttgtcacagtctcattgctcgctgacttggaggctagggctggtctgcacttagcctctcccttcctaatttctagccctagtgggcagtcctgtcttagccctggctgacctccatagtgtatcatgttcctgctaccttcctgacccctgtgctcagcctggaattgttataggaggtagcaagggcactcagaaaagtcagttggaaccagtgtcttggtgtttactgtttcatgtcttagttcctgagttgggggtggggtttgatagggaaggggtggtatagctagaatgtgaactaagaacttctccatctgctttactttttctttcttcgacaaactgtcaccttttttactccaaactgaccaagaagttgtatttgccatttgtggctactcaagtcttactgtccagccaagggcccctacgtctcagcccaatgggttggttaaaaaaaagagagaagccactctcatttctgtatcacagttgcccttttttagcaagtgtgtgaattcacagtgcttttctatgaa

SEQ ID NO: 53509 - DNA, 1055 bp, Homo sapiens
agtctcatttgtatgaaatgacagactgcaaaccactttgtttgattacaatcccttcaccttcattatcttttatgtctatttaaactctggatttgccatatccatcttgaccctcccccacatctctctgtttttattttttttattgcaattttcctcttttctgtgggcattcacagattgtttttggagttcattaaaaaggaagtgtgttgtctgggtagaaaattacatttgcatgcttgagagaggcctaagggcttttgtggggtttggcatggatcttgtgttttttgggggtgtgggtgatgagaaaagggaagagtaagaagaagggatttttagaaaggggaaaaataagaaatgttgagattatttctcctatccccattttttcctttccatattatatatgtccaactggtttcttccttttttttttttttttttttgcatgtgtaaaccacttaactaacaatggaacagattaagagatctttcttagaactgtatttgaatgtacagttgtgttctgcaaagcagaaaacgttttctatatggtaattctacatttacaagtgaagctgcaagttgataaacatatctgtctgtctatctcttttcctttgtggtaattggagggaattttatagaaaattgtctcttgaattagtatgacattttatttaaattagtatctacgtagaagtttagccatgttttgatttagaatttcccactttcagaatttagatttttaggtataatgtttagcccttttaaaagttgatagtgctagccgggcatgatggtgaatgcctgttggtcccagctactcaggaagctgagtcaggagttctcctgagcctgagaggcagaggttgcagtgagccaatattgtaccaccgcactccagcctgggcaacagagtgagaccctgtttaaaaaaaaaaaaaaagttgataatgctaatcttttcttttattaaagatgatgtcacttgttattcagaacatatcatttttgtccattgggacgtggggaaaccatag

SEQ ID NO: 53510 - DNA, 1048 bp, Homo sapiens
cttcctttccaatctggaatccttggtccttatcaagtcacaaaactcagtgttgtttgtgccatagaatgcattgtattaagggatttttctgcttgcattagactgggaaatgctttttaatgtgctattgtgttattaaagaatatgatcccagggaagcaagagtgagagaaaatgaaatgagacagggaaggagggtaaggcaacataaggatgtgtcatagagctggttactgcttggtatcaagtagcaactgattgctcaatctccccgaattgtcttataaagcagcagagagaatccccttttatgcccatctttcatttcatgagattcagacctgggaaatattttgctattaaaggtatattttgcatacccctctgtaactttcaccattattgatttcacagtttgggttgtaggaattgtagaaattgctctattgctgttaccactctgtataacctgcaaacttaagtaccttaaattccctgtgtatatggtgtaggtttttcagttccaatgtggaaaagggggttggccatagttcatagccttgttagagtctataacaactcttaatgattggaagtgtaaaataaataagaacaagcattcagtacatttaagaaatttttttctttttcagtgtcatattcttttcttctttcctattattttctttagtgtttattccttattttctgcatacgttttagaaacataatcactgtatagcaaaatagctaattatgaggtgtcatacaatgatactgctcttctcttccctcctctctctagttcctgaatccttaatcattcccttttcttctgacttcccttcctgaaaactttagtccaaacctgggagaagcaagagaaaaggaagtgagatgggaagaagggatagtagcagtggcctgaaagggtatattggagcccaactggagcagtggcctagcatggggtgctagagccaaagtggggtgaggagggtatccacatgaagggggatataatttgagatgtcagagtctgaaa

SEQ ID NO: 53511 - DNA, 1017 bp, Homo sapiens
agcccccccggcctttcacttcccacctgctcccgagggagagagtaaggtttctgggggtaagtgggggctatctgaaagaaaagggtgattttggctggggctcggtgccctacaagagcccttgcttgactttgacgcaaggcacagactgggctctgaaggggcaggctggggggtagacgtcgtcatggatgttggatctcccttccggccatggcccaagtacgacccctgttcccttaaagtcaggacctcgcagaactttcgcaagatgggtcctcggagtctgcccgcgattgcgctcccaaggggtgccgctgccgagggtaggcgcgccagtcgagatcaaagcggatgggatgacgccactggagggcgcgcggggccgcggggcagggtggtgctcctgctgcaggtttcaggcctcttctgccttctacagccgccaggtcagcagaggcggaggcccgggctgtggatggccgaggagccgaactcgtgaagccacgttcctcctgcagctcttaacccaggcgcggcggctcgccgggccgctccccttactccgaaaccgtgagcctcagcccttccctctctccccaatcccagggggcgccggcggacaccccagaaacccacgcgctctcgttcctggtcccgccccctctacgttccctccccctctacgttccctccccttttccttccagaggcggcggccccggaagctcccgccattctggacccgccccctccaagctcccgcccctttcccttcctgtggaggcggcctcggaagctcccgtctttctggacccgccccttccccaccctgctccgccctcggccccggcccccgctccgagctcccttagctctaagcggttccggaagctcccgcctttctggacacgcccctgcctcccccacaggattccgactctctcccggctcgtcgagggcttgacattttaccggggggtggcccagaaaaacctcgtagagatggtgact

SEQ ID NO: 53512 - DNA, 1013 bp, Homo sapiens
cccttgaccttgtctctttctgcctgcctgtggctatagaagtggcctacactgcaggacctggccagtgcttccctggaggtgagagccaccctagggtaggggaaataggaacaatagagggactgacgggtgatctctttgacctctgatcctacccacaggaggtgaatcaactctgggctggcctgggctactattctcgtggccggcggctgcaggagggagctcggaaggtaaggggatggcaggagggtaggaacccaggagtcttgggtgtcttataatcttgagtcttgcactccaatcaggtggtagaggagctagggggccacatgccacgtacagcagagaccctgcagcagctcctgcctggcgtggggcgctacacagctggggccattgcctctatcgcctttggccaggtgatctcacagcccacccccactttgtgcgtgcccagcctccttcctcccagcccaggctaactctttggcccctctgtgccaggcaaccggtgtggtggatggcaacgtagcacgggtgctgtgccgtgtccgagccattggtgctgatcccagcagcacccttgtttcccagcagctctggtaggatgttggggtaacaagggtgcttcaggggtgtctgcaaaggagctctgcttcacagcagtgttcccttcttttaggggtctagcccagcagctggtggacccagcccggccaggagatttcaaccaagcagccatggagctaggggccacagtgtgtaccccacagcgcccactgtgcagccagtgccctgtggagagcctgtgccgggcacgccagagagtaagcctactggggaaggggcagtgagaagtcctaaggagtgactctgccctatgacactcaaccctgtgcctctcaggtggagcaggaacagctcttagcctcagggagcctgtcgggcagtcctgacgtggaggagtgtggtgagcaccaaacctagcccccaccccaacccttcct

SEQ ID NO: 53513 - DNA, 1026 bp, Homo sapiens
tctcagacagatcttttgtccctctgatccttggtttcttctaggataaaatgaaggttttggacttaatgactactacaggctgtttcagtgtaaccatgctacatctctaagaggcagagaaaccgcctacccccattctcccagacacacctaaacaacccctatccacacacacagtcacagtaagcatcagagatacacaaatgctcccaaacaggaggctttcatccttgacccatcccagccctggcctcacagtctttgcatgtctccagggctgtaacgccggcccccttgaggccacttgctcagctatactagttgtatctcagtgctgcagccagccaagagtaaacccgtgagcatcttgagagtgcttgagagaagctggaccccatgtgaatggtggatgagagggagatagctatcacccttggaaggcctcaaaatttggcctcattgtgactgactgctttggctgggtctttttgtttcaggccatcatgaggaagccacgagcagccgtgggaagtggtcacaggaagcaggcagccagccaggaagggaggcagaagcatgctaagaacaacagtcaggccaagccttctgcctgtgatggtaaggaactaggttgtggcccaaggctcattggccatgaaaggcagattcaggctgggaagggattgtgatacgtatcaagacattaagagacttactaagggccaggtgcggtggctcacacctgtaatcccagcactttgggaggccgaggcaggtggatcccttgagcccaggagtttgagaccagcttgggtaacatggcgaaatcccctctctatgctcgcgtggtggtgagcgtctgtagtcccagctactcgggaagctgaggtgacaggatcgcttgagcctggaaggcagaagttgcactgagtcaagataatgcaactgcatttcagtctgggcaacagagccagactcttgtctcaaaacaaaagagactcactgagggtgtaattctgactg

SEQ ID NO: 53514 - DNA, 1026 bp, Homo sapiens
agccccatgctcccaacgctccaggcttttgcagccggagccgcggtgtacaacggaacttgtagtctcctcgtggctagttcaggcggaaggagcagtcctctgaagcttgaggagcctctagaactatgagcccgaggccttcccctctcccagagcgcagaggctttgaaggctacctctgggaagccgctcaccgtcggaagctgcgggagctgaaactgcgccatcgtcactgtcggcggccatgacaccgctcgtctcccgcctgagtcgtctgtgggtacgctggacttgcggtccgtctcctggcgcggttcaggcagtcggggatggggcggggtctcgccgtcgggtcgccgatgggtcgaacttccgttcagacgtcccgggtccggcgcggggaaggcagcctggcgcgcgctaattgcctattggcctgtgctgccggctcgcagcccgggtggacccgagccacgccccctggagtgcgccggaaagccgggcgcgctagagctcgcgggaggtaatctttctctcctgctctcgcggcgggaacgcggggcctccgtgttctgctgtcttcatcagcgtgggccgcgggtagcgggtagtggggtggctgggtttgggctttccagagaaggtgacgctgcctgagctgagcttaaagcacgcccaggagttagactaggagagggtcgtgtgggggaaagaagggcgttctgggcatcggtaaattcccagagaggatggagagctcagtgatctccagaaagtgaaagaggcggggagtgggccatcggaggaggctgcccagggtgtaagagcgaccgattggtagggaagcttttgtaataatccaatcaagtgataatgtgaacttgaattaaggctggcagtatggatggcgaggaagggacaaattgtgaagcagctaggcggtatagtcgacctagagggtgattgaatttgaaagaggttcctaggccgggcgcggtggctcacgcctgtaatcccagcact

SEQ ID NO: 53515 - DNA, 1049 bp, Homo sapiens
gtcatgctgccaggacccgttctatcctttccctgggcctcgcctgcttcaagcggcagccagacaaggtatgagctgatctcaccccaatcctaggtgtggctgtggggtggagggtagagagattctagggaacatcagataggaagcatttctctcccaaatctttttttttgacttgatagtttttttttttttatttgaataggtttatggggaacaggtggtgtttggttaaatgagtaagttctttagtggcaatttctgagattttggtgcacctatcacccagtgtacactgtgcccaatgcgtagtcttttatccctcacctgcctccatcctttcccccctgagtccccagagtccattgtatcattcttaagcttttgcatcctcctagcttggctctctgaaatcttgatatagcagacttctctttctcccagggtgaacattcctatctggctcaagtgttcaatctcactctgctgtgcatggaggagtatgtcatagaaccaaagtctgtgcagttcctgatacagcatggcttcaacttcaaccagcagtatgcccaaggcatcccctaccataagggcaatgacaaggtaggcctctagcctccctagccttgagtctgccctttctgtgactttatttcttcctaccctaggctggatgtctggggagaatctgcttcttagggagtatggggaatcactagtgacagggcttgggaaacaagactggtatgaggagggtgggcagcattgggtaaggtagagagagagcgttccaagtggggaagtctgggataagtgcccagcagaagaggctccctgggggactctgtcctcctcattgacccctttactttcatctagggtgatgagagccagagccagtcagtacggaccctattcctggagctaatccgagcccgccggcccctggtgctacacaatggccttatagacttggtgttcctgtaccagaacttctatgcacacctccctgagagtctgggaaccttcaccgctgacctgtgtga

SEQ ID NO: 53516 - DNA, 1048 bp, Homo sapiens
gcatcttttggggggatgtaattcaacccccattagatcatattatacctttacctataaaccttcagtggcccctgtggtctgctgaattaactgtagatgcttcatcttggtattccagaacttctgcactaataacaaatataataataataatagaaatagtcataactgacatattgagcactttccttgacattattcttagcattttacatgtatcaacttactgaatcttcacaacaactctgtgggttaggcactattattattcccattttatagatgtgtattaaacaaactgagtaaccaactcagggctctacaactattatagtctgagatgagattcaatcctagccagcctaactgcagtcaccactatattatactgcccatcttaactttttagcttcatactttctcccctacttatacagaaaaaaaaaaaagaataattactaatctctgtgctttgttatctttgtgttccttttgcatagactgtctttcttatccccaaccctgcctatgggttaccatgaaatggaattaaatcctcaacaatgagtgaatattagccaggcctaggtggggaaaggggaaggatattagaggtaaagggaccagcaatgtgtacaaatgtgcaggtgagcaggagtcagacttttataagcaggagtgaaaggctttgtgtgcctttctaaggattgtgggttttatcctacaagtaatagcacatcactgaataattttaacaggagagtggcttcaggttggcatttcagaaagattgtcttggctatattgtggaaaatggattggaatgagggctaaatcttttcaagatgcaaaagggggcaagaaaacaggttagaaagctaatggaataacctaagggaggcgtgagaatgataagttattgatagtgggttctacctgttgtaaaaaatgaaaataaattttaaaaagatactgttaaatgggagaatgagttgtgtactatgagctaaacaccaaactggactgactttgtatttagacctta

SEQ ID NO: 53517 - DNA, 1021 bp, Homo sapiens
tattgcccaggctggtctcgaactcctgagctcaagcaatcctcccacctcggcctcccaaaatgctgggattataggcttgagccactgcactgggtctctctgttatttatgccatgagaaatttaatatttcttttagactccttcaattcaccaaatatgccttcaattcaccaaatatgaaattgaagactatgccttcaattcacaaatatttgcttggaactactcagtccctccctgtgctaggtaatatcatgattaatgcaagagaaatagaggcttcttgtctcccagagagtctccttaagaagtaaattatactatgtaggaaatagactagcattagctaatgctgtgagaatatggcaggatattttcccagtctcagttattaagacagccatctttccagttatccatcctgaaaaattccagccatttttggttatcatgtattccttgcttctaatgagaagctaagctgtgattctaaatattcaaaggcttttgcatctattccttcccgtatatgtgggctgtaattcagccttcttcactttcacctggagtgaattattttccctgtctctttgccctttttcactcttcctgatactcagctctggttgtatagtttatttcttaaaactttttgtggctcacattggtttcaaaatcgagtcaaaaattatttagactgacagttaaggttcagtctgtttttccagccttttcttccactctttctcttgtacaattcacacagctccacaatttcctaattatattctctaggacaagttatttaacctctgtgctttgatttcttctgtttaatgagaatggaccagatcagttgttagaaatcacactgaggcagggcatggtggcttacacctataatctgagcacttgggagactgaggcgggaggatccatttgagcctaggagtagtgagctatgatggcttcttcctgccagctgcacagacaaaatcaattccctgagatcgtgg

SEQ ID NO: 53518 - DNA, 1295 bp, Homo sapiens
gattacaggcgtgagccactgcacccagcttccattttatctctgccttttagtgactgatttcttgatctctctgtgaaatgaacataataatccttatatcatggattatctgagaatcaaacgagatgatgtatgtcaagctcttatactatgtttcctagaaagtaggtgctcaatgaatgatagatattatcattgttattttgttacttagaatgtaattggtgatcttcatgatattctactcatggtaaagactgactatatcttgggctttaaatatatcagtgttatttgagggtaaagacataaaacattttttagatctgaaaaccaggaactagaatgtgaaaggaaatatttttgcattgagcatttattgctttacatgtatttattcattaaagatttcagtggaaatttttttgatctctttagtgtcaaaccagaagagaagtaaaattcaacaaaaatttatgtgtggagttccttcttaaaagaagaaaaaagtgattatttagactatggatcggagcaaacggaattcaattgcaggatttcctccacgtgtggagcgtcttgaagagtttgaaggaggtggtggaggagaaggaaatgtgagccaggtgggaagagtttggccatcttcgtatcgagctcttataagtgccttttccagactgacgcgtttggatgatttcacctgtgaaaaaatagggtctggcttcttttctgaagtgttcaaggtgagtgagtcttcagcttttctcatattgtcttgctgtggtcacatttactgcaggttgatagttgtgtttaattaggatgtaggatttgcctaataaaggtgctgtggatcttgaacactgttctaaattctcctttcaagctatttattaacttatattaagatattttgtttgaatcccaaaaataatatgctggttaaaaattcaaataacataggattctcttccacctcacctctacccccagccacacatgtgtgtatgtatccacacatacattctccagtaataaccactattaacaattcagtatgtatacttctggactctttctgtgcatatacatatattatgcacacaccttaaatacatatattaaaattatatatacacacacccacatatatagtttttgtttgcttatcttcagtaaaattgatagctgggtacaatggcatgcacctgtagcccgagctactcaggaggctcgcttgaggctgtgagtttgagagcagcctgggcaacatagcaaggccctgtctc

SEQ ID NO: 53519 - DNA, 1017 bp, Homo sapiens
ttactcccatggagaggactctacttcttaccactcatctcagctatctaatcattagtattactttagcatgtgatagggtctctacactaaatatcagtgtttgttatgagctctctaattttttttttttttttgagacagacgtttgctctattgcccaggctggaatgcagtagcccaaacacggctcactgcagctttgacctcctgggctccagcaatcctcccaccttggcctcctgagtagctaggactacaggtgtgcaccaccatgccgggctaatttttgtattttttgtagagacggggatttcactatgttgcccaggctgatcttgaactcctgggctcaagcagtcatcctgcctgagcctctaaaattgttgggggattacagacgtgagccagtgatcccacccaatattttaagtttgtggacttaaataagttaggccatccaaaaattcacccatgattttgaagttttagcctaagatatatatattcctaggactaaaaactacggtggaaatttagcagaataaaagtttgagagtctagaggcttggcttgcacactggcatgctgtttatttgccaaattgttatcaatgttttggcttaagcatgctacatagctgttgcattagcaatagacttaaaaaaaaaaaaaactgtgaaggccgagcacagtggctcatgcctgtaatctcagaactttgggaggccaaggcgggcggatcatgaggtcaggagtttgagaccagcctgaccaacatggtgaaaccccatttctactaaaaatacaaaaattagccgggtgtggtggcgcgtgcctctagggaggctgaggcaggggaatcccttgaacctgggaggcggaggttgtggtgagccatgatcgcaccactgtactccagtctgggtgacagagcgagactgcatcttaaaaaaaaaacaacaaacctgttaaacttttttgaaattaaaaaaatttaaatgcagaaaagagtac

SEQ ID NO: 53520 - DNA, 2465 bp, Homo sapiens
agtccaagcgattctcctgcctcagcctcctgagtagctgggattacaggtgcccgccaccatgcccagccactttttttcatatttttagtatttttagtagaaatggggtttcaccatgttggccgagctggtctcgaactcctgacctcagatgatccgcctgccttggcctcccaaagtgctgggattacaggtgtgagccactgcgcctggcctggaaagtcttcttgctctcccattaagtggccatggctccaactgcctgagctactgagaagtgtggccaagtattttgttgcactctttgtctctcatggtgtgagtttaatctcttcagtcagcttggaagcgtcccaatggctgagccagaatgtttctgtctcagtttttggcagcaggctggtcacaggcagggagggagaaggaaagaagttggggaacagcccccttacattctctctcatctgcaggccagcaccaggagctgctgctgaaacagctggctgagggacgacaggctcaggttggcagttggaaggtaggactaggttcagacttgtctctgcatatttctctatggaggacctttcctttctctgtctatcctgttctgcagggaggccaggataccctctcctgcccctgtcttcattcctctcttccctgtgctgactctctctctctccagagctcttctttctaacctttctgctcccggccatgagaaactatccttgccgacatgagggttccaagtgtgctgaagaggacagtcatggggagggagagagggagaggtttggttccacctgagcccatgatctggcagatgttagagcagttgcaaagtggccaggaaggcaagggtcataccctggaggctaccaggacagaggaccaagatgcctggagggagcacaacctccttaggtcagggggtatgggtgctgtgccattggagggaaattgtctcacaggtcgggcactggggaccaaagttcagctatcctagatttgacttgggcttttggggtagtatgagtatctgggttgtatcccataaaggcattctttacctgatagagagtcagtgaggtacctttgtatgtttggatgttacagagggaggagagattggcagggcgcggtggctcacgcctataatcccagcactttgggaggccgaggtgggcggatcacctgaggtcaggagttcaagaccagcctggctaacatggtgaaaccccatctctacaaaaattagccgggcatgatggcgggtgcctgtaatcccagctactcgagaggctgaggtgggagaatcacttgaacccaggaggtggaggttgcagtaaactgagatcatgccgttgcactccagcttgggtgacagagtgagactccatctcaaaaaaaaaaaaaaaaaaaaaaaaaaaaagagggaggagaccagagtcctagcctgaggaaggaggacagttctgtgttggaagggcccccttgatacatcattatcttctctgtttctggttctgttcccctttccaggatctccattcatgttgtccaatctaagctgcctctgcccactaccttcaccatgtctgtttcttcatccagctcttaattcagtcttctggacagtaacagtagctgggaacttttatggaagccaggtaaggataaggacaaggattcccgttttgggggaggctaaatctgaatggtgcctgaatgccagctgcctaattatttaacactaggtagaatggagtctctgcctttctgtgaactcactgacctctgttgctgtttatcctgtcagtcctctatgtccctctctattagaaaggcctagggcctagttctatgcatatcacaatgcttgctgatgacttgttttctcttcccttttctttcctcttagatccccagaggagcaccctttctaacctggagcccagcatctttcagctccatgcccagagtcttaagcaagaggacctattcctttggggccccaaaatgctcctgaatgacctgtaaggactcgttaagaatagtaggatgaaggcttctttgcccaccctcccctccaaggccctgtttctgggctgcccgcccctaccttcttgaagtagctattatctgtcttatctactgaggcttttcactgcctgcccatccttgccccccatctcagctcactgcaacctccgcctcccaggttcaagcaattgtcctgcctcagcctcccaagtagctgggattacaggtgtgcgctaatttttgtatttttagtagagatggggtttcaccatgttggccagtctggtcttgaacttctgacctcaagtgatctgcccgcctcgccctcccaaagtgctgggattacagttgtgagccaccatgcccagcctatagctgtaccttctgagtgcaagctcagttgaacttggaaa

SEQ ID NO: 53521 - DNA, 1011 bp, Homo sapiens
ccaccacaccctgctggtaggtactctttagaggatatttgccccttaggccctgtaacaacatcttggggaactgcttagaaatgggaacagatagagtcttggctgggtgcggtggctcattcctgtaatcccaggactttgggaggccaagatgggtggatcacgaggtcaggagttaaagaccagcctggccaatatgatgaaaccccatctctactaaaaatacaaaaaattagccaggtgtagtggcaggcacctgtcatcccagctactcaggaggctgaggcagataattgcttgaacccaggaggcagaggttgcagtgagtagagactgtgccactgcactccagcctaggtgacagagtaagactctgtctaaaaaaaaaaaaaaaactcatttgaaggcagatgggaattctggttccctggcctttatcttggccaaacctaacttccttgagccttgttatcttcatggaagatctctactatattatcaaaaatagtaatcttgtactcaaaaccttttgctttgccaaagccaattaagtcctagcaagtaccaccataaatcagggtccacatgggagaaaatcaagggccaggggatgcaggtggtgagaccctggggctgagccagctccgggctctgctgggattcccaggcttcttgggggcgggtgtggtaaagggaaggtccggggagggagaactaggcttctctgagggctgagccaagcccaatagggccaatcgttgggcaggtggagtggagaagtaggccttctgctcttctgagtagcgctcctggggtgtcacagcatcccggtaagtccaatcacgccagtggaaattgaagccttcgagtagggcgatacggtcagctcttgtaggtacacagtcatgaggttttctgggtggcagatctggcacctctatccctggcagcagcactacccctcggatggcaaaccagcccccaaatcgggggtgtatgcacacacct

SEQ ID NO: 53522 - DNA, 1062 bp, Homo sapiens
aggctggtctttaactcctgacctcgtgatccacccatcttggcctcccaaagtcctgggattacaggaatgagccaccgcacccagccaagactctatctgttcccatttctaagcagttccccaagatgttgttacagggcctaaggggcaaatatcctctaaagagtacctaccagcagggtgtggtggctcccgcctgtaatcccagcactctgggaggccgaggcaggtggatcatgaggtcgagtttgagaccagcctggccaatacagtgaaaccccgtctctactaaaaatgcaaagttagccgggcatggtagcgcaggcctgtagtcccagctactcaggaggctgaggcagtagaatcatttgaaccagggaggcagagattgcagtgagccgagattgcatggctgcactctagcctgggtgacagtgtgagactctgtctcaaaaaaaaaaaaaaaagtacctacctcaggtagggactgaataaacacgtgtaaggcactttggaaaaatacctggcatatatagtaagcagtatgttggccattaccaaaggccctgggaattctgtactgctgctcatgggtgtagtcggttctagaggggtgggcaggtgggagtagctgaggaagacaagtggctggaatggtatcacatgatacacagaagtatcctcagttctgaatctaccttggcctcaagggcccaggagaataacttttcccagctgacagcctctctgaggacaatgacatatgaatgaggatcaaaacgagctttggccaggcactgtggcgctcacctgtaatcccaccattttgggaggctgaggcggaggaccgcctgaggcaaggaattcagaaccactctgggcaacataatgacactaaaaaagactatctctaatcaaggctagaaccaagggaaggctaagaattgcccagtactgtgcaactacgaaagccctacccaaggccaccagccttgtcttcctctttcctctgtcagttcaaaaagaacagaaacctccagctcttttacatagcaggta

SEQ ID NO: 53523 - DNA, 1358 bp, Homo sapiens
tccagtttggtagagttagaagaatgctgagaaggcagactgagtttgctgtcttcagagctctgaagggctgtcagaaacagtttagtgttaagggtttacatagtcctatgtgtgtcgtttatttagcttttttttccccttaaggattagagagtgttggcaaattatttaaactttgcctttttttgtggaaaatttaaatttcaagtgctacatgaataaattaggcatgatagtatcttaaggctgtggtgatgattatatgtttgtaaaatggttagctcatactaaaagggtgaatgatctaagactgattgcaggggtaggtttcctggtatctgagtgttcaggtgcagaactggttttgtccataggagaatggtggtgcataccattgagaaggttattaattagtggtgcctttctcttgcagtgtgcccagctggctggaaacctggcagtgataccatcaagcctgatgtccaaaagagcaaagaatatttctccaagcagaagtgagcgctgggctgttttagtgccaggctgcggtgggcagccatgagaacaaaacctcttctgtattttttttttccattagtaaaacacaagacttcagattcagccgaattgtggtgtcttacaaggcaggcctttcctacagggggtggagagaccagcctttcttcctttggtaggaatggcctgagttggcgttgtgggcaggctactggtttgtatgatgtattagtagagcaacccattaatcttttgtagtttgtattaaacttgaactgagaccttgatgagtctttattttaggaagcatattattagcttttgattttaagaggaatttactccttgctttccctgttttggggaaaatgaggagagctgcctccaaatcagggaattatattgacacaggtagatatagggaatggaactgaatgaacccaaggtgttacattttgtttcactacacatgagggagaagaataagccctgctatagtgttggccagagcactgcgactgacgccacaggctgggttaccagttaaagtctcagtgtgactacttggacacctatttttgtttagacacactattcaaagggctgcatgggaaccagaagcttggcctcttctgataaatgcctggtacctgctatgtaaaagagctggaggtttctgttctttttgaactgacagaggaaagaggaagacaaggctggtggccttgggtagggctttcgtagttgcacagtactgggcaattcttagccttcccttggttctagccttgattagagatagtcttttttagtgtcattatgttgcccagagtggttct

SEQ ID NO: 53524 - DNA, 1042 bp, Homo sapiens
ctgcaaagaggcgttccttcctcttttactaatcctccttagcacagggtgtcaggctgggggaccccggtcaggtctttcccttcccacgaggccatatttcagactatcacatggggagaaaccttggacaatacctgggtttcctaggcagaggtccctgtggccttccgcagtgtttgtgtccccggatacttgagattagggagtggtgatgactcttaaaacgagcatgctgccttcaagcatttgttttaacaaagcatatcttgcacagcccttaatccatttaaccctgagttgacacagcacatgtttcagggagcacagggttggggataaggttacagattaacagcatctcaaggcagaagaatttttcttagtacagaacaaaatggagtctcctctgtctacttctttctacacagagacagtaacaatctgatctctcttttccccacagtggtagaatgggaaagatagtaggaacagaagctaccaaataagaaaatgggtatctctcttcataaattgaagcccctggattacagtgtgttgtgagggtgagggtaatggaaaagcttgggaaggagaatataaaggctttttattcaaagtatacatactcctctcttctgtcctgctcatttagaatcagtcactcccaaagatctaacttactgaatgtaggatgatctcacagatgtattagggcaaaacaaaatggttgggaatcacctctagagataaagcatgccattttttaaataactttattgagagaagaggttaatccatatagttcatatttttatttatttatttattttttgcaagatggagtcttgctctgttgcccaggctggagtgcagtggcgcagtcttggctcactgcaacctccgcctcccctgagccattgcgcccagcccagactagctttctaaggcctatttcagctctgatcttgtaatttaaaggaaatgaagttattagagtctggattagtggtgtatgtttgggaagacccaaaggtgctag

SEQ ID NO: 53525 - DNA, 5495 bp, Homo sapiens
gagaaaagtcaaatatgcttctgatgttatgaaggcaggtggaggcacagtgatgggaaaggtcaacgtgacttttggggagccaaacaaaagtgtttgtggcattgtgcatttggattctggtttgagagtcttcatctgcctctctctctgcttctgtataatgaataagatgccactgcactaattatggttcagaaagaatgagaggttatctcagtatataaagaaattgccttgctgtttttaaatgaaaacaaaggctgagattcagagacttgtttcgttccaaaagttggaaagctcagactgtgacccttgactgctggctggagcttcttactaaaacaacatttaatgtattcagggacactggacaatgccttgattgtttacagctaagtctctttaagtaggtgaaggctgctggttatgtagaaaattaaggcttgtttctaattcatttctgttatttctagctgataggaagatgtcttcaggaaatgctaaaattgggcaccctgcccccaacttcaaagccacagctgttatgccagatggtcagtttaaagatatcagcctgtctgactacaaaggtgagagaattaacactgggctcattgagatggagttattttatattctaggggtggcttgttagatttgtgtcaatgttgtttgactgtaaaatgttttgtctcctaggaagaagtatttaggttgttaccttcatgttgaagtggtgattatcaagtgattacagggtatatatcctaggaccaaaccacttctggagaaaccacatgcttcattatgtctggacatactagctcaattatcttttcagtattcctcgtctattttctttctttatttttatttttgagacagggtctcattctgtcacccaggctggagtgcagtggcgcagtcatggctcactgcagcctctacctctctgggctcaggtggtcctcctacctcagcctcccaagtagctgggactgtaggggcatgctgccatgcctggctaatttttgtactttttttttttttttttttttttgagatggagttttgctcttgttgcccaggctagagtgcaatggcgtgatctcggctcaccacaacctccactgcccaggttcaagcaattctcctgcctcagcctcccgagtagctgggattacaggcatgcgccatcatgcctggctaatttttttttgtatttttagtagagacggggtttctccatggtggtcaggctggtctcgaactcctgacctcagatgatccgcccacctcggcgtcccaaaatgctgggattacaggcatgagccaccacgcctggcttaatttttgtactttttgtagagctgggcgccatgttgcccaggctggtctccaactcctgggctcaagccctctgcctgccctagcctttcaaagtgctgggataacaggtgtgagccactgcctctggccctcctctattttattattggagaaatactcattatctcttgttataagagacattctacatttaaagtctcagagctcactcaaatctctggagctgtgacactgctcgttcagtttgtttgggtcacgtatatatcacagctgttaatattaggctgagggctaggcactttcccttgcctgttttgaccccggaggagagttgatattacagatggaacaactctcctttctgttgtcatagtttttttttttttttttttttttgagacggagtctcgctttgtcgcccaggctagagtgcagtggtgcgatctcagctcactgcaagctccgccttctgggttcatgccattctcaggcctcagcctcttgagtagctgggactacaggcgcccgcaaccatgcttggctaatttttttgtatttttagtagagacggggtttcaccatgtttgccaggatggtctcgatctcctgaccttgtgatccgcctgccttggcctcccaaagttctgggattacaggcgtgagccactgcgcccggcctctgttgtcatagtttcatgcagacacttggcaagttctgttgaggctcctcctttctttaccttgtagttccagagcagctcgatctcctgggacagttgaggatatagattccttagaatgctaacctgaaactcaggtgtcaagtgtccttttctcagtggtgtagcattagtccctggagttagtttttggtagaacatttgactaggtttcctgacataatcacactttgttcttggggcttctcccagcaaacaaggtaagttgcaccatagggaggtgacctgggcccaggggtataagcaggaggtctaggaggagctgttctctgccctccagagcttgacctgctgaggccccaaagtgcttgttaggcaaagctggaagggttgtttagatgagttagtttccagtgatactgcaaagtggtaaatgtcaaaaagggctgcttgtttggctttttttttttttttttgaggtggaattttgatcttgtcgcacaggctgtagtgcagtggcatgatctcaggtcactgcgacctccatctccccggttcaagtgattctcctggctcagcctccccagtagctgagatttcaggcccccgctgtcacacccagctaatttttgtatttttagtagagacatgttttaccatgttggtcagcctggtcttgaactcctgacctcaggtgatccacccgcctcggcctcccaaactgcctcccaaactgctgggattacagacgtcagccaccatgccaccacacccagcctgtttgacttttcaaacattgctgctacctggaaatgagtgaatatttggaattgttctagtatttaagcctggtgggtgtggcgagaaggctgcctggccagtttgaagatctgttatttcagtggttaatcccagtgacttcattaaaattgcagctagaagttctgttactcactagtacttttgtcttttctgtctctctctgtctccctctttctctctctctctctgtgtatatgtatatatatatttctgttgttttgagacagtcttgctgtgttgcccaggctggcctcaaactcctggggtcaagggatcctcccacctcagcctcccaagtagctgggactacagacacgcaccactgtgcctggcttaaaatttttcctgtcctgtcaggcacgttaggaacacatgtgatcacttaaaccatgcttgttccattactatggttcatcacgggagaagtgcaaaggctgtgacttcttattggtgtcttatctctacagcagaggagtactgcaattcagctttctctgggtattgttaagcattggcattaggccatgcttataagtgcatccttgcttttgctatctttggagaacttggtgtttatgttaattttagccactcagaaaagatcaaaattagactgaacagtgtttactctgtattggtagctatgacatggaggcaggagaataaagtatgggattggaagtttttttcattcaggtattcctaatgcaccaggttctaaaagtagcttctaggagacatctgtattgagcatcttggcagttagtggttattgtgtcagccatcaacttgcttctttttgtataggaaaatataaagcaaggaagtctgtgtcaaatgctaaccatgactccgattttccccccaggaaaatatgttgtgttcttcttttaccctcttgacttcacctttgtgtgccccacggagatcattgctttcagtgatagggcagaagaatttaagaaactcaactgccaagtgattggtgcttctgtggattctcacttctgtcatctagcatggtaaatctcttggtctatttggcatgtgaacttttttttttttttttttttttttgagatggagtcttgctttgtcgcccaggctggagtgcagtggtgtgatctccgctcacttcaagctctgcctcccagtttcacgccattctcctgcctcagcctcctgagtagctgggactacaggcgcctgccaccatacctggctaattttttgtattttcagtagagacggtgtttcaccgtgttagtcaggatgttcttgatctcctgacctcgtgatctgcccacctcagcctcccaaagtgctgggattacaggtgtgagccactgcacctggctggcatgtgaacttttaaaacagcaactgggaagctttggcaatagactttcaagtattgccttctcattgaagggagtgcaaagtctgactttctcttattgctctcatgacctggcagcagagaagaagcagcttcaattgcagttgagtgtaccctagtgacctaccttaactgttctcagcattcactttattgctggaaaacggaaaaaaaacagtctttttggaaagttagattaggaatatgggaaaggggaaagaggaatgcgtacagtcaagtcaagagtttgaatgtaactgtatgtttgccttttgccatagggtcaatacacctaagaaacaaggaggactgggacccatgaacattcctttggtatcagacccgaagcgcaccattgctcaggattatggggtcttaaaggctgatgaaggcatctcgttcaggtatgtcatcaggacaagtatccagttggctgaaagccttttatttggagagatctagagccctgatctgtagagactccttgtcatttcattcctttatgcaggggcctcctcactaaggccaggccagtaggagtgtggagaccagtccatttccttcaggcttcaagcctctgtattctaacaaagcacatctctaaacctgtattgcttttcctttcatctcttttcccaggggcctttttatcattgatgataagggtattcttcggcagatcactgtaaatgacctccctgttggccgctctgtggatgagactttgagactagttcaggccttccagttcactgacaaacatggggaaggtaagccatctgtctgataacaggacaacagagtggtggtatgaaggggtgggttgccccttcacacctgtgggtgtttctcgttaggtggaatgagagacttggaaaaagacacgtagacaaagtatagagaaagaaataagggggcccaggggaccagtgttcagcatacagaggatcccgccggcctctgagttcccttagtatttattgatcattcttgggtgtttctcggagagggggatgtggcagggtcataggataatagtggagagaaggtcagcagataaacacgtgaacaaaggtctctgcatcatgaacaaggtaaagaattaagtgctgtgctttagatgtgcatacacataaacatctcaatgccttaaagagcagtattgctgcccgcatgtcccacctccacccctgaggcggttttcccctgtctcagtagatggaacatacaattgggtt

SEQ ID NO: 53526 - DNA, 1343 bp, Homo sapiens
ttcgggttcgggagcggccacaagggcgcctcactccaacctcagccatccgcaacagggtggggtattagtatttttccgcacccgccccaacgagggaaagcgccgagtcattccggcggggcgcgccgggcggggctcgggccacatccccctcctctctctcctcctccggcacccccgtccgttccgactctcgcgagatccctactggctataaaggcagcgccccggagagctcttgcgcgtcttgttcttgcctggtgtcggtggttagtttctgcgacttgtgttgggactggtgagtgtgggcagtgcggcccctgcggagtgaggcgcggcgcgcccttcttgcctgttgcctcttcctcctcctgtccggggcccgcccgcgctcgggtgggggtgctgtgatgcgtgaggcagccgggggaggcccggagtccgagactgcttgagcgctgcgcacacccctctcgtgggccccccacgtaggtgcgggaacctggttgaaccccaaggcaagcgtggactcgagtcgagtcttcccccggcaactcgagcacgtggcgcggcgtctgggcgggctggtggtgggggtctccgagactagcctcctgccggacggggtgggttcgggaagcttctggaatggacctgtatccagactcgtggctgtagaagacagcctctatgtatttggctgttccgggtcctgagccttgactagctgcggagcttcgggtaccctttccccgtctttattttcctgtacgtggaatggagttagcgatgagcccaaatgtccccgctgaagcactctctctgctggtgctttctccagtgctggggagggacagggggcacctgaagtggggtttagggatgtggccctctacgctgggcagatcccctgaaggggcccggtggcggcctgaatcccagcagcctttaccccgaattggttgggttttgtacttgggggccacttgggaaagaaggattggacgagaaggccatttgggggcaccaagttgcagcatgccttagtttttggtttttgttttttgtcgttaaaggtgttaaggactttttaaaaaacagttaaaagtttgctaagatccatgcttacaaaatttcttttgcttgtggtattgtgaactaagaactttgggacttggaaaagctttcagaccgcggcttagtgggttaaatctctgttttttgagctagagtctcgctctgtcggccaggctggagtgcagtggcgcggtctcggcttactgcaacccctgtctcccgaattcaagcaattcttctgcctcagccttaggagtagctgg

SEQ ID NO: 53527 - DNA, 1051 bp, Homo sapiens
tttactactgaaatgtaagcccctggggttgagtggagagcgcagagcactggaggggacgagacttggtttcggatttgagctcttctttttctctgtatgatctcttgctaacttcccagtttctctgaacctgtttcctcagcaataaaatgaggtcctacattagaactgtagcaagaattgagataaagctttgaaggcgcacagcgcatactaggtgatctgcaagttttaattgccatctttttgtttgctcacctatgtgctttttccagctgctccggctttcttatgcaggtgcagggatagttctcagaagtggggagaagtggggataattctcttacttagacacctgctttgggtctgagaaagtctgacatgttattctgttgccccagaactctgttaaagtaagacacagatctgaaccttcactggatgaggctactgttaattaactcttccccttcagatcgttcatactcagggctgcaggcctgttacttttccaagatctgtttccttatctttaatacaggagcaatctcagtatgattctatctggtccactgggattttttgccgagtatagtaaagtgctttgatattctccaagaggattcttttcaggttttccaacaggtaaaggaagaaggtgacagaggcagcgacttcctcaaatgtccttccagctggccaaactcaacctgtcaagatctctcccccataagctgtgtgtgtgtggtgtgtgtattgtgtacattgtatgtatgtatgtatgtatgtatgtatgtatgtatgtatgggacaggtactctaggagtgaggggttcaggcagatgacaggctcagacctcaaggagtagccaggtttgtgggggaaatttatatataaacagaaaaatgtagtgatgtgcacatgctatcagtacatggaagtagccatccatttatttatttatttattttctttttagagatggatgggggtctctcggtcttttgcccatgctggagtgtagtggtggaatccttgctcagtgca

SEQ ID NO: 53528 - DNA, 1021 bp, Homo sapiens
ccctgtctctgctgcctttgctcacaggcacatatataaccacgtgtttgtcctacacatctgtcccctcttcccggcccatgctttgtagtagtgagacagagtcttactctgtcacccaggctggagtgcagtggcgcaatctcagctaactgcaacctccacctcccaggttcaagtgattcttgtgcctcagccccccgagcagctgggactacaggtgcgcgccaccatgcctagataatttttgtatttttagtagagatggggttttaccatgttgacccaactggtcttgaactcttgacctcaggtgatctgcccgcctcagcctcccaaagtgctgggattacaggtgtgagccactgcacttggcgctttgcagtattcttgacagtggaaatctgagacctgaacaacagcactaaccccaacaccattctcttcccatctgtgtttcagggggcaatggcggcttcctgtgttctactgcacactgggcagaagatgcctctgattggtctgggtacctggaagagtgagcctggtcaggtgagggatgggggaagaaaaaagaaacttgttgagcctctgcctgcattttcctagcagccccacccccatactccccttccagcggggatgagccagtgggaagagataagagaagacaccaattatacatcctgggcttccccagctgactcagagagtgggctgaggggcccagcagggctgggggcataggaaggacatctttctctaactggatctgcactgagtgctgtggcaaacatggggcccctctgtgcccatccctatgctatgacccctaatatggcagttatcaccctgtgctgtgatcatgtctcctctcccacactgggttctttgagggctcagcctctccctactgctcagtccagaattaggcacatagcaggtgtcaaggtttgaagaataactaggtgaattgtatattgtatagaccaaaggtcagcaaattttttttttttttttt

SEQ ID NO: 53529 - DNA, 1065 bp, Homo sapiens
catcttccatcttttcacctccactgcatagatgtgcctgttatatttctgagcccccttcccccagcattgaccttggggtggtgacagtagaaggctgaaaccaacatagctgaaacctctgcttctctcacctggcaggtaaaagcagctgttaagtatgcccttagcgtaggctaccgccacattgattgtgctgctatctacggcaatgagcctgagattggggaggccctgaaggaggacgtgggaccaggcaaggtaaggactggggttgtaaatagaggtgggataagagaacttagaagctgaagctagggctggggcccagctggagggaatctggcatcagcttccttccagttcctctcccagagttgagggtgggtgagaccacgtgctcatggctcttctcactgtgggccctgccccctgcactaggcggtgcctcgggaggagctgtttgtgacatccaagctgtggaacaccaagcaccaccccgaggatgtggagcctgccctccggaagactctggctgacctccagctggagtatctggacctgtacctgatgcactggccttatgcctttgagtgagccttgccagagcctcatctggggaatcagggggttgagcaggatggtgttagtaacttattgtaagtcacagcagcagagcaggataggaacactcatttgcatgccaagctgaggagcttgacatgggatcttagcctcttctgctacagcagcttagctgtagctacaggagtttaactctggaaaaaggaaggcagtctcacatggtgtgtaccccagggtatgcacctgtaaccctcctgctccctttattcatttagaaaaggtgctgacttttctgttgagcacctggggttacagtaataagtaagtctcagcagaagatgtgagaagagctcaccattagtgccgtgccctgtgctggaagaagggtggataactccctgaggatgagttaaggaagacttcctaggggagaggagatatctacgtctaggaagaggagggggcataggcattccatgt

SEQ ID NO: 53530 - DNA, 1018 bp, Homo sapiens
gatctccagctcagatcttgctcaggtatggggcagtcttagggagagggccctgggttgggaggcaagggttaagggatttcttatttcagtgtctgggtgaggctgaggatcttgccttgtgatctggagggaggccactgtaggcatatttcccatttcagcagggctcaggtgctccaggagcttagggaagctgcatggggaacaaaatagtgcttatgaatactgaccccttttcctcatctgtctaatcccccaacttaggtggcaggtccagcggaaagtgatctgcatccccaaaagtatcactccttctcgaatccttcagaacatcaaggtacttggtaatgggttctatcttctttagctctttgggacattttcttggccctgactctacctggctaaaaaggcagtgttgtggaaccccagcttctgctcacaaagctggctttcttgaaccccactctccatcctcaggtgtttgacttcacctttagcccagaagagatgaagcagctaaatgccctgaacaaaaattggagatatattgtgcctatgcttacggtgaggatgtatcagcctcctagacttggggaatgtgagatttggggtgggattctggcccaggtgtgacctaaggcttgctggttgtgagaaggacacaatgttgtgggtgggattgctatgctggacatagtgccctcatttctctttattgagctcagggaagtagtatggctcagggataaggcatataacctgtgagtcccagtcctgcttcttgatatcttgtaacctagagcaagttattaaacttctccaagcctcagcttcctatgtgtaaaatgagcccagttcctgacatgtagtagattctcagtaaatgatatgaggagagcccagaaggcgttgttgacctcactcgagggattggggttgggagggaagtcggctgtacttagggaaataaatggttcctggcctcttgatctcagttcagactgcaaactct

SEQ ID NO: 53531 - DNA, 1874 bp, Homo sapiens
gatcagttctagtcgctgctgcttgtacccgtcctcggcccttgcgtgtccgtccgttacgactcagaggacggagagaaagtctaagtcaccttcctcagtatccaggccggaaggagactctcagctactcgccctgaacatgcagagcagcactggcttccctgtctctggatgccgcaggggcgtcctgtcaggagttgtagtgtcaagattccagttcttcttatgcgacttgctggagaagcaggaagttgctgtttattggagaagtcgggctagggagggaaacaatcccgcggagccatatggagagggcaggaggtgtctagatagtggtaggccggcgggggacggagggtatgggtggtgagtcctggccctttaaacccgagggggaggatccggaagtggatgggcggggcgaagggtcctcgtatataaaagggccccggccgcgcggggtctctaatctgccattttctgtccctgagtgagtctctggcgtcccaaattgcctgtttttctcgcaggctctattccgttcgctggttcgccacctcaggggaacgatggccatggagtccacagccactgccgccgtcgccgcggagctggtttctgccgacaagtaagcgggactgtggaaagcttaaggcactggccagtccgcggggagggctaatggacgggggctccggagaaggggcagaccggtgggcgggagtacttgccttcccaagagcagctgtcgctgttcgggaaggcctggtcactggagcagtccttcttttgctgagagcctcgcgcagcagcggtaacggcggtcggctggcgccccctgccccgcttttcgcggccgccatcttgccgggggcagcggcggctgtatccttcgcctgcccctctccttcctcccccagcccggggcggttggccgggaggcggggccctggcgcgcgggttggccttcacgccccttctgtccccagcgtgtgcctctggtagaacccctggataacccgggaatataaccaacgaagatttggcgccaaaagggaaaaaaaaccttgcacgaggaaggaggctggacctgaggggtcggggtgggcggggccttgctgagggcggggttttgcgcgcgtgcgttcgcttccctcgccggccctggggcagggggcggggccttgaggaggcgggaaaactccattgtttggggccgctgcggctccagcaggagctttggactatctccgtggggccggcgaggctagttccccccgacacctcgctcacgtcttgtgctgggagatagttatcgctccccgcgactccgtgagcccctgcctgtggtggggaggattgtcgttctttagactttggaggtggtgtctgtttggggggaacattaccggacgtaaagcgtcttcaggaagcgctgtctggagctctcaccagcactgtttggttgctaggtgaatcggcagtagtatgcacgaagtggagaaggactggagggaaacaagataggattgttttgaaagcggcacagtgccactcaggcgtaatctgttttttgaacagtggagggaaacactacacgagttcaaggaaacaagtgctgtttcccatacagtaggtctgatttcccaatcttgccatatttttttaggcatctggttctatttttttttctaatcttgtgcgctttagaggttagttgccttccctgtaaaaggaatggttgctgtgaagttttttaaattgatattctataggcttacactctgtcatgattatgtctttgtttgtttatagttagagatttacgtatatctctgcttaccaccttttctctctgcgttcttgtagag

SEQ ID NO: 53532 - DNA, 2235 bp, Homo sapiens
ttttttttttttttttttttgaggtggagtctcgctttgttgaccaggctggagtgcagtggcgcatctcagctcactgcaagctccgcctcctgggttcatgccattctactgcctcagcctcccgtagctgggactacaggcacccgccaccacgcccggctaattttttgtatttttagtagagacggggtttcaccatgttagccaggatggtctcgatctcctgacctcgtggtctgcccgcctcggcctcccaaagtgctgggattacaggcatgagtcaccgcacccaactgagaaaatactctagtcaggcttctgggaatgttgcctttaagatttcttttgattttgtgatggtaaataagtgtgttagccaggccttgccagagtagtccaaaagttttaaaaaatgaaactattgctcaaatgtagcaggtattcaaaaaatactgatttaaacagtacttgacactagaaaaaatcttttttttgcagtctggatgtggatagtgaagctaagaaactattgggtttaggacagaaacatctggtgatgggggatattccagcagctgtcaatgcattccaggaagcagctagtcttttgtaagtattgtatattttgctatgatgtaatattatgttctaataaaccttgagttatcaaaaattattttatggggaaaaagcatgaagagcaagagttttaaaacatttgattatttttcatgtggtttgtaccagtaactataagtgtaaaacttaaatatcaccaagcagttccaccctttcattttcctgagtatgtaatttgtattccagtcactactaatttgggtgaccacaccttgtcctggtttatctaggacccctctccccatctctccacccccgcttttttttgttgagacagggtctctgtcacccaggctggagtgcagtggcacaatctcatgctcactgcagcctcaacctcccaggctccccagtagctgggaccataggtgtgtgccaccatgcccagctaatttttgtatttcttttggtagagatggggtttccccacattgcccaggctggtctcgaactcttgggcttaagcgattcgtccaccttggcctcccagagtgctttgcaaagggattacaggcatgagccactgagccccagcctgactttccgagttttaacactagaagttctgtgtctgtggaaactctttaggtccaagcaagtcatgattgatagtgctattattagcacagcattttttcatacatttttagcacatttttcatacattcttagcactgttgttggatttgcttagaagttggtagctaccaccaggtagccatatagacctatatcctggaggaaaaggttagctttagtgccttaaagatcatttattttccccaaagactttaatgtacctccattatctgagagaaaaaaaagcaagttaaatcgtcaagcaacaggcttttggtctatggcgaggtttgagtttcctcaaatatagtattagcaattgcaattgaacttgaaggtcaatcattgcatacattacatacagttgattacattacatatagttaagttaaatcttccttataaaagaaatggttataacaaagcgtttgtgggtttcaggtttgacgcttaatatcaatccattcttttcctaaacccctactgcctctgccaacatccagaacagaatcttactcctggatatctgcaaaaatcttttgtctgattcctgtcctctttgttcctctctgtttgaccttaatgaattggggctctgagagactaaattttatctggtagtatttagagattttttttttttttttttttgagatgggagtttcgctcttgttgccctggctggagtgcgatggcgcgatgtcagctcactgcaacccccgcctccctggttcaagtgattctcctgcctctgcctcccaagtagctgggattacaggcatgcatcaccacgcctgcctaattttgtatttttagtagagatggggtttctccatgttggtcaggctggtctcgaacgcccgacctcaggtgattcacctacctcggcctcccaaagttctgggattacaggcgtgagccactgtgcccagctgtatttaggtatttttatttaaaaatgcatggttgtcttacaacataaaatgttacctaagtttttaagcacacataaat

SEQ ID NO: 53533 - DNA, 1004 bp, Homo sapiens
ctgtgagaataatttgtctaaggtctcacagctagttatgggttaaaggtaggatttgaatccagttagaagaactccagatattctgcgctttacatcatgcctttccatgggccttaatcatcctctaggtcccagccaaaggtcctttaactattctgatccatactgacatccatcttttagcaggaggaatacctattaataccttagggctgtttggccctacattatgtattactaattgtagcacatttatgtcacttaggatgtatatatattatatattgataaagagcatacaaaattttcatgcattgtttaatgtcactttgaccttgaaagcaagaggggtattggttttctaggagtatgttactggagaaatatcaatttataactgaagaactagaactaaatgttttagattagatggtaattcagattttagatgtttattctctttgtagaggtaagaagtatggagagacagctaatgagtgtggagaagccttctttttctatgggaaatcacttctggagttggcaaggtatggatgttgtatttaaaaactgaagtttccttgttaagattgtttactagctttgagatttcacaggagctaagcaagattggttttacctagagagttttgaaggagcttgaagtagtgatggaagttgtgaatggcacttgatacaattagtagttatatttaagttttgacttttggagtcagtagaagcaaagttctttccagtagtgaatgatccaaagttcagtgtagagaatctttaaaagcactgtgagctagctcaaaacaaggactgaatagaggacaactggaaagaattagcaagtgagactgtccagtaaaaaagacttttactattgaaaagttcttggctatgttctatcagaatttattaatcagaataagttctgtttagggtatacaaactagcaaatgatgtcatctatttaatctcagttctggtaaggt

SEQ ID NO: 53534 - DNA, 3974 bp, Homo sapiens
gtcaggctggtgttgaactcctgacctcaggtgatctgcctgcctccacctcccaaagtgatgggattataggcgtgagccaccgtgcctggtctctggtaagtttttaatctcgtaatcatacagaactttctcatgatttgccgtgaaaatcttgctagagtatttttggctatttagagaaatcgggtggatacaaagtttgggaaatagtatggtcctattacaaatggaatgcatataggtcttgttcttttgacaagagacatgcttttcaggcggctggatggaggaatatgcttatttccttcagtgctcttgcagtcttaatttatattactaaagttttgatcattgcttccttgaatatacatagttttgtattgcctgcgcttggcttacacttcttgcttttataatataggactgtattttctgtcttagaaaaaattgctaggttctagccatcaaacctttggtgctttcttttgttctcctagaatggagaatggtgtgttgggaaacgccttggaaggtgtgcatgtggaagaggaagaaggagaaaaaacagaagatgaatctctggtagaaaataatgataacatagatggtatgtggagttgcatgtgacattcaagagatgcgacgttgtatatttcttgtatacagtggtggaaacggggctctacctgtcctggatggtctctcctaagatgcttggggtgatgatgcctgcatctggtggagattgcagtggggatagctgtttactgaagctgacagcagatttttgaaagagaataacttattttctcaagtaaatccagttatttcgattggggttttttaaatcaaaaagataaaagcaagattaaattggtgttttaaatactattacaaccttaagtgtttttctgatgcaaatttttttaaacagcctgtgcagttcagttattttaatagcagtacttttagagcccttgtacattttttatgtgtgcgaaaattatataatttctaagctgaatttggctgctatagttttacatatcagatgggggagaatgaaaagcttggcatctcttacctaactggtaatcagaatgctcaagtaaaacaatacctagtgtaacaagcttgggtttcttttgcagtaagttgctctgctagccgggatgctccctttccttttctctagggggcagataatttttaggccatctgctgaaacttggtaggctttttgagggtttaaagggaatgtatttttagtttccatttatgcctttatcattaaactcgaagacatgtttatgcttcatgttctttaaccatgtagaggaagcaagggaagagttgagagaacaggtttatgacgccatgggagaaaaagaagaagccaaaaaaacagaagacaagtctttggcaaagcctgaaactgataaagaacaggacagtgaaatggagaagggtggaagagaagatatggatataagtaaatctgcagaggagccacaggaaaaagttgacttgactctagattggttaactgaaacctctgaagaggcaaaaggaggagcagcaccagaaggaccgaatgaagctgaggtcacttctgggaagccagaacaggaagtaccagatgctgaggaagaaaaatcagtttctggaactgatgtccaagaagagtgcagagaaaaaggaggtcaggagaagcagggagaggtaattgtgagcatagaggagaagccaaaagaagtttcagaagagcagcctgtggtgactctagaaaagcagggcactgcagtggaggtagaagcagagtctttagacccgacagtcaagccagtggatgtgggtggggacgagccagaggagaaggtagttacctctgaaaacgaggcaggaaaggcggttcttgaacaactggtaggtcaagaagtaccacctgctgaagagtcaccagaggtgacaacagaggctgcagaggcctcagctgtagaggctggatcagaagtctctgaaaagcctgggcaggaggctccagttctccctaaggatggtgcagtcaatggaccgtcagttgtaggagatcagactcctattgaaccacagacttctatagaaagactgacagaaacaaaagatggctcaggactagaggagaaggtcagggcaaagctggttcctagtcaggaggagactaagctgtctgtagaagagtctgaggcagctggagatggggttgataccaaggtagcccagggagctactgagaaatcacctgaagacaaagttcagatagctgctaatgaagagacacaagagagagaagaacagatgaaagagggtgaaggtaaccgggatatgcaagagctgcagtgggtggagtacattctggatttgactcactaattatgggtaaaagtcagccttccattcaggattttccgtctgcctttggattaggaaagggctaaatgaaaaggggggtagtttaacaaggtcgtgatagtcaagtaagttcaatcaaaagcagcaagtcttctttagctggcttataaactaacacttttactaactgcaaaataggccttctgtgtgatttctgagacttggctagctatcagtaacttgttgcagcatactagccaataaagtgggatggaaaaggtagatgaggggtggggtaggtagggaaatagtgggctaggctggcagagaatgctgaatggatgttcacttgcatgcctctggattttaaaattattgttcacatgactccttttctgtgcgttgggaagcagctacagagcagtagaatccactgaattggtacactgaagcaggcatgccatttaaatgaaggcagttaaccttgactgttgtatcaccagagttaaagaattctggtgcccctctttaagtcttcaggaagtgtttagaggcttattcacattagttaaaacaggccccccccaccttccccaaggcaacagaaaacataaccattagctctcttcctgttttccttcctcatttcatgcttgcttcggctgctaaactgaatttttgttacttagaatattataaagtgtggatgctttctataatgctattggtctaagtgtgattaaatttcattaaggtgtataagcctctaattattacataactggcacgtctgacttttgctatcatttgaggattctactgtatataagtttcatctaacattggcattaataaccacaggtatattccaactaattgttacttcttgtaattgccagactacttcaagagttctcgtaagttttagattttcagagacccatcttcaatactttgaactcattctggtaaacttccttctacctatgtgcaggtccctgtactccagccaacacaggctcagtaactggaaatgaattggctaaaatggtagcaccattgggtttcttaatggagctttaggagttctttatggaaaaaagcacagaactaaattcctcaaaaaacaaacaaacaaaaccacacacacaaaaaaacaaaactcccatgtcttgatcttaatgattgtgagcaaggatggtaaaaagctctgctggctgacccctaagaccttgaatggtaagctacaatacagatatcacagtcccttacagattgttcgaaaactcgttggatcataattaacattgttagaactctcatacattacatctgatcctaaaacaatactatgtgataggtagtattgcccaagttacagtgatgaggttgaggtttaaaggttacatgacttgtttagggtcataatactgaatctgaacccagatctgccttgaatatattattcttcccaagttaccacacattgaagaagacagtgttcatccttttcctacacccactgcttagaaattttgtcgtgggctgggcgcagtagcttcacacctgtatcccagcac

SEQ ID NO: 53535 - DNA, 3746 bp, Homo sapiens
tctctttgtggttgctgctgataaaactcctttgacctgacgattgctctaagtcctaattgccatatttatattcccatagtaagagtgtttggagatagtgtttgagcttttttgctggtgttaaaaatgcataatgaaagatggcagagagaggcatattatatccaattcatgagttgtttgtgttaacagaaagcttattttaatcacttaacattgttgatttgtctaatcacagtagcgctattgattaggagcctgacctttagatggttgacttgtgagtgtattcaatatggtgaaatatggtgttgatatatggctgcagattttagaggtgtcattagcaaaggtataggagtaaaataggggttatagtattccttactcaaattctgtatgtgctagagctggctggagtctgtggcatgctcattggtgtaagtcggtaaggactatgctttttgctccacatctctgttgtgggaaagctagtctcttgagcattcttgatcagaatggactggaataatttaactttcgtactttcccaggctattagtattatctaatgagtggcttaaagataccagaaacactgactgaggtctccacctgcttctggctgaatgaatgggagcttctagccattgaataagaggcagtagccaatgtttcttattctgaatggtccaggttgacttttataagagaaacactcagccttttaattgctgaaggtctgacccatagactaagattgcacattcttagtctaggttacacttgaactagactgcacccactgacgatatattcagttcaggtgttaactcacttggattagcatctggcctgtcctatctgaatataggttgagacgtgtattggaatctctgactagtcagaatacgttcttagttatattctcaatactgaggaatttttacttgtagaaactgaaggctcagaagaggatgataaagaaaatgataagaccgaagaaatgccaaatgattcagtccttgaaaacaaggtatgttgttagccactcagtactgttgtcagcctttttctgtttttgggagactggagctcactcttgttgcctaggctggattgcagtggggtgatcatgatcatggctcactgcagcctagacccgggcttaagtgatcgcctcacctcagcctctcaagtagctgggactacaggcttgtgccaacatgcccagctagtttgcaggactgtagcttacctagtttaggcacgattattatttttttaagagatagaatctctgtctctgcccaggccggagtgcactggcatgatcagggctcactgtatctttagcctcctgggttcaaggaatccttctgcctcatcttctcagatagctaggtctccagatgtctgccaccatgtctggctaatttgttctctaattttattttgtttagacggctgtcttgctgtgctgcccaggctggtctcaaacctggcttcaagttattctcctgcctcagcctcccaaagtgttgggattataggcataacccaccatgcccagccctaggcatgattattatagataactgtctcttgattatggattagggaccctttattcatgcctaggatgggtggatatatttgatcctggggttcttgtgtgttagtatgtgagccaacatttcactgttaaaatatcagtgacatggtcatgacttaagacagtatgtggacccattctctagattttagggagaaagtccaaattttgaatcgtatatcaactttttttaagctacgctaagttatacatttagatttgtatttgaaaaagatgcctatctttttattatttggttatactttagtctcttcaagaaaatgaggaggaggagattgggaacctagagcttgcctgggatatgctggatttagcaaagatcatttttaaaaggtaaaactcttggtgcttctaggcttgggttgggagtttggtggttaaatagaaaccagttagggttagacaggtactgttaaggtttttgatcaattttccttcttttaggcaagaaacaaaagaagcacagctttatgctgcccaggcacatcttaaactcggagaagttagtgttgaatctggtaatgcattttccattttatactctcctactctcttcagctccctcgttcttcctctaatagattctctggaaccgaacttgatctttaaaaagataggtctgtgttccctgtagaccctggaacaatgaacagtctcttccaagtggcactcagtcttccagtaggtttgttttgttttgttttttttgagatggggtcttgctgtgtcgcctaggctggagtgcaatggcgtaatctcggctcactgcaacctccgccacccgggttcaagcgattctcctgcctcaggctctcgagtagctgggattacaggcacccaccaccacgcccggttaatttttgtatttttagtagagacggggtttcaccatattggccaggctggtcttgaactcctgaccttgtgatctgcccgcctcagcctcccaaagtgctgggattacaggtgtgagccaccacgcccagcctcagtaggtttttaaaagtcattttgactttctttatagccaagggtcctggaaataactataaacaaaaatggaatgttaaatatgggtgcattcccataggatgggtctgaattctggaagtattttatgttgaatgctgtccatttacttgctcttctttttctctttgttagaaaactatgtgcaagctgtggaggagttccagtcctgccttaacctgcaggaacagtacctggaagcccacgaccgtctccttgcagagacccactaccagctgggcttggcttatgggtacaactctcagtatgatgaggcagtggcacagttcagcaaatctattgaagtcattgagaacagaatgggtgagtgaagacgagctgcttcatggtgatgttggatccagcaattaacaaggaagaaaacagttcttttttgagccattactaatcactttattctttttagctgtactaaacgagcaggtgaaggaggctgaaggatcgtctgctgaatacaagaaagaaattgaggaactaaaggaactgctacccgaaattagagagaagatagaagatgcaaaggagtctcagcgtagtgggaatgtagctgaactggctctgaaagctactctggttggttccgttaacattttgataatagcatgtttggtaccatttatgttaatgttctatttgccaggaacttttcatcatgacttggtttccagggagttggtgggctcatctaattattcctatcaagtaatgcagtggttaagaggaaataccctggagccccagactatctgggttttaattccatacttacgtgtggccatgggcctttctctccctcagttgaccgatttgtaaaatggggataatacaggttgagtatccttacctgaatgcttgagaccagaagtgttttgcatttcaaatgcttttggattttggaatatttgcatcatactcaacagttggatacccttaatctaaaatctgaaatgctccagagagcatttcctttgagtgtcagtcagtcctcaaaaagtttcagattgttggattaagggatgggatgcccgacctgtagtacatatgtgtaaaatatact

SEQ ID NO: 53536 - DNA, 1483 bp, Homo sapiens
tccccagtggaaatgaagtttcggaaaacatggaggaggaggtgggcagttaagcagggcttagcctcttgcctcattccttgttctcaggacctggggaaatcagtcctctcaagtgcatgctccccaccttgagcctgctaacgattgttgagtgcagtcctcacagaaaacggtacttgtgcaggaaaacagtttggttatgggagtataggatgactcactgacaaatggaacctgtatattataggtccctcgatgaatatatgagaaggcacttgatgggcaaaaccattaggtcacttccttccacgtgatgattattggctctgtcagccccattatcacagagtattcaagaaatactttgtggtcactgccctcttaatatagggagcaaagcagagtttgggtgacttgtatatgcttcctatgactgaggcctcagttatataagacagaatggcttaaactaggctcactcatgcccaggttctgtttgtcttccaggctgagaatcaggctgaaagccgggcagcagtggaggggacagtggaggctggagctacagttgaaagcactgcatgttaagagggggcacagccctcctcccaagggaaagtgtttttgtatataatgtattttttcacttttggaggattctttttgtataacttcaataaagattgtaagcaaaggttgaggctttgatggtttttttcttaattattggctgaatctgccttggagcactgctggttttatatattagccaaaggttttgttctggccttctgtactgatctgtgttcctgatcctaattcctatctgtctaacgtggaggtgatcaagtgtggctgtaggcctttgttttccaatggtgctatattctgttttcaaacacttcactgaacccagctgtcttgcaaactttcagtggtgctgtccctggatgggggctacaaaaacaagaattggtgaagatcttgctcttcagtgctgaaaatggatgatggactttggctgtgagccaggcctaggatggttcttgtcctatatccacctagtcttcacctggggctataattctgtcctggaaaaagaactctgaaaacctgggtcaggggaatgattcctaaggaaaacggtctgcatttgagctctggtttgaaagtagccaaggggactgatggtggacactccagatgtggttggaagcatatgtggggaggctggctggttgagttttgttattttctgtatagaaaggttgagatatatcaacacttggaattgttacccatctgcagaattgacttctcaaataaagatgctaaaaatctccttgtctggaattatgtttaaagatcttaagtggggtcttaggctgcttttttgagatgggatcttgctcttgtcgcccaggctggagtgcagtggcgtgatctcggctcactgcaacctctgtctcctgggttcaag

SEQ ID NO: 53537 - DNA, 1686 bp, Homo sapiens
gttgcaggatctctggcttatcctggctgtggagtttcttcctgatgttgcccttgcagtatatgttccaggtcctgaggcgctttgcccccttttcttggtcaggacagtcacgatgtagtttactcccaggcacttgaccttctctggttggcactgggatctagggctaggcacagtatctaagctagatctcacatgtgacccctggttgggggaacaaccttgggctggggacctatcccagaatcaaagtacataaggcctcaggagcttcctgtttatgggtacattgagaacctgaaaggtttcctggcagaaatactgaggaaacggatttaagtttggcaataaaactggctttaccaaaaaaagcagtgggaactagtgggaatttaaagttgctttagtgggaattaatgccccctagtcacctttcggagaacttcataagtgccagacaatatcacaaatacctgacaaactcatttaatccttaatctgttttacaaaaacagaagaggtacagaaaagttaaggacttaacgggaggtggtaaagctgtggttggaactggttttctgtactcaactgctagatgcttctagacccaatgtcagaacatggagtagtaaacctgtaggtctggaaataggccccagtcctgtgcatgttcagatgctcatctccacattcacttgggttcagaaactcactgggggcaagtcagaactgtggtgagggcccaaaccctcatctctatccttgactccactgaggggctcttctgtacgaggtgggggatcagcaaagccaactgcgggggtgaggaagctggcttccagtgaagatgtgctggacacctgtggaacaggagaaggcaggttttgagcaaaaatgtaaaggttaagcacacaggttttggagttagttaggcttccttagagtctcacttactgtgaaccaagttaacctgctcctgctttgatttccttatctgttacatagtaggacttcatagagatgtgaggatcaaacaagaaagcattggtaatgactggcacacagtggtcaataaaggctggccgttagccataccagccacaccggtatgtgtagctgtggtgtccctagctgcagctgggccctcaccggaggtgggtactggtactcatggacacttgctggattgatctctgccagtgtctgtacagctgcatctcttgcattcaccagccgcagaaagagctcagcctgacctgcctggggagagatgaaatggtattgcacttgtactttgctgtatgcccaatccctgcgcaccacactcacctgaggaatcccattcagctgcccaaggctaaggctggggtccagaggaagggcccgaagtgggaggcgccagcggccacttagcacccgctgatcttggtcaaatagtccaagtgagacccaagcctttggctgtggtgccctagcccatgctagcccctgccagacctgcagctcacagaccaaagatactgatgatgagggtggtagtctgtagaataaccaaaaagcagtgtcggaagccagagctacagtccctttctaggacttagccctttagagccagcggcctctgtatacagatgagaaaacttagcagaatggtggataagcctcaactgtggcagagtacca

SEQ ID NO: 53538 - DNA, 1050 bp, Homo sapiens
gacccagtaaactctgtgtgtttagggagtatacaaaagaaatcgttcttttccttttcttatgttgttgaatacttcattcacaagggaaataatcatatcccaaagagagagcaattggcttgttttgcttttgttattgttcttccctgttatctgctttatagagagaagtttgtgtggtgggacagattttttaaacacactcacacacacacacacatacacacccagtatatatggggcgatgcacaggtaggagctggcagtgcagggaagaggagacactggtctgcagcaacagcttctactaccagcccttggggcactcacccctgtgatcaagcaatcattgtcaatgacaaagtgactattgaagttataattgtattaaattaatgctaataatttggatattttattttatttttggctgctcgggtaactttagcccttaaccaagcatatgtgggtttttttggttgtttttttttgttttttttttctttttcctttttgggtacagctgtaaaatatttggatataggaaatgttgtgttattcttgcagccttgatattcagggtggattgtaaaatataaatttttgtgagatttcaaagattaagattattttgataacattatttacagatttaaaagatgtggttatcacaagtctcgagggggaaactactgcataaaataactaacttggaataaatattttgcatcagtttggattgtcttgtgtaagaagtatattttctttaaaattagatgagtggattcttttttaggggaaatatttttagaagttggggggaaatgtgaattcagacacaactgtttctctattttagcagatacttttttgatgcagaaaaacctgtgcaataaattaccagtaataaagtcagaaaccaagttttttttttttcctgaaactgttttttagtgcccatgtatttaccagtgtacgtattttaagggaagtctgttctgttttcctactaaataagaacttggagtgggggttgggggagagttg

SEQ ID NO: 53539 - DNA, 1246 bp, Homo sapiens
tctgttacctttattaccctcccggactatggaattgatctcctaatggtctcttagttgatgtttaaatacctcagatccatcctttaagctgctactagagtgacggttgtaagttgataattagataatgttaactgcatgaaagatggatcctcattacctgtagaataaaacttaatctcccctaagaaatcctccacaagctggctcttgcctgctttgccagatacctctttccccacagaagggtcccctccttccctagcactactcatgctgaactatttgcagacctgaatattctgttctttttaatgctttctgttcctggaattaccgtttttccagctttggaattcatctttaaggattcttaaatcacctgttagtaaagccttttctgatagcacttctctttcaagtagaattgatgtttcttactgagtactccttcttccctaatatgaatttttttcatcgtccttgtaaccttttattgtacttaacttgtctagaagtttttatagcaaaactgtgacccgtgtgaagacaggggctctttattgtatttctagcacagtccttggcatatggtctgcccctgccctacacccatcttagaaatgcagtgaatactatacatttcactgaccacattgtcctcctttaatctgaggaaaatgatccacattcttgttcatctaactttcagtgcctccttatttggcatacatatcctataggaaagtgggaattcgcacatttagtctgtttatttaaaataaatgaaatcccttatatcaaaggaaatgaaactcaggagaacctaatattaacataatacctattgattttgtgttttgatattttctgtttgttacgtttctgaatacagtgtcaaattagtaagtgttgctaatatgtaaaatatgtaattatttgataggttccatggtgatggctactttgtgaaaagtgccaaaatgatcagctttctgtatcaaccattcatatcccttttttcctagccttccttgaatccagaagctggcaaacagcatcagccatgcagacctattgggacaccttctggagtatggggtaggtagattttgccattttaaaggcacaactttaaaattttttcttagcagggaggggagcaaagattccttatctctttttatctcttgtttctcatctcatgcatttgcccatggtaactaacatctgactgtagcgg

SEQ ID NO: 53540 - DNA, 1684 bp, Homo sapiens
ccagaaatactaaaactttagaattatttttgaggcaatcatcttgattttcctctcctacaaggtaaatatttttaagtgtaaagttttggagcttatatttatgaatatttgcaaggcttttttcccctccgcctcctttcatgcaaacaattgaagtggctagcttttctcctctcctggaataaaggaagtgaattagcaattgaatatataacctaggacttctctaaattaggcacctgtgggtacccttagggtccatatgcttacaatatgagtttctatcaccattattacttgttttttgaaggcctgatgcaaagcctattaagatattgaaaaggactaatagctatttatccatttgcctctccatacttcatcatcttagtcacctactgccaccttcgaaaaacacggagagcacctacccagaggagaaggtagatttggagtaagccgccgtcgacataattcctctgatggtttttttaacaatggtcccctacgaactgcaggaggtgagccatgtccaactttcatgactatatttaagctactcatttaggacaagcccaggctgtgggtacatgtctgtaatcttgaaataggatcttttctgaacatagttttcatttagattctctagtagtcattacgcaactacattggctttctaggtctaactatgattatgattctcatgaatcatctgttcagttgaactgatttcagaaattacctcacaaagaaaagatacatttttttattttttttgtgtggactttttattaacgaggtctcctgaaggcctttggccaataccgtaaaccaaatcaggaagcaaacaatctaattagtccttttctttactattctagattcttggcaccagccctccctgttccgccatgattctgtggactctggtgtctctaagggagcatatgctggaatcacagggaacccatctggttggcatagctcttcccgaggtcatgatggcatgagccaacgtagtggaggtggcacagggaaccatcgccattggaatggcagcttccactcccggaaagggtgtgcttttcaggaaaagccacctatggagattagggaagaaaagaaagaagacaaggtggaaaagttgcagtttgaagaggaggactttgtaagtatgaatctttagatgtgtggttagaagccaacaaataatgtctgaaatatgagaccctgttagtaatgagaacatttcagaaattacagaaaaaggaatttgtaagttgaggtttttattgttttagaggaaagaagttaagttgataatatttgaaaatggtgaccaaaactcctatgtaacttgtagcaaatttttcatctttgtgtctttggaatttagaaaaatatttaatttctcttaagtcttataaagtttactcaaatataattatgttaaaatgtactcttgcatgttaaattgtcttttttccaactatgataaaacattttttctcttgattttgttctctatcacataaaattactgtgacatgaacatgtaattgggagtatttcagctgttgcctatgcgttcagtaacacttgatgttattgtgtgttaaattacatgccttttggcctcttaaatcaaaggtagcattttcagagtatctttaaaatgttt

SEQ ID NO: 53541 - DNA, 1013 bp, Homo sapiens
ctttaggtatggagtacctgattgtcgtgcccttttgaacaagagactgtcttttgtttgctttttttttttaatcgatagatccagaagtttaaacaaaaagtcatagattggaaaccaaaaccaataaatttcaatatttggaaaggtgctgaagcctgtatctatttaaaagataaaagagtgaaatgctaattgtgaatgagaactttgaaattaatagtaaaataaactcatctttcctagggagtcagttttcaatgtaccttttgacgttttttcaaatacaaaagttggtttttgttaatacccctaggattttttgttgttgttgttaaattattttggtggttttacaggaaaaatatttaaagtttttaatagaaattacaagctagttgctttgtgttttgtcactgttaactactaaactggagtgagatattgattttttgggggggtactcagtggtttgtacatgttaatataaacattcagttgattctggatggtgtctttatcagagctcttgatttgtggtgtggggggaactcttggggaaacctttattttgagcgaattcaatttactagattgctcatcagtggctgttaaaatgcttagctgaggaggacacattcaaccatttaaatttagaatgataagaaatctggtgcacatttctgcttgtaattcatttttaattttgagttaaagataagacacaatcgtgaatcatacttcagaagattgcatatctttattttatggctataactctgatgtgccagggactgactgctgtttaaagtgctttgtatttgttacttacttttttttccttcttttcttttctttttctttttttttttttttttttgagacggagtttcgctcttgttgcccaggctggagtgcggtggcttgatttctgttcactgcaacctccgcctcctgggttcaagcgattcacctgtctcagcctcccgagtagctggtattacaggggctca

SEQ ID NO: 53542 - DNA, 1029 bp, Homo sapiens
aaaactaagttggaaggtagatttattttctccatataaaaacagcattcccacggtaattagtgctgctgcttttgctatttataaataaaagaggcagtttagaaggccaaattctgaagatctagtctttacctgctcctctttcagatatttttctcatggaataagattaagtggtaggttgaaatatatcactagtttgtgttcagtggtttcttttgtacattgtatagccatttaatactcttaccagcaataatatcacttcagagttattagttcatcctttctgtatagtttgatgtggtaatggaaagcagatcttttttgtttgctcctttcaaacaatccccattatttcatactgggattgactaaaatctgatgatacatatatatatttttaattttgtcttttggttctattttctttgtagatactgaagtactctttcccagtgggactaagaaccagcagaacagatatactttctctcaagatgtctctccagcaaaacttttccccatgtccaaggccttggctttcctcatcatttccagcgtatatgagcaagacacagtgctatcatacatccccctgcagctttaaaaagcagcagaagcaagcacttctagccagaccctcaagcaccatcacttacctaactgacagcccaaagccagcattatgtgtaactctggcaggactaatccccttcgttgctccaccactggtcatgctgatgacaaaaacttatattcccatattagcttttactcagatggcttatggagccagtttcctatctttcttgggtgggatcagatggggttttgctctaccagaaggtagtccagccaaaccagactaccttaatttagctagcagtgcagctcctcttttcttttcatggtttgccttccttatttctgaaagacttagtgaagccatagtcacagtaataatgggtatgggagtagcattccaccttgaactttttctcttaccacattatcccaactggt

SEQ ID NO: 53543 - DNA, 1066 bp, Homo sapiens
tagttaaaagtagttttccagaaaaaggacataagagacctggtcaagtataaaaaatataaaagtctgggaagtgaggagcacctctgcccagctgctgccccgtctgggaagtgaggagcgcctctgcctggccgcctgaccatctgggaagtgtgacaagcgcctctgcccggccgctgtgcaaccttccacgtgtgaagtgacagccttgtgtgtgatcttttctgtcttccccaagtttgcattttcgacattaaagtttactttttagttaaaagttttaaaaatatatatatataaatacactgtagataacatttgtatgccagctacacctttttctacttctgtttggctttttttccccacaccaatggtaatttatcttcacagattgttcttcatttctagaaattgttacttcatggtaattacttgagcaaaagcttgaaaatccctgacaagtacttttcatctcatagtatattagttttcactcagtcattttatgaataatatagttatccacttaaacatttcaatattttaaccatcttgaaaattaaagattaaaaatcccctttgttagagtcttgtgatcattgaaaagaatgcacatattctcccacttcaagcggaaaacctcgtatctgtgagtatctgaaaagaaaaggtagttccattgagttttcacaggagttaccactgggaaaggcatgtccaaacttatttcacatggtataacccaattatatgagctaaaaggatctatggctctaaagtcagtagggagcagtgtcatgagggaaagccacattcaaaggtaagttggacatgttttccagtttttattaggatatttggcatggtacagataacaacttgtcccttaccaccaaacacataatagctggtcaaaatgattattttcaaaggaaactatttaaaataaagccactagtacatataaattaggaaagaaaagtcaagctggagccatcttgatattctaatgagcaggcctatctagttctacatctttttttttgagatggagtttcat

SEQ ID NO: 53544 - DNA, 1046 bp, Homo sapiens
cagcaggcagtatgcacctagaaatttctcccttttttaggctgggcatggtggctcacacctgtaatcccagcactttgagaggccgaggtgagacgggaagatggcttgaactcaggagttcgagactagcctgggcaacgtgatgagactccgtctctaccaaaaaatatataaaaattagccgggcgttgtggcttgtacctgtggtcccatctgcttgggaggctgaggttgcaggatcacttgagcccaggaggtcaaggctgcagtgagccaagattgtgccactgcacaccggcctgggtgacagcatgagaacctgtctcaaaaaaaaaaaaaaaaaaagaaaaaaaaattcttccttttttgctagattgttgtcaccaaaattatctgtttggctttaggaagagggaattttattagattatcaagctttgtaaaatttatttgtacttgggcaaacctaagtaagagcatactgcaaagctactgcttggatgtagagggctaaattgtaggtacttctgaaactttttatagatactgactcataagtgtaatttgaaagtaccccttgacccaaacaaaactgcttctcaaaacttctcattttctccctgagaagcattctaaagaattgttctctgttcatttctaagagaaagatttactgggtgtatgatgcggttacttttaagttatttctactggccagttggagcaatatatattaaaggtcttgcatacagtaaaaaaaatttttttttgagatggaattttgctcttgttgcccaggctggagtgcaaaggcgtgatctcggctcactgcaacctccgcctcccggattcaagcgattctcctgcctcagcctcccaagtagctgggattacaggcgcccaccaccatgcctagctaatttttctgtatggggtttcaccatgttggccaggctggtctcgaactcctgacctcaggtgatccacctgccttggcctcctgaagtgctgggattacaggcatgggccagcgtgcccggctg

SEQ ID NO: 53545 - DNA, 2306 bp, Homo sapiens
ctgaatggaagccgtgggggaggggatcttcggcgggaggacccgggctggagctttggaggggtggggtctgagtagttcgcggggaggagtgggaggtctggggaggccgagaaatggggagtggagaaatggaagtggtggcctggggttgtattggaaatgggggtgtagaagaatgaaaaattggtgcaagagatagtcaggggttctggatggggcgaaaggacgctggaatgtgggctgagtgtgtgagctgcaacgagtaggcttactaaagaggcgttgaggagttatccataggagtaaatagagtaagatgtaagtcaatttgatgtagtgttatcctgttttctagaggttgtccttaaaattgtaaaaacggatgacactcccaagcattctctgatttggccatcattatacttttgtaccagtgtgttcacaatcattgttaaggctctctttaccaaccatctatttcacaagaaagcacttgtgaaacacctgcatgtgagcagtgttaagcccaattttgtgaacagaattcgtagatatatggtttgcctgctagttttccactgaaaacacattactgggaaaacacagcagcatacaaatattcatggagtttctgaatgaacaggatatgtttatgtaatttattagtcaagagtaggtgtatttatgagtaggggataaaggtcagttttatcaggcaggagaagctgccactagtagcggtaataagtttagtgaaaggagaataagtaatccttggtcttgttggatttacagaaaaatgttctgtagtaatgaactctagtgacagctttccttttgttcagctctattcgggatcctactgacttcatccatgaatgttttaagacttcttataggtctcttacctcttttctctcagataaattagcattttccttagacatttttttttttttttgagacgaagtctcgctctgtcgcccaggggagagtgcagtggcattatttcggctcactgcaacctccacctcctgggttcagcgattctcctgcctcagcctcccggctagctgggattacaggtgcctaccaccatgtccagctaatttttttgtatttttagcagagacagggtttcaccatgttggccaggctggtctggaactctgacctcaggtaatcgggattacaggcatgagccagtgtgcccggccctttagacagtttaaaaattatataccatgctaggtagcccttggacttttccccccttttgttcttccacctcttattccccactgagccctgaggagactgcaccattgaccatctctgccccgcttctagctgctgagcattgtcctcttgctgcaatttactcccccatgtgcctaatacttatcttttacattctctgcagtatcatctagtcaaaacttgtacaatgaacttcaagtccaggtcctttcctgtctcagtttacctgtccagttgaccttactgcgtatttcatggtagagttcaagattacttgatttttccctcctctttattttatgatttttgtgttttctcatccttagcttcagtctcagagaaaagtactcatcctcctctccgaggctaatttctctacttatgtccttgatttcatcctcttttgtttgccttagacccttgttactctctttgttttatatcacaaataaaaacaaaacaacataatttccctgaattgtgtaacctacccaaactactttgttatctcttctttgcttccccaacaaccttcttgaaaaatgagtttgtattcagtgtcttagcttcctcaccttgtatacatttctaatatggtttggcttcttcacttatgctttcccaaaactgatgtctttaaggtcaccgaaagctttttttgtgtgggattacttttttattgaggtttgacaaatcaaaggttcattcagtccatgaaatattacagaatgagtacctgtatgatcacaactcacatcaggatggagaacattcccagtaccctagaatgctccctgtgctttctcctagcactactcttttacagatgtaacctccctcaccacctctgtcactatagatttgttttgaactaatacttcatataaatggaatcatagtgtgtactgttttgtgaccagattctttcattcggatcatgtcttgagactcatccatgttgttgcttgtagaaacagttctttttcattgctgtgtaattttccattgtatgaatgtattgtgatggttactaaaacttattt

SEQ ID NO: 53546 - DNA, 1163 bp, Homo sapiens
caccctcctcagcctccctaagtgctgggattacaggtgtgagccaccgtgactggtcagactttctatctgttaggctttcaggaatgttttgaaaagcagaggatttagaaatagttgttaatagtttttttttaaagtccttaagttatttcataggggtgttaccaaggtgatttttgtttaaatgacccaggaacatttaagttctacctttaaccagtaagagaaagtgatactttgtgactagctcagtctttggtcttttatattaaagaacattacttgctgtaactgattcacaaggaccccttgattgaggtgcttccattttctacacatggcttccaagttcagctgaggaaagtggaggatgggccaatcctagaaatggattaatcacttccactcatattccattgccagaactcagtttcagggccatgcctaactactggagggctgggaaatgtcatgtggcctgtgcctaggaggaaggtgaatcatgcttgatcaacatctaactagtccctgccacaggactcaaaccccaatgtagtccttagcttagaaccatacagaaatccatttattttggttatagacagcctggaaccatagcctcctctttttccttgtagacacacagagttttgagttataacaattttgaatgcaagtaaaggcctttttcccaagcacagataggagatctggaaaagcttttctgcagcctgtggcagaggtagtctctggcaaccccaagaaaggcagcttggtattgggggtgggggggagagagagagagaaagagagagagagagagagagagacccaagtcccttcaaatacctggaaagtcttcccaagaataacagatgcaaacaagcccagatcgcaaaggctacaatgtatatttaactcttcaatgcccagacactgacaaatacccacaagcgttaagaccattcaggaaaacatgacatcaccaaacaaactacgtaaggcaccagggaccaatcctggagagatagagatacatgacctttcagacagagaattcaaaatacccattttgaggaaattcagagaaatacaggataacacagataaggaaatcagaatcccctaaggtaacttcagcaaagaaatggaaataatta

SEQ ID NO: 53547 - DNA, 1038 bp, Homo sapiens
tgggcaacatagttgagaccttgtctatacaaataataataatcataaaaaaaaaattagccgaggatggtggggtgtgcctgtagtcccagctactcagaaggctgaggtgggataatcgcttgagcctgagcagttgaagctgtagtgagttgtgattgtgccaccacactctggcgacagagtgagaccttgtctggaaaaaaaaaaaaaaaaaaagccttttgtttgtctaggctttgtgtgataggcagggccttacaaaattaaagctgtgtagcctgggcaggttgctttgtttctgcctgttgttacaaattatacccttttatcctcaaacttgcttttgtaccaaaggcacccactggctttctgctcatctcacactgttccctctatccttaggtctaggcacctactaatttgtagggtacaataacagaaacttgttactattaaagtctcatctacacttgaagatataagccttttgggtcaacatatgtggagtagaaagttttgtccatttgttcaatatgggaagtgggagtagcggggaggatgtctttgtgtagcaggtgggaggctaatttttggatcaaaggatatcctgataataccgaagtttgtgattctcaggccacagagagaatcaggatcatttgtgaaaattcctacctccttaattttttattttgaaattttgaaatctgcagaaaaatagacagaatggtacagtgaacacccatgtaagttttacctagactgactaatttgtacattttttccatatttgttttttctgtgtgtatatatgtatttttttcccgaagcatttcaaagcaagtcacagactaattacgatacctcatccttaagtatttctcctaaggtgaaggatactctcctaaataactacaatatatgaccagatctaagaagtttaatagtttttttttttttttttgagcctgagtctcgctctgtcacccaggctggagtgtagtggtgtgatcttggctcactgcaacctctgtc

SEQ ID NO: 53548 - DNA, 3743 bp, Homo sapiens
ttttttagatagtgaggactgaagattttttttttttttttttaaccttgagtggctggagtgcagtggcacgatctcagctctgcaacctctgcctcttgggtttgaatgatttttctgcctcagcctcccaagtagttgggattacagctgcctgccatcatgcctggctaatttttgtatttttagtagaaacacggttttgccttgttggccaggctggtctcgaactcctgacctcagatgatccacttgcctcggcctcccaaagtgctgggtgagccactgcacctggccaggttgaagatttttaagctgtgtacaacgttttgggaaaggaaacctgtcttggtgaaaggttgataatcccataacgttagttttagtgaccaaatggcacttccacttgaagcctttttgtaggctttccactataatgaattgagccttctttgacactcccatagcactttgtcataccttttagcacacttctcatgtgtcataattacttgtttgtatttggcttccccattggattttagctcttctagaataggattattagtttatggttaatgttgattttggtaatctttcctcatccctatctcagtggttggcaaaataaatggttcttgaattagtaaatgaataaagagtttgaattttgaatcttttgtctgaatagcttctcagaatgcatcttttttatatttttactgattaccgggttgaataaattagaagccactcctacttcctctctgctgatacatatgttttagctagttaaacctattttgatagaggagttctatgactttaaaggcctatgactttgcagacactcatacagtgtacagcataccctatgcaaatcagctgtctgttcaggtcttgtgtttgttttccccatagacataatccagccgttagttattcaaagcagcagatgggagaaggaatccgtggaaatgtggatttattagctctcacaatgaaagaccacactggttatgctaaggattagaagatttctgctgaatgaaagggacatggatcctgttttttgtgctattttcagcagtgtggcaatttcttatgactataatcagttgtaaaaagaccagaaaatgatcttgtaaatagactttccttcaagccctagactgttggttgcagctgtcataattataggagggactgcttttcttcctttttgggtgcagactgaatctggcctttagctattgctatatttacaccttaggtagtataactggctgattgtgtgctttatacatacctttatctgtcaaattagggaatttggattcgtgtctcctgaattttgtaggagagtaattattgtagcatgtcttatagtttggaaaaaatgattgaatttaatgtgttaaactcacttcctaaaaatataatgctgccttcactaacaattttgtgtgtgtgacttgttagaaagatcagcaactttcctttgtgtttactaagattctgacaattaccataaagttggaaagtttaaacgttgcttatggagtgtgtaaggaacagaatcatatcatgagaacaatctttcactcttaaaatctaaaagattatgtattttgagccatgaattaagaaacagaagcatctttaaacttggctgaagttctactttaaaaatggcagccagtaaccaaagaaacaattcttgagatcattaaagcttggataaaatgagactttttcatgctgtgcccttttagaagtctgggggaatggggagcgtttcctgtgacagcactgtaagtgataaacagctgaatgaatttgtccatgctcagaactcacaacacgtggactagccccctcctgcacataaaagagcagggaaaccgaccttagcaatgatctagctcctgaagaaagaggctttcgttactgtccaagaagtgaagaccagtgagtctagcgataaagaaacaaaagagcccctgacagtatcgaaagaatctgacatttgctttgtctgtacaaaggatgaaaggaattttgccgacttagtcaaaacaataactggttttatatcattttgagtctaaaatacaggcatcagaatcgtatgtttttctttgtatttctgaagaattgtcatctttttaaaaacgtatgtggagtggttttgtttctggaaaggaaaacgtgacatggattttataagcttagtagctgtaggtggagactcttgttttgtttgctaaacctttttaataagcagcaaagtcaggatatcaaagattggaatttttcccccggaaccttttgttcttttcttagtacttcaaataatttcaaccaaaggggtatgcatggaaaatgaaaacaaatatgaagtctttccgctatttggcagtgcttcagatgagatgtatctatacttctgtgaagaaagacgtgattctgatatgaggcagtgattgtatacttacgctggacagagggataactggtttagtggaacagtgggttagtggtgtgctgaaaggattgtttgcctctttatccagcagtaagtaggcactagtagttgactgtctggggagtggcttttttttgtctgatatctattatggatgattccagtattctgagaaggagagggttacaggtgagtaaaagaaaacctttttcactgatctccttccttttaatgtctcttgtaaatgtactgaacagattgttataatgtatttaattcatttgaggtaggaggcagagtggagtgcagctaagttcctctttattctttgatgtatagttataattagagaacttatctaaaatcttgctattttgatagaaaaatgctgcttgggcttatttacactgtatttagtgagtagagcaactaaatcagacctgtatgggatacaagcctaatttagaacattagacattactgctgacagattgtttacggtgaacatattctgttcctgaccaccatgcctgatctgcccaccattaagtcacatgtatggtagtatatgcttgattctatgcatagttttaagaacttttctaaattatcacttggcatatacacattccatccacttatctattgtctgtctgtgttgtctgtccatccatccgtctgtctgtctacctacctacctacctaccatcttttccttcttaaatcataggtagtttgttagatgaagaggtatgtaagatataacagtgaatgaaaatagactgataggcaaccttcaactgagttttaatgaatatccttagcactaaaagaatacatgccaaatttgatgattatttttttcatgctttgtagattatctcatcttagtcttgttagcaaagagcaagccagcttctagtctatcactaaatgtttttgagaattgacataatgaagattctagtgtaaatcactgagctaatcaatcaacctgtgatggtttagtcatgaaatgtagctatttctgttgttttcattttgtttatttgacattatttataaagcactttttttgtacaaaatacctaaggattttaaaattatcatgaattaacattattttagtttctttaaagttctcaggtagaaaatgtataggattagtaaacttaaaatataaatttaaacaaattgtattgtttctagttattatatgtacttcttattgatggtgctgtaaacattcagagcc

SEQ ID NO: 53549 - DNA, 1048 bp, Homo sapiens
acctaaaacatactcatatttaccatgatttactagtaaagtcacatctggggaaccctaaggaaatagagctgtgataaaacaatggcttttaaacttttccttaacaaaaaaagagatgtaattaaggaggagatcacaacagcattcatatttattaagtatactttatatacacatcatatgcaatttttaaatgtttaaatgaaacatgtagtaattctttctgttactgtccattttaggattttgttttgtgaaaaatgctctagtgattaaattttcctctgaggtttttgtgaagccttttgggctgtttacgaaaacttattttggtttgatatgaagaggcttgagtcagaaaactcataaggttcagtcttgaccatgccatttaactagctttgtaaacctagacaaatcactttatcttcttaaacctcagttgccttatctataaaatgaagataatgttacctgtgttttcttcttactaagcctgttagaaggatcacttaatatatgtatagtgctttattacttatagtttaattttaatatatattagttttagaattcttaatgggttaaatttggatgaattctattatttaagaggcacattttaaattttaaattcagtttctagcagtggatattcagtctagcttcacaagtgtcctgagtcttctgtaaatggcaagggctctaccaggactcttagaggaatgagacaccaaataggtatgcataactgaaaaggagtagcttttcagcatcatagtcaggaaatatttgtacttggtcatttttctactatttctgccccccccgcttttttttggttgcttctatttgaaaactgcctgagatttgccttttcttagtattaagtgaaataaattaaggcctgagacaggtagcttcttgcagaaatgtgtgtcctcaatgaatggagttgctgggaagaaggagaaggaggagtattcttatttttattttataccagaataattttttggtcattttagtgatatctaaagttagg

SEQ ID NO: 53550 - DNA, 1023 bp, Homo sapiens
ccctgtcaccagtcccagggaaatgttaggccttcctagtcctggcaaagtcacaggaatattggcacaaatggattctaatgccactaaagaaagtactctgtgtggggatgtgttacctggaggtaaaagtaatatcttctttggtcagataaaggatgtaaaatatggctttcattctctaaaaatcaaacaaatattttctcactttggcattatttaaggagctccgtgttctctctcctccacccaaggagtactgctctgcaatagtactgctcttcaatatatgcagagcaggctagaaagaatccatttgctgctgttgtcagaaatttctactgaaaggtaaagcgcagtgatttatagcattggaaacttgagttagactgctccagtttaccaacttggctgaagacacttctggctagtataattcatatataggtaaccaggtgccaacatattgaggaaatgctacttttctacttaccattggcatgatcttaacttctctgtgtctttaaaaaataataataattttaaaaataataataatggaataatagtacatatatcatatggctatgatgagtactacatgaatattaatgtgtaaaatgcttagaatagaacctaatagttaagcacttaataaatgttggttgctgttatgtcattattattattgttatattattattattattattattattattattattattattattattatgtagcctggtctcgggtattagagaattggagaatattgagtagaaacttaggattcagccataactgcaagccttagctggggatgggaggatagacccaaggttggggcttttggcaactgaccctgatatcatcacaaggctttccaaagtaggagccagtacttgttgagaactgttagatttctaaggtgttctagttatctttaggacctgctactgaactggggattctgaaaaaaagagggtgctgagagggctgaataattggactaataca

SEQ ID NO: 53551 - DNA, 2367 bp, Homo sapiens
cacaacctatatattaggtaccttaatgatcttcattttacaggtggggaaaccaaagcatacagaagtatgcttagcttacccttcaatagaggtcttctgcaacttaccttaaacattaatggatgaaattaagctagtttctgggcttattttcttaactttccttatggcttttcttaccacaagaatgattagagagtaatagaaattgaacaaaaaatggcactgaactttgtctgaaggagtacagtttagttaagttggtcagattcggcatttgaataatgactgtgctttgagccctaacattaaagccctgtagtcttccttcaggcttgggtttgagaatgaataatgctgcagaaacgcccacatagtcttcgctcattattttaccagtttcttccagtcccttgcccactgcaacagctgtttagcctggcccatgccttctgggttaatagtatttctgacacagtgtgagttttcaagttgctatgtataatttctgccagagtttttactgccgccaggcctcagggttggaggttgcaactgatttgtgggggagggagtttggtgcttgtcactgacgcaggaacaaggtgctttctgtagctctgatttgttgctggctgagtgtgaatgatgtcaggcagatcagaggacagctgattcatttgggatctggaacttgtcactgtcccactgctgcctcgtgggctcttaggtcttttgtggggggatgggaggggtgttctgaagatcatgtttttgaagaaaagtactttaatttttgccgtaagtttgggaagcttttataatttcctttggctgacagaactgcataccccttgtgtgagagaacttcctaccaagactccagtgtgagggcaaaacttgagtagccaggagaatgatgaaacggaggcaagagagactgggagcaccatgtctgcggattcagtaaggaggttggggtctctatggaaactggcagatgtcaggaaaaaaaactaatgccaactaacacagcttcgttcatttggatgaagactgttttggagatgcctgtcaggaagagggctgagctggcttgattaattcaaggtcaaaacagtggtccttggcaggggcatatgaggtttccaattccagaaactgaattagatgtcattttaggggttcctgaatacttggagaactgggtaaaaaaatgaagacaattattttcttcccttgaaagcaaatgtttatttaaagttagtgtcaaggctgcaaatacaaaccccgtgaatgtgagaaaccaatggaaacaaaaagtacctcctcctttgactagagagggtattgtatttctgcccatggcctgtcagctcaggacctcagatctgcccttgcagattcaagcatgggtcctttagggtgtgacctctattttatttctatattggccaatatagaaataaactttattaggtgagaatatcaaagctgggagtggaagaaggcttcctcttcagggtgacttttccaagagcagctcaggcttatttaatgaagaagtgccaagtgaattcatcagtaaattagagaaccagtgaaagaagagacctagaattcatttcacctcaattatctgtcttgaactgcctttgtttaacccacagggctaagggagtgtacttcagattttcttcctgagtcaaactgcttgccctgagacagacaggcttcttcagtgggcttcctttgtgatgttgcccttcagtgtctgtggatgcttattgattgaattaatgattctattagaccttaagaaacaggatttgtttgaagtatatagttgtagtattgacacactttaaaaaaaaccttttattaccatactgacacagaagtaaaagaccatttaaaaacagacttcatcaactaatgtgttatttaaagtaaaggtcacttgttaacaaaattaaaaatttttaaatggagtttgtagcttaagaaaacttaaatggtcaaaaatcatggttctgtttttgtttttgagagtgtcttactttatggcccaggcgggagggcagtggtgctatcacagctcactaaaccttgacctcctgggcccaagggatccttccacctcagcagctgggaccacaggcatgcaccaccaagcctggctaattttttaatttttttgtagaaataaggtctctctatgttgctcaggctggtctggaactcctgagctcaagtgatcctcttgcctcagcctcttagagtgctgagattaccatacctggcaaatcatgctcttcaaatgtgggtacactgctgttggtaatcattttctctgttttactg

SEQ ID NO: 53552 - DNA, 1448 bp, Homo sapiens
tacaaaaaatacaaaaattagctgggcatggtggcgcgtacctgtaatccctgctactctggcggctgaggtgggaggatggcttgagcctgggaggtggaggttgcagtgagctgagatcataccactgcactccagccttggagccagaccttgtcaaaaaaacaaaaactaacaaaaaaacacactctggttatagttagaaggccactaggtaagagacaatggttatttgaacccatgatgattcagataagaagtggtcagatttggggattattttaaaggtagaattgatagaggaggaagagatatccaaggattgagctctggggcaagttttagaggttggggcgatagtgaggaattagactaaaatgaattagctattcattcaggaacaaggactaggagaagtatcttagaagccagttgaaaaaaaaatgttaaaaaaggaaagcgtgattgatcagtaggtatttgttaagctttttgttagagaatagtaacctgaaaaactaaaagtttaagtgaaacacaatgtatcacacagatttaagtgacattatttgatacaggagcttaaattccacagacagtttgggacagtgatagactgacataggacaatgttagaggctaacttctctctgaaggcacctcttctagacgtactagcgcttggcgtatgaggctgagaaagattgtaagttgggtagcccccaagatgtacccagtcctggcacatggttttgagtatctcttgatgactatggtctcagaacacacaacctggagcaacatcttacagctttggagcttgttaaatttcatgtttttttttttttttttcatagacttactaacatgtgtggtcactgtattagtgcttcattccattcttcttttgtatccatgccatgcaaagtgccagttcattgatatgacaagattattttagcttgttgtttgctagatatttttatattcctttaaacattcttgagaatctgggatgcagttatttagaaattgtttgatcctttgaaggaatactttcaggctttgtttggtgagaccagggcagcacttgaggctaattttttcttactactgaggcaatactttgagtactctatttgatgcccatgtattgtgagttttttccactcaggctgatgggagcatgaacgattctgggtccttagtgagccctgaagagggtacctgctcatgttcttggatagtttccttatccacatatgctgatagatattcagctaaaaactcagaggaagcccctgcagatctccagagttcccctctgtatatctgtcttctctggtaccctgctttgaaaattctagccaccttagcctccccaagttctcaactctgtcttctcaactcagggagactgctggactctgtttgagtacccccttttg

SEQ ID NO: 53553 - DNA, 1013 bp, Homo sapiens
tgaggcagctgggcacagtggctcccgcctgtaatcccagcactttgggaagctgagatgggccaattgcttgagcttaggagtttgagaccagcctgggcaacatggcaaaaccccgtctctacaaaaaatacacaacttagctggacatggtggtgtacacatgtagttccagctacttgggaggctgaggtgggagcatcgcctgatcacctgagcccatggaggttgagatcataccactgcactccagcctgggcagcaacagaatgagaccccatctcaaaaagaaaaaaagaaaagaaaagaaatacgaggcttccattgattctggcacattgtccttcccagagaggggcagaagaaagacctcatcggagtcagccatgtgcttctgtgtagaaggtatattcttgtatcccaggggaaccaggccacgggactcagctttgctgaaagggctgcagcacttctgtgcagttcattgctacactctttataatggaagatctaaacctacagttagtggcaattgacagacttagaactgttcagagcttgctgcctgggcatagaaagccatggtcactgttgtcctaagcctggaccttgtctgtctttgggcgttaaagcaggatatcaaagcagtgaaatgggtcagcatcaagctgagtaagatgtgtatattctccatgaatttgtttccttgctcacagtttactgtctttggagggagaaagtgagggtacatgtggagtatttgagggtcctgagagtctggtgattctgaaactgaactttgtccttgggagaaggatctcaccttctttggctcagattctcttagcctagaagccagccttttagtgtgatgatggcccctttccaagaatcagtaaatctctcaatcacaagctgtcactttagaagataccaccaagagaacagggatcccagggaactggagacatacttgacctttaaagcaaagctctcattgtgcttaggtgctt

SEQ ID NO: 53554 - DNA, 1107 bp, Homo sapiens
tgttggccaggctgcttttgaactcctgacctcaggtgatccgcccacctcagcctcccaaattgctgggattacaggtgtgagccaccacacccggggaaaactaaatactctttaaggcttgaagaggcaaagtggtccgggcacagtgagtcacacttgtaatcccaacactttgggaggctgaggtgggcagatcacttgaggttaggaggtggagaccagcctggtcgacatgataaaaccccatctctattaaaaatacaaaaattatccaggcatagtggcacatgcctgtaatcccagctactcaggggccacaacatgtgagaagaatgcaaggaaaactctggaaacattaaaatcacattgttctagtggtgattacctgtggaaaaaagtaaaaaagcagctttaactttttattcaatttgctacggtttttggccataagaatttgtgaattgtacgataaaaatgttaaaataaaagttattaacagagggcagtgctggcagttggaagaccagttaagaggccattgccattatcaagatgttaggggaatgtttgaaataaagaaaatatatgactatgagaaaaatgtaagagattaaatcagtggcatgtggattgattgtcttcagattccctgagtgattaatgccatgtgttgatacccttaacttagataaggaatactaataggaagagaagagttagggggaggaagacgaacccaggatcaaatttacacgtattcagacacttgatttatgacaaaagtggcactatagagctgtaggcaaaatccattggatgtttgtatagagaaattggaaaacgtggctcttcacaagaaaatcaattccaggtgaattataattttaaatgtgaaaggtaatacagtaaaacttttagaaggtgtacagaagaaaatctgcatggccttaaaatagggaaattttttaaaaacaggatataaaggataagattcctaaatttgactacatttaaaatgaagaatttcaccgggcacgtggctcatgcctgtattcccagcactttgggaggccaaggcgggtggatcacctgaggtcaggagtt

SEQ ID NO: 53555 - DNA, 1074 bp, Homo sapiens
gttttaatacttagactactttttttttttttttgagacggagtctcactctgtcacccaggctggagtgctgtggcatgatctcggctcactgcaaactccgcctcccgggttcacgccattctcctgcctcagcctcccgagtagctgggactacaggcgcccgccatcattccgagctaatttctttttttgtatttttgatagagacggggttccaccgtgttagccaggatggtcttgatctcctgacctcgtgatccacccgcctcggcctcccaaagtgctgggattacaggcatgagccaccgtgcccggcctacttagactactttttaaaaaaagacatattaggaaaaagagaggctcctggaaatggtgttaactcactattccaatgataacccaaaataaatccatcctctttccaggattctttgcagctgaaaagaacatgaacaggttgggataagtttgatagctgacgtgggtttcctccttcaacccacttaccttattcaaaacaaattttatccaggtttgttccacgggctcatctctcctaccctatggaacttccaatttgttaagcaaggatccagataagatcacttacagtataagaatatgctggtttgatgcatttgtttgtccaacccagctggaaagacttatcccagacttcttgcctggactatatataaactgtactctcagagtaggtacgagctgggacaccaagacctgtggctagatccccataggtggcattgagttatttctcattcatttgataaatatttgctgagcaccaccaactagagtcaggcgcactcggctgggtgcttagttatgtagtggtaacaaaatagacatagtccctacttccctgaaactcaggatgtaggagagtctgtgtactggttgtttcctctgtaaggaatgctgttccctcagatcttcatttagctaactcattgttatgattcatatctcatcttaaatgtcacctcctcagagaggccttccctaaacattcaatctaaaggggccttcttgtctttctccatcaaa

SEQ ID NO: 53556 - DNA, 1073 bp, Homo sapiens
ctacagccatagccacagagctgacaggtaatagcgggtataatggggagaggggctgggaaactgctatgcatggccagacaatatggtttgtgatgttgtggttggtgaaaactggttgtgatgattcttctctgactgtgggtatgaacattgggcctttcatgtcttgcaaagaggcccaaagggatctccctctacctgctggaaccaaggctcagagctcatatgcttggaggcaggaattgctgaatagttccaaacttctgagcttagggacaagtcacccttattcccacagctttgcacagtcagatgactgcagtgaccagatagaggaaatagaggcatcatgtggtggcatttcttcctgactctggtggcccctgctgttcattatacagagaaattgctgccatgcagctagttttcatttctatctaaggggaggaaaactcacatgtacaaaagtgtatttgacaagggtttgggaaatccatccctgagttatacttgtctcatctttgctgagctatttcctggaaccgacttgttttattgtgtggtgctcccaggacccagcaaagaggtcaaagagaacatcatgtctgagcaccttcctggacatgtctgaacctcagagactaggttccagcagagttatagcctatatgtgctgctgccagggtggcatgaagtttgagtcatgtgcatgtggcatggaacctgcggctcaccccttacagaacagagtagaaaagctgctaggtattggtgagggtggggaggagtgcttcgaagggagaagccccagcaagatttattcctttttgcttcttcttctccctgtccctgccataaccatgaagccttgaacaaaccacccaaatctcaggatcttagtgttttctctgtaaattgtaatatgaacttataaagatcctccattgctgatagtctcaggttctgtgagtaacagcaaaaaaactttgtatctaacttcaaccagagcaggctgtacccttaagctctacaaaaaagaatacaccacatcccacagtccaggcaaagaa

SEQ ID NO: 53557 - DNA, 1070 bp, Homo sapiens
ttcttttggagaatgttttagcctaaaacacaagagctgtactaattgctgctatgcacaattgacccttaagccctcattgagcaacttttttttttttgaaagagtgtcactgtcacccaggctggagtgcagtggcgcaatcacggctcgctgcagcttcaacctccccaggctcagatgatcctcccacctcattctcctaagtagactgggactgcaggggcatgccaccaccctgtagcaggctaattttttgtagagagggggtttcatcatgtttcccaggctggtcccaaatttctgggctcaagcgatccatctgccttggcttcccaaagtgctaggattacaggcgtgaactgccacacccagccgagcaactttttattaaaaccacagtgacaaggttggccaactttttctgtaaagagcccaacgtggagtaaatgttttagtctttgaaggccatacagaagcaggccgtagacctgctgaccccatccccattacttgcagcattcttcaggtcttccctgctcagtgtgcctttattcctgaatctcgagcagggaaaaggagtacatttcctctcccaacctagatactactatcacattaatccaaagatgtcattggtctttggcaactgttaagtttaagatctttctctaataaacattccccttcccgggccaggcgcagtggctcacacctgtaatcctggcactttgggaggctgaggcaggctgatcgcaaggtcaggagatcgagaccatcgtggctaacatggtgaaaccccgtctccactaaaaatacaaaaaattagctgggcgtggtggtgggcgcctgtagtcccagcgtctcaggaggctgaggcaggagaatcgcttgaacccaggaggcggagattgccatgagccgagatcacaccactgcactccagcctgggtgacagagcaagactatctcaaaaaaaaaaaaaaaaaaaaaatcccctttcccataactcttcactcaaacaagtgatttttttagaaccaaggtaagtctcatctgcaaattttaag

SEQ ID NO: 53558 - DNA, 1038 bp, Homo sapiens
aatgtcttcagttatcaggtttcccaaatggcagtttaaggaaaccaggatcagagggagcccattattttgctatttccaggtccttcaggcttagctccaactgagctggaactagaagggaagtgtttctttcttgcttttcttcccaggccaccgcacaaatggaagagcgactagcagagtttatttcctccaacactccagacagcgtgctgcccttggcagatggagccctgagctttattcatcatcaggtgattgagatggcccgagactgcctggataaatctcggagtggcctcattacatcacaatacttctacgaacttcaagataatttggagaaacttttacaagatgtgagtgtccttgtgctggggttctgaaaaaacctccacctggtattggatttgtaatcccaagctaagattagggcattagtggtattctcagtcttcacagactgcttgttacccaccctcaaaggtagagctgagggacttagattcctcctcagtcccctgcaatactgagagaagcctgcttggtatcaaaggaagtcacttctgttccttttctaaatccaaaattatattactttgttgtattacgcgaagctccaccatgggtagtagtcataagtatttgactaggaggtttgctacccaaagccaaaaagtggctccagtggctgtgacgggctttcttctactggaaatactggtttaagcagagccttcagactatttatcctcagccaagggaaaacaggtatgaggcttgcacaatgggtttagccatttgcatggtgagaagttctctagttgggacttacatgttttgagacctggtcctcgctggtgtgaaaaaatctctgggaggctaaaggtaaagtaatccagagatggccaagaccaaagcacatgagagttcttaagcactgcttcctgcacgagtgcttcctttgctatcagcctcttgattaaggtggccagatgccatctcactcagaccacagcggctccatgttatcca

SEQ ID NO: 53559 - DNA, 1712 bp, Homo sapiens
tggaaatgggagtagcagtaggatttggcttgtttcctgatccaaaagctgggactacattgggtatagtgccatgggactgaattcacatcctaggctgatgcaaaaagcattaatgactaccctacatgcacctgttgtgtgatctgaggatactgctgagatacctgacattgccacgcacattcttctcttgtatctttgtttccagaaatggcccagttgagcagctgtgacagtcctgacactccagagacagatgattctattgaggtaaaaaccctgagctcctaccccattcctggagcctgggccctatgaagcaaagagctatgaattctctttaagagaatatctgaggaagggatgggggagttggtgacagcaaacactgagaagtcattctactcccagaagaatgagcaggagactgcactagagctgacagctgagaagatgctagagccacagcttctgcaaggatatgggctctgagaagcatgcctgtctcctgccttttcccttgtcttccagggccatggggcatctctgccatctaaaaagacaccctctgaagaggacttcgagaccattaagctcatcagcaatggcgcctatgggtaaaggcaggggtcagggtgtggccaggactgaagccgggtcagcctttgatctcttccatgtgagagtgtatgctgcccagtcctctgggcagatgcctcggggtggaccttctcactcccagaagcctcctgggtgggcaggagttcagattcctctgacatccgatcattgttcctttcccagacaagattcccacgcctcttactaccacgcatcctccattccctgagctctggggaagcattgagccgtgtcatcaggacatggtctatcaagaagtttaagagttctatggaccagggggtcccagacccttctcactgatatgcatgcccttgcccccttgttctgtgcattaattaaggtgtgagagaaggcagtttgggtggcagagagcacagctcaggtgctgagggtccatgggggatgggccggactttgtttcccagggctgtatttctggtgcggcacaagtccacccggcagcgctttgccatgaagaagatcaacaagcagaacctgatcctacggaaccagatccagcaggccttcgtggagcgtgacatactgactttcgctgagaacccctttgtggtcagcatgttctgctcctttgataccaagcgccacttgtgcatggtgatggagtacgttgaaggtactgaggcaaaggtggcctggcatggaggccaaggcacagtctgagacttagccttaaacagggaccagcagctttgtacagaggtgaagtttcagggcccagctttccagtccacctttggcattggtttctgcctcaggatcacagagaccatttggccacagtgggcacaaagctccctgcctctaccatgagaggcattctgggataggatgtagcaggccagcagctatagaatcttgcaccccaaagcctgcacgctctctactgctggtatcagacagcaacagaggaggcagcagagctacaaaagcccaggattaggtgctaggaggtttgcatctggaccctcagaagaaaggaaagccattaattaccctgactggcttgcaaaggggacaccccttaaaaccaagcaaaatgctct

SEQ ID NO: 53560 - DNA, 1008 bp, Homo sapiens
tgagctgatatcacaccactgcactctagcctgggtgacagagcaagactttgcctcaaaaaaataaataaataaaaataaccatcagatctcatgagacttattcactatcacgagaatagcatgggaaagacccacttccatgattcagttatctccctccaggtcccttcccacaacacatgggaattatgggagctgcaattcaagatgagctatgggtggggacacagccaaaccatatcaccctgtctcccacccatgccagcagcaaaggggctagaatcagagtctccagcaccaggatattccatgaagctgtctcctctgggacctcagaaactgccagatgggagctggctagctagagcagggaactgaatcctttcctcatggtagcctgggcttgttgcagggggagactgtgccactctgctgaagaatattggggccctgcctgtggacatggtgcgtctatactttgcggaaactgtgctggccctggagtacttacacaactatggcatcgtgcaccgtgacctcaagcctgacaagtatgtccacagtctgtgtcccttgtccagggtctccctcttgggtctccagataaaatgttggcaagcacagtagctctaaatctatccagatggctaccgggaaaacatgctcctgtgtgtgtccatctgggcctagttctctagccccccgaccaccccagatgcagatcattgcctcaaggtctggctggaacactataaggcttcggtgacatggaagagtcattgaggagccccactgaagaaaccaagcaagaacaaaagaataagcacatctagtagatggctaaacaagtgtcctgacgtttactgacatctactctgtgccagcactatattgtgggtttttaaatgtagtccctggcatgtagaacttaagtctacagtgggagacagaaatatatgtatataggcttcttctcagagggtattagtcaagtggaaaaaggaa

SEQ ID NO: 53561 - DNA, 1913 bp, Homo sapiens
aaccctcctcccaagaccagccatggacatggaacaaaattatgtgtgccccctgcccctctccctgaaacaggagtattatgggccactcagattgggagaggggactaggaatggctccagcagctgccttaggatgaggctgatctcagctctgtagaagaaactctgttcctcaactgaatgactcctgcccccaacatagaatacagttagggcaataagcagaaatggagttgtgggaatgggcaaaaggcaggttcgttgcttgtgcagaatgcagcactcacacagccagagcgatttacgtgtccacacctgcctgtccccccagctgaagctacccagcttgtgtctcacagtacccccatggaagcctgagtggggaaactgggcatatactaaaatcagtactctcagaaaaccaggaataacttcttaattttatttcttcgttcttccagcctcctaattacatccatggggcacatcaagctcacggactttggactgtccaaaattggcctcatgagtctgacaacgaacttgtatgagggtcatattgaaaaggatgcccgggaattcctggacaagcaggtaaggaagggtagttgatacactgggggttaaattctaggcccttgtcctggcgcagtgtcttacgcccgtaatcccaaccctttgggaggctgaggcaggaggatcgcttgaggccagcctgggcaacatagtgagaccccatctctacatttgtgtacacatacatagattccaggccctagaataaggccttggggccatatgcctaccttgtagctagatgttaagattgggaacccctatcttttctacctttgggttccagagaggcactgagataggtagcacatttggaaaacaggatgagccttgagaatcatatggatataaaatccaaagtcatcttcctcctcagggtttggggaaaataggtcatataactgttagcacagagtttcatatgagatcagtcctgaatctcccagcctgaatcaagggcaaggctctcctggagcctgaggttcttggaacacagctctgaatttccattgggctgtggcccagtgtcctgagaggcagcctctggatgttccctggtttgacatttcaggttgtgactgttcaccggtccctgtagttgttacatgactgatagggtctgttttgttagaggctggagtgcagaggcccattgtgggatcacatgccagaggtgggtgttgagggcttaagggatggtagttccgggctagaatgagacatttttgttaattaggaaatacctactgacagttccgactcttgttccctggggcttctgttgatcttgttcattaactaaggtgggctgagtcttcattcagagattcttctgctcgagatgggagcatcccccatctccggctgtcatgccagtcagcagcctcaggaggctgagccagcctggcttttctgtgcccaggtatgcgggaccccagaatacattgcgcctgaggtgatcctgcgccagggctatgggaagccagtggactggtgggccatgggcattatcctgtatgagttcctggtgggctgcgtccctttttttggagatactccggaggagctctttgggcaggtgatcagtggtaggtactatgcccctggcccagtggggaaacagagtctgaatccacaaatatgatgtatgcaggcagctcgtgaggcctgtgagctcttgttctgaactcatcatgtgtgtttgtgatgtctgctgctttggggatgggtgtctctgtgtttctgcatgtacatacatgtgcacactgtgtcccttggggcttcacatgtctctcatagacacctggtctctcatatacacctgggtgttcctg

SEQ ID NO: 53562 - DNA, 1031 bp, Homo sapiens
cggagctgggtgattggctcccctgagatgtgagcacccagagttcacccagggtgggcgacacagctatccctgcattgtcacagatcatgggagagattccgatgccagggaggagtgcaggtggcagggagggggcattcacaagggtggctcctggaggaatgtctgcggaggaaagttctgttactataacccttgtgtgcccctaaggagacctggcaggaggagggggaccacctgggtcactcaccccaggccttgtgtctcatagattacggaagcggctgtcggtgtctgagtcatcccacacagagagtgactcaagccctccaatgacagtgcgacgccgctgctcaggcctcctggatgcgcctcggttcccggagggccctgaggaggccagcagcaccctcaggaggcaaccacaggagggtatatgggtcctgacacccccatctggagagggggtatctgggcctgtcactgaacactcaggggagcagcggccaaagctggatgaggaagctgttggccggagcagtggttccagtccaggtatggcccagtgggcggccaaacgacctaagctggaggatactgcagggcagggaggctcagcggcatcgcgggtctcactgcttacttgggcctacagctatggagacccgaggccgtgggacctcacagctggctgagggagccacagccaaggccatcagtgacctggctgtgcgtagggcccgccaccggctgctctctggggactcaacagagaagcgcactgctcgccctgtcaacaaagtgatcaagtccgcctcagccacagccctctcactcctcattccttcgggtgaggcccctggggagctgggataaaactcacaggaagggccttgtaatctctaggccttgggagggttctgcacgtggcaggtgtgtgtgtgtgtgttaagcacagatctgactgtggtctctgaaggtgtgtattggtgtctggggttgtgtatacatgtgccagaaagcaggac

SEQ ID NO: 53563 - DNA, 1068 bp, Homo sapiens
tctccttctccagaacaccacacctgctccccgttggccagccccatgtccccacattctcagtcgtccaacccatcatcccgggactcttctccaagcagggacttcttgccagcccttggcagcatgaggcctcccatcatcatccaccgagctggcaagaagtatggcttcaccctgcgggccattcgcgtctacatgggtgactccgatgtctacaccgtgcaccatatggtgtgggtatgtctgaccatccagacctgctgtctccctgcttcatcatccttccagcttcccctttgtggagcccatctgtccctgctcgggggtcaaagggtggtggtgaaggggctcacagcttaatgtccagaaccaggccccatacttcgtgttcaggctccagtctgagtactgttctcttcctggcacagcacgtggaggatggaggtccggccagtgaggcagggcttcgtcaaggtgacctcatcacccatgtcaatggggaacctgtgcatggcctggtgcacacggaggtggtagagctgatcctgaaggttagtgctgggcgtgctgcctgcatggtccctgaatgacctcagcctgtgagtctgtgatggcagttaggggagtgggtgagttgggtgcacacacatctacaccgagtatggatgtaggtacacacaggccgggcgcggtggctcatgcctgtaaatcccaacactttaggaggctgaggcaggtggatcacttgagaccagaagtttgagaccagcctagccaacatggtgaaaccctgcctctactaaaaatacaaaaaaaaaaaaaaaaaaatgcctgggtgtggtggctcacgcctgtaatcccagcactttgggaggccgaggcgggtggatcacctgtggtcaggagtttgagaccagcctgcccagcatggcaaaactctactaaaaataacaaaaattagccaagcgtggtggtaggcacttgtaatcccggctactcgggaggctgaggaaggagaattgcttgaacctggaaggcagtttgcagtgagctgaggtcatacca

SEQ ID NO: 53564 - DNA, 2298 bp, Homo sapiens
ctccaacgccagtaccgctctccacggcgcaagtcagcaggcagcatcccactgtcaccactggcccacaccccttctcccccacccccaacagcttcacctcagcggtccccatcgcccctgtctggccatgtagcccaggcctttcccacaaagcttcacttgtcacctcccctgggcaggcaactctcacggcccaagagtgcggagccaccccgttcaccactactcaagagggtgcagtcggctgagaaactggcagcagcacttgccgcctctgagaagaagctagccacttctcgcaagcacagccttgacctgccccactctgaactaaagaaggaactgccgcccagggaagtgagccctctggaggtagttggagccaggagtgtgctgtctggcaagggggccctgccagggaagggggtgctgcagcctgctccctcacgggccctaggcaccctccggcaggaccgagccgaacgacgggagtcgctgcagaagcaagaagccattcgtgaggtggactcctcagaggacgacaccgaggaagggcctgagaacagccagggtgcacaggagctgagcttggcacctcacccagaagtgagccagagtgtggcccctaaaggagcaggagagagtggggaagaggatcctttcccgtccagagaccctaggagcctgggcccaatggtcccaagcctattgacagggatcacactggggcctcccagaatggaaagtcccagtggtccccacaggaggctcgggagcccacaagccattgaggaggctgccagctcctcctcagcaggccccaacctaggtcagtctggagccacagaccccatccctcctgaaggttgctggaaggcccagcacctccacacccaggcactaacagcactttctcccagcacttcgggactcacccccaccagcagttgctctcctcccagctccacctctgggaagctgagcatgtggtcctggaaatcccttattgagggcccagacagggcatccccaagcagaaaggcaaccatggcaggtgggctagccaacctccaggatttggaaaacacaactccagcccagcctaagaacctgtctcccagggagcaggggaagacacagccacctagtgcccccagactggcccatccatcttatgaggatcccagccagggctggctatgggagtctgagtgtgcacaagcagtgaaagaggatccagccctgagcatcacccaagtgcctgatgcctcaggtgacagaaggcaggacgttccatgccgaggctgccccctcacccagaagtctgagcccagcctcaggaggggccaagaaccagggggccatcaaaagcatcgggatttggcattggttccagatgagcttttaaagcaaacatagcagttgtttgccatttcttgcactcagacctgtgtaatatatgctcctggaaaccatctttatgtcttttgcttgcttgttttccttcggtcaacccacatgtaactaggtcctgtgttgctgctgggaatatagtggtgaataaaacagtttccaccaccaggggagggccacctaacccagcttgacttcccaaaggctttgacatttgagctcaaacatgaagaatagatgataggtagtagtttgctgggtgtggaagagtggaggttggcataagaaaggctgtccaggcaacgtttagcacatgcagtatacctggcatagtcaaggaaccaaagataattcaaagtagaaacgggtctggcaagtgaggcaagggccatgtctaatggtcttccaggagatttgacttcgtgaaggtgatggggaaccagaaaataccatgtagcaactaaaattccttcatagataagggcactaagactttgatgcccatggtaatacagtagcttgggtagaacgggggttagaacgtaggtctcccttggactccggaactcacatctctcctaactaggattgcctcagccaggaaatgaggaggggaagaagtgagagaaggcaaagagtttaactttgggtgcgtttgagataaaagagaagacagaagcagcaaccagcagagtcataaagtctatgggaggagttttaaaatggacagagaagttaacgataaatgccgaggtgagggcgagattaaaacagctgccagtcgtatttagtaacaagcccttcataattgtagccagtgagctcttcctgggctgttgtaggtagaggcctcagcactggaggtggatggacatcgtgtgt

SEQ ID NO: 53565 - DNA, 1030 bp, Homo sapiens
caggcaaaaacaaatgttcaccacgcttaagatattaggacctcactgggtgcaatggctcacgcctgtaatcccagtactttgggagactgaggcaggcagatcacctgaggttagaagtttgagaccagcctggtcaacatggcaaaaccccatctctactaaaaatacaaaaattagccgggtgtggtggcatgcgcctgtaatcccagctactggggaggctgaggcaggagaattgcttgaacccgggaggcggaggttgcagtgagccgagatcatgccactacactccagcctgggtgacagagcgagactcaatctcaagggaaaaaaaaaaaggatattaggaccgtgctcacccagtaggatctgtctgcttgatttctattttagccttaacatgtcaaatatttttacagaattatgatgaattatgataaattgaaatcacgtctgggtgagattcatgatagcaaaatgcgtctagagcaggatttgaagaatcaagctttggacaaccgagaaatagataaaaaaatgaatagcatcaaacctgacctgatccagctgcgaaagatccgagatcaacaccttgtgtaagtagtctgggagtgtatggggagggagacgttagtgccaggttactaccagcactagagacactagaggtggaagaagagattagagatttgtaattgagaattggccagtaagatggtaagaatttaggaaagtgtccttggtagttgtagggggtaccagagttaatctgaagttaatatgtggagcaaaccagaatgtaggactcttgatccatacaaatgccttggaaatctcagaggctggctgtggcatgagtaaaatgctatatcttaacaagaacagattaatgtttgcctaaaacataaaaatcagaatctttgtttacatactagaactgagtggggaatttctatttcctctgaggggaagtaggttctaggctgggcactgtggcttacgcctgtaaccccagcactttgggagg

SEQ ID NO: 53566 - DNA, 1063 bp, Homo sapiens
ctcaggcttctgtctcacttttccgggggggggattagggcaaggagggcatgagggactgtctctccctaaaacccagacccctgttccccactcagttcttcttcatcctcctcctcatcttcattgctgaggttgcagctgctgtggtcgccttggtgtacaccacaatggtgagacactgggatggaggaagggaagaagattgggcaaaaccctgggagtgggctgtggcctgtgaatggccaccttctgtaccagcccctaaacactggcctgcctcacccaggctgagcacttcctgacgttgctggtagtgcctgccatcaagaaagattatggttcccaggaagacttcactcaagtgtggaacaccaccatgaaaggggtaaggttggctgggggaggttttagggtggagagaaagaagcaaggccccacctccaccctcatcttgtctccagctcaagtgctgtggcttcaccaactatacggattttgaggactcaccctacttcaaagagaacagtgcctttcccccattctgttgcaatgacaacgtcaccaacacagccaatgaaacctgcaccaagcaaaaggctcacgaccaaaaagtagaggtgtgggctggcatgagtgggtggggactgttttcatggcctcagagtggcaaacggggatgggagtagggcagctgccaactataaatgctcttttctcttcctgaagggttgcttcaatcagcttttgtatgacatccgaactaatgcagtcaccgtgggtggtgtggcagctggaattgggggcctcgaggtaagcagatgaggaggctgggactgggacatgggcatgagaccagggctgctcaacccatctgaggcctctctggaggaaacagacttctaactgggcctcaggtagggtgtctgtgggacaggcttcaggatccctatcatgttccctcatctctccctgttcctccctctccagctggctgccatgattgtgtccatgtatctgtactgcaatctacaataagtccacttctgcctctgccactact

SEQ ID NO: 53567 - DNA, 1043 bp, Homo sapiens
ctcagaacctcctctttatactcttagaacacctcttccaacctccttgtccaaattcatattctaaaagatgctatctcttacaaattgaggtggtttctgaggaggggtgggggctgggccaaagggtcgtcagtgacccctccctacagctctctgacccatgtctctgtctccatcccaccctcactagtgcctccatatctgggacctggatgtgcgtggcaaccatcggggcctgtggagattgtttcggaagaagaaccacttcctgatggtgggggtcccggcttccccctactcgtgagtgacccttttctgccctgggaaacaggaggcctagtgagatccagggatatagctaatggcttcttctctatacattcttgtattattttcccagagtgaagaagccaccctcagtcaccccaattttcctggagccacccccaaaggaggagggagccccaggagccccagaacagacatgagacctcctccaggaccctgcggggctgggtactgtgtacccccaggctggctagcccttccctccatcctgtaggattttgtagatgctggtaggggctggggctaccttgtttttaacatgagacttaattactaactccaaggggagggttcccctgctccaacaccccgttcctgagttaaaagtctatttatttacttccttgttggagaagggcaggagagtacctgggaatcattacgatccctagcagctcatcctgccctttgaataccctcactttccaggcctggctcagaatctaacctatttattgactgtcctgagggccttgaaaacaggccgaacctggagggcctggatttctttttgggctggaatgctgccctgagggtggggctggctcttactcaggaaactgctgtgcccaacccatggacaggcccagctggggcccacatgctgacacagactcactcagagacccttagacactggaccaggcctcctctcagccttctctttgtccagatttccaaagctggataag

SEQ ID NO: 53568 - DNA, 1772 bp, Homo sapiens
atgtcccccaggaacccatggatgtggtggcactgtttggtctgaggggcatccagcatactcccatcagcatcaagaatgcccgcgtgtctcaggtactgcataggcaagtggggatggggcagacacctggctctgccttctaccctaaagctcatgtgccctattcccaccccactcccagcactacaaggccagcctcactgccactttcaacctgtttccggtgagtactaaggatacaactcttgggcctgggaggggggaaacatgggcataaggtctgggcctgttacgtggcaagctcttcccctcactgggcctcatccttcacatctggaaaatgggggtaatgctgcctgcaagaagagggttgggggcaaaggagatcacaggatggagagacccctttgggaccatgatgtcccattccccttctaggaggccaagtttgctgtggttctggaagaggacctggacattgctgtggattttttcaggtgaggggagtctctaggtttcagttgaggtccctcagtctgcagggaaagagtcagtgaggtgtcctagagagctttctggaggacatgagctcacaagtgggggcgaagcctgggcaaaggtaggatggcaggtgttggggctgctgttgaaggtacagtggatgaatggagacagtggggatttgggggaaggaggtactccaggaaggaggtgctcctgagacccagctccagcaattctagcatctctgtgtgactagatttatccttgtccctccctgaactctttgaccctgcctctctcagtttcctgagccaatccatccacctactggaggaggatgacagcctgtactgcatctctgcctggaatgaccaggtaggctggaatgaccagggtttagcaggcgagtttatgaggcctcagctaatacctcccactatggcaccctgtccccaggggtatgaacacacggctgaggacccagcactactgtaccgtgtggagaccatgcctgggctgggctgggtgctcaggaggtccttgtacaaggaggagcttgagcccaagtggcctacaccggaaaaggtaactgtcagggtagggtgagggggctggagtcccctaccaactcgaaacatcttaaccttcatcgtggtccatgtctgccagctctgggattgggacatgtggatgcggatgcctgaacaacgccggggccgagagtgcatcatccctgacgtttcccgatcctaccactttggcatcgtcggcctcaacatgaatggctactttcacgtgagtgggaggcagggagcagggcacagtgtggcatgacagtcaagaacaagaacatggactctgaagcaatcttagctctgctacttgctagccatgtaaccttggggaaagagctatcctatttttgcctcagtttctttatctgaaaaatgaggataaagggctgggcgcggtggctcacgcctgtaatcccagcactttgggaggccgatgcgggtggatcacaaggtcaggagatcgagaccatcctggctaacatggtgaaaccccatctctactaaaaatacaaaaaattagccgggcctggtgatgggcgcctgtagtcccagctacttgggaggctgaggcaggagaatggcgtgaacccaggaggcgaagcttgctgtgagccaagatcacgccactgcactccagcctaggtgacagagcgagactccatctcaaaaaaaaagaggataaaatactac

SEQ ID NO: 53569 - DNA, 1040 bp, Homo sapiens
aggcaaatcccttgccccaccccttgtccttcctgggtgcaacccagtaggcagggcagagcacaagaagagattaatattaataacatcctggcctgaggaaggagaaaaaataggatggggatctctcctcattctggccccagaaggctccctcccttgtgccctttctcgggcagcctcaggccccaggcaagctgggtcaagaatacagagagacaaaatcaaaagttaaatgcagccccttaaagtttacagatagtttccaccaaggcagagaagagagccagagactgggcgtggctcttccactgactccctatgtgagttcagaatctgcaagcacgttttatctgtaagatgggagaaatgatgaccagttttctcatttcaatgacataaaatgttcagactatctggcacaaagcaggtctcaaagtaaagatgcaaagtgcagtcagatgatctgggttcaaatcatggccctgctttttgcgtgatgttgggcagttattaaactccctgtgcctctgttttcttttcttttctcctccctccctcccttcctcccttcctccccttcttccccttctttttttgagacagggtctagctctgagctctgtcacccaggctggagtgcagtggtgcgatttcagctcactgcaacctcctcttcctgggctcaagtgatcctcctgcctctgcctccagagtagctaggactacaggcacacaccacaacacccatctaatttttgtattttttgtagagacagggtcttgctttgttgcccaggctggtctcaaactcctgggctcaagcgatctgcctgcctcggcctcccaaagtgctgggattacaggcgtgagccaccatgcccaccctgtgcctcagtttctccatctataaaatatcacttaacagggttactgtggagatgaagagagcatcatgtaaagtgctcagcaagctgcctggcacatgcactgggtgaaagttttcaaagcaagtagacagtctagataggctcttacta

SEQ ID NO: 53570 - DNA, 1066 bp, Homo sapiens
acaatattctgatagtccccgctctgggagctcggactgggatttccaggcttttaccctagggcctgatttatattgagcaatgaggaaaccatacaggaccccagcgctgggcagagagtctggtatgtagatgttaaggagaggagtagggagcctgaatctccttggaaggagaattgggtttggagtcgcctctgaggctgcatctctcctgagctgtttatcctatactctattttcttcaagagatggtgtgaaaagagtgtttctttttctggcaagaaaaccttgctttcttctattctgggagtgatgctgtcacagtcagggaatcccactgccacaggattatagaatctgctctcagatttatttcccagcaacacactacaacccagacccctgaatcctgggaaccatcaaaggggtcaaggatagtaaaggcaagagaatcacagaactgaatgtgacctccttagcactgggccaagcaccagaaatggattgggcaggatctgctctcagggagctcacagtctggttagggaaggaggagacagaagaacatttctagtacaggatgataagtgctggtagaacccaggaagggcctcctggaagagtcttcactgtagagtgatgtggttgggtttgtgctctagaaagtcgatttcaaattggaaggaggcacaggctgtttcctctgcttgaaatgcttctctccacctctttgtctggctgagtccttctatttttttttttttgacacagggtttcactcccatcacccaggctggagtgcaatggtacaatgtcggttcactgcaacctctgccttccaagctcaagcggttctcctgcctcagcttcctgagtagctgggactatgggcatgtgccaccacacctagctagcttttgtatttttagtagagacgggattttgccatgttggccaggctggtttcgaagtcctgacctcaagtgatcttctgcctcagcctcccaaagtgctgggattacaggtgtgagccactgcgcccatcctagctgagtccttctta

SEQ ID NO: 53571 - DNA, 1214 bp, Homo sapiens
tgtaaaacaggattaaatcacttacctcacagggtagctgtgaggattctgaaatgctgtctattaagtactcagcacagtgcctagcacagaggaaggtctcagtaaatgttaagtattaaaatccaatcctattaagctttgaacttcatatttagggtacttctttttttttttttttgaaatggagtttcgctcttgttgtccaggatggagtgcaatggcgcgatctcagctcaccgcaacctccgcctcctgggttcaagcgattctcctgcctcagtctcccaattagctgggattacaggcgtgtaccaccacacccagctaattttgtatttttagtagagacaggtttcaccatgttggtcaggctggtctcaaacccttgaccttaggtgatccgcccacctcagcctcccaaagtgctggaattacaggcatgagccaccatgcccagccacagggtactgactattgagcctgcccatattcaccagaaagacatagaaacaaagaatagcaagatagggtgttaatcaggaagtagattgggccaaaaggaggcaggagctggggaataaagagagctaacctggttccctagtcttttcagggcattggtagcagccaccgagaggggaaagggttggccagagcttagaaggatcagaatcccactggctgggcattcaggccttcttgcctgtacacaccagtctacctgtctgtactggaagtaaatttgacttacagggtaatctcaagcgtccgttccagctcagatgcactgttaccttccctaagcacaagtctgaacctgtctctccctgctcaagagcctttataggcattgcactgctcttagagagtgccgaatccgaacatctacaatagcagggaactccgccctcctcttagagaatgaaatctaaacattttagcaactggcattcaaaagcctgtaacatgtggctctcgcccatctctatagtttcgcctctagcattctgctctgtgaacccaaggtgctgccacaaatgactttttaaaactagttttatttagttttacttttattattattttttgagacagggtcttgttctgtcactcaggctagagtgcagtggcacagtcatggctcactacagcctccatctcctggtctcaagcgattctctcacctcaacctcccaaggagctaagaccac

SEQ ID NO: 53572 - DNA, 1453 bp, Homo sapiens
gccccgtccagctcttctcgccccgccccgctcttctcgcccaactgctcctcgctgttggccccgcccctcccccgccacccccgcccccgccccgcccctctcttctcgcccaaccgcccacctctgttggccccgccctcccatctaagtcacgcctcctagtaggtcaatttagcttctccagctccagagcccagactcctcattgggcgcagcactattcccgcctcttccttgggtcgcgagcgccgaactcatcgaacgcagccaatgggtgatacgacggcagcgcggcgggaggttcgattgacccggtcttggcgggtcggtgagtcttggcggctgttaacgcgcgctttgggaacaggaaggttgagagagaggtgctggggtctgcgtctatctctgtcgctcttttcagcccctcctggtattcccctcctaacctgggttttttacacgcccgcgtggcttcctgctcgacctccctgagtctgatcctggtttccacctccagccctgggaaatttcctttctccagactcgccctccccacccgggcctcggactttcaccccagcttctctctcctggccagtgattacccacccccaatcccaccccgccccgccgcgcaactacctcctcccttcacccggactgggaccatcatccccactccactccgcccagtctgggactccacctgcctcctccccaatcccacactaatctctgcttggtctcttcctctttggcctaatctctcgtctcggcttattggggacggccactctcacagtttggttccaaacaccagttcctggatggattcccgccatccatgccccctctttaattagccggtcctctcaataatgtagcagccccctctacagattagaccctggtcctacactcttagccgctgcctgcttttgacctttggctcatgggtacttgacgttttaaactcctaggcccaggatggtaagtgtgggcctaggggagactgggaatagccctgggtcagggtctagtaggcctaggctgcaggatccttgcaggcactgtttctgttctccctttacagaggaggagcttggctcccagccagctggccaagagaaaacctgaaggcaggtcctgtgatgatgaagactggcaacctggcctagtggtgagcactcaaggggacagggaaggtgggtagagctgtttggacagaaaagaagccaggatttggtttctagggttacatagccaattccagatgcctcttttgtatgttcaataaacttttagtgagtacttactatgtgccaggcattgaacaagattagtaaaatctttatcctcagggtagtcactagaagctaatatagcctcagttttcctggtgggaaaagataagcaaaagagccagttggattggaccttttgactctgc

SEQ ID NO: 53573 - DNA, 1192 bp, Homo sapiens
attccatggagcttttggagtgaagctttgggccaccaggactccatgctgttggtagacttgctcttcagaggcccattttatttacctcttccattgccccgctcagtttaggcaggttatttaatctcattaagctctagttttctcacctcttaaataaggataataactctacataatagagttgctatgaagatgatacactatgacatgtgtgaagaatttagcacagtgcctggcacttaataagcacttcaagtgttagttgccattatggtgatttctgtggtcttctagacttcacctttcccaattctctctcctagactcctaggaaacggaaatccagcagtgagacccagatccaggagtgtttcctgtctccttttcggaaacctttgagtcagctaaccaatcaaccaccttgtctggacagcagtcagcatgtaagccagaactgcaacctgcatgtgtatgtctgtgcccagtcactcagcctaggtagactcctgtccctgtacactccctcagtgctttctagagtggccagaagacacacatctgtaggggctttggacctgcccacagctgctggggcctgcttagagaggtgtgcctgacttgtgcctggtttatagtagctacatgggcaccagatatcagatggttcagattcctgaggaaaggagggtaaaggaactaggatcctcatgtcagctcagactctgactctgtatatgactttaaggtgtaccagagtcatgtatttcctctagtaaagtcaaacttaatcaccaccatggcaggttctgtgcattgcctcatgtaattctcacgttttaagatgagaaaacagtctcagaagggttaagtaatttgctcagagtgggtggagcagatctgtctatctccaaagcttttccactaagctttatgaggaatgttttgaaggaaaagtaggaatacataatggagattagtcatttgtgcattcagcaaacatttaaaaacggttttgtggccgggtcgggtggttcacgcctgtaatcacagcactttggaaggctgagatgggtggatcaactgaggttaggagtttgagaccagcctggccaacatggtgaaaccccgtctctactaaaaatacaaaaattaactgggcatggtgtcatacccctgtagtcccagc

SEQ ID NO: 53574 - DNA, 1755 bp, Homo sapiens
caaactgagtttggaggcattctcagagagagagggtcatatgggagctcgggaaaggttatgtgaaggacaagtatttgagctgggcttgctggagctcctaaacatagattcaggtgacggaatgattattggtttgtaggtcctctgggctctcgagcattgggcctgaaaagggctggggtccgccgggccctccatgaccccctggaaaaagatgccttggttctgtatgagcctcccccgctgagcgctcatgaccagctgaagcttgacaagtatgtgcactggtatttcataagcagttttggttctctgtatatgcacgcatacttgggagggcagagggtattttggtgtgatttctttttaggattgacatatgttttcagagagtagatgattggggaaggagactgcctggggaagagcctgtggtcatgtccagtgagtgggcattcctcatcccctcctgccttcccaggatgctcactcaggaggaggagtgattgaggtgatgacacagggaacccatccctctctgagctaactttctaactcctaaagtaggaacttgctatggttttacgatttatcagccaagaaggtcttcttttaggcagctgcctctgttgcctccggatcagcaggacacagcttcctgagggtgctcccttgcccatgtctgagcacgctgttttctttgctgtgttttctcagggagaaactccctgtccatgtggttgttgaccctattctcagtaaggttttgcggcctcatcagagagaggtaaatgagggtgaggggaacgaggtatgggctatgggctgagcctgggagactaccatccctgggacagcagcagcgtaggtgccaaagtggactgaaggctgttattctctagggagtgaaattcctgtgggagtgtgtcaccagtcggcgcatccctggcagccatggctgcatcatggctgatgagatgggcctaggaaagacgctgcagtgcatcacattgatgtggacacttttacgccagagtccagagtgcaagccagaaattgacaaggcagtggtggtgtcgccttccagcctggtgaagaactggtacaatgaggttgggaaatggctcggagggaggatccaacctctggccatcgatggaggatctaaggatgaaatagaccaaaagctgggtacggagccctaacaaagatggctgcactctcctgcacagcctgctgctttcttacgtgtatgctcatttatggccagggtggagggcaatgcaggggtagaagaaaagagaatttccattgaaaatagttgaagtggagtcagttgtttccaggctaaattaaagaactgtctaattgttttttttgtttttttttttttcaaaagattctgaattgttccctttacaccttttctgttgtagaaggattcatgaaccagcgtggagccagggtgtcttctcccatcctcatcatttcctatgagaccttccgccttcatgttggagtcctccagaaaggaagtgttggtctggtcatatgtgacgaggtacttgactctcagcagtctgggtggtaggagaaaatctgtcaaaatctcttcactgagtattgccttccaagggctgtgctagtcactggggaatgctgaagacaggatgctgccttggagacaagtgacagggagagcctgtgataccaaaatacaagatactgtctgccaaaagagggctgaaacaa

SEQ ID NO: 53575 - DNA, 1063 bp, Homo sapiens
accctctctcatgctgccccctgcctagttcccaaggccctagaacctgtaatgtttttgttttttgttgagacagtttctcactatgtcactatagtggtggcatatgcctgtagtcccagctactcaggagactgaggtgggaggattgcagtgcactcacggctcactgaagcctcgacctcctggactcaagcgatcttcccatctcagcctcccaagtagctggggctatgggtgtaagctactatgcccagctaatttttgtatgttttgtagagatggggtttcaccacactggccaggctggtctggaactcctgggctcaagtgatccacctgtctcggcctcccaaagtgctgggattacaggcatgagccacggcgcccggcctggaatgtttttgactcctcttttcctgtctacatgagactttgctaccgtatagggaatgccacattgcgctctgaataaggattctcttgcagggacacaggctcaagaactctgagaatcagacttaccaagccctggacagcttgaacaccagccggcgggtgctcatctccggaactcccatccagaatgatctgcttgagtatttcagcttggtacattttgttaattccggcatcctaggtaagaatctagccttgtttgccacatcagagaggagccctgccttgtctttgggagtataactccagctgaggagagaaagaagagaatgctagttatatgtgggtcactaggcattcttgtaggaaggcttctcttgtcagggagtagcaaagccattgggaggccttggatctgctgagcaactcagcaaagcccatgttggccatttttccattgcagaggtggcaggggctatacagggaatggtgtcatgatgagctgagggtggaattattatttttgttcctcagatcctagctcccttagaagagttttggcctcagagcaagctctgtcttgggcagacgtgtgtgttttaaaaatcattttaaccatttttaaatgtaacaattcagtggtattaagtacattcactttgtg

SEQ ID NO: 53576 - DNA, 1068 bp, Homo sapiens
ccagtagttagcatggcaattttaccagcctcttgcctttttatcctgttttctctagatgcctgatacggaggacttctgatatcctttctaaatatctgcctgtgaagattgagcaggtcgtttgttgtaggtactgaactcaactgaaagatgtggagtgggtcaaagcctagctcctgaagcatggctgggctctcaaggtgttctcagagggcaggagggtggtctagctttttccactgacccagctgccttttttaggctgacaccccttcagactgagttatacaagaggtttctgagacaagccaaaccggcagaagaattgcttgagggcaagatgagtgtgtcttccctttcttccatcacctcgctaaagaagctttgtaatcgtgagttgggcttgtgtcctggtgtcctctgtgagagtgagcaagggagggtaggttcctgtagtggcctggcaaccctcactaaaactcgtccagagtcatcctcatagaggccacatgtgattccaaccctacccaaggcatgaaccctgcattgtggagtctgtttaccagaccctttgctttggaaaattgaactcatcttctgtccagcccatgcttgatgacctgggatgtgtcgactgtttgtgagtgcttgcatgtacacacgctcatatacaatgttgggcaggaggaaaaataacaaagaaaccttgcctgctctgttatagctcccttcttgttgggagaacacattagtgagtgagattgtccatccatcgtcccagatggcaccgactatatcctgttggaatttggtaggatgaagatcaagcaagtctgatgttgaggaaggccttttgggctaggcttctagagggagttctagtgaacactgaagtggaaacttcagaaagcaaagtatctgggttttgttttgttttctcccagatccagctctaatctatgataagtgtgtggaagaggaggatggctttgtgggtgccttggacctcttccctcctggttacagctctaaggccctggagccccagctgtcaggtgacccttt

SEQ ID NO: 53577 - DNA, 1176 bp, Homo sapiens
gggctgtcctgtttcaaggcaggatatcaagagtaagaagcctgggccattgggacagccagtaggggactgctggttgctgctcttcccaggtaagatgctggtcctggattatattctggcggtgacccgaagccgtagcagtgacaaagtagtgctggtgtcgaattacacccagactttggatctctttgagaagctgtgccgtgcccgaaggtagggaagatcctaaccaggatgccaaagggggatatacccctcccctactgtctgtctagttctgatttgtggatgtgggccaagatctgggcacataagggctttccctggagatatcttcccttattgctatgatggcctcagctctatctccaagtagaagatcccctagtccttcaggtactcccttaggaaagagtcttggcctctagctccctgcccctgcctttgggagcttagggcctcaagcatggttatttcagtcccttcagtggctctccaagggactctgctttcttgggtctttttaaaaaaatttttatttttaattttttttccccctaatcattgaagctttattttcttgggtctcgaatcccccttcaggtacttatacgtccgcctggatggcacgatgtccattaagaagcgagccaaggttgtagaacgcttcaatagtccatcggtaaatgcacatccccgtccccacaccaccaatgcagtatcatcagaattaaggaatgatagagaagctataaggggttaccttgattttttttttttttaattcccctagtggatatagtaggatttgtctggttggtgatggctgggctggaaactgactgtgtgtgttgggattggctggctggtgagcagataaactggtggttttcacaattggtactgagtagtatagaggcatgagggaggagctggttgggctgagcaggatcccagtttaggctataagaggttccttttctcctgtttcttctctttccagagccctgactttgtcttcatgctgagcagcaaagctgggggctgtggcctcaatctcattggggctaaccggctggtcatgtttgaccctgactggaacccagccaatgatgaacaagccatggcccgggtctggcgagatggtcaaaagaagacttgctatatctaccg

SEQ ID NO: 53578 - DNA, 1237 bp, Homo sapiens
gaactggtagggtgagatggattagatatccaggaagcagtgaattcctggtctatatctctgtagccccatcccttgtcttgcccctcccctcatgtacctgatgtccagctgacagagagaggaggatgaatcctctgagaaaacatctgccaaggccagcaggccagcattccctggagagaaggggagaacgcctatcacctccacccaagaacaggggacaagggtatcccaacccaactatggctggcagaaccagccctgctggttcctgaagccccagcacagaaatatctgtattccaactcccacgttcccagtggagaggtctttgcctttatccagtgagtttttaggtcaaaggcctagctcctttcccctctccctccccagggtctggcccccacccaggcggttccctggcagccggaggcccttcagtgtggagttgcccttcatagcagcaaccatctcaggcagaaattgggctgggcgcttctcaaacagacggcagaaggagaaggtaatctctgtcaagaaaaattatagtaaattctgatggctgcattaggactggtgctgcccctcctgccccagttggccctagcaaggggtattaacattatagaggcccaaaaagaggaaggaatttgtctagactccaagcaaggctggaactaaatcagaatccaaactaaagactgaacctaaatgttccctataagaaggttctctgcatggacaattctccattcacttccttctttccctaacactggccaccctctatgcgggggtggggatcagagaaaagtctatgaggggagcctggcacagtacatttattttgccccaccaccaccattttgtccacctctgaaaggtaagagcaacttttgggtgaagcactctaaaagagcgatttctcatgtttagtagaggaggaattgaggttggggcttttagaaggaaaatcatgcaggttctatatccattttatagctgaggacacaaggccaagaaaggaacagtggtttgctcactcagattatggcagaaccatagtgaagacccaggaaatgtccaggttctgaataaggaacttaccttgcagagtcagattctgtagcaaaaagagcacctcgctctgacagtcagcgagattcatgtcatggaagctcagtcttttcagggctaggttgtactctggataggaggcagagaccatggacca

SEQ ID NO: 53579 - DNA, 1040 bp, Homo sapiens
actcccacatggttctgacttaatctctttcttgccataggcctgggctctaacatcttccgcctgctagacagcctgcgggccctgtcaggccaggctggatgtcgcctccgtgccctgcatctcagtgacctgttctcaccactgcccatcctggagctgacacgtgctatcgtgcgagcactgcccctgctacgggtcctctctattcgtgttgaccacccaagccagcgggacaaccctggtgtgccagggaatgcagggccccctagccacataataggcgatgaggagataccaggtgaagcactgtgtgtgtgtttgtgtgtgtgcacgcacgtgtatccccacacaaaggtgcagatgcattcgtatggggaaaggggaaggacctcttctatcactcattcctggcttatctggaacctatcccccctttagagcctaccactaagatactcttgagctagacagggcctaaaccaccataagaccagcagagagtgaccaaggcagcttggtctccagaaaaggaaaagaactgatctttagactggattagttcccctgctgtatgttcccttagttcttgtatgtctcctatcccaccactctgcatactttatttgcttgtgtctgggtagcctgtcttcctggtctaaaatttctacaagggcaaggactaaatctcatatttagtgctcaattcctagaatctagcacagtgctgacatatggtaggcactcaacgacaagtgaatgaataaataattttttagatgaatcccttaagaacaggatgggacctgctatgggagtgaggtagagatggccagctggaatcttctttccccaccatatccagaaaactgcctggagcagttggagatgggatttccacggggagcccagccagccccactgctgtgctccgttctgaaggcctcgggttctctgcagcagctgtccctggatagtgccacctttgcctctccccaggattttgggcttgttttgcaaacactcaaaggtaggaccca

SEQ ID NO: 53580 - DNA, 1360 bp, Homo sapiens
gtaggcagatcacctgaggtcgggagcccaagaccagcctggccaacatagtgaaaccccgtctctactaaaaatacaaaaattagctgggcatggtggcatgtgcctgtaatcccagctactgagtcagtagaattgcttggacccgagaggcggaggttgcagtaagccaagattgcaccattgcactccagcctgggtgacaacagagactccctgtcaaaaaaaaaaaaaaaaaagatacaactatagagataaccaggagtaagaatatgaatgaccactaagtaaaattaagccattgaagggtgtttgcataaatgaatgacagggtcatttttgactgatttttttaaagaatcaagactgcatttttcaaaggatgcttgggctgcagtgcagataatggatttgtatggcaagagtaaggagtccggaggaactactgaaattagttcaggtagtgggtaatggtagcttgaattaaggatgtggagatagagaaataaatgtatttaacaaattgtaaagatagggctgggcttaatggctcatgactataatctcagcactgtaggaggccgaggttggtggatcacttgaggccaagagttcgagaccagcccggcctatatggggaaaccctgtccttactaaaaatataaaaatgcattcaagttggatgtaatgagttgggtggggtattgtgggttatgaagttgtcatgtctactagctggataaatgggtctggaagttcaagagaaagatctggggtaatgtcacataatggggagtctttagcatagttggcctttgaaaccacaggaatggatgaaattgtccaagaagcgtgcataaagtgggaaagctctgaggaactctgaataaacagaggaggagaaaactttttttttttttttgagatggagtctcactctgttgcccaggttaaagtgcagtagtgcagtggcacgatctccagtcactgagtagctgggattacaggcgcccaccatcacgcctggctaatttttgtatttttagtagagatggggtttcaccatcttggccaggctggtcttgaactcctgacctcgtgatccacccaccttgacctcccaaagtgctgggattacgggcgtgagccactgcgcccggccaagaaaacattttttaaggtagtgaaaaaaaatttaatgaacagcagtaaatcctgccaagaagagttactgaaaagtatacattggatctagtaacaaggaggaccctgatgacataggtccttgccagtgcagtggtaggggtataagaggctggaaggggctgtgagtaagagaagtggaaacagtacagataac

SEQ ID NO: 53581 - DNA, 1031 bp, Homo sapiens
tctcaaactggtaatttttatatactttgttgtgaagctctatgcatctagagcacaggtgggagaattagccttagaaaggatggtggtctcttctattctggtaaagaaggatgagtgcagatggagagtttataggctgcttagcaagctaaagaaactcatgtgtgatggcttctattttctctgtgaagtaggtgaggtcatccctgagaagggaaaaggagagtttggaagtggtaggaatgggagctgatgttgcaagcacagtgaaggttcatacgaggttagtgatcatatagtaacactgatttgcatagttgtatgatttgtctctagcagtgctcagcaacctaggcggattgctggatttagccagagttgaggttttgctagctggtcacaagcaggagggaaatgaggactgaggactgctttgcaggttgttggtctgataagaaattgtgtcccacaccttgtctggacagctactctgatatgactggtgaggtggtgaggtcaaactctagccctgcctgagcatgcatatactatactgctcccacctgcccttggactgccttccatatctaaaatgtattcattcttcagattccagctggcttgtctcactgcccctcaggaacccctgctttcaacaactaatcaagtgtatagactttatgttcctctcttctagcaatgacagtctcccctgctatgaggcatacaagccttcctctctaacctcctgatcatacccccaatttgcccctcccacctccctagaattaggcacacagctggtgctgctaggcaatctaagcccaatccctgccactccagggtgctcaccattgtaggagagtgtgaggctctccagtgacacccaggagctcagcaggtggcatagtgtcagggctgcctctgtggagagtggaactgtgaatagctccaaggtggagatgctgcggaatctttgtgaagcttccagtgctggaagccccaggcagctgggatctgatccatcc

SEQ ID NO: 53582 - DNA, 1120 bp, Homo sapiens
ccaggagcctcatgggaggtggctggggggtgcagctccctcttaaggtctgttccgcctgctgtcaggctctcctgtgtgctccggcgtgttacccgagtggcaggtgcagctctgggcatctgcttggcttcactcttacgccggctggccatcagggctgcagcacatcgctcagcagcatcccggcggggccgacgtgagcccaataagagggacccttcatctcgggatggggcccggcctcgggaggcctctccacagaggcggcagggtgggccaccaggccctggttgccagaagccagcactcatggtgagaataaggatgaaaagggctgactcaggcacaggccaggagtatagcgacacttgactgacagccccatggtgaatgagctgatgcaacagctgccgaagtgactgctgagcagccacatcagagaacagcaggtggcggaacttgagagtgtgcagggagctggccagggtctccagaaccctgcggttgggctcagccaccagctcggttgcaccctgcagcatgttacagatggtgagctgtcggacatggcgggagctgtgcagaagaggtgagaaccgctgatcacaaagacgcctgtcagaagacacatcaatggtcccacgtagaacatgggaaaaaaaggcctccataaacttggctcgccaacatgtcacactctgaaacgcagaaaacatgccagacagccatgatatatccatgaaactgtccaaatttccctctcttccaatagcacactatttactgagtcaggcaacactacaaattcatttaatcttcacatctctgaggtatgtattattattagccctattttacaggtaaaaccgaggcacaaagaggtggccacacaggtaagtggttggattatttgaaccctggaaatctggttccagagaccatgcttttattatagtgtctccactgaaacactcacccctgtaagttcttccatgtttgtttctagaaccttatcccaattttttttttctttttaagatagagtctcactttgtagcctaggctggagtgcagtggtgtgatctcagctcactgcaacctctgcctcccaggttca

SEQ ID NO: 53583 - DNA, 1054 bp, Homo sapiens
atgaggtgaagtgatgtttgcccaacaacacaatccttggcccatcctcagtgggctggtaggggaagaggaagtatttgtacaaactagggagggctaaacatcttgtgctaacttgttagagccaacaatattcagaaactatattttgttcattattttgctgataccagaaatactgtgtgtggatagagaagcaaatgaaaaatcatggacgaggcatggtgactcatgcatgtaatcgcagtacttggggatgccaaggtgggcagattgcttgagtccatgagtttgtgatcagcctgggcaatgtgacaaaaccctatctctactaaaaatagaaaaaatgtagctgggcatagtggtgcatgcctgtaatccagctacttgggaggctgaggtgggaggatcgcctgagcctgggaggttgaggctgcagtgagctaagatcgtgccactgcacttcagcctgggcaactggagtgagaccgtctcaaaagtgtaaactaactctggagtatttacatatatgagagtacctatatatatttgtttttacaacattgagacaattctgaacagtttcaaatgctgggcttttaaaacataccatgtattcaaatatttttagaatattttattttgaaaatgtgtaccatatgtaataatacttgctgtatttaatatttccattgtttctagcttttttttttttttttcctctgtcgccctggtctgggctggagtgcagtggtacaatattagctcactgaaacctctgcctcccgggttcaagcaattcttgtgcctcagccttccaagtagctgagactacaggcacacaacaccatgtccagctaattttttggtattttttagtagacagggtttcgccatgttggccaggctggtctcaaactcctgagctcaggtgatccacctgccttggcctcccaaagtgttgggattacaggcgtaagccaccatgcccggcctgtttctagttttttttttttttttttttttttttttaagacattcctgctctgttgcc

SEQ ID NO: 53584 - DNA, 1036 bp, Homo sapiens
tggagtttggggggactgaagctccgggataagctggagggtggtcggggaggcccttggctgtgggagtggagcccagtaccatgaggcctgagtgtcctgcatagtggtggtggaagaggcttttagaagtcggccggtgtgcggaggggacagtggaggccccaggccagccagcggctgagaagacaaggggcaggccgacccatggggaacaggaggaaaggctccgtagagctgagcagggagctcagaaaagtcctagggcatggggaagaaggcagagagggtctggcttttccgcctggagcttctgggatgctaagactggctaaaaaggaagatgactgggtgcggaggcccaggttgggaagcagcagcattaaaggtgcaggctagaaagaagcaaggaaaatcccggcttaagaagaatggagaaaggaagagaggagtttgtgggtaactggggatgagaattcctgtggctgcaagaagagatggctaactagaggggagcaggttggagggaaaaggggtaaggctctggaggaacttcttcccgtgtggcctcttccccctaaaacaattgacagtttactgaatctccctttccccttctccctcccctaccactgctgtacataccaccatcccattactggctgagcccccagccaagttgagaggagacaggggaggaagagctcctgtgggcctagaccagaaaaagctgaatcaagtgaggccttttaggagaatagccaaggaagaggcctgctaagcattgctattttagaggaaggtctgtgtgggctaacagccaggaaaggcttcctggaggtagtggactagcatcgctttgtgtaaggagttggggcagcgggtgtatagaggcagcaggaaagggtacaatgaggaaactttaaaataaggtatattataccttgaataccaggatatggagtttggactttatcatgaatgcagcagagagacctccaagggttttgaagagggtagtgtcatcaccaagagc

SEQ ID NO: 53585 - DNA, 1084 bp, Homo sapiens
cccgggacgtggcctccatggtcgttgccgccgctacctcacagaaccagcaactccgggcgcgccaggcctcgggcgccgccatcttggggaggtgcgcgagcccgagagtgtcgcccgcggaccgccatcttgaaaaggtcagcagttaggacggctccataagcgatatggggaagaatgtgaattattctaaagaaatttcgaagaaattagcacactttccaagtctcttaggagctactattttagataaactcctagatcaattatacttgggtgtggtatgactaaggggatgtttcttagcaaagcctcctcgggtgcaaacatcagctacccctaacctctgcctgcggctggtagtacatgccaatctgagcatgtgttcgcgaccacgatgagtgtgccgcacttccggccagatcgccggatttccgctgagtgacccttacaagtccttcttgatcctgaactgggttaggtgccgctgttgctgctcgtgttgaatctagaaccgtagccagacatgggactggaggacgagcaaaagatgcttaccgaatccggagatcctgaggaggtaaggcaaggcgatccactcggccctcttctctgccctgaagcccaggacctagcccgccaaaacacgcacggggccctcttagcccccagtttaccctctagggtttgcatagtcgggagctctagttccctcgacctttccccagaattcgtccggtgactttggacagatagatgactagtttttctctgggcctcggcttctgcattctgtgaatgtagtgaaggtttgagagcgaaaatgttttgtggactaaagtcttgtaaaaatatgacctatgtttgcagtcagtcagatgttctgaagcccgcgtttcacagatttggggagcaaacagaccgccttgccccagctcaggttaggaatccctaccacatcttctatggaggttcggaagacctggccttgtgttccttttctttgaggaaggtgtgtgtctttggggacaatgaaagaatgtacgatgtgattctgtgatggaagagggagctctttccc

SEQ ID NO: 53586 - DNA, 1027 bp, Homo sapiens
gaggccaaggtaggaggattgattgagcccaggagtttgagagcagcctgggcaacataatgagaccttgtctctaccacaaagaaaatttttaaattagccaggcatgtggcgtgtgcttatagtcctagctactcagaaggctgaggcaggaggatcacttgagcccaggagtttgtggctgcagtgagctatgacagagcaagactctgtctcttaaacaaaagataaaggaggcagtttgctacaagcactttggatagttacgttgcatatgaaaggtatgctcgcaggcaagtttgctgtctaaaaattagccctggaagagcaggattagctccaggattagcaaggcctctaaaatgtaaaaacatcataaaacacagaaaacaaaataacatcgttaatagtgtcagtgtctatcgtcagtaattacatcagtatgatcaggaataaatatgtcataaaattgctgctgacattaattttgttttccttttgtaggaggaagaggaagaggaggaattagtggtaagaactgtctcaggtttggaaacatctcagtaaaagcagggtttgagcttcatgaaattctaagggcattttaaggagtttttacttgataccttgtagataatgggggtggaataagctttgatacttcctgtgcagtggagagtttagggtgtgagccttggaagctgagtctgttctgggtttggggcttcttcagttgtggtaccagggagcagatggcatcttgagggcctggcactcaatcatctgctatttgtggtttaataaagaactttgggctaggcatggtggctcgtgcctgtaatctcagcactttgggaggccaaggcaggcggattaccagcctgaacaacgtagagaaaccccatctctactaaaaatacaaaattagccgggcgtggtggcacatgcctgtaatcccagctactcgagaggctgaggcaggagaattgctcgaacccgagaggcggaggttgtggtgagctgagat

SEQ ID NO: 53587 - DNA, 1090 bp, Homo sapiens
agcaaaactccgtcttaaaaaaaaaaaaaaaaagaactctgaaggaacctttgttagatagtccttctctatgttagcattgcctttctagttgggcagctggggtgcataggcctggttctcagacaaggggatttgaagtttcagacgtgtcatattccaaaatgctgtgttaacaagtaaggcctcctatagatctacttcaagtttggccaggtttcctttaccaccttgtttttcagataggactgaggctttcagtgcatactggcaaccttggaaggcaggaatgtgaaacttttccctactacttagcatcagaattgaatgggagaccgcattctgccatttctggcggcagtgtggctctgccagctggccttctgcacggtaattcagaggcagcaccttggtttggtggttgtgttaatcaaagcatatgtgtttggtgggtctctgctaaaaatgcccattttgttttttttctgtttctacatcaggatcccctaacaacagtgagagagcaatgcgagcagttggagaaatgtgtaaaggcccgggagcggctagagctctgtgatgagcgtgtatcctctcgatcacatacagaagaggattgcacggaggagctctttgacttcttgcatgcgagggaccattgcgtaagtcagtgggaagtcaggaaggggaaaggttgcaatggtcagggaagacttggtgccaacaatctttccatgctagggaaaggcccatcagttactctgggcccaatatatgtgacatatggtgcgctgagcattttatgtaaataacctattctattttattgagagggtctcactatgttgtccaggctgaagtacagcggcatgatcgtagctcagtgccaaccttgaactcctgggcctaagtgatcctgccttggcctcccaagtagctgggactacaagtgcatgccaccatgagaggctaattttttattttttaattttttctagtgacggggccttgttatgttgcccaggctggtctcaaactcctgggctcaagcaatccttccttccatctcggccctctgaagtgctgggat

SEQ ID NO: 53588 - DNA, 1022 bp, Homo sapiens
cctgttgaattaatatgtaatgttaatgtcactgatggggaggtacaagtttttgtggaaagataggagggacagatttgtgtgtggataggggcttgtttagagaaggcttgcaggaaatgacagttatcagatctaaattctaaaggaagaataaaagatgaaaaaagtggggagttcactaggactcaagtgctgcttgcctatgtgagaaggggagtggtgagaagaggggcagtactgtttcaggtcttgaaggaccttgtaagccatgacattaaagctgccaattgattacctccttttctttcccccatctaggtggcccacaaactctttaacaacttgaaataaatgtgtggacttaattcaccccagtcttcatcatctgggcatcagaatatttccttatggttttggatgtaccatttgtttcttatttgtgtaactgtaagttcacatgaacctcatgggtttggcttaggctggtagcttctatgtaattcgcaatgattccatctaaataaaagttctatgatctgcaaacctgcccgtcttttttttttaattgagaatttttttttttaatttgatattttcttttagttttgagggggtggggagcggcaaggaggacagggtcttactttgttggctaggctggaatgcagtggcgcaaacagctcattgcagcctccacttcctgggctcaactgaccctctcaccgtggccccaagttgctgggactacagcatgcatcaccatgcccagctaattttaaaaatattttgggccgggcgcggtggctcacacctgtaatcccagcactttgggaggccgaggcgggtggatcacgaggtcaggggttcgagaccagcctgaccaacatggtgaaaccccgtctctactaaaaataagaatattagctgggcatggtggcgggcacctgtagttctagctactcaggaggcttaggcgggagaattgcttgaacccgggaggcagaagttgcagtgagcca

SEQ ID NO: 53589 - DNA, 1014 bp, Homo sapiens
atgctctgtggttccctccaccccccatccctgcccactgtctggctccctcaatcattcgacaggcccccctcccattgtgcccctgtgtgacacctatagcactcccaggggcccaccccaacctcgttgtcagcctgtgatgcctccttgttctacccacatctattcttttatccctttgagaacaccctttgatcctcaaagtttacccattgtcccccgagtccgggcctaccctgatactgtcccctgtggcctccatatctaccctgtggcctctcaaggcccttgcaaagagcctctgcagatcccctacagctgccctttgccttcatccaaggattccagctgtagcaccaatcccagctgtagttcgactattattagcaaatgccagagtagtgacagcgagagcaggagttcccaccaaagccaaagccggagccaaagcaagagtccccatgatggcagaagtcagagctggagcaagaggcatcatctgagcagaagtccaagtcagaaaagcagtccctatcctagcagaagctggggccggagcagtaatcctcaacaaaacacaagtcagggccagagtgagagtccccaacttagcataaatgagcaccagggtgagagtccccaaattagcagaggtcagggcaagagcaagagtctatgatggcaaaagtcggaaccggagcaagagtccccaacatggcaaaggtcaaggccagagcaagagtccccaacatagcaggagccagagcaagagtcccagcgaggcaaaagtcacagagcaagagtcctcaccataacaagaaatgagggccagagcaaaagttctgaccagaccaaaaatctaggccagagcaaggcatagatagtaacaagattgccagctatagcaagcatcccagctgcagcaaccaggaccgacttgtgcactcctcatctgaagtcttcatttctcttttactctgcctccttgttcttgtcctcttgtcccctgct

SEQ ID NO: 53590 - DNA, 1020 bp, Homo sapiens
tctcccactgggaactgcagtctgagggtggccaatctgcagccccatcccctgcctcctgggcctgcagtccgaaccttcgatgcttcacttttgacagaggggatatcagtcgcttccctcctgccaggtaggatctggagccatgactggagcggtcctgagtgtctgctggaagtagacatgttgagacccagcttctaccctctgtaataaggaccataatattgctaatatttatggcatgtttatacagactaggcatttttttgaggtgctgtacatatgttatctctttttgttctgtcagcagccttatgaagtaggtaatattattgctgttttacatttggagaaactgaggtacagagaagttaagattcttacttgctttaggtccctcagatggtaagtggtgtgactaatatttagacccagaacctgcactttgaacccactctgctctgtgcctctggtagaaaacagccaccttttacatgagcactcactgggccctctcaagttgaaatgtgttattcacagcagtcttctcattttgccctcacagccacccatcaaagtgaataggaaaagtaacttcatggtagcaaagaggtagtgggactttcctaggaaatagggctggtctaggggcacaaacttggtattagactgggaaaaagaaaggagaagttcagtttcttgattcaatcctcatgtatatgaagttgaatgagaaaagactgcagaatcaaatgctgaattatgctttaacaattaaggagagctcaatgttagttgtagggtatgggaattgatttttgaaagactgatttatttattaaaaaatattggccgggtgtggtggctcacgcctttaatcctagcactttgtgaggctgaggcgggcggattgcctgagctcaggagtttgagaccagcctgggcaacatgatgaaaccctgtctctactaaaatacaaaaaaattagctgggtgtggtggcgtgcgcctgtagtcc

SEQ ID NO: 53591 - DNA, 1049 bp, Homo sapiens
gaaaggaaagggaggaaaggggagagggaaaggagagaagaaaggcgaaagtaatggggaaaggaaaaggggaaaggggaaagaaaggggagaaaggggagagaggacaggaaaggagaaaggaaaggagtcttacttggtctgctttattcattgacttaaataactttgatactttctggcccatttaggtgtttgccattgtacccccactcagaatgactgatgctgtgccatgcacataataaatgttcctgatgctggggtttgcattggctgggactacctgagaattggtctgactccatcagcgccattgctggtggaatgtttcattgggtcatggcctctgaagtatctttatttccataggcaatcttgctgccaatgatctctccccgtcccgaatagccagactacagaagatccttcacagctatgtgcctgaagagatcagggatggaaatcaagttcgagttacctcatgggatggcaggaaatggggagaactggagggggacacctatgaccgggtgagtgattcttgatttaggacatgcatccagcttaatgcggcctccccatcctggttctagggcctgaggggttaggatccagcccctatgtttgagcatgtagagctgtttctggactggccagttctacattggtgatttgaccaaaagaaaaatcagcttagatgactggttattatctctattaaagatagttggcagcaaaaaagaatttgaaactatttgagtaggggaaaaatttactaggcttactttatttctcaagtcacttggttgctcagaaagcctcatgaaggtaagtaagaataagctcatttatttatttttgaatgttagtacagcacatggtacaaaattcagaaggcacaaaagagtatccaatgaaaagtgagtttttctcatctggcctgtagccccctacttccccaccctatagataacgattgtttcttttttttttttgagacggagtttcgcttttgttgcccaggctggagtgcaatggcgcgatct

SEQ ID NO: 53592 - DNA, 1038 bp, Homo sapiens
gggtttcaccatgttggtcagactggtctcgaacacctgacctcaagtgatccattagcctcagcctcccaaagtgctgggattataggcgtgagccactgcgcccggcctattcatttttcttgatatgagagcagtggaacatgatggagagagcatgacctctcctgtcagcctaaccagtttctacattacaggggtgctacttactaaccttaggcaaactgttgatcttgctgaacttcaacctcttcgtttgtgaaacagggtaatcctaccacttaggattattgtgaggattcagtgagagtatccagggaaagcacttagtatagtacctggcggtgaagattaggcaagcaggacccattatcattattcagcctatgcttaaacacatccgttgatgggtgcacactgagattctgttgttgaacacttacaatgttaggaagttctgcctcttactgcaatctgtagatagcatggtatatgggttagggcaaggattctggagtcagactgcttggattagtcctggttccattacttatcagccagagaagtttcggtgagttacttaactttcagttaagcttcagcttcttcatctgtaaaatgaggataatagtatagtgcctatcccgtaggtgaaaattaaataagaatgcatttggcacaatgtctggaatatagaaaacattcagtagtagtataatcatcacaatccttaccattattattattatttccattcattgatcctagctacttattttagaacaatatagaatgagtgacctgctatttcacttgacagctttaatgtttgaagatgtctttgttaacttgtttgttgaaaaactagttgtggccgggcacggtggctaacgactgtaatcccagcactttgggaggccaaggtgggtggatcacctgaggtcaggagtttgagaccagcctggccaacgtggtgaaaccccgtctctactaaaaatacaaaattagccgggtgtggtggcaggcacctgtaatccc

SEQ ID NO: 53593 - DNA, 2062 bp, Homo sapiens
ccggctctactaaaaatacaaaaaattagccgggcatggtggcaggcgcctgtagtcccagctactcgggaggctgaggcaggagaatggcgtaaacccgggaggcggagcttgcagtgagccgagattgcgccactgcactccagcctgggcgacagagcaagactccatctcaaaaaaaaaaaaaaaaaaaaaatatatatatatatatatatatatatatgtaaattagtctggagtggtggtttgcatctatggccccagctactcaggaggctgaggtgggaggattgcttgatcccagggagtttgaggctgcaatgacctatgatcacatcactgtactccagtctgggcaacagagcaagatttgtctctaaaaattaaaaaaaaaaaaaattatagttacttgtgtgttagttttgggtttttgaccagccatgaatattcccaaatatactattttccactcattatttcacaattgtctaccaagttaaaatgaagaactttgtcaggtactctgcaaaggagggatgggcagagggaatatttcacaaacttaggccaggggcctaaaacatctctggcctaaggaagagaagcctataaggatctttaatactttaccctttaacactctgggtaggtgctggtggatgtgccctgtaccacagaccgccactcccttcatgaggaggagaacaacatctttaagcggtcaaggaagaaggagcgacagatattgcctgtgctgcaagtgcagcttcttgcgtgagtgacagatttttaaactcaggactttgtgccagagtgctctgggagactgggggactggaagctcttaccaagaccataacccacacaagaatcttatggctggagatctgcctagaggagacagaaatgggatcatctctggaacataaaaaccctatttgaattagctgggtgtggagatgcacacctgtagtcccagctactcagggggctgagggaggagaatcacttgaacctaggaggtggaggctgcagtgagctgagatcgtgccactgcactccagcctgggtaacagagcaagactctgtctcaaaaaacaaaaacaaaaacaaaaaagcaaccctatctagtaggatatatatactagagtgggctgcacagattgactcatgctatttcatcctcagtaccagtgagtagcacatgtttgaaaaatagctgctagagtaaggactcattctatagccagcatagcaatttggtccataaacaagagctcagggggtcattgtaaggagacttcctagtgaagagctcatggagtaaggttgggttgctatctgccttgagagtgacttttcagacagtgtcattgtggaagggacttgagaggcagtctaaccagctacccatcctgtagtagccttcccttatccatgtttccagctccttatgttgctcttctactgctgggaagctcactagtaactgcttctgtctctttctggtttcagggctggactccttgccaccaaaccaggaggccatgttgtctattctacctgctcactctcacacttacagaacgagtatgtggtgcaaggtgccattgagctcctggccaatcaatacagcatccaggtacaggtggaagatctgactcacttccgaagggttttcatggacacattttgtttcttctcatcctgtcaggttggggagctggtaataccaaacctcatggccaattttggccccatgtacttctgcaaaatgcgtaggctgacatagtatcacccaatccctgaagcaagaatacaaagggtatactctgttggatgcaccagaaactggaaactgggaccagtggcagagatgcactctcggtcctgtctccatcctgttcgtgtctttctgcagttttcggcaataagaagtagaagatttgctgtcctgctgtccaattgtggagcatcagcaggtttccaactcactcattaacccctaccccatctccaggcctgtactaaagtttgctgcccgcttaggggcttagaagga

SEQ ID NO: 53594 - DNA, 1034 bp, Homo sapiens
cattgtaattgagggccctggaagatctctgagactcaaaatcaggtgaagctaggaagatggagctttaaggagcatggctagtgctctgagtaggaccgtaaccgcctccgtgcgtggcatatggtccctgcatgctgttcactctgtatagtacttagtattcgctgaggctaagaggcctcaggtgcctgggcttctgcccttggactcctggatatccagcctagtgctaattgaatgctaagcagtggtaattcaaaatgagagggtcccctgcctctagagtcatcatctaattggggacaggcagacctagataagaaaagcagagaactactttggaaaacagtttatctgctgtaattgaacattcagctaccctataacccagttaatccaatactggggataaatcctagagaaactcatacatgtacaccaggagatgtgtacaagaatattcatagcaaccctattcacaaaagcaaaagcctagaaataacccagatgcccatgagcaagagagtggacaagtaaactggaatattcacataatagaacattatacaattgtcaaatgaactataatgatacctaaccatatggatgaatctgagcaataaaataattaagtgaaaaaagtttaatcccagaagagtaaatgtagcatgatgccctttctaaatgaaaggttttttcttttctatggagttattctttacatacaatatagttcataaattttaaatatattgtttaataaattttgataattgtatataatagtatagtcaccatcaagatgtagaaaatagaaaataggctaggcacagtggctcacgcctgtaatctcaacactttgggaggccaaggtgggaagatcacttgatcccaggaattctagatcagcttggacaatgtagtgagacctggtctttaccaaaaaaaaaaaaaaaaaaattagctgggtgcgctggcatgtgcctgtggtcccagctactcaggaggctgaggcaggaggatcacttgag

SEQ ID NO: 53595 - DNA, 1042 bp, Homo sapiens
gggccatgttgctggttacccctctccctgggtatactttaaaaggccagttctacatgatgtatatttcaccacaatttcttaaaaaggccagcctccttttatcttatgtctacttccccttcctcaggcctgggaagtgaacaaagggaccaactgtgtgacctcctatctggctgactgtgagactcagctgtctcaggccccaaggcagggcctgctctatggcgtccctgtgagcctcaaggagtgcttcacctacaaggtatgctctgcctcagcgccaggcctccatcgtcccctccatccctgccagcctgctctgcatcttgggtcattttgggcccttagaggaggtatcaggtccagaggccttccgaggggacactggtatacctgttttggcctgtgtgacagttgttggagtggacccttggctgcccacgggccctgactcactcccttctggtgcccatccctcctcccagggccaggactccacgctgggcttgagcctgaatgaaggggtgccggcggagtgcgacagcgtagtggtgcatgtgctgaagctgcagggtgccgtgcccttcgtgcacaccaatgttccacagtccatgttcaggttgggtcttggggtggggcggggcggggcaggggcaccggtcccagcatggcacgggctgacccattcttggctcctccagctatgactgcagtaaccccctctttggccagaccgtgaacccatggaagtcctccaaaagcccagggggctcctcagggggtgaaggggccctcatcgggtctggaggctcccccctgggcttaggcactgatatcggaggcagcatccgcttcccctcctccttctgcggcatctgcggcctcaagcccacagggaaccgcctcaggtaaggtgggtggagggcgcttctgggcccctcgctgtgtgaccttggcctagcttccaacctctctgggctccaggcggggattcggtctccggggttttgctgggaggaagcattacagtaccactggc

SEQ ID NO: 53596 - DNA, 1050 bp, Homo sapiens
tataattatgattcttttgagatttgtatgcttcacaagtaaattttcctaataaccctttttttttttttttttttttgagacagagtcttgctctgttgcccaggctggaatgcagtggcgtgatctcggctcactgcaagctctgcctcctgggttcatgccatcctcctgcctcagcctcccgagtagctgggactacaggcgcccgccaccacgcctggctaattttttgtatttttagtagagacggggtttcaccatgttagccaggatggtctcgatctcctgaccttgtgaaccacccgcctcggcctcccaaagtgctgggattacaggcgtgagccaccacgcctggcccctaataacccttttaagacatgccctttaagggcatatttaatatgcctgtgttgtatcttattctaaacaacattatcaggaatgtttctttcttagcttctaacacactggactaccttgttttcaaagtcattaattctaattgacaataacaaagaaaatatcctctcttgagaacacttaccatctttcagtcaaattagttttgcagggtgtgtggaggcgggaggtggttgtttcttggtgagcctgaaataatgaagagtggagcaaaaagaacgtgttttattcctatcagccgctttctacacaagggtgagagaaaggaatattggattctggtcctagggctgccattgatgtgctcaaacagatccctgtcccgttcttggccttgcccttgccatctataaatgggaggggtgggaaggttggatttgttctaagagctttgtagctttgacggtctcttaattgttacacttcctgctctgagctagcaggggagcacgacaggattcactttaagaaatcttgctgtgtggaactggatctccttccagagccacattcttggtgcatttaagtacctgtacatgaaatatctgtttataggaagctgaagcagggggagattcctggaacttcttggccaagggtctttgcctactggaggaggaactggaa

SEQ ID NO: 53597 - DNA, 1033 bp, Homo sapiens
ctttgctctgctgctggcagggctgccttagacatgcaaagcaggtgagaagggaataggtcactttgggagatttggtaactaacacttgctcctctgaacattcagacagtcgcactgaaggaatttttttttttaaatcggccacacaagaagaaatgaggtagagcagttaagccccctgagatgctcttaaacaaggcactaattatttctgcattgctgttccaagcattgccgtttgcagagctctctgctctgctctgcattaggccttcttcttggtggtcactgtggtactgaggggtaggctggctgggattcatttagcccttcttatccctgccagacttctaaagcctcctcttcaaaagaacccgcagaatcaactgtgcttttggtttgtgtcgctggttacttctgcctcctgcagctcgttgattttttaatgtaccataattgggaattaatctgcgaactacagcatttggaaaaaattaattgtgtgtggaatgtttgataattatctgcatatgttaaccatttttttgctctttgtcatgtcaggcattgctcatcgtgatctgaaaccagaaaatatattgtgtgaatctccagaaaaggtactttgggcctgatttggaatgttatagtttatacttaccgaggaagccacccttgctttcaggatggattgttagcagttccgttggcctcagacaccaacttgaactgatcgtcttggacatgtgagaatgttacacttactgtgtgatgtttctgcccatcctcgtcctttcttcgctcttgatcatcagtgtgattgatgtaagcctgagagtttggaaaatatatgagacctgcacaaaattaatattttctagtccaatgcatctatctttatatcagttgatggaagtcgtaaatactttttttttttttttgagacggggtctcactttgccacccaagctggaatgcagtggcatgatcacagctcactgcagcctcgacttcccaggctcaagtggtt

SEQ ID NO: 53598 - DNA, 1067 bp, Homo sapiens
ctccccatcccccctaaaaaacagtagacatgtgccatttttaggacagagagataataccttcagcccagaaatgctggcttctagtagtaaacataaaccacatgaagccaagccacatgttcctgcctgtgtctgcccctgcaccacccaataacacatgactgactgttaattacatgtttgaaatgctacatgcagatgggatcctctgtcgccatatcagtaaacttaatgtagcttattgaggccagacccagtgtggttggctcaagagagtccatccctgcagcagtcagaccacaagtcctgctgggggatgtctgcacagactcggaggcctgactgacgccctgggcctaagtcctggcctcaccccttactggtgcgtaatcttgggcaagttgctcaaccatttttctttttggcttcaggatctccctctgtaaaacgagaataagtgtactacccattttgtccaattgtggtgagaataagacagtttatttcaagagtattccatagcacatggcactagtaactactcagtaaatgttagccattgccaacaaaacaataatgaatgggaaagctcaggcggaaaacccatttttccccccttttcccaggcctttacatgtctggcaagggtgtggcatttccatttgaaagtttgtgctcttgtttggatcagagatcagatgcaggggagaaaacgttgctgcagaaaggccccctcagctccaagtgccttcagttttattccttttgattgcagaagccaaatcagcctcagcatcattagtgttttttggccctatttatagttgttctctctcgcttctgagctcctcatagacaggtacagaagagagtagtccagttttgtttaacagacatacaagctggtacctcctccgtaccaggccccacacttggagctggacaggtagtgatgagtcagcgatgaatccctatgtccccaccccaagttttccaaacttgggaaaacttggcctctaagaagttatacggccaggcgcagtggctcacgcctgtaatcccaa

SEQ ID NO: 53599 - DNA, 1030 bp, Homo sapiens
aggacctttgtctcaaacagctccccagctagtttgacttcttgccagaagtaatacccctccccgaaatatgtgccatccctttgcttttacccaggtgtcacctggttcccaccctcccttccccaatcctgtcccagggttaccagagatgtgagaaaggacagtgctccagcgtcagaggtcaagcccaggctttggccataagcaagcctcagggtagggctaaaggctagagtcagggctcacacttgccagagcccaggtcagaggtcagccaggaaccagaatgcaattcttagcttatactcagccttagtgctcagtctaggggcaggggcagtgtgcttagtgggtggctaaattctagttttggtaggtacatgggtctgcatttcccagtagctcacacactcacagttgagatgagatgactcaggtcttagaaacctagctatagcagagtgacccaggacctggatgggctaaatccatggtgatacaggggtcacccagtaagccagtggtagagctgggactagaacccaggactcctgcctctgagcctagggccctgatcactgtctcccaaaatttgttctgaatctgggatccttaaattctaggaggcaaagtaaatttgcctgagctctagatgggccctcctgggtgcatctgactatactcttctacctcccagtgccaggcacatagtagttgctagaggaatgtctactgagtgtcaggtgcaacgggaggagccagtggcttgttcagatttggggctggaggaggctggcttgaggggaaggatctccagctgttgtcagaggaagcgacgccctcattggcctgccgccctccccctcctccagtgcttgcagccacactcagaagccgcccagctggcagcgggagggccctttcctctttcagggtgaaaaaaaaggaaaggacatttttggtagaaaagttccctgctgctccctgggaatccccggtggccggatggactacgggatatcccaga

SEQ ID NO: 53600 - DNA, 1043 bp, Homo sapiens
tgttactgaacacacttggagaaaggatgctgtgctgtggaggaaggaggagggtgcatccagactggggcaatctgagggctttctatagaagagctttgaactaagtgggggttgctccaggcggcagccccagaggctgacatggaggcaccccagcagcagagaaggggctaggttggacagaatttcctgggcagccttcatagtgggttccatggaaagctgagcctggaacactggtgaaaccacccctcccccacaactatcacctccactcgtggggcaccccaggctgggaactaacccaagtggttggaggggacaatgcctactggggccatgttgagggtgaggtctgagggctgtgaaattgtcttcaggcacttatacacactaggcttccacccagcctccagaggtctccttcccaagatggaagagatgagaggaatgcctctaccttaaggggagatggctgggaaggaggaggagcttggagcagagaacactggagcctgaggttcttagaggcaagacggccctccccgtctctggagggactgaaaccctctgaagtccatgtcacccgggactggtaacttctgcttgcaccactccctcttgagagaacagcacagccatcccggctgcatggttggacagctctgatgtgccaagcgccccttcatattgtcctgggtgtctgcccactgctctccaggaccctggaacaagctcagtccctcttccacacaaacacctgctgggtgtttgaaggcagtacccctgaaacagactgaccacagccttctactgtttacaagtgctatcacatttgattctctcagctcttctgtggggcagatgttgttgttgttgtctttactttagagaaggtgaaataggctcagagaacaagtgccttgtccatggtcacacagaattttagtgcatgtccttgtcaaccttgtcttcccctgccatcttcccttgaaccttgtcttcttcaagtgaaaggaagtttaacctcaattcctctg

SEQ ID NO: 53601 - DNA, 1070 bp, Homo sapiens
acttgattttgcacagtgtaacagcgcagttgcattctggccactttgaccttatagctcccaaatgatgagtttgtcatctttatgaactcatgacaggataataagcttgaagacctgctgtagttagatatgggctttaatccttcccaggcaccagtcagctgaacaaaagcataagccaaacatcctgtttaaactgtagaataaccagatattcccatcaggttaaagacttcatctagatgatgccccccagagatgcctttagtgtaagtagctggcttggggtatcagcaaatttcaggtatagttagataaacaggtacagggcctgcatactattaaaccatagtttgtggcacccgcttttctaactccacctgttagaagctatgtgtttgaaggaatgaatcagtgcagtataaataaaattcttttgtaaggagaagattaatcctggtttgcatgatttttttaaaaacaactctaaacatgatacgaaaaagtggatgaaagcaaatgttcccagattggatgtggggaaaatatagcaataattttttttttaagtctggcttacaatgtttgttatacaaaataatgaaatctgagttatgtactgtccattgtgtcagggctatgggctgattttatcaaaactcatcttgggactgaaaaattgtttggaatgccagaaataagaaagttgttctccagagctggaaacccatctttcgtttgtagtgtcactgttgtggctccaagctcagtgataggaaaggacggtggttacacaccagccttctgaacccaaggcccccagtattgttgtcagctgcctttaccatggcatttctttctctttctttttttcctgagatgaagtcttgctctgtcttgcccaggctggagtacagtagcgtgatctcagctcgctgcaacctctacctccctggttcaagtgattctgctgcgtcagcctcctgaggagctaggattacaggcgcatgccaccatacctggcttatttttgtattgttgtagagacagggtttcactttgttggc

SEQ ID NO: 53602 - DNA, 1289 bp, Homo sapiens
agttataaatggctgcataacaaattatacaaaatctagtggcttaaaacaacaaacatttattacctcgcagtttctgtagtagcagcttagctgagtggttctggctcagggtctcacaaggttgctgtcaagatgttatctaggggtatagtcatccgaaggttgattgggcttgagcgtctgcatccagccccactcacatggctcttggcagaggcctcatgtctttgtcgtgtttctccatagggctgcatgaatgtcctcactacatggcaactgacttttcccagagcaagaaaattagcaagagaaaagttacaacctttatggcttgatagcagaactcattctccatcatttttcattttttcatagtctttttttttttttaaggggctcactacattacccagacaggctcaagcaatcctcctacctcagcctcctgagtagctgggactacaggctcacaccaatgcccccaaccattttgtcatagtctacttgttagaaggaagtcactgagtatagccattacccaaggaaagggaaattaggctccatcaaagggaggaatatcttaaaatttgtgggcaaattttaaaaccatcacagctggctctgggagtacttttctgaccaaggtagtatcataacaggttttattcaagtgtatatctggttagtcaagaacttagttctcactcacaaactggttcttagagctgggtaactgttgctgtcttattccccccttgaaatatatttaacagttattagggaactggatgaagaggaataatgtgaacatgtacattaatttattcagtaaacattcaccagatgtcactctgcagagatataaaacaaaccacggtctatgtctttgaggaatttgtactagggaaaatagacaaaaaaagaaaaggaaaaatacaatacagtgtgataaatactatgacagtggtaagcacaggatgatttggtacacagagaaggggcacctaaccaagactagggacttcaagaagttaaggaaactttctggaagtggtgactcctgggcgagggcccccacccaccacacaattcagacaagagctttgtggccctgtgcaagaaaggacctcattattctttttaccttacagaatgttgctgaggcacagtgcatcgccaaccaagttcagctcttctacgctactgatcggaaagagacctacgggttagtggagacctttaacctcagaccaaatgagttcaaatatatgtctgtcatcgctgaa

SEQ ID NO: 53603 - DNA, 1001 bp, Homo sapiens
ggaactgtgctaagacttggagatctgtgagacaaggtccctgccttcatggagctaatattcagctttaggagaaagatccagaaacataattacaataaaagtgattagtataatattagaatgatgaccaaaatgatcagtgtaacattagaagtatgttcaagaaaaatgagatgctgaactattacaagtaccctagtgatagttggatatttataattaaaaagactcgctgaaattttagagataaagtctaggaatcttcttttgaatgtagttgtttccacctgtgctatgtaggggctttagctttgaacccatcctctctacctagtctagacttgagatttagtaaccactgccctgatcattcttcataaaatcatggtgtttccatccttcttctccccttcaccccccaccaacccagattatattttagagctgcacattacaaatctggctcatgtgcaaactctgcagctcctgctacagcttaaaagagctcagtcttcagagccagccaaggggagtagatttcaactgtgaaatgcactagtccatgaaagtggcaattacacaggcacattgctttctttagaacttgatttggtagctgcttgtgccattttgtttttaaatgtatggtcacaatgatggattcactgcctactgtaaacattttctgggaaaaaagccaaaccttttccagttgaagacacaaataacactgtgcaaactgtcagtttcactgtgcctttgcaggcctgaccttaccaccacataccagtcctccaactcactagccacccaaggggctgttaagagccagaatttcctctagactgtctattgctttgaaattgcagtttgttgtgatggtaccttattgagccttgataagtgttccaccttgcagacccgaggggaagctgcagccagccagctgattttatatcactatcctgaacttaaggaagaaaagggcatagtgctga

SEQ ID NO: 53604 - DNA, 1035 bp, Homo sapiens
gatcaagactgcggtgagctgtgatcatgcctgcactgcagcctggacaacagagcgagaacctgtctcaaaaaaataaaaaaatattttaaaaaccaaatatggaggaaatggaatgaatgttacaggtggttggatatagagcaaataatttcatttattcatctgtctccttgtatatctgtttttcacagtttctatgtgctctgccaagaagggaaggttatgagttttttgtaggacaatggacaggtactgaactccacttcactgcacttataaatattcaggtaggtggcttgtgcccttcctctagaggaaagaggactaccccttggtaggactagaaacccttgctgaggctcaaggacacagaatagctgcttactcccagcatttattattgtggcgcagatgaattgtcatactttttgtgttggactagttttctaggccctcctcaatacctagaaattggaaaagactccaaaacaccttctctgactacttctggttctcttttgtctcttccccagacctctagttgtatatactgcatgtgcctcacttaacaaacatgcctgagttatgatggctatctttttaacccaagctagaagccccttgaggaaagctccaagtcttaaatgtgttttattacctaagtcaacaccttccaacatgctaagtgaatagtttctgtttaatgttattttgtttgctttcttcctttatttctttatttccaataaaacaatattaacttttaaatattatatttaaaagttagattcaaaacatttaaaacttttaaaataaaagtcaatattttaaatcataactaggattggcattctatatttggaggtcaaatgtggcaaaaaacaagcacgaattatattggctttgaagttggggtaaagaatgcaaaatagaatgaaggaacagctttttactttgctattttgtaatatgtctaacaaccctttattgagtacatactttaataaccaacaatttgatgtacttactatg

SEQ ID NO: 53605 - DNA, 1047 bp, Homo sapiens
gaagtagcatatcctaggcatcttaagagagatataaaatatgaaagcaagggggaggaaataaataaaatagaaaagcagctcataggaaaacttctgactgtaatatcaagggaaactgcatggaagaagaagcatataggctcagcttcagagtacaggaagaatttgggaggtcagaggtaggagagagaggctttctagtcagagccaataacatgtaaaaaggcatgggaaggcaaaaaaaaggtagtaaaaaataagaacacagagcatccatatgatattaatggtaaataatgaaaagacacaatattgcatatatgctacatctatgtatactataaaagacatgctagaaagaaataaagtaacagtggtctttgttagggtggtaggactatgggcattttttccttttccctgttttctaattttcaaattttattatataatttttttattccccaccttttggtatttgcatcatgaaggtcaactgtagcttccttgttcgttagtgtcaagcagaggtaggacttctgattggtatataccatagtcagatccaacagaccttatctcttccacatgtagaagactttctggaagcaggattttaagagctgcctataacatgccaataatatctaatatggttttgctgtgtccccacccaaatctcatcttgaattgtagttcccataatccccacacatcatgggagggacacaatgggaggtaattgaatcataggggcagttacctccatgctgttcccatgataatgagttctcacgagatctgatggttttatagggggcttttcccccttttgctcattcttcttcctgtcaccatgtgaagaaggatgtgtttgcttccccttccaccatgattgtaagattcttaacgccttcccagccctgtggaactgtgagtcacttaaacctctttccattataaattacccagtctctggattaagaaaatatggcacatttacaccatggaatactatgcagccataaaaaagcatgagttcat

SEQ ID NO: 53606 - DNA, 1686 bp, Homo sapiens
tttatgagctagctcctatcacataactcattaggcctctgcattccttttcaccccttcaacataagaataaattcaggaaaatctaaagggaagacgctggacagagagaagatgagaccattcattctcctgcgattatctgtcactgcttctactttggcagtgtctcactgtgttgcccaggctggtctcaaattcctggcctcaagcaatcctcctgcctcagcctcccagagtgttgggattataggcataagccactgcacccagccttttttttttttttttttttaatatatttttaagggatcaaaaattagtcttcctgatttagtgaaatcctaaactttaccatttggaaacaaaatttgcggagtagcttttcttttagtgttttaaattcagttgagactacttttaactaaatttagctgtatgtttagacgtatacattttttgtaattcatttttgacagatcttcaggatttattccgcaagactggccaggacgtggatgggaagctgacctaccaggaaatctggacctccctaggttctgctatgccagaaccagagagcttgagagcatttgattccgatggagatggaagatactcattcctggagctaagggtagctttaggtatctagcttcatcaggcatattttagaaatggactgcctaatatctatttacctaacaacaaaacaacccttacttacccatcagtcctctagtcctccaaactactgtagcagatactttgccaccttttaacttgtttgaagaagctatataaaagttatttttttaaagaagaagaccattttacttatgatgttcagaaatctatgatttcctacaaccagtaagatcttacattttaaaattgccagaaaaaaaattaaagccctctttttttctctttcctttttttgaggggaggagaccttatcttttaaagctgggaaatgtatatagagagagaataagccacttttatatttcacttaaatttgccttaaattagctgcactttatagagactcagaaaatgtcttttctttaaaagataggccttttctgtttgtaaatatttaaatgaaagaaagcattgtgcatattgtgtggaaagtaggaagaatggttttgaacaggatatgaacaaatgacttattaaaaattgctgatctggtgtaggtggcagctgaaactacatccatgtctccataaggtatccctcaaaggcccaggcgctgccagggggtttgtcctggtagctggaggaaccgatttcagggagtagacactggagacaatactgactccaggcatggctcatggaagtaggattctggttctttgttcctattccctcagctaatcccaacctgggaatcagagaagtcttggggatttttctcatttttagtactatttcagggtttatgagcataaaaagttatccattggggagctccattttccctgctgagtgagctagattgccttccccacccacccacttaagtctgtcttaaagccgtagctggctcccaccaccagtaccatctccatttgaatggcagggctaaattcccccagccattatctcacactgaccacccagagctttagaagagagctgtgcttctaattttgacccagaaaaccatacccc

SEQ ID NO: 53607 - DNA, 1074 bp, Homo sapiens
tcctttaagagattgagaaatagactaggaggatctcagttccctaatgtaatcttggtgctgctggcctagtgcatgctcaagctgggttctctcagaacctagcacaagactggttagcctgtacattccctggcaatacttactgattaatctgtggatgcattctgggggaggctagaatgttctaggacaatctcagatagttaagtagacctaataattccttgttgcctacactaaacttctttcctcttaacagaatcagcacttcttgaaggagactcctggaagcaaccagatcattccgtcaccttcagccacatcagaacttgacaataaaacccacagtgagaatttgaaacaggtgctttttatctctggcttaactccctgtgaccacagtgcactgcagaggcagccaaatagtttgggcttagtgtttggtgtctcagcaggtgcatcctgtatttatttgcctgcctgggagctgagcagagaggaatgtgtgttggtatctcggggatccatattgctgtcctttcccttctttggcactttgcagtttttccctgcatgtcagtcagtggagtaaattccttttcttatcttgaaagacatagaatgagcagattatcctgaaactctttatgaaaaaatagctatctgggcaggttaaagatgaatggatagctaagtaatccagagtgatggctattttgagccacagtaaattctaagaatgttagaaagcatatccttgaaaatcaggattttctaaagtctaaagacgaaaaggcaagagggggaaaaaagactttgagttcagaatcacattaaagagaatagaggaaatcttcactcagaagaattcctgtcctgagtttaatgccctttaaaacctatagttatcattctttttaaagtagcaatcagtactggaggatgtcagtaaaaataattgaatcttatactaaacaatgcactacttgttatggtattgttacatgagccaattcagtaatcggtattgttcctgaggtaggtttgttctgacaaattaggttaatggac

SEQ ID NO: 53608 - DNA, 1033 bp, Homo sapiens
tgacagaatcaaacccctgcagtgcctaggaattgttttcaaatatctctggatcacttagtgctgctgcagatgtaagctgtctgcagtcatttggaggccttaatcaatcacttaatgggtgacagccccgtgaaggatttatgaagagtaaaaaaaggatggtgcagcccttgccatcttgctggggagatgagttatatgtaactcatctgaaatcaggactattcaaggcacacaaaagttccctagtctctctgccaatttctggatctgccctcccacccccacctgctctttgcaagcttcagaatttcaagtttaaattgggaagtttgtaccaaggagacctgggctatattagagagctctagaagagagtttttttccattttcttcaggactggcacacctcactgttacttagtggggctaacccagaggaaaaaacattgatctgggtgtcaagacccttggttctggttctaactgccgctgagtaactgtgtgacccatagtaacaaagacccctctaattcagcaattcttttattattttaatatcttgattatgctctcaagtaattcactattttctaaaataatttttcctaactaaaaaatttcctgccttctagaaccatggattcccccctccttctctcctccttttctctttattgttgccttttggttttcttataaaaacagggttgatttcagatttcaaggaaaacaacttattttcaccagttgcattctgttataattaaatctacttcttttaaatttccatagctgccaatggtaatcctcctactgtcattctttgtgctagataagtcatagttatgggctctgaagggttaagccatgcaaagttttcctcactaaaggaaaagtgtatataaacatgttatacttcagtctctggaaagaaacttgagcagtgggaagggaatgggaaaggaaagataaccctcaaacataagtcttacttagcataatgctataagggaaaaactaataatgc

SEQ ID NO: 53609 - DNA, 1032 bp, Homo sapiens
ggaatgctgctcggcagcctgccaagtagcctcaacatggatgaatcccaattctgctgagtagaagcagccacactttaaaaagcactacttgctcactggttctacttatataaaatctagaaaatgaagactgatttattgtgacagaaagtggatcagtggttgcctgggaacgatcggcaagggagtgattacagagagtcatgaggaaactttcagaggtgatgagtgtttattatcttgattgtagtactggtttcacaattgtttatgtgtcaaaacattcaaattatacatttttgaatatgtacagtttattgcatgtcagttgtctcttaaagcttttttacaccttcctatatgtttccattcagagtgtagcttccattggcaatactttaaacagcgtccatcttgctgtggaagcactacagaaaactgtggatgaacacaagaaaacgatggaattactgcagagtgatatggtaaggagacccagcaagtcagcatgctcctgctcacccttttttgtgtaagagtcatgttgccaactttccactaatctgaaaaggccctgctatgcatctgttcaaaagatctaataagcagtatacattgattgttctacaatttgttaataaagcaattatggtagataaaattaaaagccaaatcttttgcaaacatagtactggaggaggtaaggtaataagacacagttcctgaggatggaatgggtaggacagaaaatggaaaagaaggaaaggaagtggaaaagtgtctcattgtttattactacataacaaagcacccccagaagtttgtggcttaaaacaagtaattatttctcactattctgtgcatcaggaatttgagcaaggctcttagactcccaaatgctgaaacatgtgctcgtggatgaaaggcaggctgtctagcatgttccagctccagccaggctgtcagttaaatgcagcctacaacacatggaacagcaccacccccatccctcaacccccagctgagccc

SEQ ID NO: 53610 - DNA, 1032 bp, Homo sapiens
gtgctctggtagagctattgagtttgaaatattagtcacatttttaaaccaaaaccaaatccccaagtagttgaaagtgctgttcaaattgtcagagtgcagttcctgtagactgtattttgtgagatgggcttttactttatatgttcccacttgggcaggaacaaaagtttggtaaattactgaggtattacattttaccaaaatgaaattttgaagtgatccttcatcattagctttcttcctgtccaattgttgagggagtgtgtgataattacagcatcttttgagtaatttaagattttgggatcttgtgctgccaggacagggtaaagaataacacttgccttcactctttgacactagtgttcaaattgggcagggaaagaaggggtattattgttgcctcccagatcccaactctatccaaagtactgtctcctttacttctgtgagctgacagggttgcagaaacacataaaatcctagactatcttgacatcaccaaccgtagagtttgtgaaggtaacgtgtcctctacaaattctcatttgttttcattgtttgttactcttttttgttcagatttctctgttgacttctgcagtgaaccacctcaaagccaatgttaagtcagctgcagacttgattagcctgcctaccactgtagagggacttcagaaggtaggtgccatgtgtgggtacagagacttcagaaggtaggtgccatgtgtgggtactatttgccataattctagcttcttataagttttcattgaaagcctagcatttgaaatcagctgctccaagagggcagtaatggagtgtatcactgtgtcctaaagaattcagaacaattttgttttggtctggttagttaggcctttaatttgcaacaggttacctcagctgtgatttatatgggttcatacctttttatttggctctctgagtcccagaattgctctgctggcactcttgtgttagcatatatgggttcgcttttcagcttgctttttcagttcaccactc

SEQ ID NO: 53611 - DNA, 1051 bp, Homo sapiens
tagtgatatacatttaaattgtttctagtattttgctgttacaaataaggaaaaattattttaaaaaatatatcatgtacatgagctattttataagatttctagacatgaaattgctaaaataaagaatataaacatttcaaattttgatggatattcctagataaacttcttacaagtcttctctaatttatactcccataagcagagcatgaaaatgcctgtttctatatgtccttttcaaacctggatatcattcatatctttttaaaggcatgagtgaaaacctccttaatgtaattgcttctcttaggaagtttatggtttgctgagagtatctctgtggactgaggtttctcacccatcttgtttttaaatgaacagagttacaatgttgatgattagtctggttattctggagtccttatgtagaattgcatgttttagtgcttattaatttcactattaaagaactgtcacttatttgatatttcatctgtaccaggtactatgctaagagctttgattatatgtctcatttaattctcatagcctgtattgatcatctgttccttggttacaaattaccccaaaacttagtggcctaaaacaacagtcatttagtatcttacggtttctatatgtcaggaatttgggagcagcttagcagactggttctggccaagatctctaaggttgcaattaagatgtcatccgggtctttataacctggaggtctgactggggctggaggttcctcactcacatggcttttggtaggaggcctcagttcctcccaacatggacttgtcattctggggctactcgagtgtcctcacagcatggcagctcccttccccagagtgactaatccaaggagagcaaagaagaaggcataggaccttttgtgacctaatttctaaagttgccagttgtcacttccactttattctcttctgtagaagcaagttacttatgtcaggctacactctagggaaggggaagtaggtttcacctcttgaagggaagaagactatcaaagaatttgtag

SEQ ID NO: 53612 - DNA, 1021 bp, Homo sapiens
atcttaattgactaatctaaaagctccttaattgagctggtcagtacttagcatttatcatctatgaccagctgtcttaagtgctttgcagccattctctcacttaatattaacagtcctgtgaaagtatattttatcgctgtattacagatgaggaaactgagctctaagaatttgagtaatttgctcaagatcatagtgagtcacaaaattgagattcaaagccaactctttctgctcacattctgttatgatttttagttggctaacttttaaaagttgcattgccagcagtgaaatagccccagttaaaatgggagctttagtgtgaaagatatatatttacataaataaaagaacaatgtcagaattaacttttattaatccatcttctttcctactgtttgatgattttttcatcttaggaccatgagggcactttatgctagttatgattgttcttattttgtctttttagtggaatctaatcagaaaagctcattccaagaaatccccaaacttaatgaagaactactcagcaagcaaaaacaacttgagaagattgaatctggagagatgggtttgaacaaagtctggataaacatcacagaaatgaataagcaggtactaaaagtttgatttttgctgtgtaagctatgaatatttgtttggttgtttagtatgaataggatatagagaattgtaggtatagggaattcatttcagtttgttttactttttgaaatggggttttgcatactgtaatcccagcatgttaaagtcaggtaaaatagttatgcatttaccagatatttaaaatgttaatcctttctgcaaaagaaaataattctactaaatacagcagttgagagaaagttggaagtttcttgaatcaccctttcctacatagtagaataggtgtcagataaaaaaggagtgtcatctaacccccaagaaaagtagataacccatttttattagctaatgagagcttatttcatttgagtttacaaaatctgga

SEQ ID NO: 53613 - DNA, 1044 bp, Homo sapiens
gtttctatatttatcgaagtgatcaactagagggtgcccagtgacttgatttattgtgacattaacaatacaaggttaaacttgctatcatcaggtaaatagggtagtttattaaggctggctggtccagcttccctggtcaactaacactggcctgaaaaataaaataatttgtggttgtcagatactaaattaaatgatctgagtactactgcaacttattaaaggactttattcaatttctagaagaaagaaaacactggattaccaaaggcttttctggtctccccttctattctttaggtcttcccaaaagttatcttctgggaagatgccaatacatgatcacgactctggtgttgaagatgaagatttttctccaagaccaattcctagtcctcatccagtgagtcagaaggtatcactgattttaaaatgcattcacttttgtggttagagacctaagtctcttcatggttaaaacactaaataatactacctgaaacctaagtatcattcttagatatatctagctatttctatctctatggttatatctatatatagagatataagtatttcacagttatatataataattcatattatatgtaatgatatatacatatgtgtaatatctatgtaataagcatgtatggttattcctagagtaaactgagacatagattggttaagttacctacccaagacacacaactagtaagtagtaaagctgggattctatttcaggaggtttggttttagaatctggtacttttaataaccatatagactcaacattatatactatcactagagcttgacattggtttttatcactatattctgagaaaacattatacttgctttcagaggttaattgctaaaattcttgtcataatttttttattgctaccaacctgtgggtcattttagaattgtttaattcttattttagaagaaaaaggaatgggaaggattttttaaagctaatatcaaattataaccaaattcatcacagcgagtattttgtttactcttttt

SEQ ID NO: 53614 - DNA, 1081 bp, Homo sapiens
ttttctcttagattgtgtatcttttctttttttttttttttgagacggagtcttgctctgttgcccgggctggagtgctgtggcgcgatctcggctcactgcaagctccacctcccgggttcacgccattctcctgcctcagcctcccgagtagctgggactacaggtgcccgccaccatgcctggctgatgttttgtatttttagtagacagggtttcactgtggtagccaggatggtctcgatctcctggcctcgtgatccgcctgcctcggcctcccgaagtgctgggattacaggcgtgagccactgcgcccggcctgtgcatcttttcatattgcttgtgctagcaagctctctctctatatatataatgtaaaatacatagagaaacacatattgatgatatatagtaacggttttccccccagattgtcatttaagtttaacaatatttttcccaaacagacttactgttttttagtcatatttattaatctttttcatatcgtgtttagaaaagattcacccactccaggtgtatttactgaagtaaaaaaatcacttgtattttcttcagatgcttttggagttctacttttaacattttgttttaacttttcaagataattagttatatttagatagcagaaattaaatgttagttttagatcctttgctatgatttagtacaattatgttttattatcaattactgatcatgctttaagttcatattgacagtaaatcctcagtaaaattaattttgaattgctctcttattccttttttttttttttttttttggagacggagtcttgctctgtcgcccaggctggagtgcagtggcgcgatcttggctcattacaagctccgcctcccgggttcacgccattctcctgcctcagcctcctgaataaaataaaattttgttttgtagagaggaagggtctcactatgttgacaaggctggtctcaaactcctggcctcaagcgatcctcccaccttttgccttcctaagtggtggaccccagtttttgaacaaaaattgcaccttttagtcattttgttaactagattg

SEQ ID NO: 53615 - DNA, 1042 bp, Homo sapiens
gaagggaacccatgtaagggaatggcacatgcaaagtgaatgagaatgcatgaatgttctctggaccatgaaatctacttatagtttgctacagtcctaatataggcaatggattgttgatgcttaagtaaatattaagagccttctctctttctgactacctgtatatattacagcatttaatcctcagcaactctgtgaagtagttttaggctgcaaattagtctgtactaccttagcccattctttccagtccaagctaattcattctagtatactgctttcatctctgttaaccattttctttcccacatctcaggtaaaagaggacagagatacgcgtgcttgctctctttctctctctctctctcgatatatatctatatgtctgtctatatatatcaatatagttatatatatacaaatgtctatatattcttccttttaattatcagcacgtttttagatttcttattactaaggctttttaatgtatggctgataaaagccatacgtctactttgttatcttaggaagaatgtaaattatgctatatatgtaagtgactatggtttttaatttctatctttttcttttagttggctgtctggaattacacatatctatagtcctcaggtatgggcttgctgtttgcgatacatattcaattcttctgttcaagaaaggcaagtgatattttattctgtagtactttatttcgatcctttcccccattcatagtttatggtcccatttaaaattcatgtaatgccgtaaccttttacaatacttataaataaacacgtacattaagaaaaaacaaaccttatattaaatgagaataaaaccagattaaaaaaagatgaggttgcagtatacctggaaataccaaggaattcacttgcctaaccacagaacacaaaccttttgggggtggaaaaaaactgtggagattgtctactgtagcatcctatttaataattaaggaggttaactttcagtgaaatgactgcaaatgagtttggatttgttaccttacaga

SEQ ID NO: 53616 - DNA, 1917 bp, Homo sapiens
caagaatcaaactatgtttagtatgctgtattttagtaaaaccatatttgagaatgatttacaataatttggttgaattattgtgaacctaaaatccaactaaatgtgtttgtgagggcaaaaactctaggtaagcgatatgagtagcctttcagaagaagcagtgtaaccgagataagaaagttcaagatgtacttagggtagtgtttagagtatacatttttgctgaatttgtgggcagtcagactggagtattaatttggtcagattatagagaggcttggctgggcatggtggctcctgtctttaatcccaacacttcgggaagctgaggcaggtggattgcttgagcccgggaggttgagccgtgatcacaccactgcactccagccttggtgggagcaagaccctgtctcaagaaagaagagccttgtctgccagcctgatgaatttgaactttgtcatatgggccatgtagaaattgaaggttcttgaaaaaagaaaacactgtcaaatcagaaatagttaatctgatagggtaggctgaccgaagttagagtagccattgtagaagttgggcaggtgtgtattatagagggatgtattaacctatagtacaatggtagcagtgaaactaggaaggacacagtgggcatgggcaaatacagagggagaactaacttgacaatttgtggtaacaagaaaggaatcaaagaggaatggactttagattctctgaggctcaatcggaattattttatgaggccaggcacggtggcttacgcctgtaatcccagcactttgagaggctgaggtgggctgatcaggaggagttcaagaccagcctggccaacatggtgaaaccttgtctctactaaaaatataaaaaattagctgggtgtggtggcacacacctgtaatcccagctacttgggaggttgaggcaggagaatcgcttgaaccgggaggtggagtttgtggtgagctgagatcgcaccactgcactccagcctgggcaaaaagaacgagactccttctcaaaaaaaaaaaaattattttatgtccattttttcccatgtggtaaatatttattgggggtgactccccaataagactgaagtgctgctgggatatctacattgaaaatgtgtagtggagcttgggacagtaaatcttacttgctttgatataattattcacataatcttttggtcacatggaataaacgagaactgaaatgctgtaaatcagaactcatttaattttatttgtgcaagatattatatatgtatatgtatcagtataaaataaactttggcgatatgggcacatttcaaagttttaaaataattatttaatattgatttctcaggctctacagtgccatatatgtagcaaagattccttggactgtggtaagctgctttccctaagagttcatatcacttccagggagagtttggacagtgtggaatttgacttgcattgggcagcagtaactctagcaaataactttaaatgcacacctgtgaagcccatccccattattccaacagctctggcaagaaacttgagcagtaatctgaatatttctcaagttcaagggacttataaatatgggtaagtaaaagatacattaatctaaatgttagttgcattagtatattttcagaatgtccatgtaatgtgaaagaattgtccagtcaatttatatgccagagatatggtggcttggttaataaccagggaaagtaaaaaatgaaatggtttattttcgttgaatatgaaattttctttaagttgtgccaccacctacaaaaaattggtggtagggcctggcgcagtggctcacacctgtaatcccagtactttgggaggcctaggcgggcagatcacctgaggtcaggagttgcagat

SEQ ID NO: 53617 - DNA, 1125 bp, Homo sapiens
gaatactgggctgggcatggtggctcacacctgtaatcctagcactttgggaggccaaggtgggcggatcacgaggtcaagagattgagaccatcctggccaacatggtgaaaccccgtctctactaaaaatacaaaaattagctgggcatggtggtgcgcacctgcagtctcagctactcaggaggctgaggcaggagaatcgcttgaacccaggaggcggaggtgcagtgagctgagatcgcactgctgcactccagcctagcaacagaacaagactccatctcaaaaaaaaagaacactgatttttcactgacacaagtcagtttgtgggaatgcatgcagtactgttttttttccaatgaagattctttaatgacttcattataggccccaaataaatatctagcccaaatcatttttttctgctgcttcatggttttatgagggttgtaaggtttttggtcaaaatctcatacatttgatactacctgccttaccgagctcactaagttgatacaaaggttttggggcagaatccgagctttccttaagggatagatatattggtagattttgctgcctagaataaatattaacagtaatttattggcagaatgactctaacgtatgaaaatgattggcagaatctacaagcatttaatcttattaatctatagtcacacttcatataagtaatctaattttgcctgtaattttaatatgtggttaaatcatatttttcttctttgtttttatcattcattagtaatattctctttaattctttaggatactgaggatttggaattaaagaaatcattcaccagacatcatggagcctatatatccttttgcacggccccagatgaataccaggtatagaagtatatttacaaatatttgtcttacagcttttcacataacttgggaaggtaggttggaagagaaaaaagaatataatctttagaatcaggaaattctgggttcatatcctagctctaccacttgttaggtgggtgaccgtgatcaagttaattaactaagcctcagttcttcatctgtaaaatgaggatggtaatctctgtctcacagaagattattgtgtggggttgaataagattac

SEQ ID NO: 53618 - DNA, 1026 bp, Homo sapiens
accccatctctattcattataaaatataatttttaaaaacaaacaaaaatccttccagtaagagacaatagccaaaaaaaaagtgttttagaggcaaattttttttttgaaacggaatcttgctctgttgcccaggctgaagtgcagtggctggacctcagctcactgcaacctccacttcctaggttcaagcaattctccctgcctcagcctcccaagtagctgggattacaggtgcctgccaccacacctggctaatttttgtattttcagtagagacggggtttcaggatgttggccaggctggtcttgaactcctgacctcaggtgatccgcccacctcggcctcccaaagtgctgggattacaggtgtgagccaccgtgcctgactgaggcaaattcttaggattaaaaaaattaaagagtctattacaaagaaaaaaggaaagtacaaggtgagagctgaggcatgtgctaatctttagaacaactaaaatagcatgtcttcctttttgcttagtaataactcaaataccaatgagagttcaattaaacattttattaacactggactttttttttatggagtctcgctctgtctcccaggctggaatgcagtggcatgatctcggttcaagcaattctccctgcctcagcctcccaagtagctgggattataggcaaccgacaccactcccagctaatttttgaatttttagtagagacagggtttcaccattttggccaggctggtctcgaacttctgaccttgtgatccgcctgcttcggcctcccaaagtgctgggattacaggcgtgagccaccatgcctggcctaccactggacttctaagcaggatatacacttaacactatgcataaatactttttgactgaaatgaaaagtaattattgacttcattttaggataggaatgattcagcattatatttaggagagcttggaagtgactaaagagcttatttccccagatgttttctttttttttttgaattataatgcaata

SEQ ID NO: 53619 - DNA, 1053 bp, Homo sapiens
attgctattccctagctggctagacagacactggaatatctattttttttttttttttgagacgaagtgtcacgctgtcggccaggctggtgtgcagtggggcaatcttggctcgctgcagcctccatcttctggattcaagcgattctctgcctcagcctcccgagtagcttggactacaggtgcgcgccaccatgcccggctaatttttgtatttttagtagagacggggtttcactatgttggccaggctggtctcgaactcctgacctcgtgatccacccaccttggcctcccaaagtgctgggattacaggtgtgagccactgtgcccggcctggaatatctattgttagtgaagtcagcggtatgttgtttttttcctttgtgaatctctttattttgactcaatatttttttatacaggcaattataaactaaattccaaaataatgtaagttttggaggtttttttcctgtaggaaaaaaattacataaatccacggtaaattctccaattaatctggctgaagctaatgcagctcacagggcacctgaaattgttactttagtatgttgatttccaactcaggctgccagaagtacatatttgagtcctagctacagaatcttcagttgacaggaagagaagaaaaagagaaaaccaaaaacccttagggatatcttgctctctaaggcactgaaattagtgaagtgggtattgttagagggaagctggtattttttctctggaggtgaattctgctctgcaaattgctcctggagacctagagaaggtaaaggcaaatctgatacagtgtcttctgagagtgttctgtactgggaaggaaagattggagggaggttttgggattgattttgcacatttatttgtactgatgtttttcagttttgtttgcttttctccttccttccttccttccctccctccctccctctctccttccctccctccctctctccttccctccctccctctctccttccctccctccctccttcctgttctttctttttcttcttttcttttttt

SEQ ID NO: 53620 - DNA, 1056 bp, Homo sapiens
aagcagaggttgcagtgagcagagatggtgctccagcctaggcgacagagcaagaccctgtctgaacaacaacaacaaaaagccacgatttttagttcaatagtagcttgtaattgtagttatagtatttgtaagttgctatggttttgagtgttgcttttaagactgttgttagttacccactaagttttaattgcaaggaaatttcagagaatgtgaaaaagttttggttaagactggaaaatatctattcttgctttcctcaaaactggcttcagtgattacttaatgacagcagaatgctttgaaaatatgctctttaaagtctagctgttactaaaataccataataacttatatgtaagtgatagttgcttttttgttgttgctgcaactgtggtaagaggaaagcattattagcaaaatccttaagaaaaatatagtataaaaaactggtaaatagagaatttacaaaaatggaatgtgggtgagaacatgagacacatgtgtataggtttgacatctttatattcatttgaattctttgtttccttggactttgcaggtaaggttgttttttctttttgacaaactgtataataataataattatttttatttgagatggagtctcactctgtcacccaggctggagtgcagtggtgtgatcttggctcactgcaacttctgctgcctgagttcaagtgattctcctgcctcagcctcctgagtagctgggattacaggcacctgcaaccacacctggctaattttttgtatttttagtagagacagggtttcgccatgttggccaggctggtctcaaactcctgacctcaggtgatccacccgccttggcctcccaaagtgctgggattataggtgtgagccaccgcacccagcctttttttctttcttttaaaaaaaaagtttaatagagatgaggtctgtgttgcttaggctggtcttgaactcctgggctcaagccatccttctgcatcagcctcccaaagtgctaggattacaagcatgatctaccttgcccagcctgaccat

SEQ ID NO: 53621 - DNA, 1018 bp, Homo sapiens
tccataccaaacaagatagggatgggaaccggcactagtgccaaggacagccccataaacgtccttaatacagcaacctacctgctgtaatgaagatgcacagaggatttctttcgaagctgttgcctttttgaagttgggaattatattcttcttcttcagggcctacagtaggctccagtgaatatttgttgaatgaacgttaaagggacaatggaggaaaaaacacctaactttgctcaggagattctcaaaggctcctaggggtgaccatgtgagaaggcatttggcagatgagaggcctgcagcatcaggtctgtggatcctttggcccacctgtcagtgctcagtcacctgtggacacctgggcccccccagcagtaggaagctgaagaaatgctctttcactgcctggtcaccctgtagaacactgatgcccaggaagttgcagcatctccccaagcagcaggctccatgggcctggtaacagaaaggaggccagcaaggcttgagcacaatgactacctctgtcacctcttctgccaccagcctatcactgctgctactgttactgtacctgccacctccatgaccacgctggtcatggccattgctactaactggggcagtgttaggcattggccaccctcactgctattacatccatcacagccactgctgctattaccacctgaccccgatcctgttacccaagtctgttgtagttacttctaccatttccaaccacagctactgatattattattactagtactaatagttgtagctattattaacaacctacctgtgtagcatactctgcagtgtacaaagcagagtgacatccatgcttgctttgactgtcacagcaggtgggtgaggcaggcagggtaacctgtgccagatgagaaaaaggagactcagccagagatattcagcaacttcattccatccaggtagcaaaaagctcagtgaacaaagggagctaataatttactttggcttcctctagatgaga

SEQ ID NO: 53622 - DNA, 1011 bp, Homo sapiens
ggaggcctgaagtagcctggcattcttctgtttgtggccattgtgggcttggctgccctctgcaccttatctaaaggccaccagatgtctgctcagggtcttagtggagcccagctatcagaatgggcagcagaggctgtaagaagggctagatgagcagaggcaggagggagcaagggaggattcctggaggagatgtacctggggcctcaatgaaggagcacatttggacaggtaggaaggaaagcaggataggagctcaacaggagcaaagaaccaggggcaggatgggaacctgacatggagggggcctcagactgtaggtgccttggagtgtggcacatggcataatgcctggctcctttaggtgaggctgtagcttacttctcccaactgcagtgagtgccagggaggaagctttgggtcagaagaaggcttctgcaatagaagtcgctgctccctcttcagggcactgagggtgctgagcgatgcaggggtcagaactcccagctcctatgggatcaggcaatgcctttgactgctttatgcctcagtttgaccatctagaaaaaaaggacacgggagggaacctctggcattctgtgattatctcactttgtgacattgagcggggcacatcacttttgggacttgttccctagtatataaagtggggagaagcatgggccactgctgtcacctcactgagagtttcagaggactgtgcagatggtctctccagaccaagcctctggaccaaggtgaggggtcagaggacaccgggctactagggactgctcagcctgcttccctgcagccaggcccccatcttttcctctgctgccccaccctctctaccttgggtatgagatggcacagccaaccagctgtgccccacatctggagggacttcctcaggccgcagcagcctagcctggagcctgcccctctgcaaactcacccacatacctggcagcaggagtgtaggcgggcccacctgacaaaggaact

SEQ ID NO: 53623 - DNA, 1038 bp, Homo sapiens
agttagaaatcaccacccacccactcgcatgcatggaagggccaggggagtggtgcagtattgtaaaagtccaggcaaagtcagtgagctgaagactctcaccttcgtatagaactactaaatgatcctggcggaggcaggatttgaattaggctataaaggaaaagtaggatttaaatcgatgtaaagggccttgcttgcattccagataatgggaatgaggaaagtgaaagggccaacatggggtagggaaaagaaggttctggttagagtagaaggggtgaatattgagatagcaggctgaagtcgggactgggctggggtgcagtttggccatgaaggaggaaaaggagctgggggttattgcagaccaattctgtgaaagaccctgtatctaaaggattgtaatgatgttgtgagacagatatttttatccccattttaaagatgaggaaactgggtctcagaggggaggcatgacacattcaagtcatatagctgataattagaagaactggactgtctagctctttccactaaagcatttgcttcctttaagacatgaatgggaaggtagcacagatagcacaggccagatggtatggctagtaaacacacacacacacacacacacacacaccacacacacactggggggcacatacataccaaatatggcaattcctgtgctgtggctcccaatctaattagtgggatgattgccatttaggagacttttgcctttcactttagcccaagctgtgtgaggctccactcctctatttgggattcaataggagtatggaaagggaaaaaagaaatgtgatgcttgaaacaaaataccccgtcgagctgaccactaaatagcacttagaccccaagtatacacacagctgctttatgtaatgaaggctgtggaccatgttcctggatataaaataacaaaccacatataaagttttatgttgctgtgtaattagcacagatctgtgagtgagcatgcaggcccgggtgaggggaggggtgcttaggccccgg

SEQ ID NO: 53624 - DNA, 1085 bp, Homo sapiens
tctagggccataccttttggtgcaaccagaatcagaaaatggcctctgttagtaagcttatagaaacctaaaaataataatggaattatattgtaatttgactgcttggaatttgtgtaagtaccatatggcccaaggcactattatagtatcctcactttaaaaaaaaaaacacttggaaccacaatgtgagtaaaatattatagcagaacgctttgtggtagacactgaaaatgttgttgattgatggatagaattaacttctcctcccccaccccagcacacacctgtgaagccaatgatactataaagacataaagaaatcagctactttatatttaatagagagtgaggggagggaaaggagagtgtaggaataagtgaactgggcttatagtcttgaagagttgcctaaaagataatattttctcattgactctgtttttgattaattttacagttatgattgaaaaagaacaaaatgaacttcctttaaaatgaaattaaaatgtgaaacttgctgacttatttttgtagtagaacttgttaacatcatgttaagggtgctttagtatcacagtctgtgatatatcagaaagggcattagagctatctctatgagccaggagtcctaggctttagtatcccatgtctgccgttttctagctgagtctatttaattctcagatcctttgtttcctcagctatcaaatgataagaatgtagtagaccccaaactatgttctgtggaccaagatcactgttttaggagataatcgtaggaatgtaggtataagtatgtaattggccatctaagtttaggaaaatctgtttgctacacacatacacacacacacacacacacacacacacacacacacacctcttagagagtcatatgtaggattatagaggtaaaaagagatgatattaatgctggaatagcgcctgtaaactggggctgtctacagcaaattaggatatatggtcactgtgctcattgtgaacagtagcttgttcgaggctttaagaaaattctggtataaatctgtcttactctgcatctagtagacagcctggcatgt

SEQ ID NO: 53625 - DNA, 1046 bp, Homo sapiens
aaagatgtattctctctggtacactaagagccttcttaagaatgtttacctgttggttcataatagtgaaaaattgaaataattgatatgtctgttagtaggagtttagatagattaattgtaaaatatgtatataatggaaatatatattcatacacctaaaattaaaagctgcatcaagtgacagcttactctctatcctttactataacttccttcaagttctgtggatgatttgaaaatattttattgctgaaagtaagtcttccatgcagagaaactgagagaagcccatgccatttcaaaagaggaaaagcaaaaattgtccagcttgaaattatttggatagacctttaaaactaattgtataaaatattagagtagtccgaataaggagagtgttgatatatgaacaaatatagttaactaagtaatttctcctatagatttatgatatgccctattccaagaaaaagcagcttcatctttatgaaagtataaaagttgactaagtagcaagtctataaaactatactttctttggggatatttcagtgtccattagcatgcttctgtactatgaaagtcttcaaagagtatttcaagatctgtgtggaaacatacaatgaacaaataatcacattttaaaattatggtctctttaatgtaatttaaaattctgtattataccaatgtggtaatataaactcaagagtatggaacattaagagggatttacttttcatcatttaatttgagttacttttgcatttatttggaagatgatggattattaaaacaaaaatatataaaaattaggacttctacgaatggcagtttgaagagattgagagttcttataaaactagacaaaattttcacaaacaatgaattcaggatactggaaactgacaaggtaagacgaagaagttttcatgcttgaaaaactgctaaagctttgggaaaaactggcgagactattaacattcttgcctgggatgctcttatattctgtttggtaagtgagaactaaagtttatctattc

SEQ ID NO: 53626 - DNA, 1048 bp, Homo sapiens
tgcaaaaaaaaaaaaaaaaaaaagtatccgggcgtggtggcgcatacctgtagtcccagctactcgggaggctgaggcaggggaattgctcgaatccgggaggcggaggttgcagtgagccaagattgcgccactgcactccagcctggcgacagagtgagaccctgtctcaaaaaaaaaaaaagaagtgtacattatatactaatatataaacatatatgtagtctacctagtgattactttggcttttagacactcccatggtaaattaagtaatttttttgttattaatttgtttatttaaggaaatttttctttaaacttttagatgatacagcagtgttcgagttgatacagctagttccaccaggtaatatatattgatgtaatatatacaatataagatatcataaattgatgtaatatataatatattatatattgattatactatattatttgataaggatataatatagtgtattatatactgataaagtaaattgacttgggaactcatgtgagtgacatttttttttacttcaaaatctcatcttttcaggccgggcatagtggctcatgcctgcaatcccagcactttgggaggctgaggcaggcggatcacctgaggtcaggagttcaagactagcctgaccaacatggtgaaaccccgtctctactaaaaatagaaaaattatccaggtgtggtggtgggcatctgtaatcccaactactcgggaggctgagacagaagaatcacttgaacccgggaggcagaggttgcagtgagccaagatcatgccattgcactccagcctgggtgacagagcgagactccgtctcaaaaaaaaaatctcatctatcctcctcttcccaagttgagaacagtgtcagatttctattgttgatctactatgtgtaaaatgtcagtagaccaaaataatatatacagaaagattgtcataaatgtcactttaatacattgttctaaaattgaatagtaataattgaaaatggaaactaacttatcattctaaaatattttgtg

SEQ ID NO: 53627 - DNA, 1036 bp, Homo sapiens
tttttaaaaaactggcttattttacatagcgtaatgttttctaggttcatccatgttgtaacgtgtcagaatttcatttctttttaaagatgaatgatattccattgtatgcatacatcacatttagcctatcacttcatgtgttgatagacacttgggttgcttccacgttttagttattgtgactaatgctgctatgaacatgggagtacagatatctgtttgtgatcctactttccatgcttttgaatatatatccagatgtggaattgctggatcatatggtaattatacttttaatttttttcagaaattaccatactgttccattgtagctgtatcattttacattttcttcaactgcacaaggattccaatttcttcacatcctcaccaacacttgttgttttctgttgttttgatagccctttcaatgagtgtgagatggtatctcattttagttgtaatttgcattttcctaattattagtgatcttgagcatcttttcttgtgcttattagccatttatgtatcctctatggagaaatgtctatttaagtattttacccatttttgaatttttttttggtttcgttttaggaattttctgtgtattctagattgtaattttttatcagatatattatttgcaaatgttttctcccattgtttggattgcctttttactgcattgataactgcctttttatgcacgaaattttaacattttcatggagtcctatttgtgtatttttttaaattgcttttgccttggttgtgttatccaagaaatcattgctaaatccagtgtcctgaagcctttgttctatatatttttaggagttttatgcttttctaggtccttaaattgtaaagttagtttgttgatttgaggtcttttttattatttatttatttatttttgagacaaggtctggctctattgcccaggctggagtgcagtggtgtgttctcagctcactgcagcctctgcctcccaggcttaagccattctcccacctcaggctcccacata

SEQ ID NO: 53628 - DNA, 1066 bp, Homo sapiens
aaagattgaaaatggaaaataaactattttatttaaggatacatacatgtgttaacactaaaagaaaaaaaaaaaggcaaaagttcaggagaatggttatctctggtggagaggaaagaattagggaggggcctgcaggtgcttgggaggaaccaatagtatcctgctccactgagtggtggacacgtggacactttatcattacttttaaagagtacatttacagtgtatatctgctcttttctaagtacattctatgatgcaaattttaaaatatagctatgccagatacataagctggtatttgggaagtatgttgggaggtacattttcttttaccctccttaaaagatttttacttgaattcaccattaatccttggccttgtttcttctccccgtctagagtgtttgtatgacagaatagcacaagaaactgtggatgaaactgaaattgcacagagactctccaaagtcaacaagtacatctgtgaaaaaatcatggatatcaataaatcctgtaaaaatgaagaacgaagggaagcaaaatacaatttgcaataaactttggatttttcataaagctttcgtgttttccttgtgtggcatgtgatttgcgagcgatggtgccgtccaaatcagaccccaccgtgcatggtggtgtgtgtgcagggatccatcgggttctggggtcagcggcttgttctgaatgtggacactccaaagacgacagatggctttgctgagactcaggagcagcctggcactggtgtccttctgggaatggggaaaacactcttcttggagggggataaggttgcctgagttgcctgtcacttgactggggtttgaatggatatttttactatccaaggacttctttgttgctctattttgttctataataaattttcattaattctttgatgtagatagtctttatcctcatttctttagtatattacatatacagtgggggtgaccagagtgttgtgccgcctggcatgcccttcctttcagggaaggaatattccggctgaaggagagaaaattcctaagagatgtgg

SEQ ID NO: 53629 - DNA, 1027 bp, Homo sapiens
tcttagaccagggacctctccagagatgtctctgaccatgtgatattggcaaactgcaggcctttctgaaaacaaggacctttggcaggtccttctcatgtcccttagaaagtttagctcattagcagctgccgccctctgtccccacagaggccatttcgtcccttcacagactcagcagaagcatgacataaatggcaatgtcaaagtgaacactgtttttttaatgattaatgttagtaaatgacttgtgagatctaaattttatactcttttttcttttttagatttactaaagatgcagaaaggagaacaaattaaaatcttatagcttattgctggaacattctgggtcttattggctctgcactgaaactcatagggagcataagattgtgttttgttctttgtgccgtcggaatcaaactgggtaccttgtggttgtgtttaaaatcataggtgttttgagccagaaggaactttgagatgaaatccagctccaccacttcataggtagggaaatgaagctcagaggtgggaaaggactggcacagccctactccaattggcagggcagctgctctccttacttgagctggcagaggttttcacacttagccatacactggaattatttaggccacacccagcccaaataaatcagaatctctaggagtggggcccacgaactgatgatttttttttcttttctttttttcttttttctttttgagacggagtctcgctctgtctcccagactggagtgcagtggcacgatctcggctcactgcaacctcttcctcccaggttcaagcgattctcttgcctcagcctcccaagcagctgggactacaggtgcgtgccaccacacctggctaatttttttgtatttttagtagagatggagttttaccatgttagccaggatggtcccaatctcctgatctcgtgatccgcccacctctgcctcccaaagtgctgggattacaggtgtgagccaccatgcctggctgtcactggtgattt

SEQ ID NO: 53630 - DNA, 1123 bp, Homo sapiens
atgtgacaagcttatgttttttttggatttgccaggcaggaaatggaggtgggaaagtgttcattacaggcaaagcctggtttctaggaatacctgctttgggccagacactaaatactttccatatataaaacaacctcagcagtggataaaacaggctcagagagattaggtaacttgcctgaggccacacacccaggaaagggtagaaccaggtttcaaaactgaggcccctcttgctttgccatgcgtcaggcagtctgatcacagagtcccttagccatgtgcttctgtggcaccatcccttttgcctgcctcctgattaggccttcattgctggccattagaccatccagtactgcagtgcattctgtgactgcaggacccttgagcttttagatgaatatttcctgcttaatttaaaagcccaccatgtcttcatagtttcagccttaccaggcaacatggcctcaagataccaattggacaattcctggagttttcttagaaattgtctctttagagagaacccagttcagcctttcacccctatcttatagatggacaactgaggcccagagaggggaaaagacatatctatgccatgtggaatcagaatatataggatttcatgaatgctatatcatgaagcagtggaaggtttgtgttcagccaacatggatggatgtttgtttggatgccaggattcagcaggtcccagaggctggccataccctcccttgctgctccagggggtactctgagtgtggggggtaattcttagagtcctaggaccttagtcctataaggaaccccagagttcacctcgtctagcctcctatacaggacaagaagctttctgctgtctccctgccatgcaatcacccagcctccagtaacattccactagagacaagaagctcactcactgccttccagtgcagcctatctcattattggatagctctgaccgtagggaaatgtttttgtgcagggaacattattggatccttcctctgttccgagccctgtgctaggcacggagaaatcaaattgttaagccccccttgccaccttaaagaagtcacagtctcaacagcagacagttgggatgcagggtgag

SEQ ID NO: 53631 - DNA, 1051 bp, Homo sapiens
gatcctgcccccgcgctgcccagacctgagggctcctggcgaccccacccgcagcccatctggcggctctggccccgcaggtcagggtcacacccctgccggcctcctgagacttcccggccccaggggagagagctgaaacttgggttgacgcgcgccccctccccagcgacaggcgaccccgcagcagccccgcgccactcctctctgcgcctttccgtagttgtcctcgaggtggctttgttgaacgtcctggtggcgccaaaaagtccaggcagcttcgggcgatcagggtcccgaggcgctgggcgcgcggacttggatcctcagggggcccctctgtgtgactttcgctaattgtctcacagggagggcagcaccctcccctatctttcctctattacaccccgctgtggacctgggacttgggtatttctagacgagattgggaaggcgcgtgtgttacactaagcagtgctcatgtttagctgaggaagaaggagcctcaagtgttcgtagggtgtacctgtgtatgttgtaattgttgtctctctttgggctgggggctgttatacatgtaggatttagtaaacacaggtcttgaagtcttgaacctgcaggagactcatttgtttctacaaggagagaacctcccctcccccaacatatgttaagggacttgaggagaccacagggaaaccgaagggagggacttctagaaaacaattccaggtttgggggaaaatgagtcatattgattcccaagctgttagccaataccactcaagggtaataattttcataaaatcttcccactggggacttaaatacagggctccacaacacagtttgttgagagctctctggtgcctttaagcctatccatgccccttacctaaatgctttaatttagtagagctccttgagaagctgcctcacattatcctcctgcatttgtgcgcctagcttttaatattttataatacttgcaaattgacactgaacaagctttaacctccatcatttcagaataagtttgatgttttaagtg

SEQ ID NO: 53632 - DNA, 1050 bp, Homo sapiens
gctacttacagttttgcctttcttttcttccgatgactcttctcaccatatttcctggtcattgtctactgttgttttgtttgttgctttaaagctgcctgtacctttctcctatgctactgccactgtaggaaacacgtacatgttatattacctgatggttttttagcttcctctatggccactgtctccagatctctgttcctatatcagcatttgcactcatctattttgataagcttatctctctggctaaccaccctctttctgtaagacctcttcgagcgtttccaccatcacttggggacttttgccatttttcctgcttccagatctcaggtgctcctctcttcccagttcttggtgaagcattttcttcttgtctggactgccttcatggtagtcccatagcattgtgacatgcgaccctagtaacagaattatttcattctttatcacactgccttccttttctcagactgttaaatgtggctttcagttagaacctcttactggacctggaaccaccaatctcatctagcttcaggcccactgtatcagcctctttcctcatgtatggtcttttcccacccagggattcctgttttccctattttcaactggaagtgacatttaaactaaggaataaaggaaaattaggaattatctaggggaagagggaaggcaggattgagtatggtacatagaacaaatgaggaatcccagagaaggaaaagcttgtgccaagtcccagaggccaggagcagcatgggtgtgtaatagagaaaggtgtgctgagaaactgcagtcattacaatgtgtctggtgtgtcatagagtgcaagggcataggtggcaagaggtacccctgggaagttaggttgtgttagatcaaggtgggtctttcctgggtattgagaacagaaagaaaataatctggaagtgaaactggttgaattttctcaagtgcaggtgttttattcttaccgattttttccctggcccctaagggctagaacaccacctgctgacattctgtatgtatgatgca

SEQ ID NO: 53633 - DNA, 1008 bp, Homo sapiens
atttggacataaggcttctagggggtaattaaggttaaatgaggttataagggtagggtcctagtctgataggattgttggccttataagaagaggaagagagagatctttctctccaccatgcaaggacacagtgagaaggcagtcacctgcaaactaggaggagagtcccctctagaacccaaccatgctggcacccttatctcagacttccagcctccacaactacaagaaaatacatttcttttgtttaaaccacccagtctatggcattttgctatggcagcccaagttgactaatataaaagctttattgcctcactaaattctggtttctagacccagtagacatacaaattacaagatcattgaggctgatctgtgttttagaaaaatcattctgatagttcctttgaggctctgtgtgccttttgtgtgattgagttgtgagtgcttcagagcacttgctttaattgtaaggaatagcttattgttgactggaaacatcctggctcacaaatgaaattgatgaaagctggcctgtccttcactgaaccaggagtgaaggatatattagcattgtgatgtcactgtggccagaggcctttgctggactgggaactcacttctgagttcctgaaatcacttaattataggcgaatacacataatacctgaacagcatcactgcactatttttgtcttcccttccatgctgacttattcattaacatttgtgtaaaccatctgaaccatagaatccttttgggaggtcctccagctcatctcttctatctgtagaccaacttttcctcgagcatctctaacaaaactcagaggctctcatcttccccactgaagagttggtgcccttgaactgatggattcagctgatgtcaaaattggaaacaaatattaacgaatatttaattcaatctcggacaaagtaagagatctaaaaatgtgtggtcccaagcctcttaaacttcttgaaatcaaagaaagccaa

SEQ ID NO: 53634 - DNA, 1040 bp, Homo sapiens
gtactatgcacaaggtacaaaattcaaaaagtacaaaagagatacagaagatgtttttaaagcatatcatgtggtcagagttcacttttcaaatagattgcacactagctacatgtggaggacacatgagaagactagaaactggacagtgagtgatcagttatagtaacttttgggaggtgatgatggggcagagcagtgatagaggactagaggggccagatgcaagagagccctgtgttctgtggctgggaggcatcagtccagagccatgatagcaggaatgcaggtaaacgtgttttgattggtgagagagatcagggagctgggctcagccctggcaccacaggtgggcttactcctcacacaatatccacaggacccatctcttcccaaagatgtttaccagtttggtgtgttcactctttacaaaggctctttctctttccccaggagtgtccagaggggtgggattcatccgctttgataagaggattgaggcagaagaagccatcaaagggctgaatggccagaagcccagcggtgctacggaaccgattactgtgaagtttgccaacaaccccagccagaagtccagccaggccctgctctcccagctctaccagtcccccaaccggcgctacccaggtccacttcaccaccaggctcagaggttcaggtaggcatgcccaaagaggaagaagccctgctacaggggttcatagctgggcaagagccagggaagcccatggtcctgacaaatggggcaagggtaaaagcttccacccccaggaatcactgtgcaaaactccccccgagcctcagtttccattcctgtaaaatgagacagttggagcagatgcccttctaagccctcttccaatttactactgtgactgtataaactttagattctttggtagaaacaaaatgtctgtatttaaccaaacatgaaggttcagtttcaacaagagttaatcacagatcagtgaccacattcagcagattagacttaaggctggacagtggcttttaataaa

SEQ ID NO: 53635 - DNA, 1046 bp, Homo sapiens
aggcaaaatatcaatttcaaaacagcatcaaaaagtgagcaggccaggcatggtggccatgcctgcaatccccagcaccctaggaggccaaggcatatttttctgtactaaaaatacaaaaatatttgtctctactaaaaaataccaaaaaaagaaaaaaaaaagcccactgggcatggtggtgcatgcctgcaatcccagccacttgggaggctgaggcaggagaaccgcccgcacctgggaggcagaggctgcagtgagccaagatcacgccactgcaccccagcctgggcaacaagagcgaaacttcatctcaaaaaaaaaaaaaaaaaaaaagagtcagcgtatttaaccatccccatctgataatagagcaaataggtcaacagaataataattcatgctattgcatgagtaatgaactggcaacaagagaaagttggtggaaggaaaggcagaggaaatgtgtcttgtaagaattagaatcaaggggctccataatcatcggacatccattcaatgttgtatctatggttagaaatgtacatgataggaactccaggaatcttacagattcttcttttaaggtcccagtcaactgtggcaataatgtaacacttatgctgagttatttctgtactaagcagtcatctgcataggttccttggtgtgcacatggtaatagttcaaatcttggatccttggtgatccttagagccactctatacttctgccccaatttctcaatttcagccattacacaatcagttatacaagggatacacttggcatacagacagtccatcattgactgcattaagtccagtttggcttttatggaaaagttgataaagttggtatcaatgaggatgtggtaaggtgggccgagctgtgtattatattggaaaaataagtgggaagggtgttggggaacttccctttcctttaatgtgttgggatccttcttttctttctttttaggttttaatctatccttttctttaagcctctgatctctgagactaaggatttgcttcatggttgcg

SEQ ID NO: 53636 - DNA, 1053 bp, Homo sapiens
tctacccaaacgcaggcaggtccctgcttctttgcttcgtcttctccccaggtggaaacctgcgcatcttcgttcgctctgcgcttctccacaggccctttccctctgctccttcccaactcccttaaggaatccccccccctttaactgacaccctaggttttgagacgccctaggttctgagacgccctagtttcttttccccttctcgcgttcctaacgccctctggacaaccgcttgctgcgccctccctccttctagtttcttccgcaccctccctggtttctcaggtctgctttcctatgtcttttcctcttcgcttcctactgcctgcctagcaccaccctctttttctggacccccgtggctttttgtggggagggaagaaattaggccagagccgttgagggaaaggagggatccgctctaaacttgggagggaagaacttctcaggtctcaattttggaaagggtggattagaaacaggggctgtacttctgcctgtagagaagcttgggacctcctagataaccaaggcgcctttccttacaggctgcactgccagggcaggcattttctatacagtgggctcttctgtacagcgtggttaggcagaagttatgttgtctcttgtttgaaccctggacctggccacttctccacggcagggcaggactggaagggcagttaagggtggaggtgttggggcacagacgtggggaaagcagcactgaacatcgagtttacagggcacaggtagttggggttctgaggagtacagaaagagagggagccctggggtcagggctgtaggggctcagagcggaaggaatgctagagcaaaaagaaagaggggcactggagcctagtgaataagggctgtggggctgagggagaggaaactgagatccaaagggccgaggtgctgtgactgctgtcttctagctaaccgctcctcacgacacgttttctcccctcccagaggccaagttgcagaagtttgacctgtttcctaagacgctgctgcaggcaggccgcccgggcagcccgc

SEQ ID NO: 53637 - DNA, 1058 bp, Homo sapiens
cgcagtccctttggacgccaccagttcctgggcgtgggcgtgggggatggggccgggggcgaatagggatggggtggattttcttggctgggccctctcacccgggcccccagcccctggcacagcagaggcgtcagcaaatgattctgagctaagagtacgcgtgtggatgtgtgaggaagaccctctgctctcagccgcctcatttgtcccggagggttttggctttttctgcccggggcccaactgtagaagtaagactggagctccgcgcataaaccagggcatacctgcgtaagaatgtgctcctgtcggcgtgtgctatcaccgaggtggaaatctgtgggagtctgggaatgtcacacaccaagtggatggcccaggatggggacatgcttataagaacactgtgaggtcaaactcactgaaggggtccccttgagccggagggtagcatcagagttgagcctgggcccggtggtgctctctgaatgctggcgtgagagtgtgtcccaaactttgcagagagtggtcacacgcacgtgggagggggtgtgtccaagtgtgaagctacactcaggttgggaagggggtagaccctgctgcctcaacctgggcgtgctctactagtgctggtggctcagttgggccatgcccttgctttcccctccgaccaacccaatccaaatcaggaggaactggccctggagcggcctgggaagctgggcagaggatatcctgccctgtcgaagtgtgggtgagatgaccttgggtttatttgccctccctccataacgggtttattttgcctccctccataacacattcactcacatgaacaccctaacctccggggagtgggagaaaaggctgtgggtctcagacctgtggggatgtgaatgccagaaaagaggagcgagagaagagtgagatgccgccactaggggttgggcggattccctctggttgggctgtgttagatgccaggatgctcctcctcccactcctgagaaaatgaagttcctcacgcatctgctgggccgcctcgggttcccgag

SEQ ID NO: 53638 - DNA, 1078 bp, Homo sapiens
atggagaaaccccgtctctactaaaaatacaaaattagctgggcatgatggcgcatgcctgaaatcccagctactcaggaggctgaagcagaagagtcgcttgaacccaggagacggaggttgcggtgagctgagatcatgccattgcactacagcctgggtaacaaaagtgaaactccatctcaaaaaaaaaaaaaaaaaaaaaactgcatcctaattgatctccctttctccagtcccttctattatagaccggtcaccacacaactgccaaaaagagctttctaaaacacctgcttcactgtgtcacaccctgctttgatcctctcaaaggcttgctgttgccctccaaataaaatccaaactcttggcttggatttaaaactctgtcatctggccgctacctccctccccatctgtatctccagccatgccctcaacacacatcctgagctacctgcagtttcctgaaagtgccagttctctgtcatctctggccttgcacactgtgtcctctgccctaatagattcctaccatccatccatccttcactttcagtttatacttcacttccttcaagatggtttcttgaccattgccacaccctcctcacactcctcgggttagacacaggagtgctgtgagtcttcagacttgttgctgcccttttcatagcactggatcactctgagctgtaactctcagcttgcatactctttctcccctaacccccagactgggacccccgcaaatggcctgagttacttcatattcttgaagcctaatcaaatggctagtacataataagcacacagtaagtttggatttattaacttaatttataaaaataaataatggcatccatgtactaattagatgtccacttccatctctagcatccaactcgtgggaacattgagagggcagagaccagatcttaatcatccgtttatttccagagtcagcccagggtctggcacataacagtcacacacccaatggttactgaactattaattaattggagctgaagcaaaaccaattggagctgctgaggaaagaaaaagactaaaggaa

SEQ ID NO: 53639 - DNA, 1045 bp, Homo sapiens
tctccatatctgtttttgtgtcacctgtgggttttatcctaggggttgggatcctgattttaacattttgtacttgtccaaaaaagagttcaaatgctgggtttgttcccccagcctcggccaaggggttctcagaagattctaaccaaagctggagataggtctgctcattttccttctgcccagaagtggatgttggccaggaaaattacaccttgtgtcttctctgatgctccaaccagggacctctccagattactatctagcacagactagtgctacatctgcctaggtatgggctttctctggcagcaggggtctctctagggaggctgagagacccatgggtctcccttcaggggaagtgttcaggggagttcaaactgaacacttctctccagctctattcctatcttcctaatctaatggctctacaagatagtcatttccagtgctacagatgcaccagggcaccacctctttttttttctaggtagaccttgttctgtagctgctgtgaagaagctgcagccctgaactcaggtcatactcaggaacagcagcaggggtgtgggtggggtttgagggaaggtactctgaattcaccttcatgtttaacctgttccatctgacttgggtttcttcattatattgttccctcccactcaccttcacttctgtattacaacaatatagactttactctaaagccaatttcatggaagttattaaatgctacttgaatgtgtgtgaagttgatacaacctttttcaacctgccttagaaagttcttttggcctactcagccccatgatttcctatgctctaggcctcataactgggaaaggcctcagctaattgtcactgttcactcaggacatgatggtctactaagcttcagacaaaaggccaaagcaattttatccttttcatacaagcagagcattaaaatgacttcccatcaccacagaaatagcagtgtcctctgcagttcttcctcctaccattaggcttccttgggctttacatcccagcctccaggccc

SEQ ID NO: 53640 - DNA, 1017 bp, Homo sapiens
gagcataccaggtttccatctagatacagctgaagatagtttccccttccccttgccagcctgcctttgatacttggccttggcccccagggcctccacttccccatatcccccacccctccatggaagaagacaccagaaccatcttattaggagcagcttgagttaagcagaagataagattgcctgcctcaggtgctgcagtcaggcccagagcagcagagcagcagcctcaggcctgactagagattgcttgccctcccatcacacacttggagttgcccatttatctgtgtgtccaccatctttacagttgctctcacacacagcagtcattatggaacacctgttctgggcaagacactttgctaattatatattttttctcatttaattctcacaatgagtcctgcaagattgatactaactccaaagccacaaagctgatagccaacacagctgtaatttaaagtagagtctttctaattccaaagcctgtgtcgtttccactaaaccagtattactcaacttttaaacattgtgacctcttttgataaacaggaaagttttgtttcttctctcactcgcagattcagaagaccttcatgtcccatccctgcccgttgcctaggagggcataaacctaatttaggatccctgtatgattaacgtatcccactcagccaagattttgtctagcttgactttcaatagttcatattacaaaattatgattttttttaatttttaaaatataaagttgtattatgacattgcctgttttttttccaaactaaatataccatcaacaagggtatgatatgcctcccctcaccaggggagatcttcatcgttgggcatggtggaatggccattctacagtttataatgtagttctaagaggaagatcagccccaaaggcttagctgtagtcccaccaagcagaagagtccctcccctctattaggggctaaccaagcagaggtctctaggaatgccagtcagttgttaaccagc

SEQ ID NO: 53641 - DNA, 1048 bp, Homo sapiens
tcccatggattcacatttttctcaacagcagtgataggctttttagaaaaggaactgaagcccagggaagtaatagaaacagtatatgaaatttcagtctgctaagaaaattgatctagaaaggaatagctctgtttggcaaagaacacctgtcccatttttgttacataaacatgtttcacaaagccaatttgctaaatgattaagctaatgagaaaatatatccattcaggttttctaagtatagtgaagaaaatgtcaagatggttgactttccttttctaactatagacaaaatcaagccatacctcttatctgagaatgacccttctcccccaaggagtcccaaaaggtgggcttctttgttgatttagagagtcgataattcagtaaagtcccaagtaaatggcacaacacaagctcagattgggtttttgtattcatattttataaacatttcaggacttttttcctgacccttgacctattgccattcttaaagtgaagatcttatatcccggaagcttggttagaaacaacttcaggatcatctcatccaacttctttctctatatagaaactactctcagcaatatctctgaaaatgtaatgtagcgggttccaaatctagactgccttgattcacagcctggctctgcccttaatagctctgagaccttgggcaagttacttaatctgctccagggctcaatttctccattggctttttggcttaatggggataataattgtccttacctcaatgcaaaggcataaaaatgatataatggactttggggactcagcgggaaggttgcaggggatgagggataaaacactatacattgggtacaatatacagtgcctgggtgacgggtgcaccaaagtcttagaaattaccattaaagaacatacccatgtaacaaaaaccacctgttccccaaaaactattgaaataaaataaaaataattgtccctacctcagataacctaccttttatattaaagtgcttggactatacctggcacaaagtaaatgctcaataaa

SEQ ID NO: 53642 - DNA, 1058 bp, Homo sapiens
ttttctctgtttagagtattaagattttttaaatccttctaattagccaattccaacagcagtttagggaaaattctgtcccctctgaaagggcaactgatgcagacttactgtcagcccctgtatctgtgtagcagaactgacagaagctagagccagagagcttccagagccaagggagctgctggaatgacctgctgatggtatcaccaacggagtctgcctgctgtaggaatgaggctgggggaagaggtctgaggatgcagctcctctagactccatttctttgaattcatggaggctctagggaggagtggggagtttccatttagtcattcagtagatcagtctttcagcaaacatgtagtgaacttacactgtttccagcagtatgctaggacctggggataggtagccagtaaaatctcttatgtgccctcagaattcaacctggctggagagacagactcataaacaaataatcaaaaggcacaacagataactcagtgtgaaactgtggctgatcccttgagctagatcctctaggatctcttgcctggtcaaagtataagaatgctgttttagcaaaagacagggttggcattgccagtacctgcattccactttaaacactgaccttatgtcagccagcagaccttggcaactgccttgtctgaggatcctaaggtgaaataaaggtattagtccggtaaacatggattgaccacatgcaggataatgggataggcatatgagggagagaccacaatgaacatatatggtcactgtgttccatgagccgatggcctagtgaatgattccagctatgattaactctgttacaggaataggagaaagattaatttaggctctgtcactcaggcctgattttatggagaaagtagcatctgagctgagccttgaaggacatataggttgggacaggtagaactggagagggaggacagtctaggtggaggaaacaacatagcaaaggttcagggaggaaaagcacaagacatatttgaggaatagcaaactgctctaattgtctggca

SEQ ID NO: 53643 - DNA, 1037 bp, Homo sapiens
ctcaacctccccagtagctgggactataagtgcacaccaccatgcctggataatttttgtattttttttttttttttttttttgcagagatggggtttcaccgaattgcccaggctggtctcaaactcctgacctcaagcagtctgcctgcctcagactcccaaagtgctgggattacaggcatgagccaccacacctgaccaagaaatcaaataagcttttgaaggctgtacatacaatctaatctgattttatccagccataaattaaaaattgttagttctgtgctccgtattctagttgctttcgcagacacgctttgctcacttaaagtctgtataataaccccattgtaaacacaaacaactgcaaatgtgtatgtgcgcagattaaccttttctagacactccttgtaattttcaaagccagtactggagttctagagtgcattagcacatgcatcaaatggtagattccccaggacctcaccgcagtgccaactgcagccccagcctacttcaccaaaaccacaccctgttcttcgtccagaaccaggacctcaagccttcaggtttaatgtctaaatctgaatcttcaggtttggctgaatcccaaacctgaagattcttttgctatttccatttttttttttttttcactttccctcctctaattggctttatgtgagaccttgtgtgaacaagccttcctcatgcatgcattctttactgtgaaaactaggggaaaaaaacctattttctagatgaaaaaactgagatgcagaaatgggaagtaacttgcccaaggcttaggaaaaccaaaagcagaaatggctggttcaagtttacatagtcacaaagtgaaggtaagatatacattttttaaacaaaaaattgtacacacgaagtttgagacaaggaggaaagaaaaatgtggaactaattgacaccctagggctgagccaggcatttgccttccttgtagtttcctggtacccttttccctcttgtggccctttactgttctgaatttcagtg

SEQ ID NO: 53644 - DNA, 1396 bp, Homo sapiens
aaatcaaaagctcaaagaagcagatttcaaactcatgtccaaaaccttttataccaggcagatattatctccattttatagcttcaaaactgaaactgcaaattaagtgttttaaccaagatcacgtagccaagcagtggcagagctggcacttaaatgtgacggtagtgattctttctgttatatctcactgttaacctggaaagatgaattaacatggaatgaagaccaaagccagaagaataattaagggtgttgtagtctttaaaatgagatgatagaaataccaccaggcaggggaagattggagagatgattggatgtaaaggttaccaatgcctagactaagtatttggtaaatggcccatagattctcctgtcctctgtatacttggagtcagacagatctttgttctaatgctggcacttccacctgttagctgaggtactctgagtacatcatttctcttttctgtatttcagctacttcatctttcaagtgaggataatgtcatgtgtcctcacagataaattgtgatgataagatcaaaagtgataatgaaaatacttggtaactggcagagggccatgccatttgagttggtaatggctaaacttctttaatccatgtcccaaaattcactacttttgacctgtctctggccttttaaaaaataagtttttagacacattcttcattcttaatatgacagtgacttgcactttgccagttgcattataacagactcttccttggaagaaagtccactgtttattgcattccccttagtaaaatgcagtaaaaatgtgttctgagtcttggcaatgacagggagacagcatgatgatataacacaaagaaccaactattaggggggccttgggcaagtcacataaccacactaaactggttctttcacctgtaaaaggcagataataataaccacctttgcgctggatataagaattaagtgaaggccaggtgcagtggctcacacctataatctcaactctttgagaggccagggcaggaggatcgcttgggcccaggagttcaagaccagcctgggcaacatagagagacacccccatctctataaaaaataaaaatttaaaaataaagaattaagtgaggtaatgtgaggacacagacatggcacatggtacattcaagacatgtgaggctttaagatgtgtagaccttgtgctgggaaagaatagcacagctcaccaactagacctacctctgggtgtataggatgacatcacaccatctcactttcactcctactttcctctaaggaagcatattctgtcttctctcaacattacttttttccacaaagcaaaatcctctcagctagggttacatggaaatgtgaccaaacatccaaga

SEQ ID NO: 53645 - DNA, 2956 bp, Homo sapiens
cttctttgttctgcacaccattctctccttagcttttggagaaagtatggcttcccaggccagcagatatgtacccagtagcctatgtaagaaattaggtactagatcttccttcctagctgttttccctattccagcattccagtctttgctgatgtctcatctgtattcctcaaatgagatatatctgtagccctcagaatatacctgagaattgtatgtttaacagcttaacagttagatatcagggtcaatgaatgtaggttcactaagaatgagtcatgcaaaacaaacagtgttttgtgatttgatagtcttactaccctgggaagttacagagggtgacctgtattcactgtgtgcttgcattacagcacaatatttgatagtctctcatagtattctggggcaaagtagagagatatagatgtgttagattcattgctgattaaatggttgtgtccaaaaaatgttaaccaccatttccttgtagggaaccaagaggctctgtatttaatcttttattacttaccatatttgttggcaacctaaatgaagactttatcagatttatagattatgaaaaataagattcaagaaaaacttaaaatactgaaacttacacaaaatgaagctgcagaaatttcacagaaatgtgtagaaatagattcctttagtagaggttatggtcgaattaagctgaatacacgttaataacgcgttgtggctgccaacaaaaaagctagctcctgttttagaggtgtaatcccaaccagagattaacttaatggtcctgtttaactctgcactaagataaactacccactgggtgatgggtacaccaaaatctcacaaatcaccactaaagaacttactcatgtaaccaaatacctgttccccaaaaacccatggaaataaaaaatttaaaaaaaaaacaaactacccctgaaatagtctttaggcttcatgctgaaaaacgaagcctgaagaaataggagcatgtctggagcagggctggtaggaaggtgagggagctggaaatcatgtcatttaaggaacattacctctaaagaaggaaggaccatgagagatgtgattgttgtcttcagctacttgaaggcgtgccttgtaaaagagggatctgattttttgaggctgcaggggcagaactgggaccaatgagttgaaagttacacgagacaaatttggcatagtgtaacaaagcattttctaagaaaggaatatcttgtgtcgtgaagtgttaattttcctatcattggagattaccaaatactactcttttcagtaataacagatatatatatggagagggattcatctctggtattcctgctttatatggaatgggacttggacttgcttagctctgaaatatacaataaatcttctgtgattccattgtgatctaggtatagtaacctagcataccaaaacccagagtttcattaaggtacatctaagtccctcacattggctgtcaggtttgcaggatagagacagaaactagtaatatcccctctgggtggaatgaggatcttgccacttatttctaagcccaggagactgtagtggatcccaggtgctgactattgttccttttctcactggccctgcctactgctccaaggtcatcccctttatttgtatataaggcacacaaacatgcacaagggaacacatgcctgcatatgttcttaccacacagccaagtatgaaaactaccttaacttctgtcactgaagttgaactctcagtgtgtgaacatttaacaaagaaccattatcaaagtgttcaagatcagccttgttctcatactttatgttctgtgatgaaaatctcacctcagagaacttaaaaaacttaggagctaagtttgcccttcccaacccttagttttaagtcactccctttctgaacgggtctcatctttaaaaatggaagtactgaaagaaatagagtttaaggactttgcattttaaaattaaactttattttctttcaaattaatttttaaagcttattactgacagggatggggtgaaaatatcttaaaaggagctaggctttttgatcattattaagaacctctttccacagggtaaaactctggactgtggaaagttgctgttgaaaggaaactggggaaatgtgatgtgaaatgtagagtgttcttgggcctgctactatctccctgtggttgccagcatagtgcttcatatataagcatcagtaactgttgttgaatgttaataacctcaggctcccctaatctctggttccagaatgaacagaggctggtccaaatgagaacagatgctctaggcccacccagattccagacctaaactaagaaagcccacccaggactctttaggcctcctagagccaggggtggggtgagagttaaaggcccttcattcttctctgaattctctttcaagtcaaatgactagtgtttttgcaaggctattctgtaacagccatctgtgtctgcaaggattaggatctaatttgtaaaagtcatcttaaattacagccaaactaaagactgttaaaaagcacatcttaaggccttgcctctttaataacaaataatataagccttaactctaggagtcttaattgtgtcttcagccttttctccacaaagcagagactggtttctcagcagaggacctggtaagtgttcttctgtacctcccatgcctgccacccgcccccaaccaaaacaatacttcatgttaagatttccgagctgtctaaccatttactaaatgtctgctgagcataattccctgaactgagcactgtaggacaaccaaaatagccgcagacataggccttccccagaaaactgattcaagttgtggaagcattgagttacttggttttggggtttgtgtgtgtgtgtgtgtgtgtgtgtgtgtgtgtgtgt

SEQ ID NO: 53646 - DNA, 1034 bp, Homo sapiens
tagtgacagtcttttgtgggtatctattttcactgcctaatttcacttcaaaaaatagccccatttctcatccctcagatatgctttaaatactcacatatttttagtagaaaaaaaagtaccagatcagttcatatttctaacttataccaggtttccttgttttattacaaaccaaaaataatgcaaataaactatatttgttgagcaaatcaaactgaagtttaacactggtgttaaccatgactcgtttgagtgtaggtgtcctttatgttgttgttttacaacagtgtttgcttacaggaggcccttgctcttagccagtatgtttgaaactgaactactgatgtatttttgttatttttttggcagtagaactgttggatattcaaatctcaaggttgctgatttacctcgtatctcttcattgttttccacattggtccattggtgtgggatgtatgaggtctgttttctttctggggaaaagccctggagactgtatacattgaggagcagacattgtctgtataatgaatgaagtaacgagctactgttgtttattcttctgtaatataattggttgaattcagacaataatgtagcatctgttatactatgcagggaaatgtcaaaacagaaagcaagcagacaggtggattaaagggagaaaaggagagaaaaccaagaaatatcacattaagttctgatttaaagtaggcgaaaaggaataatcataacaaaaatgataacaccaacagctgtcatatgttgatcacagtattacatatagcatgaggatcaatgctcagcacttgtcactgagtgctgaccaagtgtcagcatttgctaagtggcgtcagggacagcgccaagatggccgattagaagcagagtctcccatcaaaaagaaccataattagcatgtgaatcctgcaccagcaaccaagtattcaggttctctcatcagaactgactaggcagctggcgtgatccagagaggaaggtagagcagtgtggtgtggcggcccacc

SEQ ID NO: 53647 - DNA, 1057 bp, Homo sapiens
ttttgaagaagacctgtgctgagcactgccagggaaacaaaggataataaaacgttttctgcctataagaagatattacatcttagagggaatatacagcctgtctaggagtaacagcaaatcaagaaaaaatgtgctaaatgacatagaaataaaagcaaaatacttagagagttcaaggccaaaggaaaaatcttttacagctgagataatcagacaatgtacagatgaagtaatatttgagtcaggtcttaaaagataagtgaaacttaactgtttggaaatcaaagtttattcatgtcaaaactgttgtgagtatctatcacatatatacaagatattatgcctgacaaaccctagtctgcactctgaggactgtcaataatggaaggtagaaaatattttgttgaatgtcttctgtgtattaaatagtttgctagctgctttacgtatgcttatcaattaaccattaaaacaagctacaaggttagagatttatctttataagtgaaaaaaactgaagttcattgaggagttacacatacaaaaatgagaacagctgagattctcatccaggactttatgactataaagctgtttctcatactccattccagtacaaaaccctatatcattgtgtccacaggagtcatatatgccaagtttcacaaaagtttagataagggagaaattagtcactatccttttaggctatttcaagaaatatagtttaggattcttgctcctttatgctgtcgttcacacatgcacacactctctagctctgtgtgtgtttgtgtgtgtattagtgtatcgtcaaccatactggcttgctaaaatgtcaagggtacacaattaactcagtgttctggatctaaagcttggcagcgtatgtaatttcatctgatgatttatctaatttaccatgagctgaaactttctttctttccaaatgtagataaaagcccatcatcttacagaagaccctataaacataattcagtatatgcattccagctgttaacatgtgagaggttggggtacagtgggggagagg

SEQ ID NO: 53648 - DNA, 1031 bp, Homo sapiens
atgcacaagatgtttaaaattttaatttgaccttactttcctgacttcatcctttcaaattaaagtttctcacaacattctgtactttccctttaaagcacttaccataattgtaattaattatcacataattatttatttaatgctaaactaccccatgacactgtaagctccacaaaggcagggaacttgtctatattatatatctctgtattccacatactgcctagttttgggaggtgtttaataagcatatgttaaataaattatctttccaggcataaaatacttattgtttacagcaacaattaaagaaaaagacatagctcatccacaaaatggctggcccaatctgagcctgaaattgactggctgggcaggaatgacttgttatgccactatgtacacgtaaaaaacggaccttctaaaagcaatcacagctggaagccctatgatcacaaatacagtttataataaaagagggtaaacagctctgttgtaaaacagactgtaggagatatgaaaggccatcaaatacagggatcttggcacctgttgtgtgttctttcccttactcacagctctctctgaccatcctgacagatgggctggcttgggcatgtggctcaggatgaattttcccaaatttatcatggtcatagcttcttgtatgtttggtagttgttggtgaatggttatcatttcttcttatctgttcctcagattttatacttgcctctccaactgtcctcttcagagtcatctccaattttgagagagaaaactgcttatgtgtttcccccatattattctatattatcagattttttagaaaatcccaggtattgtggttaacacttcatgtataaatttgttctcataacctgtagatgtgcctctggaacttctcttgtattctacaaatactgtccttgtagaggttccctttgctaaatctaagaggacacatcaaagtaactagaaatttttacacatcgattgggtggaggtagaacaactggattatgaga

SEQ ID NO: 53649 - DNA, 1931 bp, Homo sapiens
gaagaataagagatgaggataggctaggtgaatctaaagagagatagggtttgaattaggccctgggtaaatggaagagtccatgactcatgagagataactgtaagttggtggttaagagtttgcagtgctatattgcctgaattcaaatcctagctcttccacctagcagctgtataatcttgagaaaaatcacttaatctttctgtgcctcacgtacttcagttagtagccacttgataagattgttgtgaagattaaatcagttgatacatgtaaagtgcttagactggtgcctgacatctagtaaataatcaggaaatattatctgcagtaatactaataatataaactaagtttggaagaatgagtaggaagaatcatttggattaagaaagaagaacataaaaatttgggtatgtgatacagcttggaagtgtcaaatggcttgggatatgtgggaaagaagtaattcaataaggcaagaaggggttgtttatagacagaagtgaggagggagaaggctgaaaatgtgcattagggcacatttttttgaaggtatgtctatgttctgctataaagcttgaaccttaaactgtgggcagtaagtattcatcgcttctcttaagcaggaaattagcaagattagatttgcaatttaggaaactaatttgataggtatgacatttgcttactcactttgttcctatctttatgataataccattttgttataatttctgttattttgtttgctgtctgaactaccgtgcttttcaaactatggtctttgagcatacctttggcttccaagctagacctactgaatcagaatctctgcaggtgggccagagagtctgtgttttcacaaatttcctgtataacaagtgatttctatgtatcttaaaatttaagaaccactggtttagtggaaagaacataggctttagaatacatacaaaacctgattcagttccttatgagatatacaccattggcaagttacatagccaattcaagtctcagtttccccatctgtcaagtagaagtaataccccattgtggtattgtgggaatgaaaagaaagagcatatgtaaaatgactaaaccataatagaccctcctatatattgacttcctttctaagcttatatatgtatctcatacaactaatgagagaaggaaactgtcttactcatcttatctccagtttctaacacagggcctacatcttgtaggtgtgcagtaaatattttataaatgtgtaagtggatgaacaaattgtatggggaaaaactggaagttaggagacttgattaacaggttaatgccataatctgtgagttagtgatgaccggatctaaactgaggcatcgttcttgaaaaatgtacaggctccatcctaggttaccaggcagatgtgtacattgtctctggattggtttagccttaacataaactctcactagttagccagtttcatctaaagcagacactgagatggcaatccatagtttgaaattctgtcactaaagaaattagtaagccagtcctaaatccagctttttagctgactcccacataccacttctatccagatgaaaaagaatcttttctaaacatctccatcagaaattccagagacttacattctagcaaagcaagacaatctcagttaggacttggaagttacttgctacttgtgaattcatctctgtttttatagtcctacacaaactattttgaaatttctctgtttaaaactgttgattactggagtttacaaaaataaccaggtagtctaacattatattaaaggctcaatctttgatataataagtagtaacctgaaagagtgtcatgtcagatttgccataatccttatttcactgtttttgagcaccagcagataatgattttacagacaaatc

SEQ ID NO: 53650 - DNA, 1043 bp, Homo sapiens
caaggtaatacaactgtgtaaaggccagaatacacacttacaggcttttgatacctcatgatcccttgtaaaactgaggtacaattatattaaagatttatgggataaactgaatcagtgctcttaccaagattaggtaggatctgagtgggatgatctgaagagcagatgagacattgccatattcgcaaatattatattcactagattagaataagaaagtttctcttaattgcgtacttctacttttgtgcatggaataatgctcacttttaaaaagatatatccataccgtccctgtttacatttgttgttcttaaagtgcctgctgatagatcagtttatccatgtctgacacctcacagtagaagttaataattgtcatatatgaaactgatgtaaagagatttgtgactcaacattggcgttacaattcagcacacctgttcagagccagccctccacatttttcccttttgcctgaggtgaagacttcttcgtggattacagtaacactttttgacaagcttagactgggtggagttgccatgtaatgacagaacacaattgatgatatctcagtaatgcattcttttttgatttgggctgtcaccatttattactgtaaaagcattcattgttaaatagctggcccaacctgtccactttttgttttcagtaatggcaaggcctaagaaagtatgtttaattttctagttatgaaatattagctgactttgggggtaatatatctagttgtattttcttttatgtaacatttaaaaagtagccatcttagtattttccaaataaaaattgaaaccttctaaagccttctcaagaggctattgagaccttcccaatgtcttaaacctgacaggcacctagaaacattttttcttcttatacagattcttttaaaaagaattggaagaaactgttcttgccttaaatataacactaacttgaattcctatgtttggagacagtcatattcctcatgaatttttatttcccatggggccttatatggccatgtttgc

SEQ ID NO: 53651 - DNA, 1817 bp, Homo sapiens
aacatacatttcagaggagttgttacctaaaatattatcataaggcataagaaaacacacgatttaagttgcctttcatgaacataattaagaattaataagccagtaccagtggctagtccccagaatttccactgttttgccttttgtgacctgtgttattaaaagtccattatttttacagactttattaaattggatcttattaaagcattctatatttgcatttggtctttcataattcattattattatgacatttactttttaccatcagatctgaaaacatatcataagctacccttttctcttgaaagaaatgctaatttcaaacagtcctctaatagaagagaaaagctttatcagttttttcatttattccagatcgtgttaagaatactaatgctagacttcagtatgctaatatctcagagctttttttggtcaaaagcttagaattattatttttatctcatgctaagtatgaaactagaagacctactactactggagaaaacataattgtaaagtacagttgttgattctgaagacttgtgaaaacgttgctaaattctgttttttaggatgatgctagtcaatttatctttgcacaacactatattattctatttaagaaattttatcctcttgaaattaatgtagtttgtttttctcatagtttaaaggtagtgttgtagtgtttaaggctaagaatcctgccgggtgcagtggctcacacctctaatcccagcactttgggaggccgaggcaggtggatcacaaggtcaggagttcaagaccatcctggccaagatggtcaaaccctgtctctactaaaaatacaaaaaaaattagccaggtgtggtggcgggagcttgtaatcacagctactcaggaggctgaggcagaaaattgcttgaacccgggaggcgggggtttcagtgagccgagatcacaacactgcactccagcctgggtgacagagagagactctgtctcaaaaaaaaagactaagaaaagaatcctatgctgtcagccccagacagcatttagggtatgcttcctgcttttctatatgataatcacttctgtattatgtcagatatgtttgaaaactcaatatagcaagattttacatattgatatcaggcaggctgtctaatttaacataactaataacacaatgagttctttgttgaagtactagtaaatctattaaactacaaagcaaaacttactttgtattttgtctccttttagatttctcactatgtgcaatagacactttggcagtgttgtggcacaaaccattcggactcaaaaaacggatcagtttccgcttttcctgattattatgggaaagcgatcatctaatgaagtgttgaatgtgatacaaggtaaagtacatgtcacaaggagagtaaagccttcctggtatgtgataactttatagtttttccacccaagctgacaatatttctattagtaaatatctttgcatttgaaaatatagaatatcctgaaaaatgtcttcaaaaaatataggtgctataaaaaataatatgctgcatgaaaatctaaaagaaacatcttaataaaattgcacaacccttggggcacaggatgttcaagttaaatgttcagaattgctaaattgtataatctatcaattaggacataatcagttgtcaagtgtgacatttctatttatattgatttattgttataatgttgattaattggaagaagtacttatctttagttatctagaaaatccagtcactgtatattgaagattgaatttttcacagtgacaa

SEQ ID NO: 53652 - DNA, 1098 bp, Homo sapiens
ggaggctgaggcaggagaatcactcgggaggcggaggttgcagtaagccaagatggcatcactgcactccagcctgggtgacagagcaagactccatctcgaatatatatatatatgtagctataattaggagcaaattcaatatgtgtaattttgcatatctttttaacatgcttatgtgctattactatttccatttctagaaactttattttttgttgatcttttacttactagtttgtaagaattctatatataatgagtaaattagcctcttttttgtggtttggaattcagaaaatttccccgtttgttatttatcttttggcctagttatggtgtttttgtttttgtttttttctgtggtgtgtgtgtgtgttttaccatgtaagtttaataaaactcatcaatttttgtcttttatgcttcactctgctccaactatagtaacctccttgttacctttcaaatatgctagatactttccaacttcaatgtcttttatttcctgttctctacacctgaaattctcttccctgagataaatatttcatttcctccttcacctcttttgagtctttgatcaaatgtcagcgtttcattgagactttccctgaccactctattttatattacaacctccccttccctgctttgttttccctccatcacatggagctcacagacttttgagatatttattagtatttttttcagatcagattggagtttacccatacaaatgaagcaagtgggaattaatatttttaaagtggttgactcaggagactagacacttggtccagtgaagctatcattgcccaaaatatttttatgatgatttcttttaagaactgccttcagagacagattaaagtcttacaaagagagtcctgtgtccagaaagcaatgtgtctcaaagtgtggccattaatcacttgcatcaaaattacctggggtggggttggagacgtattaaaaaggctgtttcctgactcaaatctattgaatcaccttctctgtgggaatggggctgaggaacttgccttttaaataaattccctaggtgatttataggccactaaaggtttaggatca

SEQ ID NO: 53653 - DNA, 1049 bp, Homo sapiens
gccaaaatagattatccttttaaaaatgttctttgagataatttaaaattaccaatttacgagccttttttactctgatttggatacttcctacactcctacctagtactacagttataactgcctggttgcacatgcatcgtatttgaatcaaagcatttgtttttaaaaaagagctcattttcctctgcactaatctaattaatgctattcaggaaatatgcatttaactcagatacagttgtcaataaatagcctatgaaaactgttgttagaagctaagatacaaaggtgatattattggcaagccattccaaaagaataacattttaagtttctatcacattctatttttctcatgcactagatctttcttataagtctgttggtgttctccttggtcatctcccaattactctgtgttttgaatattttttgaatattctaggtatcttgattatgagagtcacagaattaaaagaatcatcactgtctcaagatgaagtttgaggttaattccaaacctttccctgtttgtgatctgttgctgaatccttccccattctgtaacccgtcccccgaccccaccagtgtactcatgtatagttatatgcaaatagttactcccaatagctggttatgcttgtattttagaacatacagtttttatattgatataaaacatgagtaatctaatgacacattccaaaaataagataaatatcttattctaaaaataagataaatatcttattctaaaaataagatatttaggctggatgcggcggctcacacctgtaaccccagtgctttgggagtctgaggcaggtggatcacttaaggcaaggagttcaagaccagcctggccaacatagtgaaaccctgtctgtactaaaaatacaaaaactagcctggcatggtggcacatgcctgtagtcccagctacttgggaggctgcttgagcccaggagccagaggttgcagtgagccgagattgcaccactgcactccagcctgggcaacagagcaagaccctgtatctaaataaa

SEQ ID NO: 53654 - DNA, 1076 bp, Homo sapiens
atgacaaggaaaaagtgtacatgttcagtatagacacaatttttttctgaatatttttgatacttggctagttgaatcaacagatgcagaacccacagatgcagaacccacagatgcagaagaccaactgtgtttcttatgtttgttcattgagtaaacactgaatatttaatatgaaccaggaatggtgctgtcatctgagaatgaaaggtggaacaagacacaatcctaaccctcaaaacacatatagtctagtaggcaaaacagacataagagctaatatataatatgaggtatgtacaaggtactttaggagtatagatgaactttatacagagttgctgtacccaagggggtcaaagagggacttgaaagagatgatacacataaagatgaagttagaactttactctttctatttagagatttttatattaccatagtagcattcctagtcttttgggtggcagattttgctcttctttactaaagggcattggtgtttaaagcctcataattacgtatggggaacaaagggtcagtggttgaaataattgaggagagaaggaatagagggagctggctagctaatataatcctctataatctgaaccagattgagaattaaagtcaaccagccaacatggacaaatccaaagaagatgttttgttaatgattcatccagcattggcatatgtctacaggcagacagtgaagcagggataagatattcttttggatatgtaacatgtagaaaaccatcatagatttaactaataaaaatattgttagtacaatgtattcttaatgaatgagtgcttagctatgaaagaataatttcttaaaattcaggacaggtatcacttctgggaagtcttgcctctccccatccttctcttgcctcagtcagggttaaaatgcatattctgtatgctcccataatatatctgtactaacttgtactaatagcactcattacattgtatggtcattgtctatctccctgctaggttgtcagctccctgagggagctatgtctgtaatcccattggtttacacaacttccttccttcct

SEQ ID NO: 53655 - DNA, 2365 bp, Homo sapiens
gagccacagtggacattttctgaaatataaactagaaagaatgcatgtgaactgaatatttttctatctcttcaaatgtcaattacatgtcacatgctgataaataagggcttaatatgagaatacattaaggactttaaaattatctatagaacaaaaagaaaacttgatttcagaccttttcctttcaaatggaagagactatccattgttcagattaaaaccataaaaaatatgtaagaggaattttgtcattctgttttaaagaatattttttctctgtattgttgaacagttcaaagttaatatttctctttacatatatctattaaatgaaaagaatagtaaatccatttcctttaagcaaaatacaattcctttgcaacttcatttgagataggcttgcacatgtcaacagaaatctgcaatagcagtctgcagaattagatataatcatcccagcctttttaaagtgtaagaaagtaaaattttttgatattttagatgctttaggaactccaaaatgtaaagtactctcttagggaatagcatttaatttttgtctttgctgttcatatagactaattatgcctctctaaaatttaagaaatcttacattagtggatattttaattgatcagatttttctcctcttttcagagaaagcttcttgctatctacctccaccatgatgaaagtgtgttaaccaacgtgttctgctcacaaatgctttgtgctgaatccattgtttcttatctgagtcaaaattttataacctgggcttgggatctgacaaaggactccaacagagcaaggtaatactgttgttcacaagttacaagttgggcttctattaaaaaaaaaatcattgtgtttatcatcatcataaacatttttcatcctcagcattaaactctctaccattgcatttcattagacaaaagctgctcgttgcagctaacacatgcagttatttgcaattgtgaaaatgtaccttaacttataaaaactttttaaattcaagaataacctgaaaacaaaaatacatttctcatcttatatttgcagtgcaacagacatttctaatatgtttttgaacttttagagaaacctgatgtttttaatgatgttcagaaaaggcaaaacaagtctaatatataatcctagtagtaagtttattttttaataacttcagtgaagaaggcaggactttctgcacaagtccagtggagttggtaatagcttaactctagcatatgctaattgatgtaatcgctttattgcacacattcttttgcacacagccaacaatacatccatattctcaatagggaaaaaaaaattcctttcctagttgtcaggatgagtttacttagtttgttaatcatagtatcttcaagtgattaacacttcttcatattttgcctatttcagtttcccatctgaaatatatttcatcatgtttaattacacatgtggccgtaacatcccatgatgctactttgggtgtgttaacacaatcataatcacaggctgctggttcatgaacagggagattaaattaattcatttcaaggcaagcatattttagtcacctaatttaaacgattatagaacaattagaaaccatctgatttgtctttttgttattttatggctcactgaatttttggtcatcattcagactttgttttatttaatctgaatcagaaaagaacatgattctttccttaaatgtgaggcaaaataatgttgaagctatttcataatctaatacttcatttctttaagcaaatggttaggaaatttcatgagatgacttcgttttgccttggaaatattccctgttatacataaataaagaatctttagcacctgtatttgtttaaattaaatcaggttattattcacactcagttaaaggtgatgaaaagcagtgccaaaaacagataaaaatgccacatcgaaggtctttcatgaggcaaaatacagagactggagacttggctaaatcttttgccattcactggcagtaaggaatctcctcctttccttttatccacaacttgatggagaaggaaacactatttctaaaccatctgtagtggctaagttcagtgggctacctgctgttattttgttctatcctccatttaattccttagttccttttattttacaatgacaaaaaattgcagtgtagtttcttttgaaaaacagtgtttgagggtttcttttttttatgatggcaatcaacagccatgtaattgctttgttatgttttactaaagaagtctgttaagtagcacaactttgatacactagtaataagagtttgcaggttacagagacacctgtggtgacc

SEQ ID NO: 53656 - DNA, 2402 bp, Homo sapiens
tcatttgttagatggtatacaattaaacgtttgcctccgcacattctttcccacaactttttgagggtaaggaaactgtttcattcatctttatagtctcaatcgctaatacataggtactcttcaaatgttattgaactaaattattaaatgggccaaaggaaaaactggttatagtaatagaaatcaaaacattttcttactcgttttctgtggtactgctttcttcacgaaagcagttttctgattagtttgccatttcaactcttccaaattggttgatatgcttaatccagttctcactcttttggcctgtgcttaattgagctcagtaagataatcagaaatctgagtctggagtccatttatctgtgactgtaatttaatcagatttatatagcctaaatttactagcacttccatactattgagtctttatattttgcttatttattgttataaaagcagcagaaaattttttgttgaaagcttatgtcagagaaaagattattttaaaattattagttttccttttgaaagctactttggggtacccacagcctgaagattctcttgtgatactctttttatcatctcctttctcacattcagtctaaagcttaaagtgggaattttttttttaagtgtgttttcctggcatctcatgtttaacagtgtcaggggtttgtgtccctggaacgaaaactgtttctccagagtcttttttctctcagcttccagtgaaaagaggggcgaggcgagccagtcgcttaccacaaagcagtgccaccacaaaggaaagattaagggtttagagagaggtcaatgtgggtttttctctaactaaacactttcctaaagtttccttgtggaaaaataatgaagtcatctcagagtttttaaagaatttttatttctttttcaccgtctgcattcgcttgtcttctcagcatggatgtttaatcttcctaggctttgtgaattggcccaaatgaataagtggtgagctgtctctctaggagctagaggcttattctaagggcctaatcactgagtaaacacatctttgccctccctctcacaactgcgatataatagtcgagattctagcacagtaacctggatattgcagggaccaatgctttgaaatgcagaatggttgatcctccaaaacagacagtgcctgatcttcgcctgtctctttcttcttttttaaattaaatattgccaaagagatgccgttttattgcttgatattgtgcattagtgccctggatttccaagtttagtttcagtcaacactgtcggctgcacttatagagaactctgcatgttgggtttcttagtagcctcttcggcacatgtgtgtttggtttggaagagcatttaaattaaatcagtgagatagcaatgtaaatcactaatctctttcccaaagtctaaatgttccattgcagtgttcttgagagaaataggcattttaaagatttagccattgccattgtttagttagaaatatgctgatttaaaagtggacagctctctttttcccactgtctcattaaatgtagttgctgagatacgatcaagctgaattaggggttgacatccctctgtctgttcagttagagagctcctaagaagaagagttctgaatttgttaatggtgccaggttcacattactttccctaaagcatcagaattcttgattcatttactaaaactgattttacattgccattgctattgggtatcttttttgccaaggggctgtggcttgtatcagtgttcttgtttctttcatcaaacaggctgggacccaggctagtttaaagatgcaaagaagactgaaagagacctcattctctcttttgagaaatttagtctagaggggaaactggtaaacagttataatactaatggaaggagatagaggcccaggaaaggaagctcttaactctgcctgagggaatcacggaaggtttcatagaggcatttgttttgagccttataggatgagtaggaatttactagataagtatctctctaacaatgtatctgattacaaacttcctagaaggctgatactgttctctgcagacatcaacatagatgaagaaaccccgagtctttcttgttcaccattttattgccactgcttcctgctgagcctgacacaaagagcatttcaacaaatgcttgttgaatgaatgaataaatgaattaacacatagaagcagggtgggatcagctgagctacttatacccaggagtcctgcccttattcccattacaagctgtctctgagtctcagcccaaagcagtctggcatcttcatgttatatgagtgcttccataagccttgactacagtgtggttgatttccctgctaccactgtag

SEQ ID NO: 53657 - DNA, 1088 bp, Homo sapiens
actaaatagtatatttgttagtaccacttagaatttgcctttaattctccaattatcagatctgcctaattaaaattgcaaaaatctttagtgcccatattaaaattatttcttaaattagttcaaaacttactagtttagacatacactgccatttggctgggcgcagtggctcacgcctgtaatcccagcactttgggaggccgaggcgggtggatcacgaggtcaagagatcaagatcatcctggctaacacggtgaaaccccgtctctattaaaaatacaaaaaattagccgggcgtggtggcgggtgcctgtagtcccagctacttgggaggctgaggcaggagaatggcgtgaacccaggaggcggagcttgcagtgagccgagatcatgccactgcactccagcctgggtgacagagcgagaccctgtctcaaaaaaaaaaaaaaaaaaaaaaaaaaaagagttaatacaactctatatgcttaaacacagcttgtttttatgatatataatattctacttagaaacctgtttgtcagacaatatttgatggtattaaaaagctactgaacatgtatacccataaatcattgtaattcttatgattttcagtaagaatgcattattaatatatttttaatgaaaaattattaatttatcttcaagtctttactgctatactctgtcaccttttggaatgtggaagtagatataagtaggctatgggttcttgttctcttcctcagtgtcctaaaagtgggggcgaggagtacacttgacattcgcactccttttgtcatgcttgtttaacaggcctattgctgactaggagtagtgttatccctccccatagagaatagtaaagggttagaaaaatccttcctgcacttttaagagactactgtaccaaagtccttagtactgtgtctaaatgtttacctggaaaaccaatgagagttggcctgacactgcctacttccttgcctacccagtccctcttccagcctccccaaagagcatgcctgcttctctgtaacttgctgtaagagccaatcgtttcagcttctcatgtccttattcat

SEQ ID NO: 53658 - DNA, 1072 bp, Homo sapiens
aaaaaaaaaaagaaaaacgaacaaacaaaaacagttagtcaggtgcggtggcatgtgcttatggtcccagttactcaagaggctgaatcaggagcatcacttgagcccagaaggtctagcctgcagtgagccatgtttgtgccactgcactccagcctgggcaagagaacaagatcatatcttggtgcaggggtggtggcggggggggggcggtgcggagatgagtcttttttttccttggggcctccccacctctcatgcctactgtccctgaattctcttcttctacaccaccaaaagtaccctggagaatcattagacatttatagtaactaaaaatcaacaggaataaaaatctcaatggcagggcttatctcccatgtgaaggattgttcctttcccaagcatccctttgggagtctgagctttgatattagtaatttcattacagctccaaagatctgacttcacaccagtgctttttccaaatattatacataaattaagggactcagtactcaattgctgatttcccacttagtagctctgtggccctaaacaagtaatgagcctatgtctaatatggaaaaaacatgatgatgatagtatttactttatagaggttgttttgagacttaagtgggatgctacccataaatgcacccagcactgtggataagacagatggtgccattaagcagttttggacaaatttgagaaatgtttgtaaaataacaaaactgattttctcattcaattatgaactagttctaggaacagtttcagaaaggaattttgagaaccccatgaacatttctaccacaaaaattagtagttcacgtttaacagtgctcttagttatcaaattttattatatttattttttaaatcagcccattttaaagtcatgctatttctactgcttcgtgttgaaagaaatctaaatgccatcattgctcattgtcttttaagaaaaataagttctatacaaatttgaggccacagctgtagttggtaagtttctagctcaccacacaatatccagaaaaccaggcaaacaaacttctttgtg

SEQ ID NO: 53659 - DNA, 1850 bp, Homo sapiens
tatttttctgatttcctgaaaaatggatattaggtctaaaagctttgttagatttaggtgacatgctttgtaaaataatgctgaatattttattttaacaggatttttaatggttatggagtctcattgtatggccatgttgttatatttaaacaatcacttattagacataaatatgtttgaaagaatatctaattatagtttcaaaataatgtatttttcaacttattctttgataatagtgcatttctctgcttaccagtagttgaagtaaccagaaaatgtcacagccttttgtaacttaaactgtagctcccaaaataggtatagatatttttaaaagcccatttccaaagcttctgtaagatatactatgtatacctcacacattttagctttaaatgcagataacttacacttaaaaatacagtatatcgtagacaaaagaacttttactaagtgtcttgtacagtaaattggcatttggatttattcagactgataatcccctgaggaatataagctcttgtttattaactcctggatatttctaatgaaacaattgattgtttgcttttcttagtgtctaggtgttttagcagatgaaaaattattggttcatgtaattaaatattttgcttcctattagatttgtaaccaaaatccactgacctctctggactgataaaaatgtctttatttctttgtccagggctttcttctttcctcatttctcttttccaagttacagatcaacagtttatgtacagtttattacatttctataaactaaagtttaactccatgagagataaattattcaaaattaaatctaaacaggttcatttattgaagtcatcaagcagattgtatacatcttcttttaactgtgtacgtatagtaattgtaatgttacctcagaattctgtgatgctctgtggtttataaaacatgttcctatacatatctcatttgaactccacaaccaaacagtgaaatagggatatataatcctcatattcccattttagagatgagaaagtccagaaaagctacatgacttgcctacaacacactgatagtaagtagtagggaccaaataagagctcacatgttccatgacaggtaaatatggtttacactatcccaccacacttgagttttcattgctaactgctgtacttcaggatttaataatcaaacttcatctctccttttcatatttcacacttgagagttaaaacagattttgctcaagattattttttaaaatttttgaatgaatcgtttttcagaaaacagtttgctcatgttcaaacattttaaggcaaatatgacggatactgtggcactcttactaaattttcttcatcttaaatatcacatgtttaatttaaactgtgggaggggaggtacattaattttaccagggcaacagatgagcctcaaacaccagcattcttcacttgaagtgagaaattgagttccaagagtaaataaaaacaagattgaaggtttaaatcctctgctaggctttttgaacttatatactcattaaatgtttattggagtggtgggattacaaaggatttggggagcttcatcaactggtatatagttaatcactaagtaaaacactacatttgataaagtgtttctcacgatgccacattcaatccatcttaatgaaaactgcttcaaactgatttcatttgagagcacttggtggtgagagtactcatcgttctttttgccttttttcttgaggaatttacagtactgtacgaagcagagcttccaactttggtaaagtagttattctaagttttcatgtttcttttaagtatatc

SEQ ID NO: 53660 - DNA, 1090 bp, Homo sapiens
aacggtacccatctttggaaggaaaaaagtaaactaaatgtaccatctctttcacttccacttacaagatgtgtactatagaataacaagacatgctacgtgcaaaatgaccactaaaataataatggcctatttactttgtgaaattagagaactcctgtgggcagaaatagatgtgatgtttacataaaattggttattttcccaattaatgaagtctttaaaataatatcagacccatttaatataatttagtcacaagatgtctatttcaagaaaacattgaaatcctaaatgacaactgggcacatattttaaatgcttagcaggattgtgtccattggtttttcaaaatttatgagcttggaatattttaaggttctttttgattctggtttgatgagatctaatatatgttgagttaaactatcccctcagatatatcacagaagctaaaatttaattttatttcctctttattgattgaatatatttcttatatgtgggattagatgttatgtggtttgtttttgtgtctatttgttttgtttttttgtttttgttttttcttttgtttgttttttagtgccagaaaacgcagaaaatgaaggagatgccttattacaatttacagcagagttttcttcaaggtagggttaggacattaactatataaatttgatgctgttttatgctactgtgatttttcttgggcaattttaattatagattgtttaaagtttctccttaaagtattcaaaggatatacttgttaatttatatagtcctaatagtgaaacacataaataaccagtaaaccatttatgccactttagagatagattcaacttatttctgtatgtttatggacgttcaataaatggatcctaatttaatatttttattatattcccaaaggactaggatataggatagtaatttttagtatatcttaggacagtcaaatggaaaatcctttaaaataatattaaatttaaaaatactttaaacattttaaatccaagtgaattttttcctttatttttttcttttggaattgctttacatttcttccttaagtgtcaaatat

SEQ ID NO: 53661 - DNA, 1003 bp, Homo sapiens
cactgtaaaagaacatgtggtatatcttgtaaatcttgagcctttacctatttaagactaagcctcaaatttaaaggcaacttcattctccagatatttgactacctgaaacacagcgggaactcaagcactgttgtcctagtaaatgtgttgttttgtggaggaggctctttcactgctctaaaatgagaaagcattgtggatttttaagctgttgactagcttaaaccaggagatcttagatctacgaacaaactattaagggaggaggaccagtgtttccgtgagaagtagagttaagatggcaggtaaatgcttcagggaaggaccatttatttattcatgcaacaaatgtatcttcattatcttgtctattcaaagcattagaaagattgtcttaaagttgagagggaaaatatgattatgattctctgcattaatgcttgggtatgcccaaggaggaaatgctgacatttgacactaagtcaaatgagaaacatcttgactttctcatttggaactcttagaatcactagatgagcagttttaaaaagtgtttcatggggtcctgagatcctctggctataccccaggtgtcaacagatacaaggaagaaaaggccaactccaagagcattaagctccccattgacctctccctgtatcaaccagagtagtcctacttttatgtattgtaatattttgtttgggcctaggggagggaggaaaccctatgaaaataagttagaaaaccgccgatgacagatttttaagatccttccagctttaaaatctatgattcaacaactgtctaacctctgacattccctctagctaaatttttatgagtcttttatttttgagccagggtctcactctgtcactcaggctagagtgcagtggtgcaaacaaggctcactgcaaccttgacctcgtgggctcaagtgatcctcctgcctcagcctcccaagtaactaagaccagcggcacaccatcatgccaga

SEQ ID NO: 53662 - DNA, 1086 bp, Homo sapiens
aggagaacttttgtaactactcaaatataaggcagcttcctttatgataaaacctaaacttagatttttgtatatttctgatatatgtatcttatggaaattttaaattttgtatctcacctacaattttatatttctatccctactgccttcggagttaggaaaatgaggtattattctgctaatcagaaaagtagcagacgcacattgaggcagtgggggattgggggcaagtatgtatgatttgccttattttgggctcataccagtttcctagaacctcagtctatcatctaatgaaaattagccttagctaccataacatcccatgtgtggaaaaatttcaaattttcaaagccttcctggtaatgtaatacccaggatactagagttagctttctaatctagcttcagcaataatagaaaatacctgaaaagtcaaatccttttgtgaaacatggccgtattttgtttacaaatgatggattctactttttgcagatgtgtcttgctgaatcagggctctcttatccctgccatcgacttacagtgggaagaagatcttcacctgcacagacccgggaacagtcggaagaagtaagcctgtttgccagcttttctttgaacagaaggcccatcccccacctacctgcgcacttccctttttttttatctgccagagcaatgaacagataaagttaatgtagcattaattaaatctcggtaaattcttgaaggcagaaactgtccatgcaaggttactactaatgtgctccttctcgctctgttagtttcatgtttcaacagacggaattcagatggattggttgaaatgatttttacttagaaccatcaggctaacaaagaactttctaggctgggcacagtcactcacgcctgtaatcccagcactttggatggccgagacaggcagagcacatgaggccaggagttcgagaccagcctggccaacatagtaaaaccccgtctctactaaaaatacaaaaattagccaggtgtggtggcagacacctataatcccagctacttgggaggctgaggcatgagaattgcttgaatccagca

SEQ ID NO: 53663 - DNA, 1791 bp, Homo sapiens
aaaaaagtaagtcaggagcatttaaaattactatatatatttccaaaagcttttaaaaagaaaatatgagataattaaatcaagatatttgttagtattttacaattaactgtaacatctttaaaaaacacatagctggctgggtgtggtggctcacacctgtaatcccagcactttgagaggccaaaagggggagcccaggagctcaagaccagcctgggcaacatgatgagactccatctctacaaaaaataaggagaccctcatttctacaaaaaattaaagaattagctgggcatggcagcatgcacctgcagactcagccacacaggaggctgaggtgggaggattgcttgatgctgggagatcgaggtggcagtcggccgtgattgtaccactgcactccagtctgggtaacaaagcaagactgtctcaaaaaacaaaaaaagaagaaaaagaaaaaccgagattaggagtcaagaagagaacatgcttgtgctatcattaagcagatgtgagacttgggacaaacactttacctctctatacctcagtttcttttcctgttaagtgagaggattagacccttatcttgtgaggagaaactgcctttcatttggaatctgttggggatggtgggatcactgatagaagtttaagagaaggctgctgataccttctctctggaaattcttattactagcttggaatggggcaagggagatgctgagtggtggaagatatggcagtagcacttgactcagctaaggcttcaagatctcctggttgggatacaagcaactgatgaattctgaggactcttccaaatctagtatcttgtgtgtaaaatgaagccatgtatagcagccatccttgtttcttccagctccggttgcttacatggtagtgtttgtgtttatgtacatagcaaaaagcctgagaacttgtaactgttggtgtttatttcattaaactttaccaacttgccaaatcaattgaggactataacgcagcaaggccaggcagagaacacagttttttgagctatttacacaggagttttgttgataattgatcttgacctgcacatgtcttttaatattctgttggttccagaatattattagtcacttcctttttaacagtgtgcttttttatgaggtgactaaactgctgtttaaccctgctacaagaatgtggcagtgggctagtccagacaagtgcatgtacacttggtaactagcattcttgataagcttgcttcaacctgccacaaattaaagctctgtgtgacttttctagcacataagtgacaaaaaaaatggctgggggaagggcagaagaaacctcggattgtgaataaaaataagctttttagagttgcgctttggttggcagtaaatgaaattttagcctcatgactcagttcggtttaaaactacctcagtaatctatttagctgaacagtaagcatctgaaaatttaaaaggggtattctagaagtcatcttcaggactccttactataaaaaaccttatctacgttggaaatgtgatgtaatagaaaactccatggcttttggagttaaatctggtttgccatctggtacctgatttatcttggacaggttactccactactctaaggttgttttatgatttgtacaatcacgatagtctttaatttacagagttgtcatgtatggtagacatatgttaagcacttactatgtagtttctgactaatggatggtatctaggagtagctgttttaattaagccaaagaaagta

SEQ ID NO: 53664 - DNA, 1050 bp, Homo sapiens
tgcctaagaaatagacagatggaaaagaatggtgagggaaacccaggcaagagtaatggactgagcagaagcctaagagtaggcacatgcaaggcacatttttggatcattgagcaaagaaacctgtatacaaaaatagtgggaggtaatggctggaaaggtgggcagggttatggccttgaacatcagactgaaaaagttttcagggtgagagaaaacatgagaatcatctagtccaattttttcatcatacaggtgataaaacttagagaagaaagtcgatcaaggtcacagaatgaataagaggcagatttagagttttaacccaggtcctttgctctatatatagtgtttttcccaagtatttacacacctggaatcataccacaggctgacttatggcagaaaggagtcatacaagggcaccatgaagcctaaagatgtaaaagaacaatttttgctttgctttaatggtggcaacaggaaaaaaaaaggtggcttacaggctagttaaatgtttttaagctaaatgttctcaggaggcttaactggtccctcaaagtcattgcagcagacagagatacctttttagtttttcatttgtttgtttgtttgtttttgttgttgttatttttgcctccaatagcctgttgttctttctctcaattttggtttagttcctctcgcaggaattgaatgggaaacctggagcaagttccacttttggacatggctatgtaatgtatcctttcgaaattcccagtcgtaagcaggtaatgagtgatataagatatgggcccttagaaaccctcacagctcagccaggcgcggtggctcacgcctgtaataccagcactttgggaggccgaggtgggcggatcacctgaggtcagaagtccgagaccagcctgaccaacatggagaaactccgtctctactaaaatacaaaaaaattagccaggtgtggtggcgcatccctataatcccagctactcgggaggctgaagcaggagaatcgcttgaacctgggaggcggaggttgtggtgagc

SEQ ID NO: 53665 - DNA, 1073 bp, Homo sapiens
tcactgaggcccagatgtcaatcagatagttatttaaactctaatgatagtttttagtgtttatctcactttggagtggtttccaggccttggattataggactaggtaggttatatatttctctagaaaattacaagtctttcatattttatcttggcaaggaaagtaggaaaagtacccatataagttagagcattagacatttattgcatggcatatacaaagcaacctactaagagccccatggcagctaaaaatgagaatataagatccaggctgtgtcttcaaggaccttagagtcacctaaacacagatacaatgaaagttgtagttcttttaaatcacaaaacactaattctagagcttcacaataacggttttaagagttgagcagaaggaaaaaaattacttggctaggctgagccagcaaggattaactggcaaggtgaaattactttttcttgtttctagatagtacccatttatgctggtgtgcctaacatggtatagttaattcagactcttttttcctaggaggaaaagccaggacaagatgcccagcagcactatgtccatgtcccgagaccaaagttgttagcatgactgcctaggttttgccaaggaattagatgctgctggaaaaatatccagagctcttatatttgctatccaaagagttccacagtgttgaggggtaaatggcatctcactattgactagacatgagccaagtggctcgttggtacccttcatgcatacaaagcaggcttgagatgtatccttgcatatttgaaggttctgtggttatgatgagctgaaatgaccactgattaatacagtagctctctaaaataatgaggtttctccactaacggaacctctttatttatcaaacttataataaaatgaggaatctgcttgaggtaaaataaccttttcattgtaactgaagatttcgtcttgattctctgaatttgttgtgattgtagaataaggcaaagggcttgttttgataagatcctagactgttataatcaatatatcatgtgttgactttatatgcttttgttaa

SEQ ID NO: 53666 - DNA, 1888 bp, Homo sapiens
gttattagacgctttttccataattgctgacatttatccagtgtttcacagtatttgctaatgtattaatgcagtcaatctctgagaggctgcacatgcctttttagccctggcttttatgggattctgaaattcatagacccacagatacttattccctgctggttgccgtagtgacagagctcagagataagccaagacagagcccttttgtgattgcttttcaggtgacattcagcggcagcttgagtagagtgtccttttatagttcctgtaattcagaaaatgataacagctttttgctgcttagaagagaagtctgtggactgctccccttgggattttgttttgctgtgccacttcataccaacaccagcctgataaagttcttattattgtggagatttcaaagtgcaaggagatggaattaattatgacaggttagaagatacaggactgattttacgaataaaactttaaagaatcaatacatgttcgccaaccatatgtaacaagttaatttggacattttaagctattagtggcaatacagttagccacttgtttaataagtaaatgcacccaacttctaaattgcttgtgaaccctgctggctgttccatccaaagtgcagaaattatctttcagttctgttaccattttctcatttgaaactattgcttcaacattttgttgtttagaggcaagtagctttattttaacattttcttggttggggtatttataatttcactattctcagcattgcaataattaaaaatagataatttaaaaatagcaccttatctgaattgcttcaaattcagaagaaaacacctgtgatgatggagaagaacactgagaaggaaagcagttcgagaaataactagagaaaatagaattttacctggaaagatcatagaggaggtcataagaagccaatactttcacctagactgttaaagctaggagagttattaatcttaattctggaagaagaagaacaccacaaacaatgcataagtgtgggacaccttgagagctggaaaccactgtctgggtagctgatgttattgagaaagaggcaaaagaccaaaaacaaaataaaacaaaaaatgtcaagaagaatcggagacactaccccaaattgaaccatgcgaatctgctgggagataggaagcatttagatatcttacccctaaagtgtaaatgtaattcacagttaaactggaagcaagtagaatgaactaaatagagaagtaacttgagaatctgaagagattaaaaagaatagatgtgttcccaatttctaatagatgtgttcctgatttattgatgaacaagcatatggattgcacatgaatgagggttcagaagagcaatttggcttaataaaagccaatcagttatcttgaattagatgttcagttgaaaactggagatctgatttgtgttactcgtttctaacctttcagtcttatttagaatagatgtaagctaaactctcataaaattcaaatatttgtaattcagactaagaaaggtaaccttcagactagtgacaaatatgacattttcaaatgatatttagtagacctttattaacactctgttaccctatagtgttcatcgtaccccttacttcttattgttaacttaatcatcagtcatttgctttgatatacagtagtcccccttattctcaggtgatagatttaaagactgtagtgaatgcctgaaactactgataataccaacctctgtatatactatgttttttcatatacatgtacatctgtagtaaagtttaatttgtaaattaggcacaataagaaatttgcaacaataatagtaaaacaggacaatcattttaataataaaatcaaac

SEQ ID NO: 53667 - DNA, 1043 bp, Homo sapiens
ttcttgtacatgatcttatctgagccaagtagtagattataagtgactaatttttaatagaaattatatacagtagaatatagttactatctgttatcctaaattttccttagggttgcttgaaaccacccttttctgcctagtgcttgtaatcattttccttctatgagactgtgaactccttgagggcaggaaacaggtcttagtcatctttgtttctaaagtgcccagaatgcctctggagtaaaatgaatagtaaaagtttcttgcattatattaagcatggcactgaaaaatcagtgattggctctaaattgcatttaataactgctagcccagtattctaatacatattactgctttctccagagacacccctgctctttaaaacaaacaaaaaccacaaacaggttcttttttgttacagagaaaggtcttgttggcagccttgtacccaaccctattttataactgaaaaatggaaagttgtttataatacatatgtgcactacttaatctctggcatttgtgtttgcaagctaacatgctgtctattgcatttgaacagctgtaacatatgtgatacgatttcttaataagtcattttcttgagcaatggaaatattgctgaagtagtagtccagcttattaagttgtacttttagacccttgggttttaaacataatcaattacctataattctgtatttgagaaagattgtgaagatagcattataaactgttttggaggtaacagaaattctttttttttttgatgtgcaaaaatagaggggtgcttacaactgtgtttaattggctgtaaagtcttacaaattttctcacccaaaaggaaggctgaaaatgaacatttatgcatggtaagtagccttttgaacccaaggtgacttaatcaacagtcaaatcaattgttgcttcgcatcatgacattgtttaatattctacatgtagaatatatatagtttttaaaaaataaatatccacaggagattgctggtactgattgttcccagagccaatgaaag

SEQ ID NO: 53668 - DNA, 1154 bp, Homo sapiens
caactgttttcagatattagccaacaggactctgaagaaggaaacaagagttctatgagagtcttaaattctgcctggaggcaacttctggatcccatagcaggaaagggaaagtaaaacagaacttggtaatttcgctgagttgaagggacagagattggagttttgggaggctccagcggctatattttgcaaagcagactaccagcagagaaaaatctccagaaatctgcatggggttccccaagtctttagctgaataccagtctctgtgcatgcatagggtgaaaatccagaaggctaagcaaagagaaattgttaggaaaaagagtagttaactggagctataaggtaaacaatccccagagtttacacaaaactaaaactgcttcaagtttcttccaactacacattgtagagacacctcagtgaatacacagggcattcagtagctatcttcagaagagttaacaccttagtggagtggataaattggccctagaatgaaggctactccaggactttttaaaagcttaaaaagaagcctgaataaggaataagctgattaataggtaactgcctctaaaaacaaagtccagcatccaattaaaagttactgcacatacgaacaagcaggaaaatctgacccataaccagaaaagaagtcagtcaaaagaaacagacatggaagttacttagataatgaaattggcagacatggactttaaagtagcttttataaatgctatgaaagtgctcaaggacttaagtgaaaacataagaggaaataataaaatatataaaagagaacaaagtatcatggcagggtgggagtgggggcagcgatggctcttgtctgtaatcccagcactttgggaagctgaggcgggaggatcacttgagctctggagtttgagaccagcctggccaacatggcgaaaccccagctctactaaaactacaaaaattagccaggcatggtggtgcatgcttgtaatcccaactactcaggacactgaggcaggagaattgcttgaatctgggaggcggaggttgctgtgagctgagatcgtgccactgcactctagcctgggtgacagagtgagactgtgtctcaaataaaagaaaaattttttttaaaagaacaaagtaac

SEQ ID NO: 53669 - DNA, 1009 bp, Homo sapiens
atgggatcatagaagagggaacaaccaattttgctaacagttagtggtagtgaaaaaatgacttctcagtgaaagggacatttgattatgttttaatttgtatacttgtattcctccttttgtaaattataagcattggaagtaagaaatgtcttcacatttatatcaaagagtgttttaggcatttatttaaattgcattcatttatttaaattgttcagtgctccacaaagttgacatctatggcaataaacaactaaaggatcgatttgtatgagtatagtaattggataaacattttgagaatcatttatttctaataaaaattaagttatcaaaactaagcattttatagcagcaagtagaataacagatttaggagtgtgcagagctacattgtgagccgatttttaccaatgtgtgtgtgtgtatatatgtatgggtgggaggcagaggaaatggaggtggaggagaatgcaattgagcaaaccagtccaagtttgttgaatcctaacattactattatttagatgttacttaatgtttgagcttcagtttctttatctacaaaatggagatgatattaacacacttgaaaacctattgtgaagattacatgggttaacatattattaggtgggaccatatgaagttgccattttttagggacaaaaatggttgcagattagaagtttcatacaattatatctaatatgtaaagcacataatataatgcaggggttgacagttatgactgtgagcccaaatctcactcagcatctgtttttgtcaatagtattttcttgggacacattcacaccgatttattttttttcttccttttttttttctttttttagacggagtctcactctgtcccccaggctggactgcagtggcgtgatctcagctcaccgcaacctccgcctcctgggttcaagagattctccttcctcagcctcccgagtagagtagctgggactacaggcaggtgccaccacgcctggct

SEQ ID NO: 53670 - DNA, 1045 bp, Homo sapiens
aatcccagcactttgggaggccaaggcagacggatcacgaggtcaggagttcgagaccagcctggccaacgtattgaaacctgtctctactaaagttacaaacaattagggccaggccccctaacttttgagatggagtttcgctcttgttacccaggctggagtgcaatggcacgatcttggctcaccgcaacctccgcctcctgggttcaagtgattctcctacctcagcttcccgagtagctgggattacaggcatgcgccaccacacccagctgattttatatttttagtagagctggggcttctccatgttggtcaggctggtcttgaacttcctacctcaggtgatccgcctacctcggcttcccaaagtgctgggattgcaggcatgagccaccgcgcccagccaaagttaatatttctaaatagaagtacaacatgaatcacattcagccttgcttacttattttcaatggctcctttatgtacagatttttatgctggcattcaaaacccttcattctttagtctgaaacttcccttccaggtttgttttcccatacaggctctgagtaaatacttgataaatatttgttgaatgaatgattgaatattacaccatatgtgtctcagctttagctaaatacttatcttactatttttcgaatatacttggtactctcccactctgtcatttaatcatactcttccttccacctagaatacctacaacaattatctccttccttgaagacctttttgtttttttgttttgttttgttttgttttgttttgagacggagtttcactcttgtcacccaggctggagtgcaatggcacgatctcggctcactgcaacctctgtctccggggttcgagcaattcttctgcctcagcctcctcatagctgggattacaggcgtgtgccactgtgcctagctaatttttgtattattagtagagacggggtttcactatgtcggccaggctggtctctaactcctgacctcaggttatccacctgcctcggcctcccaaagtg

SEQ ID NO: 53671 - DNA, 1314 bp, Homo sapiens
gacagtgtgccataacttaatacttagaatggtttaactttcagagaaagcacctgaacatttgcttcctagtgccagagtagaggattggttataaaggtcattaaaagtgaggtcattttgtacttttattgctcagttgaagaaatttgtgtggctttaaatatacagtagccttagatatcattggattctgtgaatttatgaaaataccatagatcaagaaattaatggatttggggtgatgaaaatgttctaaaaattagattgtggtaaaggttgcacatctctaaagttttaaaaaataattgaacatttaaaatgagtgaattttatggcatataaattatgcctcagtgaagctatttttttaaaaaagaagttaattaactagattaaaatactttttcacttacatttttatcctgcatgagaaatactttgcagtaacacaagagatgttttgttcagtatacttctcattaacctttgactcacccaacaggagaaagaaatagacctcttgtaatcaattcttttataatcttgagtctcttatgaacctaatagacttcagtcttgggcattttcaggttactcagtgaagtcaacactcatttacaacattgttgcccatctcccttcagagttaacgtattttctttgcttgtggttgtactcgaatagggtgtgggatactgtatgaattgtcagtaactccgttccttttgtactctttgatcagggaaataggtatctaaagctttaccagtaggaaaatgttttcatgctgtgacagttcagctgtgagaacaaggagttacaagtaggcaaaatctcattttacactttaacaaggaagctcttggtttctagataggagaaataattttaacactgtgaattatgtttagataccttattacaatgcagacaatatgaatacatgtagttctttttaaattcctggatttaataatgcttatacaaagaaaactctttcagttttttgtttttatttttatttatatatttttttgagacagtcttgctctgtcacccagggtggagtgcggtggtgagatctcagctgactgcaacctctgcctcccaggttcaagtgattcttatgcctcagcatcccaagtagctgggattacaggcgtataccaccatgcccagctcatttttgtatttttagtagagacagggtttcgctgtgttggccaggctggtcttgaacttttggcctcgaactcttggcctcaagtgatcctcacctcggcctcccaaagtgctgggattacaagccta

SEQ ID NO: 53672 - DNA, 1222 bp, Homo sapiens
gcagaactattatgaagataagtgataatataaatacagtacctggctcatagtagacactcagtaaatgagtcgacattataattaagataactgcaaaaaaagttattgtaattacagattacaattacaggcaagaattggctggtttaaagaaatgaagtgatgtctgagacttgcttcagaataacctatgtgtggcagagtgagtgaggatagagctaatttagattaggcatctatcaatcattgttgaatctaggtgatacatatattgggtttattatactgttctctcaacttttgtatatatttgaaaattttcataataaaaagtttaaagcaaaaatagttgtcttgtttaagagcagggacataagataatagagaaactctggaaatgtggggcttcacagggttggaaaagccaactgcttttgcaccccacccttgtagaaaccagactgaaattggcttatcaggtacaagttccaagaatgataggcaaagtcgatgaaatatgatcaattcttctgcctgtaaaatagtgccttatacattttaggtgctaattcattgaattgagttggcatggtcttttatgagacccatgttttaatggtttttataacatttaattttttgccaaagagttgtcatgcagtctaattactataggaaaatatggaaagcagctaaaactgtttgtttccaagactgtaatactacttggtgctcttaagtcacagcaaacacaagagggaatccctattaagaggcttgattcttttagcctcattattgccatttgcaccttgtcccagaacctgtgaagtggtgcctgcccacacctccccagagcaaatgttgcggcattggcagggtgttgccttgagcttgcatgatttgatacaacaaagatgtttagggccaggctgcttttaactgatgccacagcagattcactagctccagtgcttgaatttagccaaaaatggcttataactagtattctgaggagatcctggccaaataatatgtcgtaaaacctttttcattaggagtataaaaactcataaaactggtacttgtagtctatatttgttgcaggcggtggtgtttttatacttactgaaatcattcaagtggaggcatctgctacaaaacaaaatagtcctcacagcttagggcatgaattgggtacagctgagaaatgtcagct

SEQ ID NO: 53673 - DNA, 1573 bp, Homo sapiens
aaaactaagttacagttattagaatgaagaattcatttagaggcaaaagattttttaaaactgcagaatccagtcagttcaaagcctgattgaaagcaacttcaattttatagatttcttgaaacagatcttcattgttttctggaaagatagtatttgagaaaaagaaatgtctccagttactgtttttatgaggagagaatagcttggtctttttaatggttaatgagaagaagtaatagttaaacacttagagcattgatttctgatttgaattctccaacacaggccagccctgggggaagggggaagaaaaaaaaagcttgctaattaacatttgattactgatgccaccttctcattccccttgcaccatccggtttcaagcgttttttgttcagaaaggattttaaggagggttttaacttgcatcttagtaaaacaaatccatgtgcaactgcaacgtgtatacaatacttttaaaaacaagaggaaaagaaggccttaggtatgaagtatgtgttcagaacgcattctgaatcacttctgattcagaagtgactgctttcttaactataagcctttcagagtgccagtgattgctaggatactggaattaagcctagtttgtatgccttattttgatttaaacacacacacatacaaatacttatttgctcaatgcagttatttaacaaactcttaaccagaacatctgataatgcgatgcactgggagcttaagtttgatatatttaaaattcggtctaagctcaggttttcatatgaccagagtcctttttcttctaagaatgataaaagaatgagatggatggctgtagtttcagggtacttttttgtaagggctgtactatgatgtgcgatagtatcttaattcagaaaatctagaaactaaagcactgattactgaacattttgtttttgtattttgccatatcaaaatgtttgatatgtgaagaatcgtgggccagatttcaaaaaattttaaatgttgagataaattaataaaacttgaaaactatatcacagtagcgttctggcaaaatcatataaccactttgatgacattagattgatagaatagttttctgggaaaccagtgtgacaggctttatttttaaatgagatctcataaggggaaaatattagtgttttttaaaaagtataataaaagtaaatgccaaatctcatgcaaaaaaaagtactaaaatgcttattatctttatttctcatgtgaaattatttgccatttttctttttgatgtctgttatatttttttctattgtttctccattttgtagcattaatagttttaaattttctctcattacttccttgtcttgtatatgtttagcacctcttttcctgtacctaggattaactccagtattttcacgaaataataacattttggagctttgaaaatcagaaacgatcatgttttattctcttctaaggtggagtacatgaggtctcagaatggctccaccaattttcccacagtaacagttgagcagaactaggattagaaatctagttctctggctgggta

SEQ ID NO: 53674 - DNA, 1075 bp, Homo sapiens
tagaaatactaacttttgctttcttgaaatcttattttcccccaattttttttatcaactatatgtttaaatcaacatttttttcctttgttgttccattaagatagtcaacatctgacaatttttaccttaaaacttttaagttctgtgatcaatacagtcaaagtaatgcctctaggtattattcatttttaagacaacacagtctatgacagtgtctctccatgtgccttttttaccatgtacagtgaaaaactacttattaaatggtgattttcccccctttatcttattaagtaaattatatggtctttttttttatggaagcctccatagttagagatgtaaaacagcaatttcttggttctatagcatgacatagttcagagctgagattagagaaaccccgtagagttgttaatacttgagggcatccccaactagaaaagtatgtgaatttaggcatgggaggaaggaaggatctgctttaaatttagtgtagggtcactgagtcttaatgatagattaaacaagggaggtagaataatgaataggggtatactgtgtgtagcactaataccagaagtccatggtttgtggcggttttttaatgtcctttcccatatggttttgaatagagcaggttatggcagggatgagctaaggaatagctttgttaatggataaataggagtaattttttaacaggagacttcaggcagtttattcagaatgcctccttatttaatgaatcatgtggttaaattttttttcctgatcttaataatacattaagtgggattgctaaggtattcctggtattttctttctaaaatagctatatctacatttcagagccagccctaacagtgaatccttgggttgggttttactttcttaattaaaggccagtcgtatggagcttttgagcattggcagcatcagtccttagggtttggtgtgcagtagtagactttctttcatagtgtcaattcatttgatacgatttaattaaattgtcatttggagccagtttccaactctactgtattcacctaaacttaactaggtgtgt

SEQ ID NO: 53675 - DNA, 1276 bp, Homo sapiens
taaaaatacaaaaattagccaggtatggtggtgggcacttgtaatccctgctacttgggaggctgagacaggagaattggttgaacccaggaggcggaggttgcagttagccaagatcgcgccactgcactccagcctgggcaacaaagagcgaaactgcatctcaaaataaaataaaataaaataaaataaaataaaataaaataaaatagtacaaggtgacaggggtttagcattgctctagcaatagctgttctcatcttttctttttcaatatagagtatgaagcatgagtgataatgttggggaattgagagaatgatgctctgaaataagtgactttcattggctatgattgccaggctgtgacaattttcaaggatagacaacctcaaatttacttattactgtcataatgcagtaaaacacgccaaaaaataaaatatgatcaaatgcagttaccgtttattttggactgcatgacaatattcacttgcacaaaaccatataaacaacacccacctgtgtttgaaggcaaggtatctttgatcagaatctctgaaatatccctttgagttagctatcactatagcaaactttattaatttgtacctgacagtaatttaggatttatgattatttagttgaactaaagcataaatatatgaaggaagagttagccaagtaagtgaatagtgtgagtaacaatttctttggcaaggagtgaggggaggggatgatctacagaaaaagaacagagttttccagtttcagtttttagggatgtgtcatggtacaataaaaaaaaaaaattgccttggggcccggagcaatggctcacgcctgtaatcccagcactttgggaggcccaagtgggtggatcaggaggtcaggagttcgagaccaacctgaccaacatggtgaaaccccgtctctactaaaaatacagaaaaattagctgggtgtggtggcggacgcctgtaaccccagctacttgggaggctgaggcaggagaatcacttgcacctggctggcggaggttgcagtgagccgagatcatgccactgcactccagcctgggtgacagagcaagactccatgtcaaaaaaaaaaaagcctcagagtcacatagatttccttttgaattctgcttctgctacttactttggagagtttgggaccctcagtttattttttaaagagagaataaaagctgcattgaacttgatgatggtattagagaatatatatgtaatgtatatatgttacttgatat

SEQ ID NO: 53676 - DNA, 1038 bp, Homo sapiens
ccacacctggctaatttttctatctttagcagagacggggtttcaccaggttgtccaagctggacttgaactcctgacctgaggtgatctgctggcctcggcctcccgaagtgctgggattacaggcatgagccactgtgcctggccctagtttcattttcaaatgttcatatgattgatttccaaacattaagacttggttggaggaatggctggcagtgtgaaatgttaggaaaaagacccactgatttttgaagtcacaaagaataggggttcaaattcacattcagctctaccacataataaagcaatttctatacccatagaattgatgtgagcatgaaatagagtaacatgcacagtacctggaccagtgcctctgctactcaataaatggtagtttcagctactataatggcctcttataccttattgatatctttatcattataactatcacattgtatcataaacatttgtttctggatatgacttttagaggactgtgtgttcctttaaggcaagactattgtgtctttatctatctttgtatttctcctgcagaggttgcaaactggcaaccacaagattattttatttgcaaccagtttgggtcccagcatgttttaaatgtgcactggttgccaacatttaaaagttaggaggtttcacatttaaaataaaatgaaacaggattcctgacttctggcttcttgcaaagaatcagaaaatcctggtaatgctgaaccctacattttctataacagcaatcagctagtctggagcagcatctgcctctttggataggcaatgctctctaatttgccatcgtccctaacattccaatattgtatcctcgaaacaaaggctgaatgccatttgcccatcacatttcattcatttgtgttacttactgggcggctcttgaaatttgcattttcgactgctgctctagtgactgccagagagtctggaactcaaggaagcactcaataaatgtttgttgaaaggaagaaagaagaaacattaatatatgca

SEQ ID NO: 53677 - DNA, 1036 bp, Homo sapiens
tctttagtaattaaaaaagtaaacactgtgatggaaaattgttatacttctgaatgtcaatctgaataaatgaaataatttcattttagttcttattactaagttttaaaaatatgaattggggctggacacggtggctgacgcctgtaatcccagcactttgggaggccaaggtgggtgggtcacctgaggtcaggagttcgagactagcctgaccaacatggagaaaccctgtctctactaaaaatacaaaattagctgggcatggtgggcgcatgcctgtaatcccagctactcaggaggctgaggcaggagaatcgcttgaacccaggaggcggaggttgtggtgagccgagattacaccattgcactccagtctgcgcaacaagaacaaaactctgcctcaaaaaaaaaaaaaaaaaaaaaagagcaactagtttttatcgaattatgcagttcttgccatcttccttgtattctatttacaaaaatggtgagttttgtgagatatgtaggctagaggcaaaacagattctctacagtaccctagtcagtcaatgaacttacccttccatatatgcttggcactgacactaatgaacttgccccattaatatatgcttgacattgcctgacccatgagttaataaaactgacattgtggtttcaatagagtacagttgcctggttacccagtctctatacacttgcctatgaggctgatgctgtttgaacttatgaaagattggagaaattcctatgcagtttttagattctatattatgggatagttcaaggggggtgggagtagttaaagctgggtggagcaggtaagggcctaaagtctagagttagttttgaatgaaaagtggttatatcacacagtcttaagttatccaaaacatacaaattagtactttccctttgtaatttacacatttggccagattttcttctccagatctttcttctgtgcctagccactagttgctttttaaaaaatacattttttggtcaggtgtggtggctcacatat

SEQ ID NO: 53678 - DNA, 1344 bp, Homo sapiens
ggcaaatgtttgttggggttgattaaaaagaatctaatgaagaaataaatgtgatttgactaattccagaagaagctgagacaggaacctagtaaagcttttgacatgactgtaggcacccaagagaacattttctccctccaaaacaaggaaagactgtataaaggaaaattaggcctgtttctgggaggatatgtagcattaagttacctttgcttgggaaagtgtaaaccttattttttatgtattttgggagaggagcataagatatactccagaggaaatccaggattacactatggaatgagagagctaggcaatgttcaaaataagattctatcttacacatgtaatacctcttccattgttagaaatcaaggtgccatgatttcctatttgacttatataatttgaattgttttcaagttgtccatgtggagaatcttaaataatattgatagaatttcccttgcctagccatttaataccaagtagttaaaaaaaaaaaaaaaaaaaaaggccaagcacggtgactcacgcctgtaatcccagtactttgggaggacgaggcgaatggatcacctgaggtcaggagttcaagaccagcctggccaacatggcaaaaccctgtctctactaaaagtacaaaaattagccaggtgtggtcgtgggttcctgtaatcccagctactcaggaggctgagacaggagaatcacttgaacccaggaggcggaggttgcaagtgagccgagatcgcgccactgcactccagcctgggtgacaagagcgagactctgtctcagggaaaacaaaatcaaaaacaaaaaactttgtcttatagagagaaatcatatatattataaaagagatgggccctccattttatagattttaaagataagcaactctagaatttttatatacctgtgggacctcttaaatgtatagttaaatgacacatttccagaggattaatttgtattcatttatataattccccttttgttctctgctggaaataagcctcctttagatgttaatacagtggatgtctatccaaggtggcaccactggatgattttttttttttagtgcaatggtgcaatctctgctcgctgcaacctccacctcccaggttcaagcgattctcctgcctcagcctcctgagtagctggggttgcaggtgcatgcaaccatgcctggctaatttttgtatttttggtagagatggggtttcaccatgttgggcaggttggtctcgaactcctgacctctggtgatccacctgcctcaacctcccaaagtgctgggattacagacttgagccaccgtgcccaaccaac

SEQ ID NO: 53679 - DNA, 1050 bp, Homo sapiens
tttcttttgtctaatgtgtcttgtgtatgactcagtgttatacagttaaggagtttttctttttcaaacatactttttgtgataaatattcttttaaaaaatcctgctgctcaatatagggctatagtatagtaccttattaccctcaatgtactcctattattattttgaaaaactttttttttagagaaaaaagattttaaaagcttgtagtaaacattttatataaatgacaaaatgtattccttgctttgtggtcattgcgtgaccagacagtagagtactggattgttctagggttttacagctgcaaggcaaaagcatctgctcattgcaaagccggcattgtttaattttgacactgacttttccatgagtcttgtaccaagcactggattagatgccactaagatgaaatttgttttaagttgctcccaaagtgcagctgttcctatatacggccctgtagcttaaccaaaacagacagacataggatcaatcagaatctttgtacagggtcacctcagtatgctaggggggcccagagagagaatgttaatgatattatttatcatgaataactgcaaaattagtttctgggcttatttaatgtctatagtacagccccccaccttttaaaagcaatagaactgttattaaatatttagctttttaaactggattatcatggctaagtattagagtgtccctgtatgcattaggcactattcttccacaatcaattgcaagaaaaattagtttattggtcactaaagtagtgattggctgaaaataagacctattctaaaattgtttgcggaaatcttgaaaagtggacatttttatagaatgataatttttctttaatgtttcaagtgaatgaaaaatgaaagagcacctcacatcccaggtttcctgggattgtgtgaatttctacccagctggtccaaattgattgatacagggccaaatatttgtctgcctacatttcaaagtctataatttgctaatgaattgtggtaataatctttcatcctacatgaaagattt

SEQ ID NO: 53680 - DNA, 1253 bp, Homo sapiens
ttgaagagactaattcacacttgcttcattctattcaaaggcaaaatcagcagcttgttttgcttttgaccagatggtcctcatgaacacctactgtgcactttaagtgctttactagaattacaaaggccgggggctgcgttcgactccaaatgatttgagaagagagagagagaggggggaaaagaacctctgtgctcaatggatttggtgcaagtaaattaattctagtggacccattacacacagcccccttttcaaagctctgagcctcctcgcttgctctgtagcaatgagaaagagaaaggcagattactgcaaacagaaataaaaaaaaaaaggggggtatgaaagggagaaaagaggccttgaagcctttcatatcatttgagtttttcaagtgcgttatttttggggagggtggatgtatgaaaagccaattggagttttttttgttttaaagtgcgctatttaagcaccatgaatataggcgcaagagcaacagttgactgagtttactgtggtgaagctttgtgtccgaggatgaatcaaattcattatattcaactctttgtgttttaacatgaatgtagggttagtttcacaagactgtgtctgtttaggataattataatttaatattttcctttcataaagttatcactgtagatgtctaaaattttaatcaaagcagattttgtacattgactttgaagcaccctgacagtttaaaattcaaaggaaagcttttttagttttcaaaagaaaaggaaggctcattctaatggcattgaagcagagattattataactaattagaagtcacacatctgttagcttttggtttctgacttacttatgtattttttgagtaaaatatatactttaaaaatatattgctgttattgtgtgaacctaaagggataaaatgcacttaaaagagaaccatttatttgagccaaccattttttgcaaatctctagatggtcctataaaaatatgtaatgtaataaagtacattaagtgtgaattgcagttgtataattaataatcttactttggaatatgctttcaaacaatattttcacacagttctgttgtcataattctgattattaaccaaagttatgagattaaaaaaacctgtccagtttgtacaaatttatagttattccttatccttaaagctgttcatgtatagtactgtaatttggaatactaagactgtgaaataattagttcttattgtaaac

SEQ ID NO: 53681 - DNA, 1122 bp, Homo sapiens
ttgtttttttaaaactctgtacaaatccttccagttacattatcctcctggttggggagaaagcagtgacagtataaaaaggtcagaatggagagagttgcaagtagtcttaaagacgaaaaatcttttctgttttccattatgaccaaacagcttgtaaaaaatatcaaagaatgtgacagtaactctgtgatagtctgtcttttcaacctttttgggtcctaaattaactatttgtcacactttaaaattgtgagtttccttaaatttaaacaggcttaccttattttaatgaattttttttacgctgagaattcagatttgtcaacagtttattgtgcagattctagtaattctcactaatactattaaagatctgtggttacaaatgcacttggggtgggttaaattaaggggaaaaaagattgatttgctttcagcaaatccaaaacccaggtgtggaaaaggatatgaagtctctgaaatcaagccaacttttcttggaaactgattctttgttatcggccttactactgcagaagcttctgttaggcaaaatattgttttctttgtagatgtcatataaatttaaggaatatacacatgacccagaataacaataagaaacctaagtatttttagtgcagaattatggagtattacttatctgttacaacaagaagcatgatgaatagctattggaattatttaaatcctcttccaagtttcactttacctcagaaatctcactgttcttattattgttgatttagttcttaatggcatgaaaggggaaaattggcaacctataaagatatatcttgcagggagtagtaaaacatttcagtactattacagtttgtacaaagtagtgattaaatgggaagccaatagagttgaataagtctcaggaactgaatgaactaaatacacagattataccaatccttaaaaataatctgggctaaataatgataaggctaactctgattctgagcatttgaacctaacgtcggattttgtatgttgtgtctattattctacttgctactttcttaacttgcttgactagcgtatattttggactattctcctttaatgctggtggccagtaacagtaat

SEQ ID NO: 53682 - DNA, 1009 bp, Homo sapiens
aaatatttccgaaatcgagttggccatactgacaagttgaaatgtttaagcagcgttaatgcaatctgctcacacctgatatcctatgcagaatgattcaaaatgactacatcaattattaaaagaaatatttaaaattctgtaaatgtgccattgtgtgccacagttggctgaaactgttctccgtggcctgctatgtagattatcaaatatatcttaagcttcaaggacttaaaacagtaaatcttttttataccattttctaaatgtcattttaaaaatgttccagaaatatttttgcaaagacagatattcttatgtatttcttgtcaagaatttggtttcttctcctttttcctttttttccctttaagttaatttaaaataatatttttaaatgctagtttgccaggaacaaataaatgcagttgctacttatgtcacttgcttctctgtgagtagacaggtacacataggctgttttattctgtacaacttagataaaggatgtgggacctctctgggcctagttctgtgacttttctgcttcaacttgtgcaacacctgtgatggagggggtagtttcaggtgaaggacaaggtgcccttatctacagctattcaatccacaatgacacttaagtatgtacattttttcttgttgcatgattggaaagttagtttgattgcatcaagataaaaatataattgtgaaactattttgtagttttattttataatgctagtatttgtcttttattaatgtgaaagcttaatgataccatatgtgctaaattgtaaattaatctatctcaccagtttcaggaatttcttttcagtattaataggtccaagaataaatcctgactaatataattgagggaaaggaaaaaatgttcaaaacacaaaggttcctggtcatttttttagtgtattttatatatatattttttttaatttttgaaagccttgcatttttaaaagaaaactttgcactatttttcacccag

SEQ ID NO: 53683 - DNA, 2338 bp, Homo sapiens
tcttttctttcttttcctttttttcttttttcttttcttttttctttcttttttttgggacagcgtctccctctatcgcccaggctggagtgcagtggtgccatctcagctcactgcaacctccaccttctgggttcaagtgattctcctgcctcagcctcccgagtagctgggagcccagcacgacgcccagctaatttttttttgtattttaatagagacgaggtttcaccatgttacccggggtggtctcgaactcctgagtccaggcaatccacccgccttggcctcccaaagtgctgggattgcaggtgtgcaccagtgcacccagcccattatgcttaatttttatggatataatgacaaaggtccttgcttcaagaaattctattttagttgggtgtgattttcttttattttggttactaatatttcatgttacatatattggtgctcgctaagtatagtctacaattaacctgtgaacgctatggaagacaatagggcagacagattatctgcctaattcttttttttttttttttttgacacagagtctcgctgtgtcacccaggctggagtgcagtggcacaatctcagctcactgcaacctccacctcccaggttcatgccattcctctgcctcagcctcccaagtagctgggactacaggtgcccgccaccacacctggctaatgttttgcatttttagtagagacggggttttaccgtgttagccaggatggtcttgatctcctgacctcgtgatccactggcctcggcctgccaaagtgctgggattacaggcgtgagccaccgtgcccgtcctatctgtctaattctgatctttatgttgtgtgtgtatttgtcacatagttacagatgggcaaaggaggaaagttgaaggttaaaaccatggagcacacccaaaatattttcctggtaccataggcatggcaaaattacacttgagacagacagtagaaattattcaggcatactgatgataggtctttattttcaatactgatgaaaataatatttctaatattagtttaatactcatttaatattagtttaatacttctgtatttcacttgtaattgaaccagagtctttgagtatacattttagtagcatatttggaatttgatataattgacagttccaggaggagataaaaatagaaccatgacttacatttcttgattttttcactaatttcaaatactcttcatggttctgataaatttctaaattttggaactttgttataggctttacaaaatgttgctatgatttctccagtttctaaattctgtgtattactgagtcctaagtgaaagcacaattattttgaatgaatttttacataacaattgaagttctgtagatttcaatatcttctgaattttgactgaaatcagattcatgaatataaataatagtttcatacttctgttattctagaacagctgtttcacttggaattgaaccagagtctttgaatatacattttagtagcatatttggagttgatataattgacagctttgttggaggagatacgtatgcagatattatgaattagcctatgacttgtagaaaattcttaagtatacaaagcatttagacttgaaatttaaaaacaccttggtagagaaagagttaacaggttagctccccttggttgttctcagtgtgttctcttgcctttaggagctgaaaatatgataacattgggcccagacatgcctgtgtggaggttagggtactcctggggtttttgcagctagctgtaaagcaagctagaacttgttcatctctgagttccttgtttttctttcaaccctttcagtgccctgcaggagtcattaaatcaaaacttcatgctgatcatcacccaccgagaagtccagcgggagtacaacctgaacttctcaggaagcagtactattcaagaggtgagttatgtctcacagctaagaaataaaggtagctcattatagctaatgttgaccctgttaaagagggcttatctgttctggttggaaattctctttatgtttcattattgggttcttaaattttaattaactggagcatcaatgattactgtagatatactaaatgacttgacctagaaagatgtaaatgggaactcttgataatttttaaactagtcaacttgaaacgctgcttaaaaataactgattattatgtaatatatttcatggttttatagtcattattcaaaatactatggaaattgttgacaacattcattttggaggatgcttatattttatttgaaaggttgctctcaaataattattta

SEQ ID NO: 53684 - DNA, 1071 bp, Homo sapiens
ttgcctattgatagttcagtgactactgagattagcttgttagcatcacattttgaaaaagaactgcgggtattctctacggttgatttaatggatagtcagaaacttggtcactactctaggaaacaaaaattgatatgtctataaatatttctttgcttttttcaaattttgtctagatggttagaattgtgttttgacagttttgccatgtactacttgatgcatcacaatatatcactatcatcactaattaccacattttgattaattttacatactttggttaatacattttgatgtatccaatatatcactatattgattaaacagtaattatagacctgaggccacctgaactttgaaatcatcatgaaaaatgttattagaaattatgtgaaaccaaatgtttatttatctagacatgtttaattgccagcaaagaaagcaattaaaagtagctgtagagtaagaggccaaccttcgttaaacatggttttaagattgttacagaacttgtggtgatgataacatggtgtcttggaggatgttaacaactgtagcagggtgttaattaagaatgatgtaatctgcagctcagaattattagtatatgttagtttagctggacaggagcaaaacctagtttcagttgtgatgagagctcaaatcatatttatagtggaaagattaacattttatttttatgctgttcctgagacaatttaaaaatcctgaatgaaatacaatctaatgtaaacatcaaggccctagctcatttacatatgtgccagattttcaaactgattgctatttgaacctaatctgtcattgctagctgcattagctacaacaaacattacatttacatattgatttcttattttgttttagtgtaaataacccataattatggtaaatttggtcttttgttgacaagaactcatatgactctgtaagtttagaatggaaatttaaattgccatgtgtcacgctttttaatttaaaatcttgatgtagctaaagagataaaaataatattgtagatcacaaagtattcctaaagagaca

SEQ ID NO: 53685 - DNA, 1504 bp, Homo sapiens
agaatcgaagagcaaactcttaatcataatctttgtaacagttgaaaagcattttaagcccttttaaaaaagaaatcagatttcactaattaattgaaagggtgaagcagtactccagtggcctctgtgatacaactataaattctattataaatcacagtaaaattaggaaggagaaaacaaactgttaattatactgtttcatattattacaggaaagattcagttcatcaatgacttattgattacttaataaaaacaagctgtgtcctcaggtagcctgtaacctatttattaagatgattaggccttttcttaagttattcctgtatagaaaatattcttagataccaactcattcctggtgttctttttgattgcttcacccagattccttcctaaactcttcatttcttcacctgctctaaatgttggtattctggagagttctcttctcagcagtctttcttattgtaccttctccctgatatctaccctcaactcttcaatttctaaatatgtatagataacttacaaatctctatttagcaactcacatgtcccagttgcctgtggagtttttcatttgtgtgtgtcctatctgtaattcaaaatcatatgtctctgtactactacatgtgtttttctttttctttttttttttttttgagatggagtctcgctctatcgcccaggctggagtgcagtggcgtgatctcggctcaatgcaagctccgccccctgggttcacgccattctcctgcctcagcctcccgagtagctgggaatacaggcgcccgccaatacgcccggctaattttttgtatatttagtagagacagggtttcaccatgttagccaggatggtctcaatctcctgacctcgtgatccacccgcctcggcttcccaaagtgctgggattacaggcttgagccatcttggccggcctacatgtgtttttcgtttcaaatgtccaacagtataaaatactgaagtgtattctaaccaagatgctgattattaaaaaagccattgggttgggaatataagtaattaataactttgttaaaatcatttttggtagaatggtgagaatgagaactcgattatagtagattttcatggataaacaagaaatgaagaaatgattactgttattttcagaaaacttgatggtgaaggaaggagaagttgagggagaagtcaaggtaagatacttgagaagtattggaagcacaaggagtaagagacagcaagtaggaaaaatgtaaacaagtgaaaccaaaatagaaaatgtggccaaagactgagtgcagtggctcacgcctgtattcccaacactttgagaggccgaggtgagtggattgcttgaggtcaagagtttgagaccaggctggccaatatggtgaaaccccatctctactaaaaatacaaaaattatctgggtgtggtggtgcacgcctgtaacccgagctactcaggaggctgaggcaggagaattgc

SEQ ID NO: 53686 - DNA, 1043 bp, Homo sapiens
acagttacaaaattacaaactacaaacttatggtccatgtgtttataataatgttgatgtgaacctcagatgaaattaagttaaatagttataggtatggttctgtatctagtcatgtagaacattattttgtaggttagttaacaaagtgtaatcactgtcataaaataggtaatccacataattaaaagcagacaggagatgtcattgtttataatctgttgctttccagtagcgtgattaaatggatttatcaaaatgtctacctgggctaatggaaacgttcttcattgccatgtagctgaccttagtttgattgccagtcactcactccctaggcaagcaggagtctacagtgctgctgaaatgcagtgtttattggagaatgagtactttatctagcattaaaatatacttctctatttggctttgtggatttttaccaagttataatgattctttttttgtattggaagaataagagagaaaagttcaaaggtgaacaaaaaacatagtgggaggagggacaaatggagactcctgctaatgtaaaagttatgttaatgtactttttattaacacataacttaaaagctagggtttacttcttttagtatgtttattcaatgtatctttctataaaactagagatttttaaaatagcatatatattgaaagctgattttgtgggagacaatttaaaaaacaaaacaaaatccatgcagaaccttaaaagttgatggtaataattatttttaagttgtgagttttattttgtgactcatcaaataaaaatattttgacatcttttttttttctttctttctttttttggagacggagtttcgctcttgttgcccaggctggagtacaatggcatgatctcagctcactgcaacctccgcctcctgggttcaagcaattctcctgtctcagcctcctgagtagctgggattacaggtgcccaccactacgcctggctaatttttggtatttttagtagagatggggtttcaccatgttggacaggctggtctcaaacc

SEQ ID NO: 53687 - DNA, 2798 bp, Homo sapiens
ttaactctatagagataactcatcaatttcaaaaggatatcacatatttgacataaagtttcaggatgtccatgtctcctggtaaattgtaaagttataggtaattgccaaatgcaatgtttttttcaaactatggaccataaaccattagtggattgggaagttaatcgagtgggttatagtcagcagcattaaacaaaaacaaacaaacaaaacagaagaagaaagaaatgaaaaaagagaaatagaatacaataggaaacgccagagtgtatttcaaataataagggtaattatgtatttcttttcatttaacacataactaatatgagtcaagagtaagtctcaatacccttggattaagactgcacacttaataagctgggtcctctcatggaggggttaagaataagttccatatgttccatgcttgtgtaagattgcccctccccaggaaggaatatattctttctctatatattctcatggtttgcttccttcaccttttaagtttttgctcaaatgtcacattctccaagtgagacccaccttgatggccctgtttaaaattgctaagctcaaccccacattctttatccccccttccctgctttatttttagtcaaaaaattgtcactttcaacattcaactatatagggttacttatttattcctactcaaatgtaagctccctaagatcagagaattttattttaggctgttctgttcaatgctatattctcagtggctagagtagtcctgatacagagtaggtggctcaaaaaatatctgttgataagtgcatttcctggcttatgatgtaaaggtatacaatgtatttcttaatgtgtattggtttcaagaaacatttgaagtacttcagcaagtttttaccttcaggttaggagtttgaaatgtatgtgaattttctggcaaagaaatttggtgaatgaaattttctgtgcttatcaagatagtaggtcatatgtagtacaatagtaatttattcatttcaaagagtgagagctttaacaaaaaagatatctggagtaaaagatatataggtaacaccagagacctcatccaagttacctaacctctcaggctatatagcttcccatctataaaatcgttggcttgaggtgctctcagtgatcttttcaaggtctaatgatctctgaaaacctatattgccaatttttgccatgatgaccctgaaacgaagtatatattatttgcaaggatatacttcttcagtgaaaaagtaattgagtcccaactgtgttcttatctgtttgtgttgcttcatgagctaaagagtttatatattaacattcaggtttatgctagttcattttatatatgtgtatgtgtgtatacacatatatacacacatacacatacactcacatgtatacacatacacataaacacacatatatgtatatgtatgtacgtgtacacatgtacacatgtatatgcatgtacgtgtacacatgtacacatgtatatgcatgtacgtgtacacatgtacatatgtatatgtatgcacatgtacacatgcacatatatagacacacatatatatgtatgcatatacatatataaaataaactagcataaacctgaatgttgtatacatacaatatatataggtatacaaccatatttcccctatatatgtatatattatatatatgggcaataaggttacttggattcagtagttcttttgcattaccctatttaggaaattatcaaaagataaaaaaaactacaaaattaacaatttttcaagaattacaggaaaaatcaataatgaataatcaacatcaacattcattttttgctgtgttttttctttttcagacggtcctaaaatctctacacttgccaaaaaacaacagtctttatgtccttacaccagatttgccaccaccttcatcatctagtcatgctgggtaagttgtttatatttcctgggaacatgaaatgaaaaactcagttgttaaaattgctttaagttgtatataaacctcaaaattaaatcaaatacaagtcttgttgaaattgaccttaccaactactatgaagtatatcaggtttgaaacagtttgttctggatagtttgttttaacggtatagtcctcttataccactttaaagtctttagcataactccagtataatttttaaaaattgtcaaaatggtacttctctgactgaagggaaaggatccaagttggaaggaagagaaagtataaatggagttccaatctctctcattgctaaagaaagcatacctttgaggaaaattcattgagctctgcagagtaaagcttgaaaaacactgatataatttttttttttttttttttttgcgacggagtttcactcttgttgcccagactgaggtgcaatggtacgatcttggctcaccgcaacctctgcctcccggattcaagtgattcccctccctcagcctcctgagtagctgggattataggcatgtgccaccatgcccagctaattttgcatttttagtagagatggggtttctccatgttggtcgggctggtcttgaactcctgaccttaggtgatctgcccacctcggcctcccaaagtgctgggattacaggcatgagccactgtgcctggtgatgtaaattttttattaagattttctctctggaatagagggtctcattgttttttcagttttcacagtggaactcaatacatttatacaatgatcacatgattttaatttttaattatacattacgttttttatt

SEQ ID NO: 53688 - DNA, 1024 bp, Homo sapiens
tgcctcagcctcttgagtagctgggattacaggtgtgtgccaccacgcttggctaatttttttgtatttttaatagagacagggtttcaacagagtttcaccatgttggtcagaccagtcttgaactcctggtctcaggtgatctgcccaccttggcctctcaaagtgctgggattacaggcatgagcaaccacacccagcctagctttattttttagtttcattaatgtatgctatcttttgtcatcctcagatcctaaggcaagataagataaataatattatttcccattttatagatacagaaatattcatcagacaaatgtcattgactgtacactgtatgccacatattagtgttagctctggatatggacaaatgttaactgtgttattttgttagtaatatttgatctcttcttatttatacaggagagattaaacagattctagaaaatgaacttcagatacctgtgtccaaaatgctgttaaaaggctggaagacgggagatgtggaagacagtgtgagtttcttaattgcatagaaataaaagaaaattaagttatgccattgattaaatgatatgtaaaaattggttttaattaatgttgttacatatggcagtagtagatttggcaatagtaatttagtttaaggaatcagcaagtagtgttttctaagctaaaatatttcatgataaaccaataacaattgtaaatgagtagatttgtaaatgaaaacagtatatggcatgtttttcctatttctaacttttaaaggagtttggccctttttttgagaggctttacctttttctcaaacctcctagagtatcagtgaatgccctggaataataattttctgagcaattacatattggtccgaaagaagtcacatgcagcgtatacatttatgtcaagtattgattatggaacaaagataataggaaattttttaaacttggagaatttaaataaggatgttgttttccttgttgacttggatagtggcaggtgcatggaa

SEQ ID NO: 53689 - DNA, 1037 bp, Homo sapiens
ttaattgtaataataataatacaactcaaaataacattttttgagttccttagtatgtattaggcactctgcaaaacatttttcgtgaattatgtcacttaatacagcaacccaacgaagtgtttgttctacggttgtcatttccactttgcagaagaagagattgaggctgagaatcgtgtttttttttttttctctgagacaggttctcactctgtcatccaggatagagtgcagtggcaacgatcatggctcactgcagcctccatctcctggtctcaagcagtactcctgcctcagtctcctgaatagctgggactacatgcatgtaccaccatgcctagctaattattaaaaattttttgcagtggtggtgtcttgctgtgttgctcatgttggtctcaaacttctgagctcaagctgtccttctaccttggcttcccaaagtgctgggattataggcatgagccaccttgcaatagagagtaatttttaaaatatgaggaactcaggttgctgtcatgattccagctttttttctattcctctctttctgtggaacaaaaggctatttgtctcatgtgttacccaggctttctgcaagagtaactgggactttaagttaaagtcccttcttgtttttcctttaagaaacttcttttaagtcatgagggctcagagtgttttcaagagtgtaagaaggtggtgtcaggtcttggagattggtttctgagcactggacagacttgcaaatgcataagctcagttccagacaggtacagctctagaaatatcaacctcagccacaagcaaaaaggcaatgtttatatgtgtttggtataaaaactgtgacttatttttctactctttccataaacagaatgattctttgtcagcagtgacatttttgaaggccaagattgattaaagtttttgcttccacaactatagtgttgaaccagaattatttttatgatagttaatcactatccaaagtgctcagatagggatctttttaaggaaagttaaaaagtatc

SEQ ID NO: 53690 - DNA, 1419 bp, Homo sapiens
aaagtttcaaaataatccgtggaaagcagagttaatgagtcaaataatgatccagtgagtaaatgagagtgagtgaagaagacactgttcttaatttaccgagttaaaaatgatgttttaccaatattataacaacacaaggtaaaaatctgattaaatgctaaatgatatgatactgctaataaacatagaaaggcaaggatgggaaggagagtaatgtggccttcagtcaatgggaaagattttatggaggaagtagaactcaagtctggccttgacacacatgtaggtaaacttacttgataggaagaacaacacaagccaagtatggagagggtccctagtagtattctgtaatgatttagttgacaataatccttcttttatgtcaacattttagtgaatatggaggtgagaccataccaggacctgcatttaatccagcaagtcatccagcttcagctcctacttcctcttcttcttcagcgtttcgacctgtaatgccatccaggcagattgtagaaaggcaacctcggatgctggacttcagggttgaatacagagacagaaatgttgatgtggtacttgaagacacctgtactgttggtaaggtttttcctgccataaagccttcacaaataaataattaggtaaacattcaggttatattttttttatttctagttgactaccagtgcaagaagggaaaaaaagcaagttgaaactggtaactttccaatactgattattatgctttatttttaaatactgtgttgagattgaggtaagtttgagaataattttttttgttccatgcaagtagaatggtatacaatgctgttttagggctgatgcaaatcaaacatctaagagctttaaaaaaataccctaatcaagtacattgcatatcacactttacaactgagacttactcatttttcataggatatatcttgatcctttttgtgctgctataacaatacctgagactgggtaatttataaggaacagaaatttattttctcacatttctggaggctaagaagtctaagattaaggcttagaaggtttgatgtctggtgagggctgctcactgtttacaatatggcacgttgatgctgtatccgcctaagtggggaacattgtgtcctcacatgacagaaaccagaagggcaaaagggacagactcccttcatcaaactctttttataagggcatctaatcccattaacaaagctctcattgcctaatcaccttttaaaggacctgcgtcttaatactaccacatagacaatacctgaatttgggtggggatacattcaaaccatcacactatgtttaatgagaaatcagacatgagacatgtttccatcacttttctctctgccagttgaaaaaatgctgtttttcaaaaggagg

SEQ ID NO: 53691 - DNA, 1123 bp, Homo sapiens
gaagagtaaaggagagtagggttgagaaagagaatgatatgaagacatttgtgtctttaatttcactctaggggcatgatggaatggaattcagtgttgcaggagtacatataaagggattagttaggaggcaattgcattagttcatacaggaggtaattgtggcttggactagagtggcagcatcagagggtaaaggtggatgacttatacaaaacatacttaggagatataatttaaaggactgattaggtatgtgggatgaaagagaagaagggatcaaggataacaccacaggtttctggattgagttgatactaggagtaatggaggagggtcagacttgaggaaatactaatgaactaagctgtggacatactgagttgggggtccgggatcttactaagtaccagatgttgtgcaaatataattattgttcccattttacaaacgggacagctattaagtgggtagagccaggatttcatttttactttttaagaagggagagatttgaacatttttaagtgttactcaaaagaatccagaagagaaagagatgtcaaagatactggatataaaagggataatacttagtgtagagctaatgaggagattattttagcctgggtacagtggctcatgcctgtaatcccagcactttgggagtcagaagtgagaggatcacttgaggccacgagttgaagactagcccgggcaacattaacaagactccgtttctacaaaaaaatacaaaaatgagctggggcttggtggcatgcatgtgtagtcccagctacttgggaggctggggtggattgattgctggagtccaggagtttgaggctgcaatgagccaagattgtgccactgctgtccagcctggataacagagagagaccccatctcaaacaaacaaacaaaaagaattgttttagattttgaacagattaaaaaaatgatatcccctctattttataggaagtgagaaagagagagtgcttatgtgggcttgtttgtggatttgatgttaagaagataagggaaatttctcttgatggcttttgttttcttggcaaaatggaaaaagataccttttaacactgagatgtgagatagggag

SEQ ID NO: 53692 - DNA, 1045 bp, Homo sapiens
atgtggccaagagaattataatagttgcaatgtaattgcttgagttaaaaataaattcataacttttgtctccttaaaattggagactctggttctgaattaaagaacactttataaagtcttaggaggtaaaaccattctcccttccaagtgtagtttaattacttgattttcccccctttcctctcaattcaaacattggcttgaattttggtggctgggatttctaagtcactgaagcatgatctggtaagtgcggatgaggcgaacagaaacagcagattaggaatgaggtcgttttggagagcaagaaaagtactcttgcagaaacatcaggaagttcaccatgaactgcaagacatgctgttcttgataagaaaccatatatttaggatggaagcaaaatttgtttgatacctgtaccacctttaatggttgatggtttttagatgaaagcaatgataaaatagacctatacccccgttcctctcttctaaactgtcagaaagattttcatccagagtaaatgtggcagatttctagagtttctaccaacttctgtttgtttaatctttagtttgttgttgtttgttccagagcattcaattctatcgaagcccttgtctagaaagcaaaccagatgaacttcctttatggctatttttttcttagtttagaaagtttcacactgctaaatatcactccagttttatttttgagtaaatgttattgccactttttgtgccaaaatttttgctatgcaaaatctgtgggttcagctactggattctgagtacatattggatatatcatccaattaatagcatttgccataggtgaactgtagaaacttcttctcccctggaaacattccatctttcctgtcacagattatactttttatttaatatattttatgactagaaattcagtattaaactgatttctcataaagttactataatatttggggttgaactgtgatcagagtaggattttgttggttttgtttgctttttttgaaggaatgaaacatatgtctaca

SEQ ID NO: 53693 - DNA, 1333 bp, Homo sapiens
attccagattatcttctataattatgtgattaaatttaaaaaatagacaactgagattgttttataccttctgttctgtaatctgcatttttcacttaattgtggctgttcatcattctttttaatgtttgcatagtatttcatagtgtcactgtaacataattaaccaactagtcctatgctgttgggtatttaagatttttgcagcattttgctattatgaacattactgtagagaacattcctgcatatacatgttacatatttaacctatttttttcagaagaaattgaataaattcaattcataattgaatttctgaggcaaattacatgcatatttttggagttttgaatacttttaaccaaatggacttccagattggttttactaatttaaaattctaccaactatgtatatttttgatatttccatttcattaaaccaatgcttccttatcttttttgtgttttggtacttgtcaaaatttacaaatatttgtatagcttgactctaaattcatgcttttaaccattgttgctatactccaacaaagcatgatataggtgacagctccatgattgccatgtagaggaagggagaaagagcagtggcttaatcgaaacgatgctcccaagtttcttgtcttgagtcttcttttgcaataataagtgctttgctttatttagttgtatattttgggagtgtctattagagaggctgatggaagttattggggtggttaaaaattcctccaagcccctcttgcatgatacttgtaagagggatatggaatagaggaaagggtgatggtgggctgggagtacaagtctttaatggaggaattaccagttttggggatggatatatgttctttccttatctgcttcctattggttcgtgtccactaattttgaaggttaaaacacttactggtagtgaatatttttatcagtacagcctatgcagaatattgtaaaaggagaattttcccagataatgttgaataattgaatggtaaggtactcttccactatttctgagttattttattttggagaatattctaacaacacttggggttaaaacactggtgttatatttgtgcagaaatgcaatcatacactgtatcaggcccaagcaaaaacatcaggctatctttcagaaccttaaattttggctttcttttgagatatgtctatctcctagctggcttttcttcacaaataattcacttttattcacagtaaagatttattgtgctttgtaactatcttgctgtttacattttatcatttatcctgttttcatgcagcattcactttgttgtttt

SEQ ID NO: 53694 - DNA, 1014 bp, Homo sapiens
agagcagcaatcctgacacttggtggagggaccatcttagaccccaggaggtttagagaaggtaaagacattaatgttcattttctttcagaatcgcccttgaagccttcctcataaagaaaacactctggtgcagctcctccaaattgttgttatcacattaaatttagctgactgctgggtctgccatccctgctgggtctgccatcccccatggctctgatcatgatttgtcattccctgtaaacttactgggaggtctactggaaacagcagtggttggctccaggtcatgtaccttccatgcaaaacacctgtgaacacttctttactcccatctcatcaacttcactcagattctgtggggtagattttggccacctggcttatggcctggacaaatgggacagattggactgactgccatcattcagtcctttcaaaaacaaggactagactcactgttctgaactgaactgagtgggaaccttgtgctgcgacacaatttgacaatgcctccttgactgatgtaggttctccttagaaagacctagtgattctgaacaaccctctcttttccgatgtaccatgtgtgtccttgggactgtacttcttttgtgtaacccaggtattagcttatctccctcctagaaacatggaccttcctctacctttgaatgtttaaggaaacaccattaaatcttgttgcctttagataactgtgtagagctctctaaaatgaggccatgcttgcttgcttggggaaacttcctggaatgataactgattagttatttaggcacaccctgtgaagaattatctttataaggggagtcattcaattagactaggcagtgcaaaattcattcctgactttttaactgaactaaccaatgacaacaccttggccctggaaggcattaaggtctgcctcaattcactgacaagagttattatggatgataaaattgccctggacttttttcttgtgagccaaggcagagtctgtacaat

SEQ ID NO: 53695 - DNA, 1044 bp, Homo sapiens
aaactggcaggctaagttgttagcttgctagcaggataaaactcagatcctttagtttttaagttttggcagcaaggatggatgttgacagacacgtgacattctggaagaagaaagatgagggtgtcttcataggttggttaacagaatttgagggaagtccttgggaattggtagaaacatgttgcccaaattaagtggttctctactttattgcctattaatgacgagatattggggaagtggttacagactgagttccaggacataggttcaaagatagctgcctgaacattcctctggttgttgccaactctcctttgggtggggaggatatttttcaccaatctggaggtcaccctcaaatcctccccagtgtaacaacttagggagatttgtcctgattgggcaaaagcttctgttccctttcagacaagacttacagatgtatgtgtacctacactgagtgtgaaaggaggcaaatttgtaacttaacgtgggcagaaaagaaagttgttagaattttgctttgcctgagagatggagtgcataatgtcttatggctcagcccgtcctctggaggaaactttagttcccacttcactgtctgaagcaaagccgtcagctcagtggggtcattaattcatagaggtttcaccctaaacctggtcctggtttgctgatggtttagtcaagctgaaagcttactgtgtctgcttgacttctagggctgttcagcctctgtactagctatgcagactgataatggatgtgattgctctgttctctggacagaactcaaggcttttcttatagctctgattggtactcttcttgatgaaacttgttgtatttctacggacctttgcctgttgctaatggcctagctctttggtctgccacttggaaagctatagactggcaagttaaagatagctcttgttaaagctgtgaactatgaaaacaaattatacttgctgatcaaaccatctggatcactcatctagatgcccttagtaagggcctgtcttctgatgaagccca

SEQ ID NO: 53696 - DNA, 1546 bp, Homo sapiens
gttaccgagtgcatgagcgcctagcgcttcccgcgctgccccgcccgctggcccgccgacccgcccgccggctcgcccgccagcccctcggcgcccggcggcggcggcggcggtggcggcgacggtcgcaggaggtgccgtctgcctcccaggtgcgcgcttcgctcccggagccgcggaactcggcggccgccatggcgtccaacatggaccgggagatgatcctggcggattttcaggtgaagtatctggccctcttcccctcccacttccaacctcgtgggtttccggtgccacaagggagtcttcttcccagcgtttgaacgctgcagtggtgtgtcatttaggcttttatacggtgcgtggcgtgtgtgtgtgtgtgtggcgagctatggagaagcgtataatttatatgctatcatgagtgtgtagaatgtgttaagtacgggttgaatgggattggaggtattaatgacttgggttacaatgtgtgtggaatgtgtagtgtttcctgtattatatggggggacgtgtagagtttttgttttaattggtgttggaccattaagtatgggatgttttgggtggttctgtggggagagatgtatggagtgtgagcgtggagcgtgtggtgttatgggcgtggtgtatttatattgtattaagggaagagtaaaaaagcagaatgatgagatggcgagggcaatgacaatggggtactgaggtccttttcaaagaggagtaaacatttgagactttgcctaattggaatctttggagggtaagaagataacaaggagacagataagactatatattccagagtatctctgcaatgaattcacaagcttaataaattacctattcatatttgcggattcccctcccctacagacttgaattgcttggttggtgtcctttctccaggaatactttaaaggataagtaaaggctgttctcttaataaacccagtcgtagtgccactgacatgtaagtatcttaggaaggccctttgaaagtagaactgtatgcattgtgaaagacttggagctagaactaatatcctgtgagtgctacctttgccttttgatgtttggtgaaggaattattttagtgagatatttttggccattttggcatcaacttagaagctactgtcaagtataggcagacttttccctcttttttaatactcacattgcacaggttctaacactagcttagtaggcagtatttttccttgctgaaattttgttgggcttttctctctctctgttctattaagttccttattttttttaaaattaattaatttttttttttttttgagacggagtctcgctctgtcgcccaggctggagtgcagtggcgcgatctcggctcattgcaagctccgcctcccaggttcacgccattctcctgcctcagcctcccgagtagctgggactacaggcgccggccaccacgcctggctaatatttttgtatttttagtagagacagggtttcgccgtgttagtcaggatggtcttgatctcctgacctc

SEQ ID NO: 53697 - DNA, 1038 bp, Homo sapiens
gatttttgacgaacaggaagactgggaaattaataatattcttttaaaaagttttgacaaacatttttaatacaactttgcaatcttgtttatattaaacatacttatcaagatactaacacccacttattgtggcttagtccttgtacatataacgaaacacacacacagaaactggagtttcaaggcttattttcaatatgtataatcctgactctgaagttgtgtcataagtcaagaaataactttcttcaaaaccgtttccaatattgctattattttctgtgaaaaaaggtgaattttcttctacaattatgtttatttaactcaatttcaaaagccttttccaccttcctagtgtacatttttctatcaggttaatatcaaaggccttaatcgtatgtttgctttacgaagatccaaggtatctgtctcttatttttctcattccaggtccttaaatatgactaaatctttagggacagttgtggtcgtatcaatttttaataaccaaaaagtatgtttcattgaagttcttgaaatataaattatgtatcactgtttaccactgctccaaaggaagagctaaaaatcaacagttttatcaacaggggagcttaatatcttgtccatctatgtagtttgcatttacaaaatattactcattttaaatatattttgttatttaatgtgtgattagatttttttaaacaaacatttaaaaaagatagaacgactttgtattttccattagcatttaatttcataaacattgagtgtctattatacaagatatttattataaatttagattattatggatatacctagatataaataaaccagtgtaaattctgaaaatgtgtggcatgttaatgaaagtaatattttttcacaactaaattatatgtattttatatttgcatgctgttctacaagatactttataagagaccactgttagagtgaaatatattcaaacaatagtagataatctttgttatgtgaattatttgtatgttgatagcaagtgttaat

SEQ ID NO: 53698 - DNA, 1016 bp, Homo sapiens
aaatcattggtctgctaagggacttgtgtccaggagataacaaaaagataatttgctatcagagagggcaaatcaaaatcacaatgagatatcacatcttatccacttgaatggttataataaaaagattaagtttaagcaatgctgtagagaaactggaacattctatttccctttttaaaatgcacacttcattgatttccagtgtgttcagagttacacaaccatcacttaccaatacagctctcgatgggattgtaagatggtgcaggtgctttggaaaagtttggcagttctacaaaaggttttgcagagttccattcattggtttatatacccaataaaatgaaaacatgtacaaaaacttatacatgtattttcataacactgttattcacagtagctaacaagtagaaacaacccatgtccatcagtgactaaacaaaatggtggtggactattcagtgataaaaaggaatgcaattctgataaatgctgcatcatgggtgaactttgaaaacatgctaagtgaaagtcgagccacaaaagaccacatattagtatgattccatacacaggcataccttgttttattgcacttcacagggttgtgtgtgtgtgtgtgtttacacaacttgaaggtttgtggcagctctgcatgaaacaattcttttggcaccattttcccagcagctcatttcatttctctgctacatttggtaattctcgtgctttcagactctttcattatatcttttacagtgatctgtgatcagttttattagggtggtctggaacgaaacccacacatctgaataatgcttatctatgaaatgcccagaataggcaaatctatagagacaaaaagcaaattagttagtagtagcctagggccggggagtttgggggagtgactgttaatgagtacactttcttttgggggtaatgaaaatgttctaaaattgataagtgatggttgcatagctctgaacacactggaaaccattgaagtgtgt

SEQ ID NO: 53699 - DNA, 1018 bp, Homo sapiens
ttaaaactttaataggccgggcgtggtggctcacgcctgtaatcccagcactttgggaggccgaggcgggcggatcacaaggtcaggagatcaagaccatcctggccaacatgatgaaaccccgtctctattgaaagtacaaaaattagctgggcgtagtggcgcacacctgtaatcccagctacttgggaggctgaggcaggagaatcgcttgaacccgggaggcagaggttgcagtgagccgggattgtgccactacactccagcctggtgacagagtgggactccatctcaaaaaaaactttaatagcttcctgtaatgcggagcataaaactcaaactccttaacagggatgagttggttttctgccttttcatttgaatcaaccatttagccccatgggccgtctgtgtgccttctaaaatggcaagttctttcctgtctcaagtctttttgtgctattctgccctgcagctctcttctccacattgttcagatagctgacttcttatcctctagaccagatacatcccacttacaagcatgaattaggaattttgtcctcatggaacatcatagaatgtacttgcacaaacctagatggtattgttgctcctaggctacagacctggccagcgtgttactgtgctgaatatcctgggcaattgtaacacagtgcttgtatctgtgcatctaaacatagaaaactgtaaaagataaaacagtatacctgtagttaccatgaagggagcttgcagggctggaggttgctctgggtgaatcagtgagtgagtggtgcacgaatgtgaagcccttaagacattactgtacactactgtagactttataaacgccacacctgggccacattgtttatgatttaaaatattcttttttcaataattaacagcttactgtacttttataaactttctaaattttttaacttttaaacttttgtaatatgtaccatatataattgtatgtgctataattgtatacaactgggccgggcgt

SEQ ID NO: 53700 - DNA, 1008 bp, Homo sapiens
tccctcgatgattttctgagcaaatactgttgtttaaggattgcttttcttttggctttttgcaagttaggccctctccctacttcatgatgccaagtgccaaagggagccatgccacaaagacatgctccatgtgtttgcagccaagcatctccagcggttgagctattagtcagtacttcttccattttcacagtggcccaagagtcagtataagctgggtctaactttacacaggattttacagcttgaccaacagtgtagcaaagtacaggctttagagttcagcagcctgtcttcaaatcttactgctgcataatcgttgtgtgatcttaggcaacttatttacctgtgcctcagttttgccatctgcaaaatgacaatggccccacttcataggattatgtaaatattatgaggattaaataaatgtaaagtacttagaatagcaactggcacataatgagtatttaataaatactagcttttattcttttccccagagcatattggtgtctgatgttctggagtgtttaatgtggaggaagaaaaacaaacctgatctagtcatttgtgagacattagctgtgatgtctctgattaaacatccacttttttttcttttttagacagagtctcgctctgtcacccaggctggagtgcagaggcgcgatctcggctcactgcaagctccaccaaccgggttcaagcaattctgcctcagcctcctgagtagcagggactacaggtgcctgccaccacgcccacttaatttttgtatttgtagtagagaccgagtttcaccatgttggccaggatggtctcaatctcctgaccttgtgatccacctgcctcggcgtcccaaagtgctgggattacaggcgtgaaccaccacgcccagccaaacatgaacttttaacagtccatagagaccttcaatagttcattctatgtcttcccaaagggctctattcttattttgtcacttaacagttgactttatacagt

SEQ ID NO: 53701 - DNA, 1032 bp, Homo sapiens
cccaaatgaggtttcttgtttgtggacctagcctattaatcagtaatgaactttgcactggaattcaaaggagccgtgctaacccgagcagaaggcactttccgaccttggaaggctgcatctgagggtgggcgtgagaagttcccatttgctgcttggattgcagaatccagacacctctcatttattactgaattagtgtgatgatgctgaggatgttgagaaggcactgttaggctttaaatttgaagtaaacaaggaaaagactgttgactcccatcatcttagaagaaatgatcttgggagtaactccagaggaaagggtctggatttgattccttgaatggttctagtactcagcacactggggctttcttaaaacctcttggtgccattcttcacttgggaatctcccacctggacctcagccaaatcttgagttggtgttggccttttaggatcctggctttgatgtcaggttgtggctttctgctgtgaatgataactgtcttggaaacactcccattctggctcaagagataaggaatagggcaacctgccaacccatgggagagctgagggcccagcacactgctagaagccactctgccattctgagggcctgtgatcagtgagaggctgaggtagactttctgttgccaaggacctgttcagatcatgttacatcattgctacttccctaacaactgaattcatcttggggcacaggatttagactttctctaaatgaggattacttgctctctgggtgttctggctactgtagagcccctaagaagtctattatttctggttgaattgcttagggacacaaggctttggcagaaaggtagggaagtgtatctgttgcctcattttgcagatgaaaacccataaagaaactgtagaaggcaggaaagagccttaatcttgtccaaattgctcatttttagaggatctgtgactttcccaaggttactttgaaaatcagtagcaaagtcaggactggaattcaggtctccttatttccag

SEQ ID NO: 53702 - DNA, 1006 bp, Homo sapiens
tgaagaaagtcaaagggctccaaccaccagcagcagcagcatggggtggtgatgggaggggaggacacgcagggggggcagtccgcgggtgggggcagggagccaccctactcctccctccccagtgcccacagctcagggtggcctggctggtctgtccatagcggcctacacggtgggagtggcctacacagtgggagcacgatgtgggacccaccgaaataattccacttcgtcgtccccgaacggcttgtggtcctccttcccaaacatgctgaggtaggcggccttcatgtaaatgtaggtggcctgtgcgagacagagcaacagccaggtgtgagcagccctcctccagccccagccgggctggaatctgcagacggacctcacgtggcccagcacaggagctcccgttgtctccaagccccaggggagaaatgaaggtaagaagctgaagcaacttgaagacctgaatccaggacaacccatgtcaaagcagccaccttcttctccacttgaagcagtggcaagaagaacccatgcaactagtaataggcaggacagactggggctgcggcagagacacaaggacaggggcgcactcggggcttccgggaagcaacagcttcacagtgggcccctgaagggcaatggggaaattccctgaggccccagacaggccttccagccaggaggaagaggctgagcaaagccaggaggtggcaggatgtgtgtggactaccaataggaggatgaagcacgggctgtaaaaagaagaggcttgagccagaaacgtgagcagggcctgggtcgggtcagctcgggccaccctggtagaactaactgccttgctgtgtgtgccaggcacaccacatccagcacctcgcttgatcccaaagccaatgccagaaaggagtccgtaccccacctctgcttcctgggaccccagagctactggggcagagccgggagtcaaccccagcaccttgcccactaaatgcacagc

SEQ ID NO: 53703 - DNA, 1055 bp, Homo sapiens
tgaaggtacccagagtgggcaggggccacccccactgtcccaagtctagctctttaacaggctttacctggaggggagagggccacccctctaactttgaaagcctctagccaatgttttccaaagctcgggcagtagatggcagctaagatatcaggggtccatgggcaggtgccaggaagcctagccaggaaacccctggccacctaggttcctgaggctaaatcttccctgggaagctcctcctcccttgatcaggcagttttcccagccttcctgctccctctgcctggaagcccctccccagctgggaaactcctagggatccttcaggagccagcacagatgctcaccccctcccgtaggaaaccttcccccactccatgcaggaacaagacttagttctctgtcccctctaagtcatcagctggtttcaggactgtctccttccctgacactggtaaatgtttaaccagcagctctccagggcagagaaagccctgatttattgtgtgtgccaaggtcgggtgctgtgaaggttccaccatggtggatttcaagctactggcctgacttgggaagaaatgcaccgatggactctggagctggctccagcgcccacaccacccccaccccagctgtgagcccctgaaggctggccacatgtctggtcacctctggatcctggtgcccagcacacagccaggtgcaggggcacttggcagtgaccacacatgagtcagggacagaaggggagactgagctcaagccaggtgctgtggaaatggaggaggagcactcaccaggttgaaggcccctacaccaagcttcactcctccttcaaagtgcgggtggttctcacccttgcagtattgtgaggactgaacaaggctgtccagctccctgcagagagatgccaagtcctgtttcagccactgctgggggtggggggtaggggctgggaccccttccagctgggcctcaggtaaactccctggtggtggattcatacagttctggtaatcctgagagctggtatttgaggaatttcgaac

SEQ ID NO: 53704 - DNA, 1055 bp, Homo sapiens
agcctttcctatccccagactaagtcaggcccaaggactcttctccttggagcctgtcatcaccctcatagtgactcaatcggggggcggggggggggggtctgtcccttaaagtgagaatgctgtgggggcaatggcttggtggttttggtccctgctgtcttccagtgcctggcacagagaagcttcaagcttgctaattgaaagccttcaaaatgctgtcagcccaggaaggaggcagacacatcattaaaagcctctgtcctgccccaggtggctgggctaggggctctgtgcagttggtaaccaggagaaatagagttgaattccaaccaggagactccaggaagacttcctgaaggaggaggtgttttggttagcccagtggttttcagctaggggtgacttccccctgtgagacttttggcagtgtctggagacattctggatgtccagctagggagacgatgctactggcatctggtgctcaggggccatggatgctgctaaacatcctacaatgcacagaacagctcccctgccacccccaccaacaaagaattatccagcccaaaatgtcagtagcgcggaggctgagaaaacctcttttagataggatgtggaatacgaacaaatgtccagaagctgcccatggctgagtgtgccagggcccatacggctgaaattcagggggtgaggagtgtgttatcatggtgggagatggggttcgaaattcctcaaataccagctctcaggattaccagaactgtatgaatccaccaccagggagtttacctgaggcccagctggaaggggtcccagcccctaccccccacccccagcagtggctgaaacaggacttggcatctctctgcagggagctggacagccttgttcagtcctcacaatactgcaagggtgagaaccacccgcactttgaaggaggagtgaagcttggtgtaggggccttcaacctggtgagtgctcctcctccatttccacagcacctggcttgagctcagtctccccttctgtccctgactcatgtgtggtca

SEQ ID NO: 53705 - DNA, 1032 bp, Homo sapiens
taatgtacatcacagtacttaactcacaggattgttgtaaaggatttagctttgataactttttattatttattttaaataagcaaattcaaccacagtattactaatagtgaaaagagctgttggttgttgaatgtacattatatatgaagcactctactaggcattttatgtgtgtcttcttgtttcttgtttaatcttcacaatacctctaagtagtagatattgttgttagcccctgttttagaaatggagaaactgagtctcaaaaaccttaaaataatgtgcttcaaatcatccagctgatgagaagatgagccaggaactgaacctggtctgtctagtcctaagtgtgatactctcagtttaccatgctttgttttattttgtgtgaaaaaaaaatttacttataggaaatggtaggaacaggacatcataaataacaataaataacatttattaagctccaggcatgatcctaaatgctttactattaatttatttaatcctcacaatagtaaccatgaaaggtacaggtactattatcttctccattttacagaggaggaacccaaactaggccacagttatgcagctagtaagtggtagagctggaatttgaacctaggagatgggctccagagttttaaccactactctgtattcctgttaatgatgagtagtcagaggagcagtgtcacaaaagaaataatccatgtaatcactgttcttgaggattaatggaataaacctatattatacatggcatcttataaaacattttcccattcattcttgtatttaactcgtatgagggtttagaacagtttctgacacatgaaagcacttacgattattagtgttatcataagtgataagtatatggggggagtagccagccttgcttttagtttttctttttttgtagagacagagtcacattctgttgcccaggctagagtgcagtggcacagtcatagctcactgtaactgtgaactcctgagctcaagggatcctcccgcctcagccac

SEQ ID NO: 53706 - DNA, 1183 bp, Homo sapiens
tcaacaagtcaaggtggtattgatctgtgttaatctgagtaacttattgcctagcctataaataaattccaaaatatccaattcatttcttcttgaaatggtgcttgttttgttttctttccattacacaattagactcctacagtttaaaacaaactttaaaccactatcttgcactgctaacttttttctacctttgtaaatagaaacatttctgcataaaagtcatacatatgaagcaagggctgaatcataatcacaaggcttaattttgataaacgaatccagtgacctaaggattttctgcaaaatttgactgggagttgtgataggtggtatttttgtttattttcttcctcttactccttaggataaaggtaagttgacttgaacaactttcttttgcactgggaaaataagcaaatgtttaaatgcttcaaaaaaattttcaattaaactcaaatattaaatatctataacttataaacaccaactttcaatgtaataaatgtatcctaatcttatgtatgtttaactggattacatagatttttatcttttgttaaaatgtgtataccccgtggaccaacataatattaaagtatgtatatattatataaatatatatgtatatgtgctcgcttgtgtaggatgaatgtcttagagtcgtttgtggtattttatgttgttgactctggctccagggcctgtgcttgaaaaggacagataagtattgcccagagctaagtggcactacttacaaagttttaaatgtcttctacatactgattcatgtttatttgagctctctttatagaattttctcttaaagtttcaaacctctaagttgtagcctgtaattatgagaacagtaaactttaagtaataataaagaatcccatccatatatccaatttgcaattgagttttgcatggttctctgattatgtccatgctgtgtccaaggaggagtaggtacatacaatcagcacagattaatatatgtaaagggtttgggacagcacctggtatagaataaataataaatgtaaactattatttttggttatcatgtcgtgcttttatgaaagaaatgaaatgtatatgcataaagacagtgcctaaaacataagaatttgtaggcaggacacagtggctcgcgcctgtaatcccagcactttgg

SEQ ID NO: 53707 - DNA, 1046 bp, Homo sapiens
aggtcatttgctcttactgccactagtggataactgttatcaggctgagggctgtaacagcagaggcaggccatttctgtctttattctttattattctccttctgtttaatccattcgtctctccttttgggaacatgctgcttgggtgtggctaggggatggtgggattcagtctttggacaaaaatatgattcctggcccatccttactttgctatttgtttcattagctgcacatagctggaatctatttgagagatcatgtgtgaagaatttgaggacaaattgttggtgtagctatttaagacaatattcagaatgtgttttaggtactcaatcatcctctacccacagtactttaatgctatctgtgtacatgttcttgtgtgcttgtatttgctgtatttactggttgaattaattgtaatgattttgatccagggaaaagatccatcaacaaattggattctcctgatccctttaaactgaatgatccatttcagcctttcccaggcaacgatagccccaaagaaaaagatcctgaaatattttgtgatccattcacttctgctactaccactaccaataaagaggctgatccaagcaattttgccaacttcagtgctgtaagtactgtgaatgagctgtttgggggagaaatctttaaagagttttcagagattattttggagtctgccaagtttgcatcattttaactaaatttaccaagatactaaaaatgatctttcattcttcccccaagcaaaacctctgtttgatcctgttttgacagttctacggttgttccatcgcacagatgattttagtagtcccagttcttgtcatatacacaagttgttttgtaaatctttctcttagtcttggtaatgtaagtaaaatcctaacagttattattttgtggatggttatgggtgatggtgatttaatgaacaattacagagtcattgctctctgcccactagatgaataatgccagtaataagtttgtgtatttgcagctgtgtatgtgtgtttgtgtataaag

SEQ ID NO: 53708 - DNA, 1019 bp, Homo sapiens
gcatgcgccaccacgcccagctaaatttttttttttttttttgcatttttgttagagacagggtttctccatgtggggtttttttttgaccagagaatctgagaggggaaagattgagcttaaaacagatttgtggggaaattccaggagttctattttcaacatgttagcaaagcccatcacatgtccaaggacagatttgagttagcaaattgaatatctaaatatggattctaggaaagatgtcttcaagtaaagattgtatttaaagctgttaagtaccctagtctcatcaacacagtatactcagtaagactttattctttcttaaggtagatttaaaattactaacttaaccctcccctgcccgcaaagaaaataaatatattaattttcttggattttaggatcttcaagatgaagttcaaagggagaatactaatctgcaaaaactacaggcccagaaacagcaggtacaggaactccttgatgaactggatgagcagaaagcccagctggaggagcaactcaaggaagtcagaaagaaatgtgctgaggaggcccaactggtaatgtctggctgtttcctgctgcctgcacctatacattagttgcttttcctggcttaagatgaaaacattctctactttttgttattgatggtggtggttggcaatccagtcagcatttgggttcatgggggcgatggagcaaggttcatccagaaattacaggccttctttagaggaaatagaagggcagttaatgaactgtttttccaaatttttgttggaaatatggtgcctataccttcaactctcctctgtccctcccccagttacccttctttacgaaaaccatacatcaaaaaacatcataattggctgggcacagtggctcacacctgtaatcccaacactttgggagtctgaggcggggggaattgctggagcccaggagttggagaccagcctgggaaacatggagaaatcccatctctacaaaaaatatgaaagctg

SEQ ID NO: 53709 - DNA, 1743 bp, Homo sapiens
gaaaagaataatgtggaacaggaccttaaggagaaggaagatactattaaacagaggacaagtgaggttcaggtaagtgaccataaaatttagtgttccactgctgatttaggactattcattttaaatttatatggttatttactatttgctggatgtagtattaggtcaagagaatgcctaatgtttatattatataaatgtttatcttttccaagatgattgttcttgcttggaattctggcctgcaaagattatactgcaatgagaaagcagtatttttcagcatagatttctagttttgaaagtattttttaaatggtacttacctgcatattatatcattaaaggggtaagtttgcatgacttacaatgttaatatttttgcaccagtaaaattagagtgagatcatcatctcatcatcatcatcatcatcatcatcaaaaaccagtatgctttttcatgcatgtgaggtttttgttagctaggagacctagtatgttaaaggactgtttctcataatacttgtagggtgggagatgatacagaacaatttaaagtagcattttatgagtagcttagtaaccagcatatcttaaactttggcataaagagctttagttcattttcattaggtgttgtgttaaattgtttcattttacaaagagaaaggatgacaaaaacctcagtttttgtttgggaaatgataaaaataagggagtagcagtgtttctaacgttagaaatagagaaaactgggcagtgcctcacttagagcagtaagcaatgcatgtggccatgttattggggtactgtttccttagtgctgcaccggcacatagaggagattggatatagaagcactggtagcagttgctagtaagaactcttggatgggcatttcttaatgtgttgcttgtatgttggattttcctgcttttcctaatagttttaagtagggaaaaactctaaattgtgttaggcccattgttttgttttgatgcaggacattcattagagattgtctgtctggtggactgtgctagggtggggagaatgatttactgaagaattgaggaagaagccagagagacttcttgttggaagttgattctctgattgggtgactacatttattatatttacttgaattttcctgaaggcagtgcaagttaagagatcatcatcaatataattctctctctggcagtgaggttaggtgggcataagagggtaagttatctgaattacattattttgtgcagtttttgagcttcttaggaaatgcaaaagagccacacattctaagcagttattactaaaaatagtttaaaatggaagataaaataatctacacaagttttcataatttgaagaaataggtgtagctactgatacaattttggacagcttctaaatttagccagttactgctttaaagtacataggttcttgtgatagacagtattttgttgagtatatctacctgttggtttttccctgctgcattttttgaggatgtgaatttaaatacccagtttagaagagtgctgaaatttacattgtttccttcagtttaaataggctatccctgaacatttggtgtcttataattatagaagttttgttgtccatcagaatttctccgtgatttgcttgcccttcttacttagtggcaatggtaaggtgtatgtctaaccttaagctttgcaaaatccaaaatgtgtgattggcacaggaagt

SEQ ID NO: 53710 - DNA, 1032 bp, Homo sapiens
tggtcaactaatctttcaataacttttagtaactataatgttaagttgtaccagtggcagtcttatatagtaaatggcagctgacagcatgaaaataacatatctaatattttgtgactatcttattaggaaaatcagagaatttcaaaaccttgttagtttttagggtatagtcacattttataaatgtgcggtatatttatacatgatttgacgtttgtgaaaatattttccctggacttttattttagatgagatctacagtgtaggcaaacttatataatctgtcaactccattagtgtcatagtcagactcatccccatgctaaaattatagttgttaaaatacgcttttgtaaatagttgtgttaggtcattatcaccaagtcttcaaggtattacattataaaaaccttggtttttattcttgtgaataaccgttttttccatgcaaagttaaaattcttcagcctttaatttttttattaatatataaggatgtgatgagtatgactacaaaacaggaaaaaataaacagatttcgtttgtggcttttgctaaattgttacctgacaaaatcttagccagttcttcattttcgttttgagatgaagatacttagttttagtccaggggctgggcgcgatagctgatgcctgtaatcccagtactttgcggggccgaggcaggtggatcacttaaggtcaggagtttgagaccagcctgcccaacatggtgaaacgttgtctctactaaaaatacaaaaattagacaggcgtggtggcacacatctgtaattccagctactcaggaggctaacacaggaaaattccttgaacctgggaggcagaggttgcagtgagccattgcactccagcctgggcaacacagtgagactcttgtctcaaaaaaaaaaaaaaaaaattttttttttttagtccagggatcaaacctctaagtaagcagcatgtatgatgtgaaattgtaattactgtataatgaatgtagtactttataatacttttttcttaa

SEQ ID NO: 53711 - DNA, 1057 bp, Homo sapiens
ttttttctgcccccagcctgcctcttgtcagattgagtaaaggaagataatgacaggatatgcaaatcagccagtttggctatggttaacactgctgggtcaaactataaaaaataaagattgagaattatctgagtattttgtttatacagactttcagttacctatattaatgtgggcattagtcaagagttaactatgtttgaatttactcatttcttaaaaaaaagtaaaaatgtgcacctatggataagtcctaactgacctgtattttcttctgttattttctcttccccacagcattttgattgagatgtcatatggaagtgatacattgttgctctgagttagtagggtagaattgttcagaatttgtgatggatattgtaatggattgaaagagtgacacttcaaagtttgtttcattttggcagaaatactgttttttttcctccctgtagtgggttgtatcccctgcagaaaaagctaaatatgatgaaatcttcctgaaaactgataaagatatggacggatttgtgtctggattggaggtccgtgaaatattcttgaaaacaggtttaccttctaccttactagcccatatatggtaagactttatttgaattgattttttaaaaatatggttttgtatcaattccagtttctgcattttgatttttagtcatttgtaaataggacagtttttgtttcagaattttttatagagaaaatcagaatctgaagaattcttctggctaatggacaaaagcttgagaatgggttacctgaagctttataagattgacagcatccgctgggcatggtggctcacgcctgtaatcccagcactttgggaggccgaggtgggtggatcacctgaggtcgggagtttgagaccagcttggccaacatggtgaaaagctgtctctactaaaaacacaaaaaattagccagacatggtggtgtgcgcctgtagttccagctactcgggagggtgaggcaggagaattgcttgaacctgggaggtggaggttgcagtgagctgagatcacgccat

SEQ ID NO: 53712 - DNA, 1053 bp, Homo sapiens
caatatttgatagtttaagcccagtgaatggatttctgtctggtgataaagtgaaaccagtgttgctcaactctaagttacctgtggatatccttggaagagtaagatattatttactccgaaatgtaatttttatgtattttaattttatatctattatgccaggagcatgtataactctttgttaaaaatatacaaatcttattttaaagttgtatcattataggattttttgttttctgacttaatgtataaaattattgccagcatatttctgtatttggttattccctgtaaaaatgagtggttgaaatgaattacatatgtaagccccttaagtaggtccttttttagtttgtgctgtacactcttgacctcctatttgcttgagttaatttctagagaccatcagtattttatgtctgccacttactctgtggctgtatcatggtgtcttgttgtaaggaatagttttatctctgaaatcataaattcttctctctaacttgtacttcctgtctttatagagctcttttccagaaactagcaagactaattctttgactggttttactaagacctttaaatctgacttcttggctgggcatggtggctcacacctataatcccagcactttcggaggctgaggcgggtggatcacgaggtcaggagttcgagaccagcctggccaatatggtgaaaccccatctctactaaaaatacaaaaattagccgggcgtggtggtgcgcagtctgtggtcccagctactcaggaggctgaggcagaagaatcgcgtgaacccaggaggcagtggttgcagtgagccgagatcgcaccactacactccagcctgggcgacaagcaagactgtcttagaaaaaaaaaaaaaaaaaaaaaaaaatctgacttttttacttttcctctttttttcaatttttttactgtgataaatatgcatatcatgaaatttaacatcttaaccaattttaagtgtacaattcagtggtattaactacatttacattattatgcaactatccccaatatccat

SEQ ID NO: 53713 - DNA, 1180 bp, Homo sapiens
tgatccttcaaaccttttttttcttttttgagacagggtctcagtctgttaaccagacttgagtacagtcacagagtcacagctcaccgcagccacaactgcctgggctgaggcagttctcccacctcagcctcccaagtagctgggactacaggcatgtgccaccacacctggccaatttttaaattatttgtaaagacgaggtctcactgtgatgcccaggctggtctcaaactcttgggttcaagcagtcctcctgcctcagcctcccaaagtgctgagattactggtgtgagccactgcacccagtcgatccttcaaacattgaatttcagatgagtctgttcataagctgaccaaggaactctttgaactgtagtgtgaatttaatggaactgcctttctgcaagcagtttatatctgatgacatcactacctttctgtatgtcagtttgtatattcatttaattgttttattgaagtggtttttgaaatgtattcataggtactttgggtacttgggtagaggatgaattcttggggatttgggcctctcaactggctttagagaaagcatttcattctcaatttgttacatattgggtttctgggtaaaatattagatgaagaggagttttgatgtcaaaaacaaaatttaagattcttgtttcatttcttgtctacctgattcttagtaacccatgtgactatctttatctattctctgtctcacgctccccaagaagaaacaaaatctaacccctgaaatcaaggatattttatcttattcatctttgtttctcaaatatctgttgaatgaatgccaaatatgttaatagaagttaatgaatagcatctaatttttattaatgtgtttatttcagttatcaagtgggaatcctgtatatgaaaaatactatagacaggtaagatttttgtttcattgtttgcctggattgaacattaaatgtactgtcaactcttgattgtatgcctgtagattaccagctagctcgataaatttgatgtgtcttgttttcaacatcttgtttacagcctccactttgagtacttaatgcatttgacaatcccagagaaatgaaggaaagataattaagtccaagtacttagttgtcttaaatatctatgttgaaaatgtatacatttgatagatttatcc

SEQ ID NO: 53714 - DNA, 1033 bp, Homo sapiens
agcttgtctctctatgatgttaaaattgatcagtaggttcaggtgaaatgtgtgtttttttttttattttaaagaatatggttgcggagaagtaatcaggaggttgcttttgatgggatttagtgattggatgtgagtgaaaggggaagagtctgaagacatccaggttttcagcttgagctggttgaatgataaaaaggaagataggaagaacaggttgggggagagaagtggttgctttggggcatgttgaaattgacataaagatgtgttacagtctggagcttgggacaaaaatctgggctgcatatcctcttatcagtcagtaaaacataaaataaatctgggctgcagataaatattagtttttcatatatggagagttgagagagtgagtagaatagagatctttggataggactctggaaaataccactggatttagttatctattgcgttatgacagattactccaaaatgtagcaatttaaaacaacagtttgttacctcatagttttcgtgggtcagaactttgagttctggctcagggtctcttatgaagttgtagtcaatatattagccagtgctgcagtcatctgaaaggcttgactggagcaggaagatcagcttccacgatgactcacatggctgttgtcagaaagtggcagttccttgctggctgttggaaggtggcctcattcctcaccaggtagcctctccattgagctgcttaagtgtcatcatgacagagcagctggctgtgatccaagtgagagcaaagaggaagcctcaatcccttttatgacctagtcagagaccaccacttctgccttattctgttcattagagacaagccattaaattccactcatgctcctggggatgggaatttcagacatgaggagggaaattaggctttatcttttgaaaagaatttgtggacaaattttaaaccaccacaatcacaatttaagggattggcagaggaaaaaagcttgcacaggagagtgaaaagggatgccagagatgtaag

SEQ ID NO: 53715 - DNA, 1056 bp, Homo sapiens
agcctcctgagagctgggactataggtgtgtaccaccacacctagctaatattttgtattttttgtagagatagagtttcgccatgttgcccaggccgacctcaaactcctgggcccaagtgaccctcttgccttggactcccaaagtgctggattaggaaattaggaaacgactaggattataattggccctcttaatgttgtttaatttgtaaccctaatagttgtattaccactgggacctgtcttgccttttttctgtttactgtaattttatttaaaaaattgtgttatagtagaagaggatcaaggatgaatatattcttaccttgtttgggttaattttgcattctaacctcatcagggattttcaaatctaattattatttttgtgtatttcctttacacttgaagggaagataagtatagggtacagtaaaagggcgactaaatgcttaaggaatgttttcatcaactgttttctttcactgtgttattagtaaagaactcttttcaactctgcttggtattgagaaatttttttcctaaaatatatgattcctgatatttatagttagaacaaaaagaatactctgtttagtatctcggtaatcacttctgaacatgaattcttacggctcaagactttggatgtagggcatctatagtttcatgtgggataatcatctttaaaacataatcattcaatattggcttgttttgctgctttctcacacaggtggagtacaggaaaataccagttgttcaagtattaagtatttgttcaacttccattatttgagatgttactttgttgtattgcacatgactaatttactcttaggaatatttactgaatgtaaacatagcacttttgcataacataggctttgcttggctcagtttagtaagagacacagaaaggctaagttacatttcatcagtaaatgttttttgagcacctgatgtgtaccagacactgttctgaggcataagtcagatacaattcctaccccctaaggtatgtgtagtcttgtgggtgaagtaaaccagcaa

SEQ ID NO: 53716 - DNA, 1029 bp, Homo sapiens
gatggttaatgggtacaaaaaaatgagaacgaataagatctacttgataacacaacagggtgactatagtcaacagtaattatacatttaaaaataactagaagagtataattagattgtaacacaaaagataaatgcttgaggtgatggatacctatttaccctgatgtgattattacttatttcatgcctatatcaaaatatttatactccaaaaatatatatacctactatgtacccacaaaaatttaaaaatttatatattgtttttgctatcacctttagaatttcttgtcattggatagttcgtctgtataccattctggtcttcattccccagggcccccgttgtctgatttttctgcttctagaactgttagaggtcacaaaagcaagatggttgtatctatcacaatttttgtctgactttaactgggtatctgttacgatttagtagtcatcttactgacttcttgttggtttccaattgaatcctcacagtagactgttttcattgtaatcagtatcgaattatagcctgttcccttcttcataaatgaaggctttcttcttcaacagttcttagtgacttcacctgtactttatttctctgctttgaatatttcgaagaaaacatattcttgctctttcccaaggttaacactacatacattaccttgaccacaggatgttttcttgcagattgtgacctaattccatcacccttcagcagcccccaccgttttcatggattcagctaaaccttctgtaagatgactctttttccccctaatctttatatctcttttgatatgtagctttagtctcactttttttccttttggattttgccagttagatgtctccctggaattccacttcagcatggctaagactaagcttgtcttctctttcctccccaaagcaaattgtaattaggatagactgaaggtgacagaagataactaagatcttcttcatcctttcggctcttatggaagctgaattccagtagtcattctaaatttg

SEQ ID NO: 53717 - DNA, 1054 bp, Homo sapiens
ctcagccttctaagtagctgggactacaggcacgcaccaccacacctggctagttttttgtgtttttagtagagatggggttttaccctgttggccaggctggtcttgaactcctggcctcaagtgatccacctgcctcagcctcccaaagtgctgggattagaggcatgagccaccacacctggctgaaattggaatttcattggtactgcctgtaattttatgttaatttttttttttttttgtcgtcactagcttttatctaaagcccctagagagaaaggccatgataccttgtatacaaggttataagagtatacaagggaaagggagggctgaagggaacagggtgggctggtacaagcctcattagaaataccattgagtctgtgagtaaaacatcattatatgaaaaggagatgtggttttagggtggtccaattacttttgcaccagcctaataaaattacaagtcattatcaatagagacattgtaaaacctttttttttcccaaaagaagtatcaggtatgataattacatgtctgcccaactttcgttatagattaacataacttaattgtatttaaggtacaatttaggagagttgctgaaaaatgaatctttagtattgggatgccttgattctaccctcaatagctataatggattatgtgtctgagtagattaataaaaatcttttgagcatttttcttgaactacttcactgaagattagctttttgagcatccattttaatttctcagtatataaggatcggtttatcacaactgtattgttttccctggccttgttagattatattttcatatcatgtagaaaaataggtgtattcgttctcccttgaagtcctttgtctcccaaaggaaatggttgcaatacagatgtgtcacctcttccacaggtaaagtggaatggagaagtagccagttaaatagtgcatgctcaatttggaacatttagagcatacaggaaagttatttatttggtaaatattttttaagcatttactatgtttcatgcattgtactagt

SEQ ID NO: 53718 - DNA, 1058 bp, Homo sapiens
ttaagtggtactgaaaggctcatatagcaaaaatatggcctcctgtcattgtactttcctacttcccagactcaccattttcaacattttttagtagtttattttgccattttatagcatagtacctgacattttatttattcaacagacatttcttaagtacctaatacatgccattccttgtttgaagggatgctaaggatacagtggtgaacaaggcgttgtggggttgtatagagggtattcattcctaaccttgaaccaaatatttctttctgttggataatgcattaaaaattgcaaacagtttacaaacttttggagcaatggtggccttgatcataaagtagggactgcttctaccgtatacatgcttggtggtgtatttgtgatatctggctaaagtttctacatggaaattgactgactttagttttgagacttctgggaaccagtcaggcaaaatagtgaaactgtgtatcctgtttccaagagttgtcttttaaggttatctgcttcattcatttggcctgacttgctaggcaaatgcctagggtaaatatgatttgattaactataacaacaacagcaacaacaacaactttattttttagagcagtttgaggttcacagcaaaattgagcagaatgtacagagattttccctatacccgcttcccctacgcatgtgcggcctcccctactatcaacatcccccaccagagtggtttgttacaattaatgaacctacattgacacatcattatcactcaaggtccgtagtttacattagagtccactcttggtgttgtgtatgggtttggtcgattttataatgacatttatccaccattatagtgtcatacatagtaattttgctaccctaaaaatccagtgtgctccacctgttcctccttccctcctccctcatccctggcaaccactgaactttttaacatctccatagttttgccttttccagaatgtcatatcattggaatcacacagtatgcagccttttcaaatgggcttctttccgttagtaataggcatttaagt

SEQ ID NO: 53719 - DNA, 1033 bp, Homo sapiens
agtactgctttacccctcccatttctgtccaaatcctacactctaaattgcatcctctgtgaaagctttctcgtccttataactttctcctttgaatttcttcgtgcttttctgataacattttaccatgcttgaatcaattatttgtagacagatatatattccctctaatagaatgaaactcttttagatctgtgtctgcttcatcttggcatccccaaaggatccggcacagggccatagtcataagagatgctcagtgaataagtaattattgtaacactgaattctaaggtccagcatagtatgtgtaaaaatgtgctcaggataagatttagtgtgagataacgagtttttagagagacaagaagattgtcattgcctcatcttgtttcttgttttactaccatttatttcaatgtgtttttctcctagttagtttctctttcttcttaaaaacgtttagccttggaaaaattcagcagccatacattacagcaaccaactaatataataaatcccttaaaataactctatgagttatttatgatttttccacgaatattctgatttataatctgcaagaactagttccttgattactttttgtgtttaaatgttaacaggtgggcacattgcagaattccttaattcatttacaaaatttttattgaggacttgctacaaaccaaacactagcccggtggagatagtagagaataaaacgaagtcctgttttcattggcttgtattttatatcatcttgatagattctgacaattaaactaaatcagtaattttgtatgcactttttaacaactttagcgaaaaccgaatctgttttcttctggtactcattggcagctaaaattagatatacgaagacagctttggcatatataatttctaagagataaatgtcagaacaattgttgagtctattcaagtcagggtcgttgttttattttgtttgcctgtgactgatcatctatctgttagtcctgactagctatcaccttgagtgttaatttgt

SEQ ID NO: 53720 - DNA, 1012 bp, Homo sapiens
aaaacttcagagatcatggggtgggttgaggaatgggagaactaaacagtgagaatatgaagttaacattaagggaagggaggaatgaactgaatgaaaaaggggaaaatagaagtaacctaggtgggttttgtttatgttcctttgttaaattactgttgttctagtggtgactgggagccaattacagggtttgggggagataagaaagtgattctggagagaagagtaaatccaatttgagcagcagcatgtgtaactgctgagaagggaagcagtgctccaagttaatgaggaagattgatgtaccactgtttaaatagacctaactgttaaatagacctattatttgtgtcaaaatagaactgtattttaaaaattgaaatgtcttcatgtatgaagggaaaagtattttttgtactattaaactttgcttgggttctggtagatttattgcaaattctctttctctagggtttggattcaggatttgttcctagtgtccaagattttgataagaaacttacagaagctgatgcttacctacaaatcttgattgaacaattaaaggtatggcattagtttgtatattaaatttatataaatagaaaatgttactgagcttgatttttgagtaaaaacagttacttgatgttaatttacagccctcatgtggttcttcagcagtttttaaagcagacttaaaagatctagctgacttattcaaaggtctttatctctaattatattggtaaatagcatatttacataatgcttttttggtcattaagaaaaaaaaggtaaatatgtaggcataattagaaaaaaataaggcaagatttggttcatattctgtttaaaatttccatgaaactgtgttttagtggctcaatttctttttttgtttgtttgttttttgagacagagtctcactctgtcacccaggctggagtgcagtggcacgatctcagctcactgcaacctccgcctcccgggttcaagcaattgttct

SEQ ID NO: 53721 - DNA, 1158 bp, Homo sapiens
aacatttttagtgtaatttgtacttgctacctgtctgtgttagcccagcttaataaaactacgttttagggttcttcgcaatggataacttggatcacgtaaatgaaatttggccttttatttattccagaaggaagttttattgttgttaagtcttcttatgtacaaatacaatcctcaattatatttgtactgtatatggactctgtatctttaaacttaatttaaatgtaaatgagaccgtgtcacttgcctgctcaaatacccctgatgttttccatctcatttggaatgaaatagaaactacttacgttcactgccctcttacctgtctcctacccttgcttggtcacaccattccagtaacattggctcatttctttttctcaggcaagacaagcttcccccctccacccccgcccccggctttagggatttttacttgctgttccctccacgtggagggcatttaccacagattgccactaggctcactctctcactttattcatatttctgccacaaggaacatctttggaaagacttttcctgactcctgtatctaaaatagcctatacctcccactggtttctttttcttcgtggcctcgtatcactagtcaagtttacacgatatatttgtttgtttatctctttattgactgtctaccctagagtacaatcttggtgaggaatttgctcgtcttaccacttgtattagtctgcatgggctgccataacaaaataccatagactgggtggcttaaagaacagaagtttattttctcaccgttctggaagccagaagtccaagatcaacattctggcctgttcagtttctgatgagggtccttctcttggcctgtagatagccatgtcttcacatagtctttccttggtgagtatgcacagagagagggagcgtgcacgtgtgagatagcaagctgtttggtttctcttcttacaaggacactaatcttattgaatcagggccccacccttatgatcccatttaaccttagttacttctgtagaggtctcatctccaaatatagccacctttggggttagggcttcaacacaggaatttggggagggacacaaacattcagtccataaccccattgtatcctcagtgcctacagttgcttaccatata

SEQ ID NO: 53722 - DNA, 1055 bp, Homo sapiens
aacactttagagtagatttaaagaaaaatttaaaattaaattcctgtgatttatatcttatttgatttttcatcctaacttcattttctccacttttctttcccttacttctcttgttaatacaaaaaagaaataaaggaataagataaaatgtttgctctcctaagtaaatctcagatcttttgtttgcagttcccactcaaacttttcttcttagatacagtttcacttgtgtgatcacctggaatatttgcatgctacttaatcatttgcaattcttgatcaattttttttttattccaataagaaaaagctgcttttctctcttactttttctgttgggtaataaaaagaatatgaagttatttactaataaggtgagctacctttggaatttccaaaataagcattaccttttaggggttaaactttttgtgttatctttttaaaatacctttgtgaatatgatgactaaatgtggcaaactgatgtgctttttttcacaactattgaaccatacatataggaatgggcaaaaaatccgtaagtgactctggattcttttttttttttttttgagacaaggtctcactctgtttacccaggctgtaatgcaatggcacaaacacaactcactgcagcctcgacctcctcagattaagtgatcctgccccagcctgtcgtgtagctgagaccacaggcacatgccaccatgcccagctaatttatttatctatttttttaagagatggggctctcactttgttgcacaggctggtcttgaactcctggcctcaagcagtcctcccaactggtcctcccaaagtgctggaattacaggcatgagccattgtgcctagcctggattcatttttattgctgtcttcaatttcttccagaactgtggccctggctttcagattgccatcagtgtcttaataaactttagtcttcaccagacatctgtagattagtataaattgcctgactgacagcccttaaatgctcagtaagttaaattgatcttaatactccatttgtcgattggtttgata

SEQ ID NO: 53723 - DNA, 1039 bp, Homo sapiens
gctccactactcaccagctgtatgacttcagaccagtcattgaacctccgagcgtctgtgtattatgagcgtcattgtgttttccttagggttgtaatgtagatatagacataccgtgtatggtgcatacaaggtactcgataaattattattataattcatagctttaaattgtttttgcatactttatgattttatgcctaaattctagacaacttagcccattgcagataaaactttcctgtatacataggtgttgtttttaactgttttctttatatcatttgttctgaacaaggtaaattatgaaatggctgaaaatttatcccattttttttcaatttacagtcttactgagtatttcacttggctcagacatggtttctaatcatgggtaaggagaaaaaacacagcataaataggacctttgaaattacatctaaaataagattcatatgttataggatttggggtttttaggtcaattgatttaaaagattgactctattttgagatacatcacagaggcacaaagcattttaaaggtaactttcatgcttttttttgagacagagggtctcactctatcactcaggctagagtgcagtggcacgaacacagctcactatagcctcaacctcatgggctcaagtgatcctcccacctcagccgccccagtagctggaaccacaggcacacaccaccatgcccagctaattttttttttttttttgagacagaatctcactctgtcgcccaaactggagctggagtgcagaggtgcgatgtcggcttattgcaacctccacctcccaggttcaaacgattctcatgtctcagtctccaaagtagctgggactacaggcgcatgccaccacgctcggctaactttttgtatttttagtagagatggggcttcaccatgttaaccaggctggtcttgaactcctcacctcaagtgatctgcccaccttggctttacaaagtgctgggattacaagcctgagccaccatgcccagcctaattttttattttttg

SEQ ID NO: 53724 - DNA, 1070 bp, Homo sapiens
attagaatacatgttttcgcacgtgtagagttgtaataagactcatgtgtactgttttataaatatctaaagcgtgagaaatttgatttcaatttttacatttaataagtaaattgtgtgccttttttatttttcctttatttatatacaaataccaactgggtgtggtggctcacacctgtaaacccagtgacttgggtggctgaggtgggaggatcacttgaggccaggagttcgagtccatcctgggcaacataaggagaccttgtctcttaagaaaaatataaatatacgtgcgtgtgcgcgcacacacacacacttccatcggtaaattatgatcacaggtatgataatctattaataatagaataatctttctttagacctgttaactggctcataaaagccagttagcatgaatttacttgcataaataagatgtttttttattttataatttcaagtacagttttttaatgattaggaagagtgttaataccaatgtgggcttttattaaaggatctcaaacataaagacaagacatgtttctgagacttgccgtttctggaattgttgccaagaattgtgacatatttagatttatacccagtaacaaaatcataaaaggaactctagttttaaacttaaatgcagaggcaaagatctcactaatttttgatgacttctaggtcttgactatcaacatggctttgttgagcacatcctgtgcataaaggataagacaagagaccttgtcatcaagagaattctaaagcatatatatgcatgcatgtaaccagctaactgtacgagtctagcttactatgattctaaattgctttctttagcttaaataaggtaattaatgtttttatagttcttctggatctgcctcagtcctgacacacagcagctcgggaaatagtctaaaacgcccagataccacagaatcacttaattcttccttgtccaatggaacaagtgatgctggtaagtgacctttgataatttaacttttttttctttaaaaatatttgtggccagatgtggtggctcatgccgtaatccc

SEQ ID NO: 53725 - DNA, 1065 bp, Homo sapiens
ttgaattccacattaataatgggacaattaatagtgggacgctgagcttcatatttcttcactgtaataatttcttcatcatagggctattgtaatataatatgtatgtaatatacaaataataaaataatgtatatgtaatgtccagcagataggaggcatcaaaggattcctctgagtgagtttgttgagtagtttgttgttgttactatacttagggagaaaaaggaagtttcacagaggaagtgacatttgaacattcaaaagtctttctctgtttttgatctgctaggcaggttaatggtcatttctgaatctgacaggttgagaattagtttttggagcatgcctgggcaatatgtggtggatgttaccatgatttgaatgaggtggtgttttgttttgttttcttttttttttttttagtctgtttatctgaagagaaatttgatcttcaagggtcaaatgtgtatgtttttcaggtagttcttccaacgtttattcttgaaagaagatctcttttagaaatgtatgcagacttttttgcacatccggacctgtttgtgaggtatttgactgaacatggtagtttccaacgtttacagatgttactcagcagctttctgccttttattttgcaggatagatggattccttgtcacctttcaaacatttctgggtattctgtggtattgaataatgtgtttacactggttgcctgtttgcttaaagttatatggtggcgatgttaggcaaccaagtttaacactttaaaaaattctcaagagcccgttaataggtagccaatattcacaaggccaatggtataagtttatttaatccaggcactggcaatcactgtcaaattatttgtactatatcctaatgaagcttaattttctgagttcagcaaacctttccaaagcacctgttgtttgctaggcactttcttacaagttggagaaaggaaaagtcatgtctgcccttgagcttacaatatagtatccaaattatagatgatttataaattttaaatataaagcttgcaatattatatatgtgtat

SEQ ID NO: 53726 - DNA, 1049 bp, Homo sapiens
ctcaaagtttaaattctcacacataaaaactacccttaaatctcaaatctatacccaatgaacaactggtacgttccatttttgcttacacgttactaataaatgcttaaattttacttcttaaattatctgttaatttaaacactgccatatttatttaaatttctgcctttggggaattggttattcttttaaatcttcatcaagaaaaaaaaaatatatatttatcaatgtcagccaatgtatccacccagcaagaaacttcagtgatatgtatctagcttcagtaaaccacagtctgagactaaggaatgcagagaagacgaactaacaacattccccattacaaaaaaatttcctgctaccagcgaaaggcaatgtgaactcacctccttgtaaatcaatttcacctttacattacttctatctcatacatatacacatatataatattgcaagctttatatttaaaatttataaatcatctataatttggatactatattgtaagctcaagggcagacatgacttttcctttctccaacttgtaagaaagtgcctagcaaacaacaggtgctttggaaaggtttgctgaactcagaaaattaagcttcattaggatatagtacaaataatttgacagtgattgccagtgcctggattaaataaacttataccattggccttgtgaatattggctacctattaacgggctcttgagaattttttaaagtgttaaacttggttgcctaacatcgccaccatataactttaagcaaacaggcaaccagtgtaaacacattattcaataccacagaatacccagaaatgtttgaaaggtgacaaggaatccatctatcctgcaaaataaaaggcagaaagctgctgagtaacatctgtaaacgttggaaactaccatgttcagtcaaatacctcacaaacaggtccggatgtgcaaaaaagtctgcatacatttctaaaagagatcttctttcaagaataaacgttggaagaactacctgaaaaacatacacatttgacccttgaag

SEQ ID NO: 53727 - DNA, 1071 bp, Homo sapiens
aggcataattcagcaacaaacaatcttcctttgggagaaacctgttcattccaatcttctaattacagtggttcctatctcagggatactggactttctgacgcagatgaacaattaaggggaaaagcttcccttttccctctgtggcagttacgattttgacttcagtcctgagaaaaacttcaggttttgaaaatcagatgatgtcttctccttttccaaacaccacacgttgaaagcatttataaatccaagtctgaaactctgcgctctagtactgctgttaagatacacaacttgtttcttagttcatataatctcgggatacacacacacacacacatatatatacacacacatacgtatacacacacatacatatatataaatatacctgatgccagatttttttcataaatattctgcctactgtaaatatgggttcctctgagttgttttagaaaattagcgcaatgtattaaaatcaagtgttaggaaatttcatggtcttacctacaataacttttattttggaattgaactattattaaattgtatctaatcctggattacagtttaattaattattcttagtgcttaaggcttcataaagtaatttttccaaccttttttttaaaaatgtgcatcttttattatcttttatggttaaacttggaagccaattatttggcaaccttgaatacaagagctagcttttcaaagaaagacacttgaaataatggaggatccattcttttcctctgtcagattgtatgttctgtctttagcccctgccaggcaattccccagaatcttcacttaactcatattgcacatgtagggctgcctaccaacattttatccaaaaatgttttattgccttagagggtttgggaagagtgtgtatttatagatccccaccccacagtgaacaaaaatagatagatagatagaataaaatgaatgccacagcagcagatggctcattctgaagggaaatacagaactatatctatctatctatctatcatcttttttatttaaaaatacattaaaaaaacaggtattagt

SEQ ID NO: 53728 - DNA, 1050 bp, Homo sapiens
aaacactttagctttttttcctggatatatgtcttagtcttaattccttcttttgccttctgcctgagatcgggtttctgatgacttaattgaagatgttttgttttagttctgattgaagatgttttgtttcagttctgaagttgttgataagaagatagaagagtttctttctagctttgaggagaagattgagaacctcactgaagaggcattcaacacccaggtgactgtgccagcctggtcttttggcctttggcccacacaagcccccagatacaaatcttaacagggcttcgccggccagtttttgagctttgcagccccaccttcctcttacaatagtgtctccctagcttcatccgtgcctcttatactggcatgtccatcacaagccgggctggacagggcccagtgtgttctgtgggaagtggtatgttgcctcacctgagcatctttctttttggtgggaacaggtcacagctctcatcaagctgaaggagtgtgaggatacccaccttggggaggaggtggataggaactggaatgaagtggttacacagcagtacctctttgaccgccttgcccacgaggtaacatggttttcagagtaagacagctcaaactggtcaaggttcctgattctacaggcatcacaggtctgtgcacaccagcattgtgtggaagagaaactcgaaacactagtcctggcctgattactcgctcacttcctgagttttcagactggcctctctagcaccttaggtggccacgtgagctgggtgctaatccttaccacaccaccaccaatttcaatcagagcagctctatttttatgctatatattgaggtctacaagattttgtggagaaaaagagttttgccgtttaaagaaaattgaggactctttgtctttacggagttcattattccaagtgcatgtgttttgacaacttctattccaaagtagtaaaacctatgaaaaagatctggatcttgtactccagtgtgactttggttaatacatagcccctacatggtgaattacca

SEQ ID NO: 53729 - DNA, 1111 bp, Homo sapiens
ttctttcctaaaggggaagctgtagttttggcaggccagcattatcatattctgtttagaagggaacctgacccctctgatgctgggcagctttcttcttaagatgaagactgctgggctgggaatgatggctcacgcctgtaatttcagcattttgggaggccaaggcagaagcattacttaaggtcaggatttcgagaccagtccaggcaacacagtgagaactcatccctacaaaaaataaaaaattagccaggcatggtggcacatgcctatagtctccgctacttgggaggctgaggtggaaggatcatttgagcccaggagtttggggctacagcatgctatgattgcaccacagtattccagcctgggcaacagagtaagaccctgtctcaaaagaaaagaaataaagaaagagagagagaaaaatagattgctggtaatagactaggattttgagtgaaatgggtttggcgtatctatactgtttgttacctttgttgaagattgtatgtggaaaccatgaacagtttagtatagaggctaaaatgggaggaaggaaatggtgagggatgtgtgtgcatacatacggatacatacatagatacatacatacatagccagaactagtatgtcaagcctgtttgtgaagctaaggtgctgggctttatcctgtagaaatggagaaccattaaaggatttaagaagatttgtggttaagaaatatccagagagacaagttatgaagctgttttaaagtacagatatgattccactcataggagttatctaaagtagtcaaattcatagaagcagaaaatataatggtggtttccagtagttggggagaagagggaagagacaagttattttatgggtacagaattttggttttgcaagatgaaaaagttctgaaaatctaatctactgcacaacagtgtgaatatagttaacattattgaactgtaccccttttttttctgagacagagtctcgctctgtcacccaggctggagtccagtggcgtgatcttggcccaactgcaacctccacctcttcggttcacgccattctcctgcctcagcctcccaagtagctgggactacag

SEQ ID NO: 53730 - DNA, 1104 bp, Homo sapiens
ggaagaattgttccaaatttgacaattatttagaattttggacccttaagattctttgaggctaggaggctgaggcaggaggatcacttgaggccacgagtttgagaccagcctggcaacataagaagaccttgtctgtacaaaagcaaaaaaattagccgggcatggtggcccctgtctgtagtcccagctactcaggaggctgaggtgggagtatggctagagcctaggcattcgaggttataatgaattacagtcgatagtaccactgcactccagcctgggtgaccagtgatatcctgtctccaggtaacacccaaacaaacaaacgaacaaattgagttgttagtaattttcttatgtccccccacaatgcctagttccatgctgggtacctggtaaaaaccaaagagaaacatttccctccctaatacctagtggatttccatgcttcttaaaatgcttccttctttttcttttagctactgtttcagctcattattgactacttagctgagttcaattccacaccagctgtctttacaatgataactgagcagttgaagaagacctactttaacatcctcatcaagcccgagactttggccaagtgggtataaatgagatgagcttatattttgaggacctgaaagtattactctccctagtgggtgggtgtgggggttaaggctatagttgcagtgctaattttcatccgtgtttgaatcgtgctctagtttaggagacccgtgcatagcgttacggtatttctaaacccagcttatgtagctagctgtgaatgggactgaaagcagcttactgtagagactaaaagtaaggaagggtgttttcaccaatcattatacctgaatgttaaagaagtgctagttttaggccgggcatggtagcttatatctgtaatcccagcactttgagaagctgaggtgggaggatcacaagcctagaagttcaagactagcctgggcaatatagcaagacttcatctctacaaaaaattaaaaaattagctgggtgtggtggcacatgcctgtagtcccagctacttggcagactgaggtgggaggattgcttgagcccaggagg

SEQ ID NO: 53731 - DNA, 1025 bp, Homo sapiens
aaaatccaaacttaaaatgacaagcagcactagaatttgttaatattcactctaaaaaatgcattcccaaactcatatttttaattagtcagaatgcctagacttggagggtagacagagccttcaggccagtgctgctgatgcctattccatttacctcattgtacaatataaatattatcattttgcatgtgtacatgacatgaaaaagattgggaaacactgctgaaggtaggaattctgtaatacacctctgaaactgaatcctgagtaagctgtattaccttttacattctggagtagagaatttatactttctaaaaatgaagctgcttactctaaattgaagcaaatctatttcatgtgtctttcttaccaattaaagatgccatttgcattttgtacttcttagtgtggtcctctttgatatctttgtcaatatccttacgcataaccttgcggaaccagcttatgaagcagatgtggcacagctggagtataaactggtagctggagaacatggtttaattattcgagtgaaaggatttaaccacaaactacctgtaagtacaagtactctgttttccttatagagagcattaaaataccatatttatttagaggtttgtgcatgggatgctgtatagagaaataaatgtttattaatgtggattatcttgaatattcttggctgatgacagctattctaactgtgactgactatccataagaacaacatatgtttcattaattactggcagtgcatgggattatagcccatgctttaggattgatttcacttccctttgctgtcagtttctccacaaccaacactggcatttaggattggttctagctaaattttttaccatacaggaataaccttttttttttttttttttgagacagatactcactccatcacccagactggaatgcagtggtgtgatcttggttcactgcaacctccgcctcccgggttcaatcagttctcatgcctcagcctgctgagtagctgggactac

SEQ ID NO: 53732 - DNA, 1004 bp, Homo sapiens
gtactcaaattttaaaaattagctatttttcatctatgtgataatgaaactgttgttttaattaaccaaaaggacaagtttgactttgagcagaactattttgtaacttttcaaatgtatagcataaggttggtaaaaggcattctcatgaattaatggattgtttaataaattggtttatgaaactatcctgactaaaggctcctctctcagttaaaattgtctgtaagaaagggaatgaagcagaatgtgtagcaaccagaatcagttcttgggaaattccagatctttagaatttatttactttaagaccaacatagttttccctttggtattggtctactaatttaatgtattccaacatttgaatttggcttatttttgccacagagaaaagttacttagacttctgaagccaataacagattactggggctcctgctgaaatacttgagtgaattattattatcttcttttattagccacggactttacgttgaaggctttcgattgcccggaaacagaatacccagttaaaattgtgaatactccacaaggttgcctgtggtataagaaagacaacaaattcaaaatccccaaaggtaaaatgttgccctcctgttacttccctgctgaattccagtgttctctttagatgctctgtttcacatgtgattatctacttgctattttgatcttcctttgtggaggaggctggggctgggtgcctctatcagccaccttgatgccctctcaccctccctaaaaggagtaaaataagtaaaacaaatatttctccactttgctgtaacttgcttcccctgtgtatatcacctacttctctttccttttccccttccgtttgaagactttttctaggcttatctaccagatttatactgtcctcctatgctgtcacagaaatccttatggacactccagtgtccaggaaatgaaaatttaaggctagaatgaaatcgtttttagatttttttctttcagtt

SEQ ID NO: 53733 - DNA, 1049 bp, Homo sapiens
aattctgtttagtccttattgtagctggaggattactgaaggaggccctatcttggcagtgttttactgattcctggatatgaagtgatacaaaacatagctgttaggagcatagtccttggtagcatgtacaaatttagttagaactccacttttgccacttctagctgtattattctgtacaagttacataatctttaacctgagcaaattacttaaccatcacccaaagctgactgttattttgtgtaaataagtatatcttaggattgtttttaggaataaatgaaataatgtatgttaaatacttcctggctcacagtagaagcttagtagtaaaggatagctatttttactgctaatgctgttaatatgtaggatttaagataaacactgtttaaagcattatcaagaatatacttgatatttgtcaactatacctcaataaagtaggaaaaaagtttttgaaacactgttgagactttgtaaattagggtgttcatgaactgtaggtatttttatgagcatagatcttggaggtgcctaacaatgtgatttttgcctttttaacagagatgtattaggttaaaattgtgtgtatctctttcccctcttcccactttactaggtcattggtgaagccttgaatcagctagttcctcaaaaagcaaatcttgttttactgtctggtgctaatgagggaaaatgtgacctcaaggagaaatggtttggaactcaatatagtatagaaggtaaaatattttaacaattgtcttacatttaggtatatttaacttacctggaaatgtttattctttaataatttaatggttctagagggggaaaaagtataattttttaaaaagttcactttgaaatgaaaattacttatactactgcacaggaagttattttctgctatgtttatatttactaactagtgaaaaaattctgttatcttggtattttgggggcagagttttgacttagttttagaagaatgcttctcaaatgtagtgtgcatttttgtcacttggagatcttactaa

SEQ ID NO: 53734 - DNA, 1009 bp, Homo sapiens
gtagctatggctatattttcttagaattttttttttttggagatagggtcttgctttgttgcccatgctggagtatggtggcacgatctcagctcactgcagcttcaacctcctgggctcaagcatccctcccacctcagctccccaaggagctgacactacaggcgtgtactgccacacctggcttatttttgcattttttgtaaagacagggtttcgccatgttgcccaggctggtctcaagtaatctaaccacctctgtctcccaaatgctgggattacaggcgtgagccactatgtccagcctactgagcatcagattcttaagctgcaattatatctcgttgtatctgttcagaagcttttggttttattgttaataagaaagggagaaagtatttgtatgttgtggtaaatcaaatataataatggagaagttctggtgtgaaataatttacctctttacagacagatccagttgagtatgtggaaaacatgtgtgagaacatgcagctgtacccattgcaggacattctcactggagatcagcttctttttgaatacaagccagaagtaaggaggtttatacgtctaaaacttacttttaggggaagaggagggtgagaaagtacgaagatgtatttaagaaccatgggaacgaagaaaacttagttatatttagtcaggatttttgtttgtttaaacagaagtatcaacagttttgtgaataatttctcatggttcttttacataattaagttttaatataaggagaaaatcaaactcagtacttgttaggtcctattttaataattttcaaatgttgaaacatctactgcaatagatgaagtgattcctaagaattatgtggtttccctgtgaaaaatacgtagttgtttagcttaccttttaattcagttggagagtcaggacaattaaatttttaatcattttgaaaatatttattaaaaaaatgtaaggttcccgaattagaaacatatgacttagg

SEQ ID NO: 53735 - DNA, 1525 bp, Homo sapiens
tcaaaggctgagatttccacattttacatagaaagcctctatattttgttaatttgaatgtctgtagactgtcaatccaggaacattgattgggttaattttttccccacctgtagatgctgggctcttgcactgtttggtggaaatggtgagacaggatttgagcaaaattctacttattcagtgttcagcatttctattacattgactgatgagggttatgaacatttttatgaggtaaataattcaaattcagttgttttttccttttacgtagatatcactttatgcaaaagactaattggatgttttgttttcaggttgcttacactgtctttcagtatttaaaaatgctgcagaagctaggcccagaaaaaaggtaataaacacttcctggaatgaggccaggagccagtcctggtatatttgaggcttcaggctgccggtagacatgctttagtcttgccttgatggtttttcaggcattttctgctctatttcctttattgactccatatccttatccctctacatgtgattgtatactaaggctttacacatatgtgggcagtccctttattttcacgcttctcttttattgttgatgcttctattgagaattttttaaacttttattctaggttcaggggtatatgtgcaggtttgttatgtaggtaaacttgtgtcacggtggtttgttgtacagattattttgtcacccaggtactaagcctactacccaatagttaccttttctgatcctctccctcctcccgcccttctccctcaagtaggcagaaattttaatgtatcttctaattatagttttctccttcacagaatttttgaagagattcggaaaattgaggataatgaatttcattaccaagaacaggtactggaagtcaaattctttttgcatgttatctgtgactgagttgaagctggtgtagacattgttcctctttttgaaagtgtcggtggagttttaattctgtcattctgtgtcatgtgagtctccaggtggccttgaagctatctgaaaattaactattgggtttttgagtatttatattgagtaagataaggcagtgagaggattaagcagatgacacagatgatgttgtgtggtaatcatttatctacatagtcatccatctatcccttcaataaacattcatggagacttgttatggtatttaatattttgggaattcaaatattgtgaagacattctataaggtaatttatatttaccatgtataatgttagaaacattgtgctttggaattcaggggaaggagagcattttccttgattgaaataggctcacaggctgggcactgtggctcatgcctgtaatccaagcattttgggaggtcgagcaggcaggttgcttgagcccaggcatctagtaaaggactgggcagtgtggtgttttgggaagcgtatgggatatgttatgaggtcagagttctgatgtccgctctgcctgtcgtttactcactgtgtgaccttaggcaag

SEQ ID NO: 53736 - DNA, 1046 bp, Homo sapiens
catgatttacttaaaggaaaaactaaaactagaaccaagattttctgaccctctgaacaacacatttcattttaccacagaacccaatgtggtaccaaaagcttttacagacagtaattcatacctatattaggttctagactgataaggaatctacatttcatattgggtgaagcaaaaagatttatcatgagagcagataagtttggtgtccaagagaaaaagtagtgcccttaaattttgggatgattgtactcttcagtaatctcaaatgaaagagttaattttactatattttctgtttttatcttcctgctactaaattaattataatttcatgtttagtggacatatgtgagaataagtttgtgattatattttcaattattgtagccttagaggtaagattttctggtgtatttataccttttgtttttttcttctgaccattaaatttttttaaaagggtgaagccacttcattatatatcctggctggttggacatgaaggcaaaggcagcattctttctttccttaggaaaaagcaagtattcaattaataagtattttcagtatagcaatctctgaaaaatagtagacaataagtattatataatgcattcttttactttagctgccaggaagcctagaataaaatttaatgcttaattatagttattttaataacttacattattttaatggccatattatatttgtgtatttccttgtaagccaccttttagcccattgttggaagttatttgtacacaaaattttaaaaaatcataaatgaaattaatagattccagaattacataaaagaattagctctaatcaagaatttatatttgactgaatggtaaagaaatcaattatttaaatgccatggatctccaggctttcctaacccccaaggctagactttaatgaaaacttcattgggtaggtaaatcatagttaataggtgggactgcaaatggtatatgcagccatgttagcagaatgtttcctaagcattaaagcacctgtttaagtcacctata

SEQ ID NO: 53737 - DNA, 1032 bp, Homo sapiens
tcgcttgaacccaggaggtggaggttgccatgagctaagatcgtgctattgcactccagcctgggcgacaagagcgaaactccgtctttaaaaaaaaaaaaaaaaaaagaattaggcaaaaatattattaaaataattagaaagaacctggattgaatactgctagactaattattaagcaaggaagcttagggagttattgtctgtttttttaaggttttcccagagattaattccttggatattaaaatatacttcagaattgtttcttatgcatttttgtcttattaatattaatacattattgcacactggttcaatattcttgagtcccttgggttatttcattaatcatgtatggtagcaaaatatgcattgatgatgtagaagacttttaacaaagttaacttagttatatctataatttttttcattcttttataggaaatgctgagacgctcaagcatgagccaagaaagaataatattgatacacatgctagattgagagaattctggatgcgttactactcttctcattacatgactttagtggttcaatccaaaggtaactattaattatggctcttagagttaccttgaagtagcgctttcttaggatttgtttgcctgtatcagtgttgtagtgtactattaattactttagtgcttgaccttaatacaaagtaaaggaaatcagaacttggagatgtcacgtagctagtggcaaagctcagggaaacacaagatgatgagattctcaggcaaatttttttctcttacagaaataggtcttatctgtaagataagatatgtaggctggtctgtgaatgtactaatattctaataggtcatgaattgatcttttaagccaccttcagctgcaattgtatctgtggttttacatttactctatatcgattacaaactcttacagggcaaagtgttggtttgttcattcttacataaggtcctgtaaaaatggcatgattaattgagattgacatggtgacaatttaagaattatcttaaa

SEQ ID NO: 53738 - DNA, 1034 bp, Homo sapiens
tcctttttttgtcttttaacttactgtaattatgccccaatagttcgggtgcagtggctcacgcctataatcccagcactttgagaggctgaggtgggaggattgtttgagtccaggagtttgagaccagcctgggcctcatagcaagacccctgtcttaaaaaaaaaaaaaaaaaaaagtcccaatcattttaagtgcagtttggtgtacctcttggccatcaattttgttaaaaactctgattttcccaaagtattgggagaatatatactgataagtaatatatgctgtatatcttcaattagaagtgaagaactaaaaagcctctttaaaatttagttatactttttaatagctaccgattttatctttttttatcacttactatttttgttagatgttttcctaaaatgttatcttattctatcttaacaaaattttctaagttacatgttgacaggtttcacatctagtaactgagtcactcaacacaaagcttttaattgcttagagatcttcagagatatctatctagatatgttacttccgcagatttccaaaatctagtaattcagggaaaaaacttggttcagaattatgaaatgctgacatgaaatgatatttgggtgggctgtccagtccctcttccctttttttctgtctgtttctgctttttttccttaggtctgcacctgttcagcatttggcaggatggcaagcggaggagcagcagggtgaaactgacacagttctggtgagtttcactttgctgctcctcctgattctcagggaaagaattttgttactcctattggaaaacatccatctccaaatgaatccttaagataagatgcgaatattattcctttagggttgactcaactatttgtatgtgttctaattactccagtctgcagcggctctttgtgttggagttgggagtttcgctgatccagatgacctgccggggctggcacactttttggagcacagtaagaatttgtaaaatatcattcctggtgtgtttttttcc

SEQ ID NO: 53739 - DNA, 1040 bp, Homo sapiens
aagactccacctccaaataccattacattggggattaggcttcaacatgtaaatttggaggtggggacacagacattcagtctataggaatatgattaacatatctctttctatctcattttagggctactcagatcaagacctactcctgggacaatgcacaagttattctggtggggaacaagtgtgacatggaggaagagagggttgttcccactgagaagggccagctccttgcagagcagcttggtatgtacatgacacatgtatgtgcatgtgtgcatttgtacacatgctcatgagagtggggtaaacagggtacgagtgtgtttgtatttatgacattagtgttgtgattgtgaattatgtacctatgtgatctgtgtgtattgttttatatttgtatgaggtacatatgggctttgtgctgtgagttttagataattcatcatttttgatatgtatatattttgttatattgaatgtgtaaataaattttaaatttataaactctttttttttaccagttccttccacaaaggacttgagatatcttataaaaatggtcacaatacaacaataaaaataaataagtaagtgagaaaattggagcaaagggaaagcaagggtgagggaaaaataagaggaagctagggtaagtattaagttcttggacacctgcaagagttggggccaaaatgttgtctttgagcttcctagcaacctttgccaagagggaaacataatcagctacatggtttagagtgtcctagtataaaaacaaacccattattccagagaagcactactcttcatcatcaactgtagagcagactctgtatgctgaatgtgaccatgtcttgaatatcaaacatccttccagcactgagtatttatatgctgttcttacagtttatctcaatgcaaattcatgcttctcaccaaaacacaattcacaacaaaagtaatagtatgaaggaacaaaactatgtggtttgagtatgtagctcatcggtgtcctgactttttccaagcttaac

SEQ ID NO: 53740 - DNA, 1745 bp, Homo sapiens
atggtttggctttgcaagattcatagactctggctcaacccagcttctggcctgccattatataggggtgctttgtagaaccaccattcaggagcctatactgaaatagctgtcccccttgagtctaaatccataagcaggatgccccaagacagacaagaagtttcatctcgagtctacttaaggccctccttccaggtttctctctctctttttttttttttttttttttggcctgagaacttggcttcatccatgtatagttgatactggaaatgacgacccccttcagtagagacacccccgccccagcacacacacccctcagtgtaatctgtaacctccacaggaagtaaaataagtgcaacattcatccaaaagatacaatggggacggtaggaaggtgtttcctcttccctgggggtgaagtgaacatctacagtctaggacaggggatcagctctaatcctagagggtaagccaaaataactgctaagattttggtatgacttcgtagttgataaagcacttttattatccattctcccatttaacttttataatactgtgtgaagtgagttacattatttcattttataaatgaggaaacaaattcaaagagataaatgacttgccagggccaaaatccagagctagatcttgagtccagatcttgtactcctctcatatttcttctgaaacatttaaaagtgtacattggttgtcaaatgtcaaacattacttacttcatacttttttcctccaatctttatttcacagttgttcaggggatgaaggaagctcaggaaaggctgacgggtgatgccttcagaaagaaacatcttgaagatgaattgtaacatgaatgtgccccttctttcatcagagttagtgttctggaaggaaagcagcagggaagggaatattgaggaatcatctagaacaattaagccgaccaggaaacctcattcctacctacactggaaggagcgctctcactgtggaagagttctgctaacagaagctggtctgcatgtttgtggatccagcggagagtggcagactttcttctccttttccctctcacctaaatgtcaacttgtcattgaatgtaaagaatgaaaccttctgacacaaaacttgagccacttggatgtttactcctcgcacttaagtatttgagtcttttcccatttcctcccactttactcaccttagtggtgaaaggagactagtagcatcttttctacaacgttaaaattgcagaagtagcttatcattaaaaaacaacaacaacaacaataacaataaatcctaagtgtaaatcagttattctaccccctaccaaggatatcagcctgttttttcccttttttctcctgggaataattgtgggcttcttcccaaatttctacagcctctttcctcttctcatgcttgagcttccctgtttgcacgcatgcgtgtgcaggactggctgtgtgcttggactcggctccaggtggaagcatgctttcccttgttactgttggagaaactcaaaccttcaagccctaggtgtagccattttgtcaagtcatcaactgtatttttgtactggcattaacaaaaaaagagataaaatattgtaccattaaactttaataaaactttaaaaggaaatgtgctgtgatggcctttttgttattggaaaaggagggagggatggagatcacttcaggaagaaaactaacctagaggaccta

SEQ ID NO: 53741 - DNA, 1059 bp, Homo sapiens
tgctttgagacagagtctgttctgtcggccaggctggagtgtagtggtgcggtctcagctcactgcaacctctgcctcccaggcttaagcaattctcatatttcagccaccccagtagctgggactacaggcacgtgccaccacgcccagctaatttttgtatttttagtggagacagggttttgttatgttggccaggctggtcttgaatccgtggcctcaagtcatctgcccacttcagcctcccaaagtgctgggattacagacatgagccactgtgcccagccctccctaactttaaagcccaagtttgcagaatttacagaagtgttagaacttaacaataattttgttacagcaattatctattattattgaacatttgtctaaagattttcccaattgaaataatactacagaaatgtcttcacatattaatctttatcattaaatttcaagaagtagaattactagattataatttctttgttttgcttttaagtggactgcccctgatggtgattattcataaatcctggtgtggagcttgcaaaggtaagtgcaaatgctcaatctaaattcaaaactcagatgtgttgttaaatattaacatttaacaaatattggcactgactctggcccagcactactgactgtttaaggaatactaaagaaacatatgacatagatttcctgccttcatgaaatttgcaattatatttggaggggattttagggaagttaaggtgattaagatacagttatgtcacgtatgggattaagtgctaaaatgtcaaatgaacaatacatgttagaggaagctgaaatgtacggacagagacatgagaaggaagtaggacccaaattagaacccaagttatctgactctgtggcatgtgttctttctgctataccaccttgccacttccccagacaggctttttcttttatttagtatgctgcacttaaaatcctagatggaaaaggagtgtaaaaaatagtataaaagaccaggcgcagtggctcatgcctgtaatcccagcactctgggaggctggg

SEQ ID NO: 53742 - DNA, 1583 bp, Homo sapiens
aggccctaacgctgcgctttgaggctcccgattctcggaatcgctgggaccggcctttattcactttggtgggcctagaggagccgttgcccctggcggggatccgctctgccctgtttgagaaccgggccccaccaccccatcagtctacgcagtcccagcccctcgcctccggcagctttctgcaccagttggaccaggtcacgagtcaagtactggccggattgatggaagcgcagaagagcgctgtccccggggacttgctcacgcttcctggtaccacagagcacttgcggtttacccggcccttgaccatggcagaactgagtcgccttcgtcgccagtttatttcgtacactaaaatgcatcccaacaatgagaacttgccgcaactggccaacatgtttcttcagtatttgagccagagcctgcactgaccagaggaggtaggggggaagccatggcttctgatctccactccactttatttctctgggaaaaataggctgcaggtctccagagcatatcgatgcagtactgtactagagctgttgtgactgattcactcaaactttcctgcatacccctgtgccaggccttgggtttacagcataagttcagactaaagagaatggagaactattgtggtgcaacctggcaaatccctcagaggacagagctaaggtggacagggattacctagattggatcctacttgggctatcacagagcattgaccattggcttccctcatctgaggcgtgggagagcagactggatagatgagaattgttttaaaacaattgtgaacagaaactgaagatggtacagttctacatctgcacctgcccttttttcataccacaaaagtattttttgagtactgtactgactttttgctagtttctattctgggaccgagttcacagataaatccattggtttgtatccttgagaaactttgtttttgtggaagtaagaaagttatctactagattatttcctctaataaaatcttttaaaatagtctactggaatctctttcacttaatgttccctgtgtaacttcatgtaacattttaggtatacttgtcattgttctgcctttaagtgaagtagtattttgatagttctgagagagtagatgttttgagctactctacagtaattatattatgacaatttccgtaactgttttgcttcattctgcatttcaaggcaaatatcattgtaagcttgtctttcattcttcattgatttcattgaacaaatggtaggtacctactttaacagtggctgtgattttcaaagaccaattagatacagtgtttttgctcttgagatatgtggtgagaagccgggtgtggtggctcatacttgtaatcccagcactttgggagtccaaaatcgaggtcaggagttcgagaccagcctggccaacgtggcaaaacctcgtctctattaacagtacaaaaattagttgggcgtgatggtgtgcctgtaatcccagctactctggaggctgaggcacgagaatcgcttgaacctgggaggtggaggttgcagtgagctgagatcgcacc

SEQ ID NO: 53743 - DNA, 1073 bp, Homo sapiens
ttattgtcttgcttttacagatgaaggaggaaaataagaaagaaattgggacttggagagcttacttcactcacaagaattcacacacgtaataggaagtggagtcatggacctaggtctttctgaatctaaagctgtattgctgaatcaccttcaattggttatgatttgttatgacctgctttatgtttactctgtgggaaattctcgttcattcttacagtattattagcatattccgtgatagtttacaaagcatttaacgtcatttttaaatttagcctcctttgaaactgtgaattaggtggtggtgtctccattttgcaggtatgaaaactgaggcttgaggtatggtcccatacacctagaaggtggtggagctgggacttgaacaccaagctcttgacagaagaaaaccttcttagtgggtatcttgtgaacatgcacacttccttcttgggactgtgccctttgttcattatgtgaatgcttataaagttctttccttccaggttttggagatcatattcattggaggacactggaagatgggaagaaagaagcagctgccaggtacaagacatggttttaggtcatttatggtggtaaaacacttttcagctatcaacttaacgttaatttcaggtgaagggctataccaaggcagagcaagaactgaatagttgcctaattacaacaacagcaataataatggctaacatttatagttgagccttgaacaacatgggttttttttctttttttttttttctttttgagatggagtctcactctctcgcccaggctggagtgcagtggcacgatctcggctcactgcaagctccacctcctgggctcacgccattctcctgcctcagcctcccgagtagctgggactacaggcacccgccaccacgcctggctaatttttttgtatttttagtagagacggggtttcaccgtgttagccaggatggtctcaatctcctgatctcatgatccacccgcctcggcctcccaaagtgctgggattacaggcgtgagccaccgcgcccggcctttttttttctttt

SEQ ID NO: 53744 - DNA, 1594 bp, Homo sapiens
cacagatttgactttctttttttttttttgagacagagtcttgctctgtcacccaggctggagtgtggtggcgtgatctcaactcactgtaaactctgcctgccaggttcaagcaattctcctacttcagcctcccaagtagctgggactattggcttgcaccacggcacctggctaacttttttgtattgtagtagagacagggtttcaccatgttgcccaggatggtctcgaactcctgagctcaggcaatccatccacgtcggcctcccaaagtgctaggattacagacatgagccaccacacctggccagatttgactatttattttgcatgctgcatgcctgtttttgtgattccatgtgttatttctttaaacatttcatgcatagctatttctgtattttgtggctgataattctaatatctgaattcctcagggatcaaaatctgtttgttgcttgtgttcttgtggcgacttcttttctcacatttttggtgatccatgattgtgagctcataatggttgttcttcttcattggctatcctggaagcctaaagtggagaatcttttcctccagaaagttttggcatttgattcatctgaaaaccagggggtaccactcacgtggaatcactttagtctcttttgagggttgtgttaatgtgggagtttcagattcatctccattttgccacatcataatggacgcttgcgttcagggcagcctcacttgcttgttgctcataggttttagcttgctttgtgtttatggagggttctgtcattactgagtctagtgagcacattctgaaagtccattttatctaggatttcattgttttgtaggtgtatatcccttcagactgtctggttgggcatcttgccaaagcaggattcagttgcctgagtttagatattgaccaatagagtgatggtgatcatgttagacaccttgcagttctcctgggcatcctctcaatttcattctcaatcactcactcttcagagtcaaatcttgagccttaggcaagtgacagcatcccatgctgttgggaatgaaaagtgaggatggttagtttcgatactgcctgcatgtgctcatctggatgaccttttgtttccctgtggtagcactgatgaaaattagatttgaatttatttctgagaaagaaaaatctgaaagatgagtgtagtaaaccagaatggcacacgattgcaatttaaatctcagcttggccatttagcagttatgtgaccagtacaggtgatgtaacttctctgagcctcagaagtctcaatcgtatagaataacaaaagctactacttactgatcatttataatatgctaagcactatgctaagttttttgcatatatttcttatttaatattcagtaaccttatgagatataattattttatgcctcttttaaagatgagaaaacaagcatacagagattaagtaaaactgggttattaataaggccaaatttaaatgagataacacatgtggtatgtcaggcacatataaggtggtcagtaaacagcagctagcattatgatcactaataatttttggatataaaattc

SEQ ID NO: 53745 - DNA, 1087 bp, Homo sapiens
gcaggaacctaacaatgaaatccagttgtccagtcttgatttgtggaggggtaaggagaatccgaggccagtgggcaatccgcccactgttgggagcgactgacctcacgaatcaataatttgcttttgactaggaagtgcagcggttcttggggggaggggctggactgggtggcggacgcgaggagcaacggttctcccgaacctctcccccgcccctactatcttggcctacattttcccgctccgtcccgggacctggacacccagaatccacgaaaagcaactcgcgctcgagaacagctctcgtacccttctacgtgatctgcacctttaagctcactccatcccaaaccggaccccggaggcaccacccacatccgtctaacatcacttccttcagagtttgaaaaaaaaaaatctgggaagtagaggtgttgtgctgagcggcgctcggcgaactgtgtggaccgtctgctgggactccggccctgcgtccgctcagccccgtggccccgcgcacctactgccatggagacgcggcctcgtctcggggccacctgtttgctgggcttcagtttcctgctcctcgtcatctcttctgatggacataatgggcttggaaagggtcagaccgcgttcttatcttctctttactgatctttactatactgatcccagtataatctcttcttgccctagcaccgttcccctcccattctaactcttaggccactccagatttctttttatcttccccaaccgctcctggagtttgaagatttcttggggtagagagtagcgggtctggggaatggagaagttgtacttgaggcctctctaaattattggattggggggaaggaatggcccgtaaattaaggaaagcatgttaagagcccagcatagtgcctagcacttgggaggtcctgaggaacggtcaccttcccacctgggagaaatagagccgttggggacctgcatatgcagaggaccctgttctgggtctgaagatttctctcgttacttcttccgcgaagagctaggttactgccacttgcttgcctttgggaaacagcacctgcat

SEQ ID NO: 53746 - DNA, 2095 bp, Homo sapiens
tgttagacggatgtgggtggtgcctccggggtccggtttgggatggagtgagcttaaaggtgcagatcacgtagaagggtacgagagctgttctcgagcgcgagttgcttttcgtggattctgggtgtccaggtcccgggacggagcgggaaaatgtaggccaagatagtaggggcgggggagaggttcgggagaaccgttgctcctcgcgtccgccacccagtccagcccctccccccaagaaccgctgcacttcctagtcaaaagcaaattattgattcgtgaggtcagtcgctcccaacagtgggcggattgcccactggcctcggattctccttacccctccacaaatcaagactggacaactggatttcattgttaggttcctgcgagggtctctgaggagacctggcaagcctgttctgcggtgcgtgggctcgtgccgtgcagacatgcactttcccgctggagaagctctgtaccttatttttccttgcaaccgcaaatcttctactcagggatgatgcaaccaactgatgcaagctccaagaaaaccaaacttgggacctcttattgcaaaactgacttaggtggacttaggacaccaggatataagtcactgcaggctaaagtgtaaagcttctggttatttttcttgtagcttgaggatttcttcccaatttttccccttcgctgtataacaaacaggtgaaaatgtccggtctttttcttcctggtactagttgagtcctaaagtccgtacttaatgcatagcgaaaaagcgacctaacaaaagtacacacccaaataaaaacataccgaccacccttttattaggttccctaaaattgtaggcagggacacaacagaacgctcgggagactgcaagccccaggatgccgcgcggccacctgcacctgccgccactagcactaagagggatgcgcaaagcaggcggggcgttggagttcagatgttcgctcccgggataggctgccccggagagggagaggcggggtcggctgtatcacgtggatctgctcccgccgccgccgccgccgccgtcgtctttctctgtctcggctgaggcagccatctttctcttgccgcgtgctggtgttggaggaccctccctgcttcaggtgagacccccggcggtcccgccacttcacggccataggccgctgcgcacggtctccccccgccctccccttccgacacccgccaaccgctcaggctgccacttccgccgtggtgcggcgagcgggggcggaggcggctggcttggcctgtcggttaccggcggcgcagctgggggtcggcacctgtgggaaggtccccagcaccaccgccccctgtgggagcgagcgggcccgccctgttgccgcccagaccctgtcccaggaggcaggtggacgcccctcctctgttccattactccttgctcacaacagcagtgttgtgtgctttgagctttatacaggctctctgttgtcatctcatttgatgctcccagtctacagatagggaagctgaggttaccacttcccgcccttgagtccagggaaccgaactcagttacagcactcttcaccttgtaatggcagtgtttgtttacaagtcggcgtcccttgcccatctttataacccccctcccactgcctgctgaccgacaggctcagtgttgcacagctagtgaatggcggtttcaacttccgttcccacattcttgcagtttaccatagttgtcccctcgggagtggtaacaatagttaccagtaactgtgtatcttctgtgaaccattccctgtggttgataatgttttaaccctcaaaacaaccctgtgaagtacgtggtgttatacctttccaaatgcaggaggaatacaagttcagagaagaaaaatacctttcccaactggtagaaccttggtctttctgattccaaagcctgtgcttgtcttagagaaaccctacataataaaaagtcaggactcaaggttgcaattatttttatctctgtgtaaacatgatgtatgtgaaagtgcctaccacaatgcttctaacttaggcacttaataaatataaacctgtt

SEQ ID NO: 53747 - DNA, 2017 bp, Homo sapiens
ccaaagggtttaccaagtatctaggtctaatgtttttccttagcccctttttttttgcaataaattcctttggctctttgttagttcactacactctcatggccacattcctttgagaaaagtgaatgttggtccttttctgtggatatttgagcataggaattgggatttaagtcatcaaatttaagtctatggcagagctaagattggcacacatttaagacttcttgttttggactctaaacacacttcctcctataaaagtgtttttagctgcttcagcattgtgatacagcgctgagcagagtgaagaatcataaattctaaatattatttgggatctggacattagccttaaagaagagatagatatataggttattgcctaaggatagtgtcaaagtacaaaatggttagtaattatatagtctttgatgctgctttttttaatctctcaaatgaagcaaacagtatttttttcatgtgaatgatgactatacagggtttagagaattggccaaagaagatttgataacaacctagtcccttattccctccctcacatctcagtaatgatttgttgatctgcagaacaagtaaaacaagacttttaatttggcttttttttttttttgagacggagtttcgctcttgttgctcaggctggagtgcaatggcatgatcttggctcaccgcaacctccgcctcccgggttcaggcgattctcctgcctcagccttctgagtagctgggattacaggcatgtgccaccacgcccggctaattttgtatttttagtaaagacaggtttctccatgttggtcaggctggcctcgaactcccgacctcaggtgatccatccgcctcggcctcccaaagtgctgggattacaggcgtgagccaccgtgccgggcctgaatttggcttttctttgtttatgtaatgtggaatgtgatgacccattataaacttaagaatgtttttttcttagtgggattatcactgaccagactagattcatgactataattttagaatcttcaaaatcaagattaactttaaaaagcttgttttaggagtctcctctctgcccccccccaacatttattactgtagcaaagatatgtttttgttaaattgtgcaatgaagcattttaccctgtatgcaagaatgtcttgacaagtataacatactatatcagtgcagggtattgaatgaactctggagagtgctgcagaagcaccaaatgtctgaaaacctggttctctttccccattattaacataccatctgaccttgaatagaggacatgactacttgatatcttgacagctagacagccttttgttgaatttcttctttgttcagcttttttttccttttgtcatctttatggtttataagaaatacagaatgtgatttgggaggaaaaaaatctacttgaagattttgctaataacatttggtaacagctctctgctgtaaaaatctttgggggaaaaaaactggcttgcctacagagatttcataattggttaggcttaactgaatgccaaaggattgaatcatgttttaaggagggatctttgaataggtgactttgaatcccattctactttctgtttgtatatttgattccctcatggtaatttaattttgatttttaaaaatatctggtttatgaagctagaacaagttattaatgtttattaagaatatagacagtattaatatggtcatggtgttgatgcatactacaagctcagtgaaccagaaggtactgttgcataaacagtttgttaatttcggcaaaagagtgactttaacaaatctatttttccccccctagatttaccaacagcatgaatcaagaaaagttagccaaacttcaggctcaggtccggatagggggcaaggtgagtgtggcataagaaaaattgataggagaatgtatgattaccagatagtgttattatttcggatttgtggtcattgaaaatctaaaatcttttcaat

SEQ ID NO: 53748 - DNA, 1023 bp, Homo sapiens
gatttggtcttgatttgaaaaatatagtcctaccatatcttttgttcttttcccattctaaaattatgtgattctaggctaaatgcagagcaacatcccatttcacatccactgtcatccttctcgagcccagatttcacccactttaacatttaactttttaacaaaactgtaattatcttcaaaactatataatttatcttttctgaagttaacataactcacagtgctgtgtttttagaacagctgggttgaatgcttgtgtgtgatataattaatagaaccctaagtgtaatagtgagagagggaagggtatagaatttaaatagtgatttttgtcagaaaaacctggggaaattatttgtgggtttagttacaattttccagggatttgcctttattttctctgtgttccaggtcttgcctgaaatttagaagcccctttcttgcccttcctttctggtgctatcaatggtggtaatcacctctgaggaagaaaagccctcttcccactgtccatggagaacactcagcatctatgcttgattttgacagggcagattttggatgaatcatgaaatgcttctaaagtagccaagagttaactcttcctaacctttttatatagtaagcatgttaccccacaaggtaacttacccaggggaatcaactacatagtggaatcacgttattcacacatttaacttacacaaattcaactctactgaaaaaaacatgaagtacatgagtgagagagaaaaataacaatcttaagtagcacatgttaaaccttccatttcagtaagtcccaggcaatggatgaaatcaaatctgaaatagttcatattggtgaaagttatggaaagaatgtgaggatgatttttaaaggtttcctagttgataaagcatgttcaggtcactaggtgagtgggtgggacaatttctttgacctttacaggggttattaaagattgttgagaagctacccttaagaattagaggaactggctgggtgtggtggct

SEQ ID NO: 53749 - DNA, 1024 bp, Homo sapiens
aagaactagcaaaatcccttacaaagaatggcatgattagaacaagttgaaatttttataaatgtactaagtgcttgaaggaatgaaacacctggttacgtttctgagtgttctttatggatttttagtggttgtttttaccatatactatttcccctttgtaaccagtcccctaagtaagatgctaccctgccaagtggaaattgcactgattttgtttgacagtataaattgagtaagataatgagtaatttcattaagaagctggtttttggctgatacttccattttttaaaaaaacatggtcatgtacttccttctcttagaagtctttgaatttaaaatctagattctataatgaattgaatatttcttgtccatcctagtaatttgtgccatctacaccattttactttattactatgatctttttccacgaatgtccgttgcttggccagttactaccttgggattacataactaccaagtaaagaaccataattggctgaattgctttttaaaaatatattgttttagtgtacctagcatgtgaagtacatttttcttctgtgatcatacaggtgaacatgattaaagatgatgggacagttattcatttcaacaatcccaaagtccaagcttccctttctgctaatacctttgcaattactggtcatgcagaagccaaaccaatcacagaaatgcttcctggaatattaagtcagcttggtgctgacagtttaacaagccttaggaagttagctgaacagttcccacggcaaggtaggtatttcaatttagtaaatctttctctccccaccttacttaaagaacctaatcatttaaaaggtgtcccatcttaatttggatttgcctgtatgtaattattttactttctataaagttatttctatgcttcataaaattttgagtttgtttaatgattatgtagtgtgacatatagaatattcagaaacatggctgggcgtggtggctcatgcctgtattctcagcactttgggag

SEQ ID NO: 53750 - DNA, 1016 bp, Homo sapiens
tttaagcatcctgtttatctcctttcagtcattgcatagataacttttaggtttgtgttgattgtaagctcatgaatttaaattgattcacaataatgtggataggatctaatgaaaaacaacgtaagcacccaccttagaacctagaatcagaaattgtcacacaaagctctgctgcctggatttattaaattgaaatcactgtgattataaatttgcatagctattgttataacatttctgtatgaattataattgacatatgaaaatgctattcacctcagtaatttgcatagacaaaagatgaacatttccttaggattactgtcctaagcaaataattaaatcattgttagtaaaatgccaccagttcatttctgcctccttatgttttcaggctaattctggttgtactaattttattttttcgggggttagaagttaggagttccatttacctctttttccttttttgtattctttgattcatatactttgtttttctttttcagatcttgtagaaaattttgatgaggcatcaaagaatgaagctaactaaaagtttggtttttggaagctggcatggactagatttaacaaatcagctatgtggttccaaagttttacagacatggagaacatcacctgttactagttcagtaatataaatattttgtatattaataatgctgtttgttcagcatttttcggtcatttgattttgcattttgcacttcctcccaggatatttttttggtcaaaatatgaagtattggtgcagtttgagggtgttttggtttttgattcctggtttttttgttttttgtttggggtatttttggtgtatgtatgtttatgtatgtgtgtgggtatgtgtgtatacagtggagagcaaattggaaaacagttctatttatcctcctccctccccagtagaaataaaaaaaatctttacatttgttacttttcttttccccccgtaagacacagaattaatggaaagtgagtatcttgga

SEQ ID NO: 53751 - DNA, 1059 bp, Homo sapiens
catcttcaactttttatttctccctgatgttacagtttggtagatttcaaactggaatagctagcatgtgcttgctaaataattttatgccagccttatcctgtatcctagctgttcttaacagcaggtacaaaaatgcctgtttttcagcaaggttgaaattgggaatgtccttttgaatcagaagaaaataggccatagactcatctcccagcacaaatgggcattctatgaaatggtactggccctaggaggatttcctcaaccactctcctactcttggccttgaacctacctctgggttggatcttactattgtagctgctcactataccctcctgcatgcttagaataatgctttgaggggagcactggtaaaacacagtatttatttttttacctcctttaagaggacttggaggtaagttgcattcattcactcaagtttccctcttgctgtctaatagaagcttactttttgctatatcagcatttgttacagccaatatttaaggacaaaatttagaaaatatatcatttcctggcccatcatcaaactaatacagcttaaccttgcagctaccaacttttgtgtcaagctagatatctttatttgatatctaaggtgcaagaccaacaatatattaagagatctgtagacatgaaggcaaagctcttgtattttttttcatccaaacacctcaatttattttataaattcgttcatttttcctgttatgttttatataatatatggactaaacaaaataaaataacagtgcaaaagaggagaatatttcctcttgtgcttttcttgatgttgtgtacagaatttccttttatattattcctctaccctccacctgtaaatgaatgttagtgcagtaattgtttgaaataatgcctcatccagtgttaggtcagtagctccacagtctacacagtccagaattctttctctaattgtcccaaagggggacattgtggaggcagagttagggggaaccacttcaagtggttagggacagataaataataggcagtatagcacatgaaaga

SEQ ID NO: 53752 - DNA, 1094 bp, Homo sapiens
aaatactgtgccattttatataagggatttgagcatccacagattgtggtatcctgtgggttcctggaaccagtcctccacagatacagagagacaactgtatataataatcattggaaaagatgtagttgcaggcactgaatagaaatagttcatatatttagttttcaaaaaactctcaatttattaaatttacttaagaactgttttcagaacatagatttttccttataaactacagtaggctagaactagattttatagcctgccagtcttttcttataaccttggacaagtttgttaccctctttaagtctcaattttcttttctataaaatgcaactgataatagtcaccttacaggattattgtaagtattaaatgatataatgggtaaatcagagctatagttcagtcccatgagtcctggtaaatccggactctggaattggaaaatatatttctctgagttttgaaaaaaagaggttgaaagattgttaattatttatgtagtttactattaataagtaaaatcagcataatctaattttgaagtattagagattgctaaattaaggaggaaccaaggtgtcagtagaattagcatttagttatgtagtagaataccttatattttataatggtaaaatttatttaataaaataatttgaaaagtgctgtttttacaggttgagcatccctaatccaaaagtctgaaattcgaaatgctcaaaggtccaaaactttttgagcactgacatgatctcacaagtggaaaaattccacgcctgatctcatgtgatgggtcacaatcaaaatggtcaaaactttgtttcatgtacaaaattattaaaaatagtgtataaagttacctttaggctatgcgtataagtatacatgaaacaaatgaattttgtgtttagacttgcgtcagaattctaatctgtcccaaatgcttctggttccaagtattttagataagggatactcaacgcataaagtattttctattttacaaattaattaatacttatatttttcttttaaattatggtaaatagcccatttacggaactggaaaagttagaacagta

SEQ ID NO: 53753 - DNA, 1129 bp, Homo sapiens
ctcactgcaggctccgccccccggggttcatgccattctcctgcctcagcctcccgagtagctgggactacaggcgcccaccacctcgcccagctaattttttgtatttttagtagagacggggtttcactgtgttagccaggatggtctcgatctcctgacctcgtggtccacccgcctcggcctcccaaagtgctgggattacaggcgtgagccaccacgcccggccacaggagctgtttttctaatagcatggccttcctgcagaactctaggggcctgcattttgattctcttccttgctataaactctacactgcatcttttcccaccattggtacctccaacagcatagggattgcttgcactacagcctggacttgctgcagagttgttgcccctactcaatactagcagcctttcatgtcaaccagtatatgggccacagtggtattcctggatatagaatgtgttacttctagaatctgaaggagcctaccagacattgtgcttccttttttgtagttggggatgcaagatgcagcaatttgtcttttgctttggaggggatgtgttggcatgattgcgaccactggactcttaaaactttgctgaaatggaagatccctgaatattggtagggtttttctttaccctctttggaacacatgtaccccaccaagttcttcagtatgctagccacctcttgctcatcttgcaagatcaacatgtatcactgacgtgatggatctatatgctttgagtccagatctctgcagactattatgatagagtggagttaacatagccccaaagcaaaaccatgaatgcattttattgtttgttccatgtgaaagtgaactgcttctgatcctcttttctgattaggatagaaaggaacttatttgccatataaatggctgcatgctgtgtacccaaggctatatttatctgctacaacaaacatactacatctagcatggcaatgtggtcatggctgctacttgtttgagcttgtggtagatccaactggttcctgcaggggctagacttttgaattacatggatatatatagggactactgcccttgaatctttgagatccttaaaggtgacactcatcattgcc

SEQ ID NO: 53754 - DNA, 1048 bp, Homo sapiens
taaataataacagcaaatttgtcttctagactgtgtcatcaattattggaggattggaagcatatcttgtatcctacttagctcctcttctttgactctcctgctatttgtgctctgttttaatgccctctgttctttgaagcaacagtagttacatggaaaaaggggtgagtttgcataccgtcacactttggtatgcagtagaagtgccttcttcatatttccattttgtcacacagaatattaaaaagactttactcgagttgagatttaacaaagttaataatttttattgcttcatcagtcaagtgaaactgacgttttagaacaactgagagtgcatggcagtgaagaataagactaccagtatagtttggtattgctgccttgattattgctaaggtgcaagcagttctacccatcattgctattgtgctttcactacagttgtcaacatggtgaaaagggcatacatactaagatgtggattcccgcgagtctgtggactacaatttgagaaccactggagtaatctgaactcatcccatttttagtttgaatgttgcaacctgcactttacctcataagattacctagcctgtttaaaagtttttataaattcaacaacctggttagataaactctattgagtgtttaactgacttaatcattttaaaatgttttaataatacagggcttaatctatatccttcatgatttttcatctgaacactttattgtttgcttatatatactaattctaccctgatgattaaaaaaaaaagttttaggctgggtgcggtagcttatgcctgtaatcccagcgtgaggaggccaaggtaggagcattgcttgagcccaggagttcgagaccagcctagacaacatcttgtcccatctctacaaaaaacaaaaaagtcaggcatggtgacacgcacctgtagtcccagctggaggctgaggtgggaggatcacccgagcctggggaggtcaaggctgcagtagctgtgataatgccactgcactccagcctgggtgacaccagatc

SEQ ID NO: 53755 - DNA, 1048 bp, Homo sapiens
aggattgtttgagctcaggagttcaagaccagtctgggcagcatactgagtctctatctctaagctaaacaaaacaaaaaaagaattgataaaatgttttgccaagtctgatgacgtacaacattttttgtttgtttgcttgggagtggaacctttgggtctgcctccgcattgcagtactatctccccacttgctaacactcatcccaggtttatgcttttcttaagaggtgttcaacaatttaatacctactagttcagctttttcattgaagagggagtaataattataccttacagagtgctttcttttttaattttcattaacaaagggttggaacagatatttttattatcctcatttaagaagagaaaaaaacaggtagaagctaagcaagttttctaatgccacaccatgctaaaagattgtaaattcccatggaaagacttattctgacaaaattatcaatggttagtgtatttttaatgaaattaaaaatgaaattataagcctgggaaatgttattgaggaatgtctaaaattctattgcttagctctgttaagtagctgtagagtattagtccctaattaataaaccaaataagtaagatatgctatttattgagttggaagttttaatatagagtattgctaagcacttttaaatcctttgttaaaaataaaattggttagatgcagaaaaggctcttgatggccgggcacggtggctcacgcctgtaatcccagcacttttggaggccaaggcgggcagatcacaaggtcaagaaatcgagaccatcctggccaacatggtgaaaccccatctctactaaaaatataaaaattagctgggcatggtggtgtttctgtagtcccagctacttgagaggctgagactggagaatcgcttgaacctgggaggcagaggttgcagtgagccgagattgcgccactgcactccagcctggggacagagtgagactccgtctcaaaaaaaaaaaaaaaagcttttgataaaattcaatatcctggttgggtgcagtggct

SEQ ID NO: 53756 - DNA, 1828 bp, Homo sapiens
tagttgggatgatcaatgcagtgctgttgaagtgggagagaagaaatgtggaaacctggcttgtctgccagatgagaagaatgttcttgttgtagccgtcatgcataactgtgataaaaggacattacaaaacgatttacaggattgtaataattataatagtcaatcccttatggatgcttttagctgttcactggataatgaaaacagacaaactgatcaatttagttttagtataaatgagtccactgaaaaagatatgaattcagagaaacaaatggatccattgaatagaccgaaaacagaggggagatctgttaaccatctgtgtcctacttcatctgatagtctagccagtgtctgttccccttcacaattaaaggatgacggaagtataggtagagacccctccatgtctgcgattacaagtttaacggttgattcagtaatctcatcccagggaacagatggatgtcctgctgttaaaaagcaagagaactatataccagatgaggacctcactggcaaaatcagctctcctaggacagatctagggagtccaaattccttttcccacatgagtgaggggattttgatgaaaaaagagccagcagaggagagcaccactgaagaatccctccggtctggtttacctttgcttctcaaaccagacatgcctaatgggtctggaaggaataatgactgtgaacggtgttcagattgccttgtgcctaatgaagttagggctgatgaaaatgaaggttatgaacatgaagaaactcttggcactacagaattccttaatatgacagagcatttctctgaatctcaggacatgactaattggaagttgactaaactaaatgagatgaatgatagccaagtaaacgaagaaaaggaaaagtttctacagattagtcagcctgaggacactaatggtgatagtggaggacagtgtgttggattggcagatgcaggtctagatttaaaaggaacttgcattagtgaaagtgaagaatgtgatttctccactgttatagacacaccagcagcaaattatctatctaatggttgtgattcctatggaatgcaagacccaggtgtttcttttgttccaaagactttaccctccaaagaagattcagtaacagaagaaaaagaaatagaggaaagcaagtcagaatgctactcaaatatttatgaacagagaggaaatgaggccacagaagggagtggactacttttaaacagcactggtgacctaatgaagaaaaattatttacataatttctgtagtcaagttccatcagtgcttgggcaatcttcccccaaggtagtagcaagcctgccatctatcagtgttccttttggtggtgcaagacccaagcaaccttctaatcttaaacttcaaattccaaagccattatcagaccatttacaaaatgactttcctgcaaacagtggaaataatactaaaaataaaaatgatattcttgggaaagcaaaattaggggaaaactcagcaaccaatgtatgcagtccatctttgggaaacatctctaatgtcgatacaaatggggaacatttagaaagttatgaggctgagatctccactagaccatgccttgcattagctccagatagcccagataatgatctcagagctggtcagtttggaatttctgccagaaagccattcaccactctgggtgaggtggctccagtatgggtaccggattctcaggctccaaattgcatgaaatgtgaagccaggtttacattcaccaaaaggaggcatcactgcagagcatgtgggaaggtaagttgc

SEQ ID NO: 53757 - DNA, 1096 bp, Homo sapiens
tcctgaactacattttctttgaaactttagtattgtagtttaataaggttcactgacaatcagtgtttgtcaatattggttcactctctttgcatggcaatcccaagtaaattttgtgtgttcttcccccccccccccccacaggttttctgtgcttcctgctgtagcctgaaatgtaaactgttatacatggacagaaaggaagctagagtgtgtgtaatctgccattcagtgctaatgaatggtaagtattaaaacaggttgatttcatagttattgagacaaaacaagggaattacgatgagaagacttttttccccctgcctttctttacaagttgctcaccttctcaaatgtcataactttaactgaaaatatttagctaaatttccatgttttgaaagtatcttagcatttcagaattcctgtgcctaatttaatgaataaatgctaaagccaggtaagttttgcaggaataatggaagttctttggaaatctggtgcgaggtagttatttgtgttcctataaaataaccagagtgaggtgggaatggggagcttttgatcaccagatgataagatgttaaaactgggctgagattttccttttaagagaagccatctctttctaaggaacaacttaataacttagcatgtgttcttatcaacaccttgtttcattcatcttgttgaagataactattttagcatctaggaccaagtagaaaattgcatttttaaagcccatttatctctttaatgctacttagatttgctatgagaataatggtttagaatctagttgttacgtggtaaaaagaatatggccggggaaagtaaataaaacttacccagtgttcatcttttgctggactggaaatgattttaagggcatattagttaaaaaccctgagtattcttgtaaaaagatacactaaaattgttcaggttatagtattttctctttgaatgcatctttgtacagttactggaacaattactaatagacataaaatgttgaacttgaacaccagtgctacctgtgccaggatagtgtgcctcctggaggctggaacttatctgctctgagacccct

SEQ ID NO: 53758 - DNA, 1048 bp, Homo sapiens
tctgtaatcccagctactccggaggctgaagcaggagaatcgcttcaacctgggaggcggagattgcagtgagccgagattgcaccactgcactccagcctgggtgacagagcgagactccgtctcaaaaaaaatacatatcaatgacataaaagatcaagatgagtcatgacagccatagccatgtctgattctatactggaaggtttactggagggaaaaaatgctacaaagaacatcactgggcagatgccaggttaaagtatcaaatccatgtttgactgaagtagagaactgtcctacagttgtgtaagagaatatccttatttttaggaaataagcatttaggaggaaaggcctatgatgtacgcaatttactctcaaatgcctcaattttttatggagaaggagaaagggagagagaaaccctgacaaatcaaatgggacaaaatgttaataagtgaacaagaggggaatctgggtaaagtgtgcgtggggttttttgtactttcaacttcctagaagtttaaattatttctcaataaaatgtatttttaaattcctccagtatttataactaaaaatgtcctgggtgtattccatcagcattcacagaaatacccagttgaatacctgccatccacacgggcagatctccagcaatcctgaactcacctctgctctccacatgacatttacactgagttgcccttccgaaactggaagagtagattaagcccttgagtcttcgattcacttcaatgaataatctggtaaaaacaaaaatctaagtgtgacttctacttgataaacagctgtgatgtaactgggacaagatcagtgtggaattatcctttttataccaattctgtacaaagagtgcaagaactgatgctttatattttatttcccctctgccctcccatcccacccttggtgatggttgtacccatttgagcatttctgagcacatgaccataagtaaatcttgagagaggagcggaattcttgtctaaacagtaacagaaggggattagctgcaaggata

SEQ ID NO: 53759 - DNA, 1021 bp, Homo sapiens
ggcctgagctcaagtgatccgccatcctctgcctcccaactcctgatctcaagtgatccgccatcctctgcctcccaaactgctaggattacaggtgtgagccaccgcactcagcctcattgatatttttggtgaatgtagccacccccaaccccaccctgtttttttttttttaacagaaaacaactcagtttgatatttcctcatatttagaatcagtttatgtgtttttgcccataatgacttgatatccatctgccccctcattgatagtggtaaattttgatcacttggtcaaggtgtccaacttctctgtatatccccctacctggaacttataaccagtatatgtagactttcagaccatgcaaatctcttgcctatgaaagtgtcccgttaaattagcatgcattgatgtttcttacctgcactgatcttttactatgtttgcaaaatgattttccaattctagcgcattctccagctttacaggttgcacttggtaatctactataagcagaagcccttccttcccaatttattcatttaattttcattatacactcatggactgttgttttgctttgttttgttttgaaacagtgtctcactctgtcacccatgctggagtgcagtggcacaatcttagctcactgcagcctcaaacttctgggctcaagcaaaccccccaccttggcctcccaaagtgctgggattacaggcatgagccaccaagcctggcctttttcagtggttccaattcattattttggtgcacaaatggtctcagctttagctagacaagagacccttcaagctggctcctacatcctggtgatatgctattttttttttttttttttttgagtacttcttttttatttctatcctaacaagatgcttcaggcttatcttgtgcttatcctgccctagccctggaatcagctatttctgcaaggagccctggcttcttttaatgggagtggtattagaaaccaaaatctggtttatccatgatatg

SEQ ID NO: 53760 - DNA, 1928 bp, Homo sapiens
tgctgactctgccacatagagtcatctgcttctctctcttggccatctgtgaagtgagggtttgggtcagtggaaggctgcttcttcaagccaatgtttcttccagaagttgccgtggggattgaggagaaaatgaacagagctctaggatgcttgtctggatttatttattacttttttaataagactcacctaaaaccaccaccacctcctcctccaaatactgggagggtagggttttcatgaatggagattcctgtgttcatgccacaggacatcttagctcctctcacttctttcctgggaatgtagggacctgcctgctccccatctctgtccccttagttaccatttccctctctgtggtcctcacaggtcctggatggaaggaagcccaccggggggaagctggaggtgaaggtgaggctgcgggagcctctgagtggccaggatgtgcagatggtcactgagaactggctggttctggagcccaggggcttgtgaggtgggcagctctctgggccttcagaacctttgccccctccttttactcaactaactactcaactcatatctggagagaaaacctaggagtttctcatctatgagaaagacctaccatgctgggtagggcttatgggctgagtttctgatgttcctcagtagaactgggaagagaaggtaaccttccaaggtttaactatctatctatctatctatcttcaggaaaccctttctaaaatctttgtgttttcactgcagtttagactgacttcttgtgctttgcacccctgtgtagccgatggccagcaccaggagaggagtcaggccgcgactgtgcaggagatgactttcccagctttgctggcttcagaagcctttgtacataagagatgctgctacccaagcaccaaagacctgttaagcatgtgcactactgaccacgactctggtctttcctgttgttggcccctctggggctctacagaaacaggctgggttccaggagcccatctccccgctgtctccccctgccccgagtctggaagagggcaaggacacttccattcctctgtaccatggagtcctgcagccccttaacccctgcgtggcaactgtgtacagcttacccctgcctccagttgcaccacttctagatgtgcctttaaaagatctaactatgggatgggagaacttgagggtgatcgggaacctcccctgctgagggtggtgtcagggttccgtgactccagtgggccagtggtagcctgtcccagacaactccgtcaccccagctctgcctgtgcctttatccctgacagctgctgcactagccttcctgcttccctaaggacttagtggagggggaaagttgtttttggtactacttggtgggaagtaaggggaaggttggatcttgggtttggtctacccacccaagagaaaagactgttaactggaagaaaaaatatatatataaaattttatgtagacacgtttatttatctaggaaactaagtctaactcattgtagggattttatactcaactatacagagtatccaccaaagtcctaatctaaagtcctgctccctgtcactttttaaaagccagggtagcagtaacatgacaaacggctgctgtggcttcctcttgagagaggacagggaaagcctttcctcttcggctggttatgtggggaacttccttagtttttttccacaagaaattctcctttggctttgtttttctgaatggatggagactatgaaggggtttgtagttgtaagagatttaatattcaaaactgaaatattctgcatttcttagaaataccccatcttcccccaccccctttttgaattattaattcaagatcaacaaagcattcctcaagatcacttttaaaaaaggttagaagtgaagca

SEQ ID NO: 53761 - DNA, 2188 bp, Homo sapiens
tacccatccctgtcagatttgagaagcttgctcaggaccgcaagaaacagctggagatcctgcagctggcccaggctcagggcctcgaccctcccacccaccactttgagttgaagacattccagactgtgaggtaccaaggcctagggaaacaggggctccaggcagggaggggcaggaggctgggagcccaggccagagactgctacccctttagtgaggcttcccaagcctggccccgctgtgggcactggggctgctgaggacgacagggtgcatgctagtggagagcgcacagctgtctgggtgctgtggaaagagctctggaccagaagtcagagatcaaggtctgcataccagctctgccttccctcccgtcaccacccagctgggcagacaggccctggacgaagggaccttgttccactactgtccttcacttttgagcattttctccttcccgcttggctctaggatcttctcagaactcaacagcacagaaatgcatctgatcattgtccggggaatgaacctcccagcccctccaggtaaccctagggccgcccctactccaggaggctcttgcccggacactccaagtgctaggctcctggccactccctctgacttgactcccttttctccttcccaggggtgactcccgatgacctggatgcttttgtgcggtttgagtttcactaccctaactcggtgaggttcaggtagaagtaggatcctctgaaacccgccttgcattccaggaccctgtgctcactttcttcccatccctgggaggtgtggctgcagtgcctgccctgtgtgcctctttgtttatacgctgtcctgacttctccctcctcactgcttaggaccaggctcaaaaaagcaaaacagctgtggtgaagaacacaaactctccaggtgagggccacacgtgggcctctttctcctccctcagagtgtgtgggcagcactggtgtttccagagtgggttcccatctatgcccttacttgatccaccccacttgggagataaaggtgctgttaacatgcttcttctgtagttggagaaacacgcagagaggtacagggacttgcctggggcctcatggcaaggaagtggtagaaatgggatatgaacacaggaattctgtatcccaattccaagtctttcctactttgttacaatctatgactaaaaagagtacaaaaactcacttccaaggccaggaccgcgatgctctaccaccctttggaggcagtaccccaaaatgcaggtggagagattgggggaaggcagccagccctgggcctccatttccacttcctcaggaaatcccgagagccaagcccctccttgctttctccccctttgccagaatttgatcaactcttcaaactaaacatcaaccgaaaccaccggggcttcaagagggtgatccagagcaaaggcatcaagtttgagatcttccacaaagggtgaggctcctatcggtcatgctgccacacgggccgggaggagggaagagcgtttgtcactgctgcccctgcatgggctcagccagcacattcctgccttccctgcccagtccaatcctctgctgcctcttgactccccaggtccttcttcagaagcgacaagctggttggcacagcacacctgaaactggagcggctggagaatgagtgtgagatcagagaaattgtggaggtaggggctggggtgtgggcaagccaaaggggttggtacgacaagagccaatacgcactgaatgccacaccttgttgtaggttttcgtgctcattacttaatttgaaattctccacaagtgtgcttagagtaggtggaatcctcatttcacagatggagaggttcagaaggtctgagaaatctcacagagggacccaggagaaggcagcctccttgtttccatgaactcaatggattccacaggcaaggactatacgaccttgcctctgacaaatgaggaaactcaggtccgagaggaaagggggttctgtaagctcatatggtgtgtccttggcagagctacgaccagctccttactgataacctatgtaggctggggctcttcccactgtagcacacctggccctactgcctgcctggggaagttgttcttatgcgggccctggtctctattggagccactgagggtggttggac

SEQ ID NO: 53762 - DNA, 1039 bp, Homo sapiens
ccacttctcatgcgtctgcctcccctctgtggagccatccatcccagccatgccccagcagagccatgccccagacagggccccgggtagctttgtgcttctctgaggctgctccctgcccctcccatgctgtctctctcccacaggatttccccccatccctggcctggagtccactatgggtgttgaggaggacgcagtggcagcgacattggcagctgcagagaaactggcctctgcagaggattcagccccggctgataaagacgaggacgaggtttggttgagggctcaactccagggctggtggggagaatagcaggtgaggggtaaacccagaccctgttgtccatactaacaagcccaataaggtacatattctttcctccactgtacagagaaaaaacttgcccaaggacacccagctaggaaatagcagaactaggattcaaaccaaggtctttctgaacccagagccccggctccatccccattaccctgcagtctctctcctgctggggaggttagatgtgagagcttctgaggctgcttctagctctcagatcttttaggacccaggaagagaagccacccatctcaggtcacacagcgatgtagtacagtgttaggaagacagcccaagtctgggagccgccatgactatgctagggaacacatcccctcctaacagcctcctgggcacctgcagggtgagcccccagcacaggccccagtggccaagaaacctgcacggcccacagtcccttcatcccagcgcctgcctgagcccagggcctcaagttctaaggagtcaccgagtccatctggtgagttggggacaagcagggtgaagaactgagggcctagagagggcaggtgtggccctaaccagtggccttctcccttcagtgcgggagcagctggcactgctggaggcacggaaactgcagtatcagcgggcagccctgcaggccaagcgcagccaggacctggagcaggccaaagcctatctgcgggtagccaaatggcttgaggctca

SEQ ID NO: 53763 - DNA, 2021 bp, Homo sapiens
aatattgctgagagagagggtcctttactctcaggtcctgttgtgggtatggtcttgaggcccccaagctcctgggctgtgttttgtctccctagacggagctgcaggaggtcttaggtgtggacgaggagactgagcccctggatggtgatgaggtagctgacccaggcggctctgaggaggagaacggcctagaagacactgaacctccagtgcagacagccgtcctgacagcttcagccccagcagctcaggtgggttctggaggagggcccctgtgcctctgatgctcctgtgcgcccagacgtaacacgtgtgtggcctggcctgcacagcaaggctgcagtcaccctttccaggaccctcccccagcagccgccccaagcagaaactgagcacaagaaactcctccgtggcagccagcctcaaaggcctctctgttctcctagactaccccccgggagccatatcctggcttccaccaagtggggctctgtatttgcctctgccatggcctctggcctctccagtgagcctttgcttcctgccttaaggcttttaggctcttctttctcctggagtcccagagctccatcttctagggcagcttccgcagagggagaatggtaggcctagcaggccctggagtggccaggcccttagctgaattgttcataggccggagcatctcaggggctacacgctttgctggaggaacggattcacaactaccgagaggctgcggccagtgccaaggaggcaggcgaagcagccaaagccaggcgctgcgagcgcggcctgaaggtgagtcgggctaggctgggagcagggcaggggagggggctgcatgaaaggcggctggtggagatcgcaccagtggaggggaggtcaccccaccagactttgggggttggggggccacccctggcctgtcttggagcagggtctgggctgagatggctggctgggtttctggaccagttctctccctcagaccttggagtcgcagctagcctctgtgaggagaggcagaaagatcaatgaggatgagatcccacctccagtggccttaggaaagcggcccctggccccccaggaaccagccaacaggagccctgagacagaccctccagctccccctgccttggagtcaggtatctgcagatgcccaaatcctgttctagttcctggggtcatagcccacagcgtgtgtccccagcctgccaccactgttcattaccattggtcacatcctccccaggacatcctcaagccagtgaagtccgtgggcaccttcttctgtgaccctcatgtgctctctggggactgtttgtttccttatagacaacccctcccaacctgagaccagcctccctggcatttctgcccagcccgtttcagacttagacccagacccgcgggccctgctgtcatcccgacagagagagtacaaagtggctgccctcagtgccaagcgggctggagagctagaccgtgcccgagagctcatgaggattgggaaggtatggcatctggctcagggcacccaccctcattttatagataggggaaacaggctcagaaagggagctagactgagattgagtgagattggcctaagtgggggttgtttcagcccaggctcttggggtcccctgtctttcacccacacctgcttttccaacttctgcagagattcggtgctgtcctggaggccctggagaaggggcagcccgtggatctgagtgccatgcccccggcacctgagggtcagtatgtatcttctcaggctgcggtggggttggggaggagtagcaggcctggggctggccaggccctcccacctacacctctactctgggtcccccagatctgaagccccagcaggcttctcaggctcccacagcaccctcagtcattcccccagccgtggagcgagtgcagccagtgatggcccctgacgtcccagcaaccccaggtagggcaggatggtgggactgtggcgtggggacctgcaggca

SEQ ID NO: 53764 - DNA, 1068 bp, Homo sapiens
ttcttctgggcctacatcttgagacttcttagtccatttttactgtctttaaaaaggcaggtaagaaaggaggtggggtaaagggcatagactcaagtcgcaaagagcttgttttaaattctgattgtctcacaagactgtctcagtttcatctgaacattgggataaaaacagaatgtaagctgggtgccgtggatcacgcctgtaatcccagcactttgggaggccgaggtgggtggatcacctgaggtcaggagtttgagaccagcctggccaacatagtgaaaccccatctctactaaaaatacaaaaattagctgggcgtggtggcatgtgcctgtattcccagcttcttgggaggctgaggcaggagaatcgcttagacccgggaggcagaggttgcagtgagccaagatagtgccactgcactctagcctgggcgacagagccagactctgtctcagaaaaaaaaaaaaaaaaggatgtacctctacctagagtagtcatattcatggaaacagaagaatggtgcttaccagaggctggaaggaggggaggaaggggggttaatgtttaatgggtagaaagtttgtttcacaacatgaaaacagttctgtggatggatgatggcgatggtagcaggatattgtgaatgtccttatgccattgaactcacccttaacagtggttaagatggtaaatttcatgttgtatgtgttttaccagagtttaaaaaaataggaccttcttttttttttttttttttgagacggagtctcgctgtgtcgcccaggctggagtgcagtggcgccatcttggctcactgcaagctccatctcccgggttcacgccattctcctgcctcagcctcccgagtagctgggactacaggcgcccgccaccgcgcccggctaattttttgcattttttagtagagacggggtttcaccgtgttagccaggatggtctccatctcctgacctcgtgatccacccgcctcggcctcccaaagtgctgggattacaggcgtgagccaccgcgcctggccaaaaaataggaccttcttct

SEQ ID NO: 53765 - DNA, 1027 bp, Homo sapiens
atgacgtgaacccaggaggcggagcttgcagtgagccgagatcatgccactgcacggtagcctgggcaacagagcaagactccgtctcaaagaaaaaaaaagaatcaaaggtccttaaatgaaatgaaaaaatagttcaaaaactactgccctacaggacaccactggtcattgtcagtaaaggcagtggtagtctaggtatgaaatgtgtaatttgttatatgggacctgggaattgggtttgggggcccaagggtgactttccacctggataatcactgggcagtcaaccaacttattcctctgtcattttggctccccagggtcttaccaggatgtgcttccagccctatacatatagccagctgcagcagatcctaaggtcccggctcaagcatctaaaggcctttgaagatgatgccatccagctggtagccaggaaggtaagtcaccagctgcacccataaatcagtcagcacatctttgctgagtacctgctgggtatgaggccctatgctggtgctctgaggttggagagaaatttagaaagtcgtgtaaaaatatcaaaaaagacaagattatgagaaattccttagccttgttattttatgattagagggccctaaatattgtgggtttatatgcaaactaatatgaattcattcagggagcaagcagttttgcatgatgaaagggacaatatagtcaggtagacaaacctggtttgaattctggctttaacgcttagtaggcatgcagaaagttataggaaagttacttaaaaatttcctgagcctcagttttcttctctgaagaagaatgagagcacttccctcatagggtcattgtgaaaatataacaatatcatgtctattacatgcccagcaaggcacactctccaggctagatatgaggtattagatgcccctctcctccaagtctaataggagaatgctccctgagagttcaccacagactagtctccccggctgctgaggaacaaagtgggttaaatgtctgcctcaag

SEQ ID NO: 53766 - DNA, 1541 bp, Homo sapiens
cgtttaccaccaatggtaggctgcatgtttctgctgtacctgagtctcttccctgtcgggaacaggaattccaagacatctacaattttgtggaaagcaaactccttgaccataccggagggtgagtcatgtgaggcaggcagggtagtttggggaataaggcccctgctagtggaatgccttgggtgttacagttcagccatacaggctttctccagtatcagcagactagaccaaatcgttgctgaagcccaaagcttctgaaacatttgttgccaaagtaatcctatagtaacagaaattttgcctttcagaaagaatgaaactggccttcattgagtaggcagtttgcatatagcattatgcaaactgtggaatgaatgattctatataagcaggtcctactctgaccagcttccaaggatggtccctactgcccccacctccacatttcaagggtctcggtccttccctcagtatacattcccacactcctaactgattataacgtgtagtggctggctgagacctaccccacgggttttcctctcttgctctaggtgcatgtacatctccggtgtccctgggacagggaagactgccactgttcatgaagtgatacgctgcctgcagcaggcagcccaagccaatgatgttcctccctttcaatacattgaggtcaatggcatgaagctgacggagccccaccaagtctatgtgcaaatcttgcaggtaagcagagctgtttaggctttttggaaaatgctgtttcttcgtgacacatgaaaaaggaaagagttacttaattttgcgtgtattgcatgttcatgatataccaggcattgtcctttctgtagaggtagcaagggcaaggaagacagaattcttaccctaagagacttcaaagtctaggagctggataatgattacaagccaggaagccagtacttacccacatggtgaaaactgtgagcttacaggtagcagtgtggcaacatggaaaaggggtccgtggcaggccagaggttaagccttgctctttgtccatgggctgttattttggagcaggtaacatccagttatagaattctgtaatagtgattttaagggggcttctggcccagcctgtgactcatttgcatttcaaactcatataccttctttatcttctctttcggtgccttctcttgtccttccaagtaaaggttaagactagattgggaggcagaatataggataccgaagtcctcaggttaaatgcctccctccatttgcagatttaactttaagcccaagggagtaagacccttacagttcctcacaactgtgtttctcctaatgcagaagctaacaggccaaaaagcaacagccaaccatgcggcagaactgctggcaaagcaattctgcacccgagggtcacctcaggaaaccaccgtcctgcttgtggatgaggtgaggtgcccatgggcggacaggagaagaaacagggctgtacctcaggagcaagtgctggatgggagggaggaaagtcctggctccct

SEQ ID NO: 53767 - DNA, 1646 bp, Homo sapiens
tctaatttaaataaggttaaggcagactttgaactctgggtttgagtcaagcttcaattataactttttagttataattttttgccaactttttagcagaaagaaagttttactcttttcaaagtatatataaaaagactgggagccaatcaggccacttgactatcttctagtgccttttgtacactctggtatccaaaactgcttcccgtgacctcgctgtggtttcttgcagggatgcaaaagaagcaaaagcccagaatgaagcgacctctactccccatcgtatccgcagaaagagttctgtcttgactatgaatcggattaggcagcagcttcggtaagactactccttggcaggcagagaaacattgctgccatctctgatatctataatcttatctcctaatgcctcttatactgtttatttgccaatccattgaaattgaccttttacctagcatgtctggaattatgttaagtttcaaataattgtcttagtctgaaggggcaagaaatacttcctgggcttaggtgactcccatccctaatcatcatgtccagcaagactgttggtgggatggggtgcctaagagcatgaacttggattctgacagatctggatttgaacctgggctttgtcatttaccatctgtgtaaccttgggaaggcaaaattacctttctaagcctgaaattcctcatctacaaaatataataatatacatgtcataaagttgttgaggggtttaatgagataatataaataatgctcctaacagagtgtctcggtagcaagcacccatgtcacctggtcacaggagggaccctgcaatacttgtaatccacactaatgttatagagttcttcttatttagacttgaacactgagtatcaaaaaatatgtccctaccattcaggtttctaggtaatagtaaaagtgaccaagaagagaaagagattctgccagcagcagagatttcagactctagcagtgacgaagaagaggcttccacaccgccccttccaaggagagcacccagaactgtgtccaggaacctgcgatcttccttgaagtcatccttacataccctcacgaaggtgccaaagaagagtgtaaggttcttctaggtttacttcccattgaagcatccctctcttagtttaaaagttacaaatgctgaagtcacagattagtaacagctggaatctgaggacagatctgttatattcaatgctattctttgtggaatattcatggagaaggggacctaagtgaacactaggactgaaaatgaatctagtagagagtgatttttgaggtaagtcccttttacggtacagaatcagatggccaagagctgaacttcctgagggaagtaagtacaagacccactcctctttgcatttcccacggagcactggcagagtgggtatcgcatgtacggccaccgagctgtggtgttagttttgttgtcccacttgatacacctgagaaaccgggagtgctacttacatattggtaacaaatcatgtcacagcaagatggaaggaggagatcaatgaacatcttttctgcttcctgtggaactttagcagaacactgaaaaggtattcagatcaggatcttctcatgttcgaatgtgc

SEQ ID NO: 53768 - DNA, 1042 bp, Homo sapiens
actaggaaaatcactcctaaaatttaggtgagagatgaaaaattattagagctacctgggctggagaaagcaagcctggaatgattaaaaatatagataattcctgttttacatataactcagtggctgaatttggctgtgatgagattgtgggtttgtatattgttaggtaaaaaatttacacattgtgatgatttctcttagacttaggtaaccctcagatgtcccagcagacttcatgtgcctccttggattctccaggaagaataaaacggaaagtggccttctcggagatcacctcaccttctaagagatctcagcctgataaacttcaaaccttgtctccagctctgaaagccccagagaaaaccagagagactggactctcttatactgaggatgacaagaaggcttcacctgaacatcgcataatcctgagaacccgaattgcagcttcgaaaaccatagacattagagaggagagaacacttacccctatcagtgggggacagagatcttcagtggtgccatccgtgattctgaaaccagaaaacatcaaaaagaggtgaccagggacattacccacagagcaaattgaaatccttcacatcacgtgaagtatgtgagtcatagtcaaaaaagttagaacagtagttgaaaaacctatgtcacagaagtattggggagctttcttaaaatacagatttctaggcctcttcccacacctagtgagtcagactccaagcactggccctaggaatctgtatttggaaatgctcttcagatggttccagtataccgagctgttatttggggatcattgctatagaagataacttcccaaacctgcattgctatccagtttgggatttcattagttcctgtggctttttgccacactttaacagtcattttttaaagcagtttttcattgttgttgttgtttcattttatttcaatagtttttggggaacaggtggtcttcggttacatgggtaagttcttaagtggtgatttctgaggttttggtgcacctgtcacc

SEQ ID NO: 53769 - DNA, 1024 bp, Homo sapiens
taaacgaggactgcaccttgagtaaatcagtacaaagagtgctagttgctacagacaaatttgtatgacaggatttcttaataaatcaggtgctaatgagcggctggtttgcaggctgaagtaagtcactggttatgagtttttcctgaagtgacttcaggctccccagcatgggattaggttgtgatgtgaggtgtggttgtatgctgattatgtggttcattgagcgttagggtagagactctcgtctggcatgattatcttaatttatctttgagttaaatgagtgaaggagagaaagctaaaggagtgtgaggcagatgcaaaagttgaggcagcaggatgagtatacgcggagaggcacagggcttggagcatctgggcaggagcacagtggtgggaatagcaggactgtgacaagacctcttcaaggagtattgcgcactctgtaggtaaaatgaggccagatcttagaaggcattgaaaaattagtttaagtaatttggtcttgctacagtgggagccattattggctgttgagcaggcgagcatgtttagataagtttgtggggaaacttggcataggcgaacagaatggactggaaaagaaagcaatggtagggtataagaatatcagctaggaggaatctgtgaaaataacccaggagtgagaggatgcatatttgaactagggtgataataataggaattgagagatgaacaataaacatttttaaaatgaaatgaaaggaataatttatttcactgatgtctttaaagtgattaatgataaaatgagtaaatactcagtaaatattcattattatgtgtttttctagcaatatgctatgccatgtctatgcgtctttagattggaaaggtaacattttaggtacagatgtggacttcaatgtttttaattgtagctctgatggaatactccttggctctcttggggctcatctcttcctacttatctatacttcctaaattcaggtgatacctttagccccaaaggatgtgg

SEQ ID NO: 53770 - DNA, 1662 bp, Homo sapiens
cataaaattttgtatgtaggataatgtcatgtctatttaaggtgagttctatataacttttgatgaaaacgagatgatagatgtttttactatgtctttcccagccctggagatctctgacaatttgacattgttactgggcagcttgacagccttgggaaacatttgttgtgggaagcatttgttgttctttgtcaataactgagaggaattagggttcctaataagacctttggattcattactcagctaaaacaattcattcaacccattttgcctattcttaaatataactgggcgaattggtttcccagtaggagagttggtcagcagaaagaaatcaggattggagagccctctcctttgtgcccaggggatctgaagagcttgacccactttaagttatttcctaatgtgcttctctgttacttcctagagaaatgtgtgtgaaaacagaaggttgttccaccgagattcacatccagattggacagtttgtgttgattgaaggggatgatgatgaaaacccgtatgttgctaaattgcttgagttgttcgaagatggtgagtttgggactggaataataaaccattccttgtcatgaatgattgggaggtggggagattgtggattcttttgttcacagcagtgtgcagggcacattagactgaggtgggatcacgtaagaactagctgcgtcttcttccatctaaaaaatttctttactcaccaaagcagtattgagtaaaacggaactggaaggctcaataatttaactttttcattattttggggagtaagcaaggctattaaggcagaattgggggggatggagagaatggatgaatttgggggaaagggagaaggaaaaaacaggtaatttgtactatcatagagatgtgtcctttagttttggcatgaaggttagtaatatattttgcaagtgctacttcgttacaagtgaagaggtaagttggatttggaaggtgtagcaattggggtttcagtcagggaaaacaaaaacacttaagatattttacccagaggaacttgtgtgttaatgttggaaaggctagaagaaaaggtgacatttaccagagatgagtaagtgcaggaagccacggctgcccctaggctggaggaacaaaagggaaggtggcatcaaccagagcctacaagcccacatcgaaagccttagctgatttgctgaccttctaaccctctgcaaaacaagaggagagcacagaaatgtgggagtggggcacagctccacaaggaggattaggaagatagcaatttgaaactatctaaaactgcctcgttcaagagacagaagaagggcatggtcattaggtaatcctgtggtagtctgtatgcccaagagaaggaactgatagactgagtggataaagatgttttatattactatagtcccccttatccgtggtttcaccttctgcgatttcagttacctgacaacaaccatagtccaaaaatattaaatggaaaattacagaaaaaaacaagtcataagctttaaattgtgtgccattgtgagtaatgtggtgaaatctcacgctgtcccacctgaaatgtgagtcatccctttgtccagtgtatccgtgctgtacagtatgtgtgtgtaggaaaaatcatagcat

SEQ ID NO: 53771 - DNA, 1294 bp, Homo sapiens
ttaggcgaccatcttgaagccggaaacaccgtagtgtaaagggcttccgctccccgcgtcgcctatcgaatcaatgatggcggctgcatgttagcggatgtacgtcatgcgcccctcttaggtgtacggagtgggcggggcgagctagttggtgtcgcaacgaagggacggtctgggggcggggccacgccgattggcgcgaagttttcttttctccttccaccttcttttcatttctagtgagacacacgctttggtcctggctttcggcccgtagttgtagaaggagccctgctggtgcaggttagaggtgccgcatcccccggagctctcgaagtggaggcggtaggaaacggagggcttgcggctagccggaggaagctttggagccgggtgagtgtggcgtccagcgggctgcgagggactcgggggagggcgcatcggaacctctgaaactgaggacgttctctgtagactcagtcattgattcttttagctgacatgtaccaagcgcctgttcagtgccaggcactgttctgaactgttaagagcgttcctctgttccacactccgattcctaaaaggcttcccgcgctgcagggaactgagtttgcaggggggaaggcggaagccaacagcctagaagcaggagcattcctgccctccgcaccctgatgctcagtgatgactttccctccatctgcatttgtaaagcactctacttgtttcgttctttgagctatagtgtaggaaccactacagggaaggcggagcagaggttattaccccattttacggacgtaaattgcgcccagggagggacgtgtcttaggtcgcttttcgtgactaagcagtctgggctcctacccagatctttttttcagatgagctcctaactgctgggctgtctgtcattcaccttcttttcagaagagaagtctggtggcccccttcctacttctcttttctaaccccggaattgaagagtcttctgctgtgacagttggaaaaggcattcttatcctgatctatttgtgaaactgcaatgattatatacgattctagttgtctgtaacacatgaataatagtaccctcgtctctgctgtgttaggtgggctggaaatgccaaaggagtttccaatatgacagaatggtttaagtccctttgcaacagtttttaactttaatggagggcaatatgtggactttaggaggtttgtgaatctgccgaaattgaatgcaaaattttgcttgaattatgttagttccatagtattcatcaaatgatactta

SEQ ID NO: 53772 - DNA, 1050 bp, Homo sapiens
cctcgcagcccgctggacgccacactcacccggctccaaagcttcctccggctagccgcaagccctccgtttcctaccgcctccacttcgagagctccgggggatgcggcacctctaacctgcaccagcagggctccttctacaactacgggccgaaagccaggaccaaagcgtgtgtctcactagaaatgaaaagaaggtggaaggagaaaagaaaacttcgcgccaatcggcgtggccccgcccccagaccgtcccttcgttgcgacaccaactagctcgccccgcccactccgtacacctaagaggggcgcatgacgtacatccgctaacatgcagccgccatcattgattcgataggcgacgcggggagcggaagccctttacactacggtgtttccggcttcaagatggtcgcctaagctgtttagtgaaacttcttccacctttctccattcctctaggtgctttttctgaacctggatgtgaggcattaaaggatccgacggaaatagaattgaaggcattctaaaatggctaaccgtacagtgaaggatgcgcacagcatccatggcaccaaccctcaatatctggtggagaagatcattcgaacgcgaatctatgagtccaagtactggaaagaggagtgctttggacttacaggtaagtggaagcgcgcggagcgcctctcagcccccttgtggcccatttctcctgaccgagcgcgggtaggactagcgactggcctctgggggtggtactggaacggagtatgtcgatcattcagaaaaattttgagtgcctgctaagtgcctcgtcttgtgttgagtattagaggcacagatgaatctggtaaggtcatattctgaaggctgtctcagttgggtgttgtgagttattccgtatttaatgatagcaggctgggttgcaacagtgttaagctcagggatccggatataacactttgacacaatctgttgaaggtctttaaggacctaacgttaatatgcctgaaaccaaattcatgatcttactattcttagatctggg

SEQ ID NO: 53773 - DNA, 1125 bp, Homo sapiens
gagaagtcttccaggtaatcttccgatttgaattgtggctttaaatccatgtcctgtgacaatctgtggaccttgagcaagtcactttacctttcttagccctcattttccttacctggaaataagaacattgctagaactttcttcatgacttgttaaaaaaggttaagtgagataatatgaaaagcttagcagggtacctattttattatccattctcaatgtatattagctgttgtcgttactgttattaatacacattcgttctcctaatattacactgttgatgtatatttaggagaaccaaagcttgaactaactccactccaactaggaagagcttagccctaatatgttactgtattgtttttgttttttagctgaacttgtagtcgataaagccatggagttaaggtttgtgggtggcgtctatggtggcaacataaaaccaacaccctttctgtgtttaaccttgaagatgcttcaaattcaacccgagaaggatatcattgtagagtttatcaaaaatgaagatttcaagtgagtgcaatgttcactagctaatataagaggtttaattttggcggtttagaattgggctttggttaagaggggtgtacacaatgtatctcatttctagagagttccactccagatttttgcttttgagcccttgagtttgtattttttgtttgttttttgttttggaaacagagtctctctgtgttgcccaggctggagtgcagtggtgcgatctcggcccactgcaacccccatttcctgggttcaagtgattctcctgtctcagcctcccgagtagctgggattacaggcatgtgccatcacgcctggctaatttttgtatttttagtagagatggggtttcaccatgttggccaggctggtctcgaactccagacttcaggtaatcccctccccccccgggcctcccagagtgctgggattacaggcatgagccaccacaccctgccaagtttgtattttatctgttctgattgtattaatcttctactttactttctcagttttggtaatttttccctgaaaaaggatttcacagattcactaaatacatattaagcaaaagtgagtgcctgatatgtt

SEQ ID NO: 53774 - DNA, 1068 bp, Homo sapiens
tttgtttgagacagagtctcgctctgttgcccaggctggagtgcagtggcgcagtctcggctcactgcaagctcggcctcctgggttcatgccattctcctgcctcagcctcccaagtagctgggactacaggcgcccaccactacacccggctaattttttgtatttttactagagacggcatttcaccgcgttagccaggatggtcccgatctcctgacccggtgacccacctgcctcgcctcccaaagtgctgggattagaggcgtgagccaccgcccctggctggaacgactctaataaagcattaacagctagaaaatacctaacttttgttaggcacttactgtgtgctctgtgctatacttagcactttcaatgcatttcttgtttatataccaagccataaattaggtagcattatctccgttttacaaggattgagaaaacacatgatttgaccagtagtgtcacagacttagtaaattacggagtcagaatttgaacccagatgacttacttttttccaaaaccagcagtcatgtttatgtgtacttgttcttgtattgttattaaatatatcttctttctgttttaaaattcaatatatggccaggtgtggtggctcacacctgtaatcccagcactttgggaggccaaggcaggtggattgcttgaggtcaggagttcaagaccagcctggccaacatggggaaaccccgtctctactaaaaatacaaaaatatgccaggcatggttgctaacacctgtaatcccagcactttgggaggccaaggcaggcagatcacctgaggtcaggagtttgagactagcctggccaacatggcaaaaccggtccctactaaaaatacaaaaattaggctgggtgtgttggcacatgcctataatcccagctacttgggaggctgaggcaggagaatcgcttgaacccaggaggtggaggctgcagtgaattgagatcgtgccactgcactccagcctgggcaacagagcaagattctgtctcaagaaataaataaatacataaataaaaatacaaaaattagc

SEQ ID NO: 53775 - DNA, 1051 bp, Homo sapiens
gcggaggttgcagtgagccaagatcgtgccactgcactgcagcctgggcaacagagcaagactctgccttaaaaaataaaataaaattcagtatttcttttgattcttagagtaatcctgtgaggtaaataggttttattctagttttactgatgatatatttgaaagttgatcaatatgtatgatgttcccacagccataaatggtagcatgggaacttgaactcaggtctccatattttagctgtctttcttctgctgcattctacctccacaattgcagctttcttacctgccaaagagaagaacatgtttatccactactgtcatgagaacagctagttgtaaaactcaggaacttctaggatggcctgttgtttcactgtcatctgtctctcaggtatgtccgcatgctgggggcactttacatgaggctgacaggcactgcaattgattgctacaagtacttggaacctttgtacaatgactatcgaaaaatcaagagccagaaccgaaatgggggtaagtatggtgctaagtctcctgattgtcatttttaagccagtttttattttaccagtacttctacctttgcattgtcatagacagtgtgaatgctccttttcatctacattgttactgtctctatgcaggttttcccttgtccctcatgggagttttcagtctgactactagcttcgtgttggccttacccagcctgcctctgtctgtctccctttccaagtgcatcttatgttaatccctgccttgcatcatatgccccctttacatgtgctccatcccaaaagatctagctgcagaatggcttctccataaaaaccttccccagccctctcagacaaaattagttttccatattttacatcttcacagttctttctactggcctctcctctaacactgtaattcacactgcagcatataagactactcatttttatacaggaatcccactgaaaaataagtatatccaagagaggcagctccataccttctacaaggagattacttaatgtgctaaggagggattc

SEQ ID NO: 53776 - DNA, 1007 bp, Homo sapiens
ttggccgggcgtggtcgctcaagcctgtaatcatagcactttgggaggccaaggcgagtggatgaccagcggtcaggagttcaagaccagcctggccaacgtggtggtgaaacctcgtctctactaaaaatacaaaaattagccagcgttgtggtgggtgcctgtaatcctagctacccaggaggctgaggcagcagaattgcttgaacccgggaggcagaggttgcagtgagccaagatcgcaacactgcactccagcttgggcaaaagtgagactccgtctcaaaaaaaattttttttctaactctagccaaaaacaatatttccttattaaaagcacctcagctctgccatatactagtagtataatcttacgcaaattacttaaatttagttttctcctatgtaaagtgaggttaatgatacttttttccccaagactgttaaaagtattaaataagattataaacttaaagcccttagcagagtattggcacattataattgcctaataaatggtggcagctattaaatacttggaaagaaagaacactttcataattgcacctatcctaaggaataaaccttgtttaggagggggaaaatgtcaaccgcatagtcatgttctttcagtactagttacggtgctgaaaagttgaaaacaaccaagctgcccagttgttccaggaagcaaactttttttttttttgagatagggtcttgctctgttgcccaggctgaggtgcagtggctcactgcattctcggcctcccaggctcaagcagtcttcccatctcagcctcccaagtagctggaactacaggcacgtgccagcatacctggctaatttgtgtattttttttgtagagatgggatttcaccatgttgcccaggctgcagataaactaaacatacacacatacacacacacaggtctgtttctgttccctctcctatgagtcattttggctgtcttatatagctcataataagttttgttagttaat

SEQ ID NO: 53777 - DNA, 1073 bp, Homo sapiens
gttcaagaagttaaaacaggcactcaggaaatgctgattgaatgaaatgataacttaaaggggaagtgcctggtatggtctcaggcttgttatatttaagccttcttaaaccacccatatactactggggcatccctgtattgtagagtggcagagccttgactgtggttgagctcttctcttgagcaaagaactggggctgaaggaagttactattagtcataagcccttttaggaggggagagtctgcaactcttttctagtgggttttttccctttgattcctcctctccatctttcgtgtcctctccttttttcacatacaggtatttccttcccttcttcatttttctccccaccctctcaaatgttttgcagcatgctttatcacctcctattatataaatagaaaaaaagaaagctaactacaagttaattctaaggtgttgtcagataaacaggcacaagcctttcagtttcctgtctgtgttgtatccaacagacagatgtgccacccgtcggtgtagagagcgttgtccccacccaccaagaggaaacgtgtcggagtaatgcgagtccattttctttcagctggtctaccgatgcacagcaaccagccaatcctgctgtctcaagggtatccgtacctcaatgtcagttacattcagcagaaaaagtgacatttaatggaaagcaaaacaaatcaggtcctgatttaaaattttaacacgtttagatagcttatttaaattctaagactgtttttacagactgtattatttgtatataaatatgaactatagtttttactagtatcaccaaattgagtgatacaaatttcatctattttattaccctatttttaagggaattttatgttttgtttaaccttgatgaattgtataaagagagaatttaaaaaattacattctttattttctattagctgtattcatactttggttgcttcagactttatatattgttcttaaaagttaggaaagaatttcatgtgttttaaattgtcacttctattctttacagaaccttgtagtgccaaaaactttttaaaa

SEQ ID NO: 53778 - DNA, 1008 bp, Homo sapiens
tacctacctatatgctagctcttgtgcaagctactttcttttggttatccaatttaaacctcataatctgaggttcaaaatggaaccttagtagttttaggaaatgagatttgagcttagacttgtttggcctcaaagcccaagttctcaaccattatgccacaatgcctcaagcttgtaataggatctccttccaggccaagatataattgattctgggatagttggcattgtctttaggataaaatcttaagttcctttgcatgatgtactaaggttttttgaaatgtatatccccacctacctgtcccgccttttctcttaccacttcctccatcactcctgtctctatgttgcagattgttgtgcagttccccaaacttgatgtgctttcctgctttcaggcttttgtacatgatactccttctctctgaaatgccccccaccccctccctattttgcctaaatttttccttgttttctagaactcatattagtcaatcatcttacgaagactgtctctaaccttcaaagactgggttagccctctcttcagaacattttgcctgttctactagcaattattacatattgttgtgtatatatatatctcttcttgtatgtctcttatgaataatttgagcaaataccaatgctttattctttaaaaaagtttgtttggtattctctgaatttagcatagttcttagccaatggtaggtactgaatatatctttgtggaatgaagggatatttcaatgaatgaactaatgtttttaaatgtctttttccctcttgttgaaatgcagagccaggctttcgaggactgactcctccaattccttgggaacatgcaccgcgtccccatttcccccttgtcccagcttcgtggccttatggtttgcatcaaaacttcatgcatcagggaaatgcccgattccagcccaacaaacctttctatactcaaggtaccactgcttacaaattagttaacaggcttgggtgggt

SEQ ID NO: 53779 - DNA, 1062 bp, Homo sapiens
gaattctcattcaatactgtttttttacagggtgtatttcactaggtatccacaggtcaagctatgagaagacagaagtttcatgcaagcaaaatgccatgtatatattgccctaacaacactaaatgcctaaaacatctcaattttttggtctatttttattaatggtactgatatttttccactaagcaaagtctgaaacctcaaagtcattaccttatttttaatccatcttattaggtagttattgtacaattgaagagtaggctcatataaattaagtagcttctctgtagacagaaacccagatctacattattccaaaaggaatgctcattccaccttatgtgcctagcaaggacatatatacaaagcactgtgtaatctggaagattgtattagccagtctgagagaaaacactatcacccattaaagatactgctatcatcagtcaagactaacacattcacaggcagagtacttacacattctgatgactgtctagtccttatggactgatcaccctgttgctgagctgaaccagccacctgttgagcatttacaaggttgcggaccagctgggctgctaagagaaggcatcacaaagaaaatcaacagataaggaaagtagcagagaaatgacaataaataaactcccttcttatgtaaaagaatctcaaatatctctgcaattttataaacttggacttttaaaccttaagtatattaacgaaggacttgcagcaactgagctacttaattttaaaagctatttgtcaaactagcagatcaagaaaaaaaataacactgatcctagaagcaagaacaaatgttattctgcttttctaaaggagacaacatatttatttgagaaatactttctggttgggtgcagtggctcatatctgtaatcctagtattctgggaggctgaggtgggaggatcacttgagtccagaaggtcaaagctgcactgagctgtgatcataccacgcactgcagcctgggcaacaagagtctgtctctctctatgtctctctctctctctctctctcacacaca

SEQ ID NO: 53780 - DNA, 2964 bp, Homo sapiens
tatttttagtttttagagacagagtttcgccacttcgtccaggctggagtgcagtggctattcataggcacagtcattatgcactacagcctcaaactcctggccttgagtggtcctcccatctcagcctcctgagtagctgggactacagactttttttttttttttttttttttagatggagtcttgctgtgtcacccaggctggagtgcagtggcacgatctttgcttactgcaatctccacttcctggattcaagcaactctcctgtctcttcctcctgaatagctgggactacaggcacacgccaccatgctcagctaatttttgtgtttttagtagagacggggttttgccatgttggccaggctggtctcgaactcctgacctcaggtgatccccctgcctcagcctcccaaagtgttgggattacaggcatgagtcactgcacctagcctacaggcaattttgtacagagaataattcctttccagaagtagcccgatatagcagaaagcatgagttttgttgtgagacagacttagctctacatcttttatgtgagacttaacctgttttttctatgggcaaatgacctgaactcctgaatcagtttccccatctgtaaagtgaggatgaaaatagtatctactttattgagatttttcttattcatctgtagcatctttgtgtaatgtcatatggatgtaacttggttagtactattagcaactgtgatgatgatgattgtgaatcttattttcatatcttgggttttcttacagtgaaatatttgttgctgttattttctttgtaaaaataaaccatgtttgcatcttggtcttctttccatttggattcaaaagttttatagtgattcctcctagtaaaattgcattttctccctaggagtacttctttgattccagagtattaacagatggagaactggctcccaatgatagatgttgccgtgtgtgtggaaaaataggccactacatgaaagactgccctaaaaggaaaaggttggcaaatgaatatatatcaacattttgaggaaaataaatgagaggccaatttgtagctataattatgttcagaaatgtttaactgagaaagtttagggtatttaattatacctaaggtaaatgttcatttgagtggaattttgtaatagggtaagatttgcatgtggtataatagtatcttctaacattcatttgttcatttattcattaattcactcagtttttttttgtttttgtttttgtttttatttttgttttttttgagacggcatctcgccctgtcgcccaggctggagtgcaatggtgtgatctcggctcactgcatcctccgcctcccagtttcaagtgattctcctgcctcagcctcccaagtagctgggattacaggcgcacaccacaatgcccagctaattttttgtatctttagtagagatggagtttcaccaacattggccaggctggtctcgaacgcctgacctcgtgatctgcctgccttggcctcccaaagtgctgggattacaggcgtgagacaccatgccagccagttttgtgttttttttaaatgaagaactgtttattgacaccgtctatgtgttgggaattgttctaggagaaataaaagtgaccaagacgttgggttcttgctgaggatctcacagtcatgcaaactgataattaaaatacaattaatggaattcttgagataacatgctgtgagctatatttatagatcttggggaatgtacatcttctatactccctcaaaatatatctacgaattatagtctcccaggttctgtatactgtagtaggtcaggaagatctctttcttttgtcatcaagtctggcctaaaataaaaacttggaacttttgagacagaacgaacttccagtttccatcactgctatttactattaaatttagtcaagacacttatcttctctaagcctcaatttctttttaaaactggagataataaatatcaacctctaaggattgttaaaggtttaagatttggtattttaaaaaatttaatataatattgttttacaaaactactggaaaaccgagttcctgccaaatgagcaggtgtgccataaatgtttgttcccttgccttcaaaaagacgcatgaaatgatgggcatgttagtccttttgttattgtgagagtcctgcatagtttgttctgtgactcacttaatttacaagtccctagccccacattattggtatcagcagtttactgtttagactaaagaagaaagacagtgaagaagagaaggaagggaatgaagaagagaaagattcccgagatgttcttgacccccgagacctccacgatactcgagactttagagacccgagagacctcagatgttttatatgtggagatgctggacatgtacgaagggagtgcccagaggtcaagctggcccgtcagaggaatagcagtgtggcaggtaaatagaaaaggccaaacatagtttctggtagaaacgaagtcatttatgttgcttgcatgctaaatgaccctaattcctctctgttgcaaacctaattgtatgattttggaccttacaatttcttaaagagataaaatttagacaatgaggcttttacttttaatagtacttggataagtttattatcaaggtttccacagtctgttgtattcaattatctccctgtaagtattctttagatttttatttttatttttatttttttgagatggagtctcgctcttgttacccaggctggagtacagtggcgcgatctcggctcactgcaacctctgcctcccgggttcaagcgattctcctgcctcagcctcctgagtagctgggattacaggcgcatgccaccacgcccagctaatttttagacttttagtagagacatggtttcactgtgttggccaggctggtctcaaa

SEQ ID NO: 53781 - DNA, 2594 bp, Homo sapiens
tagtttatttcaatatctagcaaataaatctgtgtttacaaaacatgaaatacctataatagcgtctgaatctttaaggataaaatattacatgtcagccccttaatatcttcacttctttcttgaggtcagaaatcctatgtcttttgtttcagatattaatagctgcaattgcctctttttttttttttttttttttttttgagacagaatctcgcttagtcacccagtctggagtgtagtggcacaatctcagctcattgcaacctcaatctcctgagttcaagcgattctcctgcctccgcctcccaagtagctgggactaccagcacgaaccaccacgcccagccaattttttgtatttttattagagacggggttttgccatgttggccaggctggtcttgaactcctgacctcaggtgatccgcctgcctcggcctcccaaagtgctgggattacaggcatgagccactgcgcccggcctcagtctttcacttttgttttatgaaatgtcggaatatgtgctagatgacttttagtaaactgtatctgtttaagtaatatgtaaatgttaaaaagcaacttattagccctagtccctggaagcttgatttctgtgtaacatacttacatattaaatatagtcattcaacaaacatatattaagtgttctctatgtggctttggtctagtagggttctgggtttcagagataagccatagtccttacccacaaagaacttaaatctgaggataaaattggaggggccagacatgtagttaattttataaatcactgtcacatcaaaaatggaaatggccattgggcccaggcccaccttaactagtggatttaaatggtattgtggtttaactgtattctgggacccattagtcacggtagagggtaaagagaaggtggtgtggtatgttttctccatttataaactactgactgactaatttatatagtctttcctcattttcactgggaaaagtgagcacttagggagatgattgtcttgcccagaaccactattcctcaggatagaggctagaaattaggtctcctgactgaatctgttgcaccttcctactttattgcatctcttaagcctcctttagaataaaagtatcaattacttgtggaagtcagttacacagacatcttacgggatacttttcttgtaaaaatagcgtttttttctccttttttcttctccttaggacagcggattattattcataataaagtttatagtctttatcaaaatgtaagggaaagcttcctaattttccttttttttttttgtttttttgtttttttgtttttttttggtgagatggagtctcgccctgtcgcccaggctggagtgcagtggcacgatctcggctgactgcaacctctgctttccaggttcaagcatttctcctgcctcagcctcccgagtagatgggattacaggtgcacgccaccacgcccagctaattttttgtatctttagtagacactgggtttcaccatgttggccaggctggtctcaaactcctgacctcatgatccaccattctcggcctcccaaagtgctgggattacaggcgtgaaccaccgtgcctggccctaattttccatttttacaaaatgatagtccaattgctttttagccttatctgatatagataaatgattaaaggtactaggtcccaaaacagttctgttgccttcctttgggtgcacaatcagtgggtattatctattttgtatttttatatctgtgatcctttgatgaaactgctgtttcatcatgactgctgtttcttttttaagttttgcttcattattcttggactggatatgttttgataggtcaagtagataacatcaaatgtatcatttggagtttaatgctcttaaaagacatccttttccagctttggtctttcagatacgttttattcattaacttcttggcatcaaattataccatcatcctgacatgttctttttggaagaagtattttagtatgtcttataggtaaattctaaaatggtattagagtatttggacctttgggttggatcacttgaaatctaataatacaattaatttttttatgcagatctttgatggaaaacagattccacagagaatggttgatggatggaatgctttcttctttgataaaacagaagaactggtaattttaaaatagtctttatgttctagaatgctcactgatatatgttagcatctgtataatttaataattttacttaaatttgctgtccatgttttggatagtactgtatagacattgttcttttctttttttttttatatgtagaaaaagcgtttaccttcacttggaaagaacacagaatcattaggggagctttggctgggactgcttcgtttctatactgaagagtttgatttcaaggaatatgtaattagcattcggcagaaaaagctgttgacaacttttgagaagcagtggacttccaagtgcattgcaattgaaggtaacatttaagctgatattaattcaggagcaaccaaaatttggtcaacgaaattgaggggaaaact

SEQ ID NO: 53782 - DNA, 1691 bp, Homo sapiens
tcacgcctgtaatcccagcactttgggaggctgaggcgggcggatcacgaggtcaggagatcgagaccatcctggtgaacacggtgaaacctggtctctactaaaaatacaaaaaaattagccgggcacggtggcgggtgcctgtagtcccagcaactcgggaggctgagacaggagaatggcatgaacccgggaggcagagcttgcagtgagccgagatagcaccactgcactccggcctgggcgaaagagcaagactccgtctcaaaaaaagaaaaaaaaaaaaaaaaaaaagatttgaatccaggtttgtctcaatttggagcctatgtacttaatcagtatattgttttgccctcaccaaactcacctctagttgtttattcacttattgaaaaccatattcttctcctgtctttgtgcttctcaaactttaatctgcatgtgaattaccttgggatcctgttaaaatgcagattatgatttagtagactggggagggtcctcagattctgcatttctatcaagtttccagattatgctgatactgtaggtctatgaatcacttacttggagtagcaaggttattatagagctttatggctggaaattgtaaatgctactattaaatgcttagattaaagtagaatttgcacaaggtgaaattgagtcaaacttatttatttgatttgttttttagaaattaaattgtaaggaaataattgaaaatttggcaaaaattcttaagagacatccaggtatgaattttgaatcttatctgtaaaacaaaataaatttttttagcatatatgaaaattatttaacctactgaagtcttttttttttaaattaggtttaagaaacattttgcctataactactgccaaagtgcctatagtaaaatttgaacacaggcgaagtgggttagaaggcgatatcagtttatataatacgttggtaagtttatctttataggccatgtatatacttttcattttaaaagtttacagattactgactctatgtttaaaactttcaaatgtgaacagtataaggaaaaagtattttactagttatcttgatagttccttcagattgaaggtcagtttttgtttgactcattaataggtgttttacattttacatttatatattttgtatttggagtgtattttacttttaaatctgatttgtagtttaattttacgaaatttgaaatcctttcaaatatgtaattatttttcaggctcaacataacacaagaatgctagctacttatgcagctattgatcctagagtgcagtatttgggatatactatgaaagtgtttgctaaggtatttatgaaaaaattaatgatctgctttgttcatgataattaaaatgaaacataactaatgtcagatttgtgaaaaattttgtctcagttttgtttatctgagcttttaaaaaagaaactttcagtattatatagcttgaatagatacctatcagagtagggtggctctgtctttttttcctgtatgtattctattcccatgtgcaactgactagtcagtttctcagcagtaacatttctcaatgcagtgattttagccccaggcatgggagttggcatatcatcctagttaagaatttctgagttaagaaatcttatatttgagtttagtgataagtttttctgacccagaa

SEQ ID NO: 53783 - DNA, 1404 bp, Homo sapiens
atgattgtgcctgtgaatagccagtgcactctagcctgggcaatatagcaagaccctgtctctaaaaaaaaaaaagtaataggaagaaaaatccaattctgttaaaccacagcttatttgaaatggtagctgttattggatgacactgagtctgaagggttaaccctatcataatttatatcaagtggactataatcactcatttttggaagagcatcgtatactaaggtgatatttgtaaacctacatgaattgtgctttgaaagaactaatttatttttaagagggcagtcctcaaatattgatcttaactattggtagtgatgttgagaatgtataaaagcagatggatttattatgtaagtcggaaaaagctaaaagtctcaatgattgtttggatgtggacattgagagacagatattaaggattgcacctgtatttctgatgtgggcatctgtgtacatgatggtactatttgctaagaacagggataatagaaatagtaatagatttggggcaaagttgatagttcagacgtgttgaatgtatgatgtctgtggaaaattggaaaaagcagttgggtacatgggtatgggaacttgggcaaaagcttgggctcaagatgttttggaatttctcagtatttcttccagtggtaggtaatttaaatcatagaaatggacaagagcatgttgtattaggtcatcagcagatagcagaagactcctcctctctgcttataataaggccttggactttgttttcctttgcttagaaaaggcaaggttgtgcttatttggctcttctaagaatggatttggatttcgtgatagtgatctggatatttgtatgaccctggaaggccatgaaaatgcagaggtaagagtgtttggaaagcgttatgtaagtttattttctcccaatgacgattctatgtttatttttgtatgtgatattgataaaaatgtggtatcactctttgtataaatatattagcaaaataagtgtttgaaatatgaaaacagtagcattttcagtttagaagacattgaactcttaagtaaaagtgtttcagtaattttatgatacaaaaaccatgtcactgagagttacagtgatttgtaatgaattttgggaaaaaatatatcacgaagttggaattttttcactagaaccaatgggaagctgatgcatcagttttgtagtgaacattgatctttcatactttgtcttctcatatctctttcattagatgatgtctttgtgttactataggtagtaaatataggtggtcatctaatttataattggttttgttctaaaagttagttataatttttgaccactcacataaaattttttccatagaagcaatgttacagatgatatgctaagggctgggc

SEQ ID NO: 53784 - DNA, 2161 bp, Homo sapiens
ttttaaaattgcatacattaaggctcactctttgtgctgcaaagttctgtgggttttgacaagtgcattgtgtcatgtatccaccattagagtgtcatacagaatagtttcactgccctaaaacaagttaacgaattacattaattttatttaactccccttcttctgtaagcactgataactgcatttgtttttaaaaagctgaatattagtttaattcattataacaaattcttaataaattactgctttgtttctgttactgtgttaacttttggggataagtctggaagagatagggaaaaaaagactttgttcttaagaaatatatggacttatttggaaaaataagatgaatataaatgaaataactagaaaaccaaaaggacaaaataaattaggtaccagactgtggcacacagtttgaagaactaaagaagtgtggaactaaggagagatcattgaaggctgtggttaggcaaaacagtttatagggaagatagaaattttgaccaggcatttgagggaactgttaaatttgagtgggccagatgcctagtatagcaacatgaatacagatcttaacaaatgggaaaataagcatggatatgggggagagtgaagaagtaaataggtttgtagatatacggaaaatgatcatgtgaaatgtacatatatcttaaaaattatttttctgtttcatttattttcgtttcttcccctgggttgctaaaacagaaaaacagtttttttccttctatctcccagacccttccccagtaacatttatggttttaaagtcagagaagtcaacaaataatgaacaaactgtaagtaaaatttttagggtaaaaacttgaagatgttttcagattctgttttccttacttttctttttccttttttcttctttttataaacccagatgagttatcaccaccttgttctgaacaacacaacagggagcaaattttaattggcttggaaaagtttattcaaaaagaatatgatggtatgtcataggttaaaaaatttattgcgtttttgctgtagtcatgtagtcttgagtttcatttatttaaaaatatttattgaatgctatgtgttaagtactgttctagttgctgggaatacagtgctaataaaagagatgaaacctcatgaagcttatgtttcaaatggggagacaaatagttgactaataaatatataatattatatcagcaaataatacatgctgttaaaagtataggagataaaagaactgaagtgatggagtgttatgataggcctctctcataaggtagcatttgaggagaatcctgaataacatgaaggagcaagttatataaatatccaaggagaaaacattgttgatggaacaagaatagattatgtttggcatatttgaggaatagccaggaagtcagtgtggctggagtggagtattagaggtagattgtaatgtatagaagaggtcagagagggggtctagggattaagtcattagtgccttatggatgttggtagaaagcctttgaattttattttgagtacctaatgagaatcttttagaggatttttagttaataaatgacatgatctgagtgaatggtttgctgggctataagactggaagcaagcagaacatttaggaggctgttgtgtgagtccagagtagatgagaagtggtcagatttgggatatattttgaaggtagaaccaataggatttgctgatggaaaatgtgaggcatgagagaaagaaagaaatcaaggatggtttcaaggtttttgctataacagttacagtaggtggtcctatataactgagatggcaaagagcaggaagagtaagttttgggcatggggatgaagaatcaagatttttgtgactaaatattttagaaaaggataaaagttgactttaatcagaatgaatttgtacttttacaagatgacccattatgtgctacatattacaattaaaagtatttgaaaacaaatattttttaaattaaaaaatcatatcatcattattgttttttagagacaggttctcactctgttgcccagactggagtgcagtggcatgatcatagctcactgcagcctcaaacttccgggctcaagcaatcctcctgccttagcctcccaagtcg

SEQ ID NO: 53785 - DNA, 1049 bp, Homo sapiens
attcacctgttgataaatatttgtctcatttcaaaattttggctgggtgggtctgggtatggacatatgcttttatttatcttgactaaatacttagaatggctgggtcatggcacgtgttttttagcagctttattaagatacaatttacatttatttttacttagtaatttatttacctcaatgtgggctcatagatatttgatgccttgggttataattgaatataattttcttttgttcagattattctagctttggccattgggaactcttttacttgactacctggtcccttttatatatatccatcagtgtgtggttttttttgtttgtttgggttttaacacttccatactttctggcactacaagatgctcctggcactgcatgtatattttgtgccctactcctagaattaggcatttgtccaaggagctgtggttccttttattggagaatgagattagaaaccaagacctgaacactagatgtgcttgctgttactgggctgtcactgctttgaggccatctcagagcaacaaaatatgtgtgtatatactaacctatgtatataaacttactataaagatttctatatgtagccgtctttttttttttttttttttggagactgagtctcgctctgtcgcccaggctggagtgcagtggcgccatctcagctcactgcaagctccgcctcctgggttccagccatttctcctgcctcagcctcccgagtagctgggactacaggctcgtgccatcacgcccggctaattttttgtatttttagtagagacagggtttcactgtgttagccaggatggtcttgatctcctgaccttgtgatccaccctcctcagcctcccaaagtgctgggcttacaggtgtgagccacggcgcacagcctgtatgtagccatcttatctgtattaaaccaaacatgatttcataatggtatatccaactcgaactcattaccacatggctcgttttagcccccactccaacagtgagaaacctggttcccaccatctattattcat

SEQ ID NO: 53786 - DNA, 3062 bp, Homo sapiens
gcttgggggacagagcaagactccatctcaaaagaaaaaaaaaaactcctttttccacaatttcatcattgaaactaattacttagttggccttctcagccatcccattattagtgaccttattattagtcttgtttatttttccttttagctttttattttatgagagaaagaaaaaaatgttgcaattgtatttcctcccattttcaggaactttcactgggagtctagcttagaaaaaccccttgggaaaatgtattctcctgacagtttatcagttaagatctacttgtatgagcttggaaatgtagtttgttagtagagacttagctatttaccattttctcttttgctagatccattttcagtcaagaggaatgttgcacggagcttaaacagccagctggtttacgaatatgttgtggagagatttagggcagcttatcggtattttgcctgtcctcagacgaagggtggaaataagtctacagtggatttcaagaaaagagagaaggggaaaataagcaataagaaaccagtcaagtcgaacaatatggcaaccaatggttgtattctgcttggggaaaccacagaaaaaataaatgcagaaagagagcaacctgttcaatgtgatgaaatggactgtacatcacagagatgtattattgacaacaacaatttgttggtaaatgaactagattttgctgaccacggacaggactcttcatctctttctaccagcaaaagcagtgaaatagagccaaaattagataagaaacaagatgatttagcgccttcagaaacttgtttaaaaaaagagctcagccaatgtaattgcattgatttgtctaagtcgcctgacccagataaatctactggaacagactgcaggtcaaatttagaaacagagagttcacatcagagtgtgtgcaccgacacatctgctacctcttgcaactgcaaagctacagaagatgcttctgaccttaatgatgatgataacctccccacccaggaattatattatgtgtttgataagtttattttaacctctggcaaggtaggatacagtttgtaaatgatctgtaagattttgtggttgttgtatgactatgtatattttttagattagaaatgtaaaaatagctatataaagtggtgacttgttttggaatgatattttggtatgtattttaccttttgtgtttttcatatagttgcctttaaataatgtatataaagcctcaaaaggtttcagcattctattaccagttggtttcctttactttctcatatatgaaaggattcatctgatatttcatgaaaatcttagcaaaggtagcatgcattttaaatgttgcttattttgtatttttttccccaacaaaagccacattcaagcttatttttatacataaaatttttcttccccccccaaaataaaaggtttgtaaattctaatagtattctactttaaagatatttttagaggggggaaatataagcatactaaaggtagttgagggaaactaagattaatagtcaaaaaaatgaagaatccagattctgtttctgctactgagcctctggatttcggcttatcctatatgaattacaggaatccaaacttttctactttttcttttcaagtaagatagtatgaacttattactactattattttgagacaaggtctggctctgttgcccaggctgaagtgcagtggtgcaatctcagctcactgcaacctctgcctcccgggctcaagccattctcccacctcagcctcctgagtagctgggacaacaggcgcatgccaccatgtctggctaatttttgtatttttttgtagagatgggatttcgccatgttgcccaggctggtctcgaacttgtgagctcaagtgatccgcctgctttggcctcccaaagtgctgggattatagatgtgagctactgcacctggccagatagtctgaactttaactcataaaggaaatcatttaaaatcataggaaaaaacccattgaacaggaagtaagcgataactgctttgtgaataaaacaaagttttaaccgaatcacagtacttcaagtgcattccagataattgcaatatcattattagtatccatgtgaaaaaatgattatacagatcatgcataagccaagtagaatattaaaaaaaaacaaaaggaaagtcatctagccttatccaggcttattgttttatcgtagttattgacaagctttaagatgtttaacctaattattaaatagtattgcctgttttttaaaaatctgctttattaaggtatggctagcatttaaaaagctatagatatttaatgtctacaactggatgtgtttgaacttaagtatatatattattatcactgtcaatgccacaaacctatccatccatcagctccaaaagtaccctcctcttcttttccttttgttgttagagaacttaagaggtaccttattagcaaatttaagaatataatacagtattattaatctgtacagatctccagaactactttgtacagatctccagaacttatttattttgcacaaatgaaactttgtaccctttgaccaacacctccccattttcccctcccaataagcagtatttcttcattctatgtaaatatacatctgttgcattttatctaggttgcagtatttaaggcacatgcactattgaaagcatcaaataaatggcaggtttttagaaaacttaattatataacttcagtttacatgtcttatgctttatactttttttcctggaaacttagggtaagtactgttgttccagttttcatttttactatttaaagagtttcctgcctaaatatgtcattttttaaaaaaagctttgaaaaggtgatagagattcttgtagtactgttaattagcccacagtgcatcattcttacaaagagagatttccttatataatttgtatcagaatttatggctatataaatgtccaggctaacattggagaaagacactttaggatgtaggcatattacaataaagaaaaga

SEQ ID NO: 53787 - DNA, 1993 bp, Homo sapiens
aaaaaggcctagaagaagacatagaaggttgttaattgaagtagaagtagaggcaagatgaaaaaatatttttaaaatgtgtccacagtaaaataactacatgtaatattattccttttaacaaaaatatgtatctttgtatgaattttaaaaagaatgaaaaaaatgatcatcaacattttaatggttattttagagtgatgatatttcaagttattccttatatttttcattgtcatttgaactttttacaatgattagggtaggaaaaagcaagctacttttatcatgaaaattaagaaagctaaatggtagtacttttttccccttcattttgcagttgtgctatattgactcccaaactgatggtggaatcccttcttactgttttgctttaatggtgatgttttttctacaacagagaaaaccccctcttcttccttgcttacttggaagttgggtaagcatgaatttgtgacatatatatgcatatatatatatagtttgctcttgcagagaactctgctcaaacattttaagctggaattctggtttgtctgtttgtccatctttttttttttttttaaataatttttccactaccaatttggaatgcctttttatatagattgaaggctttgacccaaaaagaatggatgactttcagctgaagggcatagtagaagagaagtttgtgaagtgggaatgtaattcaagtagtgcaactgagaaaaactcaattgctgaggaaaacaaagctaaggcagaccaaccaaaagatgataccaagaagacagaaacagacaaccaaagtaatgccatgaaggaaaaacatggcaaagtaagcctttttgtttttgttttttggcttttctatctgtagaatttgtgatattcttcgattgaagctattttaattgtagattgactgaccttgagcaagcctcttggcctcattttcctcatctataaagtgaggggttgatctggtttagtttttcagtaccaagattctctaatgaatttatgccttattttggaaaacttgtgttgtttgaatcatgtcaagataaatctgtcatttttcatctagacaaggaaaatttcctttaagagttgggctctgaccagacttcagcatatgggaattttgttgccaattgggtggagaaataaagcccctgtgctctaagagagggtagctttgcttatttgatcattcagcattcatttttaaggacctgctatgtgccaggcattatcttgagtgctagagaaccaaaggtacatggattatgtccttcagaagcttgtagtcttctaaatggacagatgcattattacagaaatctgaacatttctgaaatcattgctctagctatattgaattatttgtagtttcctgatatacttgactattgtattcaactcttccactttcctgtactactgtatactctctcctcaaaccactaatactctcagccaatgcttgcttattacttcactgggaacttgccatgttcttatctaaagtcattttcttcacttgcgtattcagtctcatcctttcttgtcttttccagaatatcactctagcaattattccctcataaattgccaatttttcattccctacaaaatcaaacatgctcttacttctcccactgtaagaaaaatctgacatcacttcccctcccagctattcctttgctcccttttgcagcgaaacttcttaaagaaatgtctgtatttactatttttgatttctctgtttccccttaactcacactaatcaggctttgatgtcaccccatcagtttgccaaaacttgtatcatcaatgtcagtaacctccacattactaaatcccgtggtcatttctcagtttctgttgtttttgatttattagcaacacttgccagttaattacttccctctctgaaaattttattcacttgactttcaggacaccagacccgtgtctggttatt

SEQ ID NO: 53788 - DNA, 1135 bp, Homo sapiens
tgaaaataacatattagtacaattgtgaaagcttggataggaaaaattagagtcaagaagtatagccagtcagttaagtattcattttttgctattatcatgtagaaagcaagaggattgaactaggaaattaccttgcactatttgacattgaagagatcagtgccctgtctctcatgtatatcagttttgataattcataatgctgcttttgaaattaatttctcattaacttaaatactaagtttggttgaaatttatttctgaagtacaaatgaatgttaaaaacatctttctttaattcgtatggaactctagttatggaatgacatgtagttttcagttagctctaaatttattaaaacatttgtttttattagggcttttacggtactatgttacaatatgataactagaaagaaaatagccacaggatttgaagtattctgcttttaagggtattaatacaatgaaatttgtttctttctcattcacagtggtttactttgtagagtgagtgcaggaaacgatatggcatgtctcactactgatttacttactgcccttggcaaaatagaacctgtctttattcccttggtgttagcctttcgctactgggctaaggtaagtgaaagagaggaaaactacttatttatatttttagaaggaaatgtatttaatcttcaaaattaggccttttcttgtactgacatgtaacatcaatcataacatgtgggagaaagtagttttctgtgctagacagaaagttggtgtggcaggttgtaatttatggacataaaaataaatttttgtagacacacttatggatatattttagaatttttaattgtcatgctatattctccttttatgtactatagaaatgttctctttcatatcagcatatgaggctcaagttttcactcttactgtaagttaaacttgtaaggttttaagatgtatatacattaagattcttttgttggcatatttttttccccagtctctaagaatgctattctctttcctctaaatcattgataacatgtaccaatttctgattgggcaactgctgagcattagttatttaagtttcctaaattagtcttaatttgtatgtctaaaggctgtggtt

SEQ ID NO: 53789 - DNA, 1087 bp, Homo sapiens
tccttagcagctttgattaggcaaactcttcatatactaacgggaaatgtggcctgaagagttaggttgtaattacattggtaatttaaaagaactaaactgtcaaagcatgataggtcctcctttcatggctcctgtggaactagctctcaggagtaaggggtgtcctctctttgctgttatctatgaaggtttaacaactttgactagattatctacttacttggaaatattaaaacttttagggatgttaagacctttcttaaggtgattataatttttggacagtatttggggctgtacctgtggtttgtgatatacagcaaatgacaccaggagaggtaagagatttcgctgggttggtgctcataatgagaagagtggattatcccacagaagcaatgagaataattttcagaaggaaactgttacttaatgtttactgtagagtacgtattttagagatgttgacattagcttacttttttttttccttattagtattatatgtagatgtggaatctgattttcacgctaaagttcctgttgtggtgtgcagagatcgaaaaaggttggtaacaatgaagataaaatatttaaaaaaacaaaccccaacaaccaaatttgtagtgaatgatctttaagagaaaaagtttttgttttagatttctccttggatgaatatgactaagctagtttctattcattaaaaatagcaagcttaccaaatgcatgtgaacaagaaatatatagaacatcagacagttgaaaataaaatactctaggcaaaacttcaattttttttttttcaagtcattcactcacccaagagtattgcatttacttatatgcaggtactactttgctctatggatacagacataaagaagaaatagcctctcttcagtcacttgagcccaggaattcaagactagcctgggcaacatagtgagaccttgtctccacaaaaaaaataaaaaaatcagccaggcatggtgggtgtgtgtgcctgtggtcccagctactcgggaggctgaggtgggaggatggcctgagcctgggaggttgaggctgcagtgagccgtga

SEQ ID NO: 53790 - DNA, 1032 bp, Homo sapiens
acttctttgaacaagatttgttgacataaaagtaaaacatggccaggtaaggtggctcatgcttataattcccgtgctttgggaggcaaaagtaggaggaatccttcttgccaggagttcaagaccagcctgggcaatatagcaagaccttgtctcttaaaaaaaaaaaaaaaaaaagtattagctggatgtggtggcacacacttacactcctagctactcgggatgctgaggcaggaggagtctttgagcccagaagttcaggctgtagtgagctatggtcatgctgcagcctggacaatacagggaaacctcatctcaaaaaaaaacaaaaaaaaaacacgattctgttttcactatttaaaacacaaagcatgattatatttaaatgttattctttaatgaaattgagttttccttaatgttctgctgtccgaactttgaaattagtatatcgatttatttttgaaacttttttagatgaatcatccagatcttctgataaaagtacttgggattttaaagaaaaatggtgagtttcttttctttttcttttcttttttttttttaatttgtctttctaaaggtacatgtgttgtttatatatggctaaccaagttaaaactaaactgctggcatagttgagtcattgcattacaaatggagatacatacacacacttgtttatagatatactagaaaatataatttaactgtaacttaggtaaaaaaaaaaatgccatattaaaattgatatgtaggctgggcaccgtggctcacacctgtaatcccagcactctgggaggctgagatgggtggatcacctgaggtcaggcgtttgggaccagcctgactaacatgctgaaaccccgtctctactaaaaacacaaaattagccaggcgtggtggcacgtacctgtagtcccagctactcgggagactgaggcagaagaattgcttgaacccgggatgcggaggttgcagtgagctgagattgcgctgctacactccagcctgggcggcaaaagtgaa

SEQ ID NO: 53791 - DNA, 1365 bp, Homo sapiens
tgagaaccacagtgttttgggttttaggtttacagaattaactgacttggcttcacttcgtattttataaaagcattggcattgaatgtttatgatcctttccccaaagtgctcttacataaatatttaagagtaaataaatgtagtttgtgacagtagccatagctaagttggtacattagttactgttatatattgaatgctaaacatattgtcagtcatttctaaatgaactattactaaaattttgtttaaacagtaagcttctgtgagtagtttctctctcccttctctgttcctacactccataactgggaaccatttttttattctatagatcagttagaaagggtgttcttcttgtataattgtcttactagaaatggaagacgtagaactgaagtgtgtgaaattttcccgtcgctgtttttttacatctctcatatttgcatgctatttcatgctttgatgtttttcctttattccagaatgttcacttaggttgtatggctcatctctgactagatttgctctgaaaagtagtgatgttaatatagatataaaatttcctcccaaggtaagtaattagaatctttcctgtgtggttcttaactagtacttagtaatttttatggattatctttgtagagaaaggatagggaaatataaaactctggtttgtatagtgttaccatcgtgactaaacagtgcttttggaaattactattagatttcagacaaaggcaggataaaagaaataagggacaagggcaaaaggaagcagaagaggaaagctggaaaaaggaaaaatgtttatatttgaacatgttgaatagttaatacttctggtaagcagtatagaaggtgggaagagttttgaaatcagatacctagattcagatcttatctgtgataagcaagttgcttgaactttttgagcttcagttttctcatttccaaaacaggaataataatttttatattaaatgagataatattaatatatgtcaggtgtcttaatatagtatctggtacatatgggtacttttaataagtagtacctagaatcattagaacaatattgatattgttctaatattgttatcagtattagaacaatattgtttagcactgctgacattctttattgacatatcaatcttttaaaataagtcaatattttatgttttaaattgaataatatgtttatgttcagggaggtttgatttgggtgaaaatttggtgtttgtagggtgatacatttactttataattaatgtatggttattaaatatttttgttgtttgtttttgagacataacctcactttgtttcccaggctggagtgcagtgatgcagtctcgg

SEQ ID NO: 53792 - DNA, 1581 bp, Homo sapiens
gtctgaatatggtaacagttagtgaaaatagaaatggaccaaagtctttaagtatatttgattgggtagggaaaccaactagctttggctattatatctgatgggagcgtcatgtttcaaaagataagagatggtttcttgagtgaaaaatgttaatagaaaatgcctgtgtggggaggggatgtgttaataatactaaataaaagagaatgattgtggctcagttgtgttaaagaatgaaggagatagtaggatatgaaattgtgggttattttcttctttgtattttcctgtgttttatgtagcttttgtaattaacattttttaaatcagaaaataattaataaaagtcattgcatatatatagcaaagtgtctttttagctcctagatttaaattggctttaaaacttttagcagaatagaggttttttgaacatttcgcatagcgttggataaaatcacaaagagaaatcactggtaaatagtaggcaggaagttttcctgtgaccatttaacttgatactgtatatgctgattagataggattcaagacttttctgctacatctaagacaatctgccttggtgcaacaaaatcgtcaagttagtattgtacttaaggtaccttggctttaatgtagcatttcagaatttatgcagacagtacagtggaacaaatttttaaaaacttagtagcatcccctccccacacagtacctctcattctcaaaaccctgcttcccaaaggcagaagtcttttgttcacttccgtattgtaggtatctggtagatggaaggtgaatatttttgttgagttagtttatttctgtctttccctgctaaatataagaacaattaaaatagaaactttttttgtttttattgttgtgaatcattacattaataggaaaaacaagaagaaagtgagcttcgttctctgccacctccttcccctgcccacttggctgctttaagtgttgcagtcattgaattagcaaaagaacatggaataacagatgatgacctcagagtccgtcaggaaattgtggaggaaatgtcaaaggttataacgacatttttaccaggtagaaatacatttcatatttgattttgaaaatcacaaaactcttcccttgctcctcttgaactagagtacatttcttaatgtttttcttcccttttctccttaaaagtagataaaatttattgttttatgaatgaatttttgagggaaatatttcacacaaggaaattgagaattatggcacagcacacttttgtactaagaaaaaaagattttaaaaatgccagatgtagaactatttcttggcggtcaaatattttagtttttcaatatcactgatttctgagtggactattttgttatattattttcagtataaacatttcatccagtcactgaactaaatttctgttgcctgatggtggggaaaaattaatttactttaatagggcctttagaaaaagcttattgtttggtacaagggagtgtcagatttattttagatatttatatatggactatttgcttagcccatatcttttttgcatcagtatag

SEQ ID NO: 53793 - DNA, 1024 bp, Homo sapiens
agccaccagagtagctgggattacaagcctgcgccaccatgcacggctaaattttgtatttttagtagagaatgggtttctccatgttgtccagtcttgtcttcaactcctgagctcaagtgatctgccagcgtcgtcctcccaaagtgctgggattacaggcatagccaccacactcagcccgactgcttttcttacattggattctaaagatgatagtaggtgaatattaaacataatttagcattaccatgatattgttagatatcgtattaaagttagtatgtaatctcctatgataactattttgaaaaaggactactatctcttcagtatataagtttattaaaaactattactttagaagaaggaaaggataaagaaaaaaccttcagtgcttatttctgtctacttacataattgtattattcacttatatagtcaatagtttactcctctgttttctgaataaagtgcatttttaaaatttgtctcttcagcgatcaccagaatataccaattgtcggtatctatgcaaactttgcttaattcacattgaaaatatccagggggctcataaacatataaaggagaaacgacataagaaaaatattttggtaagttctttttaaaaaatacttttatttatttttcaagttgtaaaaccatattgaatattttttatttgtgaaactaaaaatgaaatatttgtccaatcttatattggtaactgaagtgatagctttggaagcaattgttgccttccttatctgagataatcaggaaggaaccttgttgagaccggtttgctcatcctttagaatgttgattcctaagtttagagctgttaggtacaattagtccatccaactgatgtttattgagttcttgtgtgctacttctaggcagtggtgaataagatagttgtggttcctgccctcagattttctaagaattgatgagggcatgcgttgaataaagatttaaatataatgagtcttgttagggggggaagattgtgcta

SEQ ID NO: 53794 - DNA, 1005 bp, Homo sapiens
tttttatcagattgacttcagagattctccaagatgattatgttatattagctttgtgtaattagctttgtgtaatgtaagtctcagttatgtatctcttgatggatagattggaagaacaagctagtcatttgacccataaaggtttttctttgtgactttggataccatgtctacctcttacctatattttatatatgcataccaacttgtatactttcctaaggaaaatataaggaaataatattttttctgtgtataaatttaatgtctgttttccattaaaaaatttaaaaatttaccagttctgatgataactgagtgattgctttcttttctaggtaaaatgaagaatgatgaatctaataaagaaaattcttcagagatggactacttagaaaatgccactgtgatagatgaatctgcattgacacctgagcagaggctggggttgaaacaagcagaagaacgcttagaaagagatcacatctttcgacttgaaaaagtatactatgttgttttagttatttggggggaaatgtgtgtttcataactgttttccccaagtacagctttttttatttttcttttattcataagacagaggttgcattcatctttccttacttccctcttctctacctttcttcttctttccctcttttcttccttgcctctctttttcagcagttacttattatctgtgagtctgacttcattcatcccaagagttggcaaactatggtctatcccttgcttttgtttttgaatgggttaaaatacacctagtctccccaccgtttttggtaaacattttattggaatatagccatgcctatttgtttacatgtcgtttatggctactttcatgctacgatgggaaatttgagttgagtagttgtcacagagcttatatggcttgaaaagcataaaatatttagtctttgccaaagcataaaatgtctaccaaaatatttattcgcccctttatagacgaaacttgct

SEQ ID NO: 53795 - DNA, 1055 bp, Homo sapiens
ctattgaaattcttaaagaaatatgagacaacctttacttctaaaattctttattttggtgctgttttaccacaattacattagaattcccttgatgagcatttggctatttacctagtgcactgtaactccttctcatatagttttctgagttttgtctttttttttttttttaacaatttcttcagtttttagaacaagtttaaaaaattgttttttaatgtctaaccataaaaaattgtttttgcattttaaataacagatttttctcttttttttaacccaatagtttgcttgcctaaactggacttgaagcaatttaaactactggagatctgccattttataatatcacaattggaaagaaacagattttcaaataatggaagagtctaaaaccttaaaaagtgaaaatcatgaaccaaagaagaatgttatttgtgaagaaagcaaagcagttcaagttataggtaatcaaacattgaaagctagaaatgataaatccgtaaaagaaattgagaacagctctccaaataggaatagtagtaaaaaaaataagcaaaatgatatttgtatagaaaaaacagaagttaaatcatgtaaagtaaatgctgccaaccttccaggtcctaaagatttggggttagtccttcgagatcaaagtcattgcaaagcaaaaaaatttcctaattcaccggtgaaagccgaaaaggcaaccatttcacaggcaaaatcagaaaaggcaaccagtttacaggcaaaagcagaaaaatcaccaaagtcacctaattcagtgaaagcagaaaaagcatccagttatcagatgaagtcagaaaaagtaccaagttcaccagcagaagcagaaaagggacccagtttactgttgaaagacatgagacagaagacagaattacaacagattggaaaaaaaattccaagctcctttacttctgtggacaaagtgaatattgaagctgtagggggagaaaaatgtgctctgcaaaactcaccacgatctcagaagcaacagacatgtacagataatactggtgatt

SEQ ID NO: 53796 - DNA, 1879 bp, Homo sapiens
cgtgtcccggcctccagcggcggcagcggcgacggcggcggcagcaggaggcggagggagagcaggagccactgagatgaggaggcgtcgcgcgcgcctgtagctcgcgggcctcgcaggtacgaggttccggccgcggggcagcgtcgggtaccgagggggtgtgctcgggaaggccgggcggcccccggttcgccctccccaggtgccgcgcttcgcaggtgtcgggggcctggcctgagagcgtctcagccgccccctgggggcctgacacttctttctttcctggaacgggcttcgggtgtcccaggggaaggctgagataagggaggtggggacggcggcctgggcggcctgaggagggcattggggcgctttggggacgaactccacactgtggctggggctcccggtcccggaccgaaacctgttgtagaccagcggggcggattttgagttaacgggattggtttgaacatttctgttgggtccagttacgattccctgtcatgtgtacctttttctttcacccttgcttagacataggtgactacataatgtatataaatgtatacacgcatataatacatactgaatgtttccccgggctcgtccttgtagggagaaggcagaggtgtctgtgtggattttgtttcttgctcgcccgccttctctctcccccgccccccagtcgaaaggtggtaatgcgcggttttgacgtgggtaactgagattcgtatttgtaaacagatagcgctctcctagtgtgttgcacgcctctgcgaagggtttcagactcctgttggtatctggattgcgaaagaatgagatgtttagacctgaaagaagcacatcagcgggatttctagtcgtacttgaatgggatgaattactgttgtattaacaacgttgattacacattttcttttcagaagatttcgaagtcttagatgaattttgcgtgagatcttagataccgtatatctgcttcttcattttgatagaagtagtagttccttacacatttgacctgccctatcgtgatcttaaattgtgtccagaaatgcaattcgaattgtgtattgttggcatgcatttagtaattagcccgagtggatcagatggccttttatttccaaagattttttccctccagtcttacagcagcgaaatgtttgtagcacttgatgaaacagaacatatcctgtttctgtttttaaagtaatgagaactgttagctaataaaattggataatcccagccagatatgataattcagagaataccaccgagaggtgttgaattgtgggatggtttaaaaagaaaagccgactttgtgtgtgtgtgtgtatgtgtgtgtgtgcgcgcgcgagcgcgctgaaattttctttaggcttagaactcatgtatgtcactacactgcatcgtagtactgattagtcacaactggtaaaatgaaatattgattctcttaaaaagctgtgcttaagataactcattagtgtctagtgtgctatgttgcttttataaacaaatttttaaagattgcttcttagaaaccatatactttggggaagataagaattttaagtcgttttatgctttaaaaatatttatatttaatataaacaaaagaaacttacttttaaaactcttagataaatttttctgctgcttgcagtttttcacttggctagtgtggaaaatgaaaaatgaagttttcttaaaataattcagaaatggaagtgaaagttaatgacatttgatgttttaaatccagcaaacatttaaatacagaaaagaaatttaaagtattttcattgtcataggccaagttgttagtacagataaattaacaaatattgtcatgcatataagt

SEQ ID NO: 53797 - DNA, 1035 bp, Homo sapiens
cccttgagacagggtctcactttgtggcccagactgaagtgtagtggtgcaatcatagctcactgtaatgaactcctaggctcaagtgatcctcccgcctcagcctctggagtagcttaaactacaggggtgtgccactacacccggctaattttttcaatttgtatttagagactgggtctcactatgttgcccaagctggtctcaaactcctaggctcaagcaatcctctcaccttggcttcccaaagtgttgggattacaggcaggaccactgtgcccggcctgcttgctcattttgacacatacttctgacttggtttttatttaaattttgtcttgctcctgccaaaataagtttactgactacttttgtctctccagatctgacctagaccattgtactctcctatcagcataggccagctgcctcatcttgaagagctgttaaaataaaaagaaaaaagagaatggtaggaaatccagtataccaaatagcactatggtgggattgtgggtagtttatgtcatttttctataggttcaaaattttgcaatgtggttatgttattttaaataaaaatatttgaagtttactgaagtcactcatcaagtgctttcatagataactattgaattttcttccctttcatgatttccaaggatgaatataaaactgatattcctctagccaacaagatatggggtttgagatcctatctgggtcagagaatctgttctccatcttcctcccttcaaagccaactctgcactgcccccagtttactttccaaaacagagatacaagcatatatttcccctacttcaaaactttgaatgctcccccagtgtttgcaggatcaagtccaagtgacttaatatggctcccaagacctttttttttttttttttttttttttttgagacggagtctcactctgttgccgaggctggagtgcaatggcgtgatctcagctcactgtacctccaactcctgggttcaagtgattctcctgcctcagcctcctgagtagct

SEQ ID NO: 53798 - DNA, 1021 bp, Homo sapiens
gtacacgttatagtcccagctactcaaagactgaggaaggtggatcacttgagctcaggagtttgaggttgtagtgcactatgatcgtgcctatgaataaccacagcacttcagcctgggcaacatagtgagatcccatctctaaaaaaacccagagcttacaatgtcgctgttttgccttctgatatgtaacttgctttttctgtttgaagaaataattctttatatttgaaattcaataataaccaggattaatctgtcttttgatggtattgctggataatttattatttgtctaaaatttgctgagtaacctgaggaaaagcctcactctccggacctcctgtttctcaactgtatgaggagggggataatgagtcttgtcagtgttgtcggtctatacttccctgactggatttatgaatgagcaagcagagcaggaagtttgaattttatatgggctgtgagcaaaaagttgcataaaaactgagtttgaagaactgtttatgaaggctgcagcaggacttcaagctcttgagggaagatggactacaataactaccttcaattcaactcaaggttcttttccatcccagaagtgaatttatgataatagtgccttgttatgtttctgtgattggtgcagttggttaaagtctgatgtttcccggaagtttagagtggaagtctatctccaagcccttctaaaccaatgctattattgtacgcactggcaactggatgttcagacttgttcaaggtcacacaatgttggtggcgcagcaaggactggaattcaaactttctaattccccatctatacttttccctcagcagtgtagtatgataatgggactaaaaacatagatctagagccagggtaagcccattagcttgccactgccttgccactatcaactgatgccagtgggtcattgatcttttcagtgggagcctctggtcacttccagtggggttgtggggaaagcataaaagcagacagatacccccttcttttgtt

SEQ ID NO: 53799 - DNA, 1023 bp, Homo sapiens
tttttctattacttccatcctataccgactagctccacttaacatgtggagaaactgaggtcggagtgggggcgtgaccaggccagcctaaggccgctgcactaatgagaagctgagctctcagatttttgcctccctgtccctgccaagtcgctgtttcctgggacaagagggagcctcactgaaacgaactccggtctcaggggacagaatcctgaaaccctggctctggggtccggggcaggggtgcgctgcctcaggacagacggtgaaactgaggtccagagccggacatccaccgcctgcggagggaacgagaacgcggcgcgtcctgccttgcgggccgagcggcgccagagccgcctcctcccgccccccgcgctagatccccccgccccgtctttgccctcgcgacgccgccacctccggaacaagccatggtggcggcgacggtggcagcggcgtggctgctcctgtgggctgcggcctgcgcgcagcaggagcaggacttctacgacttcaaggcggtcaacatccggggcaaactggtgtcgctggagaagtaccgcggatcggtgagtgcgcggggtctggcggcgccgctgggcccggcctcgccctggcggggcctgctggggacgccccgcagcccggtcccccgcgcggtgtggctccgaggacgctccagccgcgcggccgccaaaccccggcccccgccccgctcggccgtgacctctggcgcggcgcccccatcccgcgcccggcccggcccggcccgcggctacgtggcacggccttggcgcggaggaacccgaagcgctcgcagtcggcgcccacttcgctaccggcacctttgggcagcggggtccagaccttcgccgggaggccgggcaccactgcccagcctttgccattcacgggtgaaaaaagtaaccgtagcatcgtgcggcctttccctctcccgtcctcattttctgcatctggaacggggagtggctgattcggagtccagtgaagaacact

SEQ ID NO: 53800 - DNA, 1049 bp, Homo sapiens
gcctgaggctaagagtttttgagtccagcctggacaacatggcgagaactgtctctaccaaaagtaaaaattaaaaaattagccaggtgtgatggcacgtgcctgtagtcctagctatttgagaggctgaggtgggaggatcacttcagctcagaagtttgagactgcaaacggttggggggatgtcctgttatgattatgccattgctccagcagcaacaacaacaaaagtggtgttagttctctggagaggagggggacaaaaaggtgattgccctggagttatgagggttcttttctcaagaaaacctgtgtctatgttcccatgcaggcgtttgtgtttgtgtgcacacttactcattcatctgaaacttactgagactttttcatatgccaggcccagagatgaagtggacatagctcctgccctcagtaggttcacattctagaagggagactgacacagtgcagagtggcgagtgctagctgactgagccaaaaattgagcccaggtctccctttgtaccccctcttatcagttctcagtatgtgctcaccagtatgtgtgccccagtctgtggatgtgctgtgtgtgtgggcatgtgtggtgtttgctaacatgtttgtatcgtggtgcatgtgcatacctatttatgtatgttgtatacttatgttcacagatgttcatgtatgtgtgcacacatctgtaagctcctgaatgtttgatttcatatgtgcctgtctgtgtgcatgtgtttgtgtatgtgtgagagcactggacacacatttacatatgtgtacacagtgttcttgtatgtgtgaggcagtattaactgttgagggagtcacatatgtggatgtgtcagggcatgtacaggttcatgcctcttcactggcttgtctgggctttgttttgttttgtttctgtcatacaggtgtccctggtggtgaatgtggccagcgagtgcggcttcacagaccagcactaccgagccctgcagcagctgcagcgagacctgggcccccaccactttaacgtgctcgccttc

SEQ ID NO: 53801 - DNA, 1007 bp, Homo sapiens
gctgtttgcaatagaaactttggccaggatagccaaggcgggcagattgcttgagcctaagagttggagacaaccttgggcaacatggtgaaacccagtctgtaaaaagaaatattaaaattagctcggtgtggtggcacatgcctgtagtcccagctactcaacaggctgaggcaggaggatcacttgagcccggaaggttgaggttgcagtgagccatgatggtgccactgtactccagcctgggtggtagagtgagatcctgtctcagaaaagaaaaaaaaaaagaaggaaactttggctagagtatcagaatattccacaatgataagatccaaggggccccagacaggacatccacatcctgaactatacccagagacagcctgttagttggtgtatctccatcaaccttgcatgtgtacatgtgtatagttatgcatatatgtatacttatttagttaaattggggttatgccatgtaattagtagtgtgtcctgctcttttcaattaatattatcaataagttcataaagatttatccattatcttagatattaaaatctaggctgggcgtggtagcttacgcctgtaatcccagcactttaggaggccgaggcgggcggatcacgaggtcaggagatcgagaccatcctggctaacacggtgaaaccctgtctctattaaaattacaaaaaattagccgggcgtggtggcgggtgcttgtagtcccagctactcgggaggctgaggcaggagaatggcatgaacctgggaggcggagcttgcagtgagccaagattgcaccactgcactccagccggggcgacagagtgagactccatctcaaaaaacaaaacaaaacatattaaaatctaaaagatctgaaaacatttttttttgagacagggtcttgctctgtcacctaggctggagtgcagtggcaccatcatgtctcactgcagcctccacctcccgggctccagcaaccctctcgcctcagcct

SEQ ID NO: 53802 - DNA, 1178 bp, Homo sapiens
gtctcaccccaccctacccatcccctaattcctacttttctggctcaagcggaatacagttcatccctcggccctgtgaatggaaaccatcctcctgcttttcactgctcagccaccagctgaattattcagtcacgagaatttgagacagcatgtcctcttgatttttgtttcttatttttaagaagaaaagtgcattgcctgaccttttactaaataacagctttaggctctctctgctttttgctcaaactcagctcttagttcctacccttcttcttcattaagtgttggcctctccttccctctgcacccaaagcatcaacccaggagcttccttctgcatctgagatggttacaggcccactctcttacattcatcagagctttactgttgatagactttcatttctgtttgctctcttgcgcttcaataggacatggagagaggtctttacccccattttatagcagaggaaaccaaggctcagccaagggaaatgaactaagtccacatagccagtgagcatgtgtcactgcgatgtcaacccagatctcccagactctaaagcctatgattgcactgtcccttgggttccttagctctgagtatggaggcaagggtggggtggggagtgccttggcaagagcagagtgtaaatggaaaagcagtttctgaaataggcttctttccctgcccaggcattctgtactctgtcccatcaccgtcacacccatcccatccccaaacttgggatggcaatgaagaccataactttcttattctggtactttgtgaggaactggctagatcagaaaagtgagttcctactgttgagctgggcactgtgctaaggacttcaaacacatcatcccctttaacctgctcaactactctgcctggtgattattatcaactcccattttgcagatgaggtcagtgaggtgagtgtagaggtgatatctaggtacatttaataagatactaaaacattggggggaaaattaaggagtccaattcttatccttttctgaaagttgttggtgaagaggtcattagtcagccattctcatcaactagaactcaaaagctcctagaaataaagtctgatgctctcactgtatagatggggcagctgaggcccagagagaggcagtcatgtgcctaaggtcaccca

SEQ ID NO: 53803 - DNA, 1022 bp, Homo sapiens
cctcccaaagtgctgggattacaggcgtgaaccgctctgcccggccaatgctctcactaaaatctgacagtatggtgctcagtactgtgaggaaggaaaggaagagtcccagagagggaagggaaaacctgagggtatagagatttggcttttatcttgtgggtaatgcagagtcacgaaagggttttgatcaggtttggaaattagaaagatcatccccagtgcagaaaatgaatcacgggggaaagactggaggcaggaagaccaatgaggagatggctgcagatgtcaaggtgagacatggtggggcctgagctaaggcctgtcaagcaaggaagggagcacaggtgagaggccagacagctgaataagcaaaattgagccatgcgggggtgggaagaaggtggggttgagcatgaggttgaaaaatataaaccaaaacaggtttagcttgggcatctaggtggacagtggagctattcatattgatttggagcctgtggtgtggggatggggacaagaactctgaactgttgggtgattttttaagttttataaataaatagcatttttatttgttttatgaagttgcttgaaaaattgtatgaagggcagcgtggcagagggaaaatgcctagacttcagatcctacagatgtggacaattctggattagtcaaaggcagaatacgcatgtatatttaggacacctaacaaagaatgagaaatatatacatttaaaaatagtaatgttatattcctttttttttttttttttgagacagagtctcgctctgtcacccaggctggagtgcagtggctcgatcttggctcactgcaagctgcaagctccgcctcccattctcctgcctcagcctcccgagtagctgggactacaggctcccgctaccatgcctggctaattttttgtatttttttttagtggagatggggtttcaccgtgttagccaggatggtctcgatctcctgacctcgtgatctgcctgcctcagcctcccaaag

SEQ ID NO: 53804 - DNA, 2063 bp, Homo sapiens
agtagctgggattataggcatgcgccaccatgcccggctaatattttcgtatttttagtagagacgaggtttctcaatgttggtcaggctggtctagaactcccgacctcaggtgatctgcctgcctcggcctcccaaattgctggggaagtctgggcttttaatgtaaccaaccatcacccaaataatgcacttgtacctgttaggtaattttttattcctcaccatcctcccacccttcccaatctccagtgtctattattccacactccctgtgtccatgtgtacacagtatttagctcccacttataagtgaggacatgcagtatttcacttcctgtttctgagttgttataacatttattactgtttgaataaattttgttcatttatttatttattgtatttcctcccctagaatgtaaattttaggagggcaaatgagtatattctcagcatctagaaccatgtctggtacatagatgcatagagatgctcaaatatttgttgaacgaaaatgaatgagagatatatgttgtcactgggggtaaagaagaggggagagagattaaggaaagaggtttactgggactgggagactgccaaggaagtagagcctattttcattagaagctgccgcctctactctttctctttggctttcatgttcctaccctggctgaggagtaagctatagtcattacagcacccttttctttttctttctttctttttttttttttttttaagacagagtctcgttctgtcacccaggctggagtgcagtggcgtgatctcggcccgccgcaacctccgccccctgggttcaagcgattctcctgccttagcctcccaggtagctgggattacaggtgtgcgccaccacacctggctaatttttttatatttttccactcctggctaatttttttgcatttttagtagagacagggttttaccctgtccaggctggtctcgaactccagacctcaagtgatcctcctgcctcagcctccccaagtgctgggattacaggcatgagctaccgagcctggcccagcacccttttcttgctgctacaaagactagcctatgagccttttaggttttcactgtttttaccatttaacttcatgagagattccaaaactagcaaagtttcaatcatggaagtcagtggatacttgggcgtggctgacagggagcagaagggctggtgagtggtagagccaatgcaggggctgaggtctccccaagccatgcattgctcagtccatggctgtggggagacaatgccatttgtaggaatggctaaacaccacctacattctttgtggtaaggccaacttgccacacatcaggaggacaggggctgtcttaaaagacatcacctggcctgccacacctgggcaccccctacccccaagtccccactgcgagcagcagccccagacatgaagaacaacccttgccctcttctcgcaggttgctatcggctggtggactatttggaagggatccggaagaattttgatgaggctgccaaggtgttgaagtttaactgtgaagagaaccagcacagtgatagctgctacaaactgggggcctactatgtgactggaaaaggtaaggagggcctgccttttgggtccttgtcattgatagcagtgctggcctcacacctgagccccatgataagctcttgcagaagggtctcgcaggcattgggaaagtgcattgtaggaagatggagaggtaggagttcagcagagtgatggggggaagaacacagcctttcaagttaggtaaaccttagggaatgctattggcaagtagtgggaccttgagccaatcacttcgactctgtgcctcagttacatcacctgtaaattggagggaaatagtacttgctttgtagggtggtgaggattaagtaggacagcataggaaaaggcatcagcatgtgcttggcacagagtaaggggtcagtaattattgtcttccttctgtcttttctccttgtactctaattgtagttatcactggcatagtgtttacattat

SEQ ID NO: 53805 - DNA, 1005 bp, Homo sapiens
cctccttccccattcacctgcttcggtgaacccctttaggtgacaccccctgaatctcccttctccccgatgacatcctttttatcacccccagtgacagcctttttcgcattccctttgtcgcccactccttgtcctttaaccctaacccttcctttctttctcctctatcattttgccttttttcctcttatgtgatttttactttcccccctttcctccctagttttcgctgctcttccttgctcttctcacccctcttcaccattttatctccactgcccccttctctccgtgttccttctccccttcgtcctcttccatccacgtttcctcttcccttatcggatgtcctcgctcggttcgccgtcgcagctgtccccatttccttctacgggcttcaggggtctaagcaggaacaatttgaggactgttgcttcccgggagctgtagggcgggcagatagggatttataggtttgcttcttccttttcgtttttggaggcattgaagagatcctggaagcctattcacctagtgtcattgcaaaatcgaagtggtggtgtgttacagagcagtgaagtgagggccagcatgcatactgtgacctcaggagagatctagtcttttgacagaaatagctaaaaaatgttttgaattttttttattttgagcatcttttaatgtggaggtgcagttggagaagtttaaaaatacttatttacaagcttggctattattactaaaaacaaatgatttgttttcatttggaggcagagaccaagggcatttgaggactgacaatcaggttggcaggttgtgacagtctctttaaaccttctaaagagttcatttgttttgccctgtctgcctttagttgggagaaccttatatttgcaaattttctttctgtctgaaaataggttgaggcttcagttggttttttcattgagttgggttataagtggtttgctgtacatttattgaaaacattgctccatcata

SEQ ID NO: 53806 - DNA, 2702 bp, Homo sapiens
tgcctgtatttccaggctgaggcacaagaatcgcttgaacccaggaggcggaggctgcagtgagtcgagattgcgccactgtactctggcctgggcaacagggcaagactctgtctaaaaaaaaaaaaaaagcataggaaatgcataaaaatataacaacacttacctgtgattttgggtcaaagataaggtagttatgattgtttttatttttttaatacaggttgtacatgtcttgaggttagaaaaatcaagctagctatttattgattgaatgtgtaggccttgcactgtagacgtaacatcagtatagaggttatttatcaagctgtagcatgttagtgatcaataacaaaacagctaaaaaaaaatggctcctagaagtcatttttttgtggaataattttcaagtgttttaagaaaagctatttctcctgttttgtgtgtgtttttttttctttttcagcttcaaggtattgcagcatgctgattgaagaaggaggattgcagcatttatacaacatcaaagatcatgaacatactgatccccatgtccaacagattgctgtggccattctggatagcttagaaaaacacattgtgcgccatgggaggccacctccctgtaaaaaacagccccaagccagactaaattgatagccataagtattggatagttgaatcacaggaatcctttttgtgattggtccatttggaatatcttaccctccctgatgttttgggggtttctatgacaagagtcataaaatcagtttgggattgataatgtgtagtactgcccatgtgaacagtctctaatttgtcttgtgattttaaacttatgagtcaagaagggtctcttcctttatcattgccttttaggaaattttccacatctttcagtgtttgaacttacttgtgcttgagattctacagttttatggtaaagtttgcacgaacccttaggccagacttttctgatctcagagtcccttccaatcaatttgcagcttcacataagctgttgacctgatttctgacactgcttcagttgtaaattttatactgcttctgtataaaatgcctttcttctctatctgtgtatattttataagatgtccttcttagtgtgaaagaagggaaatgtggatcatcttgtggaagctaatcactggcaggagcctggatggctggcggaaagatatatgagaaagaaaaattatgaaggtagaacagagtgtaggaactgggaattggtttcatggtataggttttaaaatgagacaggctacccttcgggagtccacctctcttgaggcggtgagcagaagcttgtcctccatatttatacctagaagtgtggactgctggttcctgcacagactgccggttattcactaggaatatttccccaagcaccacagtataaaatactacagcactctgtgttaaagactaactgtctacatctccatatgttgtagtgttgtgaaaatgtgattttaaaaaattatcgccagttaaaactggctattcttttcctctatttcaaagtcatttttgttcagtggaatagagacagcaacatggtgttaacctctcaattaaaatacaattgacaccagtaaattttgccataaaaagttaaaatctcttgttcaaaatatgtgtatcttcttaatgtgttcatgttagagaaagtgtccccatctcactgccaaaaatgaaagaaaataattaaactctttaaatgattaaatgtaatgattctactcgcagtgcataacagcacatatttttgacagattattttttaggcaattacctttccttaaggtatctgatacagtatagtaaagaatcacttatatcagtaatagcacttgagagatagcaagtcaccaagaaacttaattttcatttaaaattttattttgtgaataaggtcaatctacaatcccagataactacattttttttcatagatggccagtgttttcaacagagatttaaaatggaatattaaaattatagtgattattcagaagcattttaatttagaaaggagctggtttgttagttcactgatgacattttttgacaaacattttataccattatcacaataatcagacttgaattttttttggagttccttcatgtgaatgaaaactgagttaaaagaaagtaggcatttaggtctggatgcagtggctcatgcttgtaatcccagcactttgggaagctgaagcaggaggattgcttgagcccagaagttcaagactagcctgggcaacatagtgagactcggtctctaccaaaaaaaaaaattttttttttttaaattagctgggtgtggtggcacctgggaaacagagcgagacgctgactcaaataaatatctaaatagatatttagaatcactgaaaaccatattaaatgctgggttaatgctgacttaattggcttaaggaatttttataggcgtaagataaattttcacagactaagtttatttcagacaaaatagagaattcttttaaaagttttttttttttttttcctttttcgaatgttaatgtctaagacaaagttcagaaaacgagatggcctgtggtagtttggaaattgctagatatgttgaccgtttccaggtcttttatctagtgtagttaagggaaagcctatttaagaagtttggc

SEQ ID NO: 53807 - DNA, 1022 bp, Homo sapiens
tcatgactctaaagtaaagctcttttggatagcacagcctaactttacagctagacagaatggccattaagaatatttccaaaatccaagtttatcaaaattattttgtgggaaatcatcaatctattttattaatgttatgtgtttaattttggacttattttgggaaaaactgttcaaattgggtccttttaagcttattttaagcagcctagaaggaagaagctacttagctaatgaaagctgagacactttattaaaagcaggatcttaagagcattgtttttccttaaaaactttatactctcagataatctgcaacaacaaaaattaagaaatccctgacttttgtagaattcccactgtcaaattctcactgacttatgagtgtgagagaagttatcttttgtttgaattctgatagaacagtttaactcctttctaaggatataaaaaattcattggaaagtgtgtatatttcaaagactctcaattatctggactgaaggcactgttctcactatggccagatgaatgggagtattctgtacatgaatcatgctgtattttaaatcaggacatcacttaagtattaatgttgtgtgtacagatttttgttttgggattttttttgcctaaataaatgttataaattttatgtaaagtgtgtcttgtctacttttattctagacatttggctttaaaagttaatattaatgcaaacttcaaattccttagtgatccacttgtaatgattgctttctgaaaaaggctacttttactggagaagtttttatttttattttattttttgagacagggtcttactctgtcactcaggctggagtgcaatggcatgatcgtggtgcatgccaccacactaggctaattttttaattttttgtagagacaggggtctccctatgttgctcaggctggtctggaactcttgtcctcaaactatcctcgcttcagcctcctaaagtgctggaattataggtgtgagccaccacgcccagcct

SEQ ID NO: 53808 - DNA, 1039 bp, Homo sapiens
gggtttagaaccgaggtttgatgcgtcttaacattgctttccttataccgcaattgattattcattagagcatctaactccctccctgtctctttggtttttaggaacttctagcaatagtaaaacaaaagactactgagaatttagatgatgtcaccttcttgtttactttgaaagcactttggaatcttacagatgggtctccagctgcctgcaagcacttcattgaaaatcaaggattgcaaatcttcatccaagtcttggaggtgggaagacaggattgagtttatatgtaaagttcttctcttcatgataaagtaacctgtatgtatatatttttttgacagaccttttcagagtcagcaatacaaagcaaagtacttggtcttttggtaaggtgaattgttttgaattaattttaattgcttaaaagcaaaacctaacacttatatagtacctactatatgctaggcagtattgtaagcaatttacatgtataaactcatttaatctttacattagccctacagagtaaatactattgtatatcagttatctattgttgtgaacaaactatagcttagtggcttaaaacagtagccatttaatttacttatgaatctgtgggtcagtagtttgagctcagctcagctgtaaagttcttctggtctgtctggtctcatgtggggtcacttatgtagctgcagtcatctggtggcttgactggggctggagggtctaagatggcctgactcttatgtctgacagttggtgctgcttaccagctggcgggctttgtgtccacaggcttctccacatggcaatctctagagggcaggccccactgtccaagcgctttttaaacctctgcttatatcaccttgctaatgtttcataggacaacacaggttatatatttaagcccagattaaaggcagtaaagtcacattgctacggggtgtatatacagggataggagaagttgtgttatttttgtattctaccatacactgttatccacgtttcatagagaatctga

SEQ ID NO: 53809 - DNA, 1042 bp, Homo sapiens
ctagtgtaacatataaaataaaatactgcctgactttcattgttgttgttaaaagataacgtaacattgagcaggccttcagtaatgttaagtatttgaattaggccttgatttgtattctagttcatccagttattagcagtatgaacttgacaagtttgtcttgcttagtgtcacatttctttgtagtagtattttaaagattaaatgagataaggtagataaaaagacaattttatttatctagtactgtgcctggcacttagtaagtacttatttagtgattgttgttaatgatcatcctcatcaagggagttggattgtgggttttaggctagcttgaggcggaggcgggtataagaataagagttctgaatttatctgacctgagaagcaggaaagggaaaaaagccaattcctgattctcccctcccttcttgtctctggggttctctgctccatctgacctgtagaacaacatagcagaagtcagagagctctcttccaagctggtgaccgaagatgtgctgaagcatatcaacagtttactctgtagcagggaaatggaagtcagctattttgctgcaggtatcatagcccacctgacatctgacagacagctttggatatcccgtgacttccagaggcgtactcttctccaagatctggtacaggaaccacattcttatttataaaatccagagtaatctctaattacagaaaatgtagtttcctaaatcataataatatgattgtagaaagtgggaaaaatagagaaaaacttattactaacccatatctttccatccaaaactatctctgttaacattttgttgcatatgacttacttcggtcctctttctcatcagctttttttttttaaaactatttactttattgatgtttctttttttttttttgagacagggtctgtctcccagggtggagcacagtggcacaattcacagcacactgcagcctcaacctcggaggcttaggtggtcctcccacctcaacctcccaagtagctgagactataggt

SEQ ID NO: 53810 - DNA, 1011 bp, Homo sapiens
ctagtgaacaggtcccactcccatgacaagctcccaaagggaaaaaattgtccaaggctagagaaaagtaacttgcatagctgttccaacacaagctcccaggccttcccagagtccacggtttgagtcttcaaaattgctgctgaaaggctgcagaatgagtccaacttgacttgggattacagctatcatacaaatccaaccttttgtaacatatataaaatcaacaatcaaaggccaatgagacagccaactcacaaactccaatgacaactgatgtgcaattactgccagggcagaacacctgacattgaggaagagcacacacctctgaaattccttaggttcagaagggcatttgacacagagtgggcctctgataattcatgaaatgcattctgaagtcatccagaatggaggctgcaatctgctgtgctttgggggttgcctcactgtgctcctggatatcacacaaaagctgcaatccttcttcttcaactaacattttgcagtatttgctggctgaaagaaaatcaagcagagacactccatggacaactggcattttaaatactcccatgtcaccacattcaccttgctgaagaaacaatacaaaggtttaagctctttggcctaggaattaacagataaaatgagtcaattctaaagcagttcttcaaaacttgcttggcttgtatgaggtaacagatgctcattttagtatgtttacttccagacaactctatgcttcaaacatctttttctttttttttttgagacagagttttgctcttgttgcccaggctggagtgcagtggcgcaatctcggttcactgcaacctccacctcccgggctcaagcaattctcctgcctccgcctcccaagtagctgggattacaggcatgccccaccacgcccggctaatttttttgtatttttagtagagacggagtttcaccgtgttagccaggatggtctcgatctcctgacctcatgatccgcccgcctcg

SEQ ID NO: 53811 - DNA, 1006 bp, Homo sapiens
gtgaaccgagattgcgccactgcactccagcctgggcaacaagagcaaaactctgtctcaaaaaaaaaaagaaaaagatgtttgaagcatagagttgtctggaagtaaacatactaaaatgagcatctgttacctcatacaagccaagcaagttttgaagaactgctttagaattgactcattttatctgttaattcctaggccaaagagcttaaacctttgtattgtttcttcagcaaggtgaatgtggtgacatgggagtatttaaaatgccagttgtccatggagtgtctctgcttgattttctttcagccagcaaatactgcaaaatgttagttgaagaagaaggattgcagcttttgtgtgatatccaggagcacagtgaggcaacccccaaagcacagcagattgcagcctccattctggatgacttcagaatgcatttcatgaattatcagaggcccactctgtgtcaaatgcccttctgaacctaaggaatttcagaggtgtgtgctcttcctcaatgtcaggtgttctgccctggcagtaattgcacatcagttgtcattggagtttgtgagttggctgtctcattggcctttgattgttgattttatatatgttacaaaaggttggatttgtatgatagctgtaatcccaagtcaagttggactcattctgcagcctttcagcagcaattttgaagactcaaaccgtggactctgggaaggcctgggagcttgtgttggaacagctatgcaagttacttttctctagccttggacaattttttccctttgggagcttgtcatgggagtgggacctgttcactagaagagaaaggaaacctacagggagactttgatatttatattaaatttcctttgttgttatcgtcatgtgaagctatgagaaaagcttgggaagcatatgcttcaaaatgtagtgtttagaaggcagaacccctgttggagagcggggaaaagaatttatttatttatttatt

SEQ ID NO: 53812 - DNA, 1588 bp, Homo sapiens
caaaagtgtttcacagtgatgatttcgtttggtcctcacgaaaacactgtaagttaacaattaaaacatatttattgaatatgaagtgtttttattttgctaaatcttcacaagttttgttttgtaggtgaggaagctgaggcccagagcatttaaacaatttgtccacggttatacagcaagtaactggcagagactgggatctgcagtctgacccctgacacatgttcaaccgatgtcagagtttatttattacctctgttgttcacaggaagaaactaggggtatcttaaaatcttctgacatctctaatgagtgcctgataactgagagaggtcaggggctgagagccaatgataccaagactcagagagatctaatttaattctttatcattcaagtagagagacaggcattttccaaagcaaacccaaccctcgtgattatttctagccagggtgaagctaaggaaggtagcagtaggtggtaggatcagcaccttggttccaggcatcacgccagtcattttatttccatcatcatccttgtgaagaaatggaagtctggagaggtgaaatgatgaaggcaatctggccacaaatcttccttctggatcctgctcttcagggcatgcatctcccatgctgaaggttaaaatgggggtcatttgccaacaaatttgggagtccgcttctccctgaaggctgccatgccctctagccggtcccgggttggaatattctgcaacaaggtacaaaatattagttttgggggagcagggccacaggcccaaaaagagttgcttaagcttgtccagcccaagacaaggccagggtccaagtgtttccattgtctctggactctgatcttgaggcatgcaaaggtataagcctccgtggctgctttgtctcctggggaagacaggccagcctttgtattctctgtgccccatcagcattagcctccacttgcacactgctttcatgcctcctgagaactcagctgccgtctgcagtggtctgacatgaggctgctcagtagagaaaaaaattctttgcagtaagaaatctggctttgaatccaggttcacactagtttctccaagtcccaggaccccttaggagtattttggatatctgttaacgtggagattagcattttttactcacccatgagtaagagatttaataggtcagtcccaagtgtacagcccctacattgaacacagcctgcaggctacaaccaagcccttgacctcccaactccatcctgaactttacagtggcatctgatacagaggcaaaagatgtggttcttcctcttaaggacctgtgttctgtgattctcggcattaagtgggcaggatgaaccccagtacattagatggttgagggaaaagtcccagagagaagcactatggctctcctcaagccactccaggtgacttatgagggacgatggatgcggtcagactgtttgtgttgagaagaaccttctaaaattggtcatgtaccatacaaagtccctctagcctggcccagcctatgttaacaagcaggcatgggctggttgctacatacctgggcat

SEQ ID NO: 53813 - DNA, 1478 bp, Homo sapiens
cagtgagccatgtttacaccactgtacaccagcctgggtgacagagttgagaccctgtctaaaaaaaaaaaaaaaacagcaaaactctcccccgccaaaaataaaaaaaaaaaagatgaatatggagggagttgtaaaattaaagaaggtacatgggtgcatgtgtgcttgtgtgtgtgtgtgtctgtctgtctaacaacagcagaagcaggcaagggctactgtggtagtcactgttgttcctctccccattttgcttcacagtttacaagtccttccactttctctctgaggcagaaagagcaagggtttttctctccattttatggttgggaaaattgaggcctgcctgagtgtgtgacttgtggcaagtcactctggtcatctagggcagaggctccccagatcccaggcctcctgcctccagtccccagcccgcagcccaggattaggcagagccagctgctttcccgtggctgccctgactccttacagggatcactgagattctgatgaacagaccttctgcccgcaatgccttggggaatgtcttcgtcagtgaggtaagaaagggcgggcgccagggtgggctggggatgggctggcactatctaactgggtgtcctctgtagctgctggaaactctggcccagctgcgggaggaccggcaagtgcgtgtcctgctcttcagaagtggagtgaagggcgtgttctgtgcaggtaggttctctctcctgcccccatctgtgctctgcagggtgcccaccagcctccaggggttgggggaaaccttagatcagcttcagcatgggactcattgttgccattttaccgatgtgaatgcagagactcagggaggaaaattcccttgcctaggatcacatagctagtaaggggtaggatagactttagtttgaacttggcctctctaacccttagatcttagttatttcggctatgccatgctttgttctgacccttcacgggggaaataagaaaatggagtccaagacgggtacagtggctcacatctgtaattccagcactttgggaggctggggcgggtagatcacttgaggcccgagttcgagaccagcctggccaacatggtgaaaccccttctctactaaaaaatacaaaaattagctgggtatggtggcaggcacctgtagtcccagctactcaggaggctgaggcaggagaattgcttgaacccgggaggcggaggttgcagtgagctgagattgcagctctagaattcctgggctagttcctgcccctctcggagcttcagtttccgcatctctcacagaagggctggaactgatcaaagatttccaaaggctctcccagctctgacttcctgtagtctaggactggaagagtctatttactctctactcctgctcacccctgcatctggcctttgaggaccccaccacggtcactcttcccgccaaggcgcttgcccacctgca

SEQ ID NO: 53814 - DNA, 1050 bp, Homo sapiens
aagtgaggcgcaaatgggaggtgaagcagtgaggttcgcaagtgtagacacgctcaagggactcattaaatgtcatttcatttaaaaaatgaaattgagcatatgtgcaagcaaggttcacacaccccatttaatcttcacaccaccacggggtagtcactattatccccattttacaggattaaaacactgacgctgggaggttgacagagttacaccaaatcacacagaggagctgggcttcccccgacctcctccgctcaagtctccctgtccccgggaggtgcggaaggaggcaacagacgcttggcccataggtggagcaattggcgaaggcttcgcccgacgccggaactgcgagctctcagcgggagccgagacggtgcagggccggagaagcaccttcactcccagcctgcgccccgatgctgcgcgttctgtgcctcctgcgcccctggaggccccttcgggcccgcggctgcgcttccgacggggcggccgggggctcagagatccaagtgcgcgccctggcgggtccggaccaaggtaaatgtgcagttccggggcggcgcatgacgcgactgggactaggccggaggcagcgggggaccggcaggtgggccgctcagtgcgttgaaggattcgatccccagtccctccctcccagttctaggcgccccaaaccgctccaggcctgagaggtgggcggccgccttagtggctccagactctagctgggggcggggggcctctggcaacctcggtctcttcaaaggccctttggggtcttccgactgtgtggaagggggagcggggtccgcacgggtaggactgggccccgcggcccccaggccaggagcgtttaagtgcgcgttcccctcccccgccaagggtcctggcccggttcgggggcggaggcagcggagccagtcccagtgcccagtgcggcagcgggcagagtgaggagggtgcctctccagccgcgcgcccgccctgggccgctagcgaacctttgcgtccttctggctccagggaaaagttcgctgtttc

SEQ ID NO: 53815 - DNA, 1050 bp, Homo sapiens
ttgatttagacattgtatccatgtgtgagatcctgcccatccccgctttcttggtgtcctgtgagtttaaattcatgaattcactctcaactgccaccgctaacaggacacaggccaattccaacacgaaccccaacggctctcctcagggtcacctttcatgagtccgctttccggccaacccctcctctcagtcttaggccccactgcaagcctactcccgctcaccgtacagaacctaagcacaggatcagagatggggacaggttgactcagtcccatgcccaagtccgcaaattagggattcggctgcctaagggctagagaacgctccccgccccacaggacgcgccccaccccgccccctcctcctgcccctacgcacgcgcactctcacgcgcctgtgttgccgcccgcggccctggcttcgggcttcagggagctctggtgcagtctccgcctgtcagtgccggcagtcgtccgcggcgcccgccccggtcccgcactggtgcagccatgtcctcttccccgtgggagcctgcgaccctgcgccgggtgttcgtggtgggggttggcatgaccaaggtaaaccgagcagcggccctgctggccctctgaggctcgggggcggtcggtgcctgggtttctctgtccctccggtctcctagcttcgactgctccgcgcgtgggtcatcggcgtggcgacttggtggcttgtactctgcggaatctctggggtcatagcgtctcgggctggttcctgcggccttctgcttcctccttcccttttcttctggtcagagttcatgaagcagccccgagataatccaaggatctcacctctttagattctgagcggagtcccgaggtgtgtgggctggcttgccccggagggaggcaggtcgcgaatgccgcctgctcggccctcccaggaacagcccccacaggagccctcacagagacagctccagatgtggatggcgaggagaaacgctcctgatgcccagcgcctcggcccgagtggcagattccggcctccctctgtccctc

SEQ ID NO: 53816 - DNA, 1062 bp, Homo sapiens
tgatagcatccttaagctctctttcttgttccatagacagagtcacctcttgatcttttctttgtaagatgagcacattagtgctatctgctcccagtaatgacagtctttctcattttaccctctagatgtgcagtggagctacagggatgaataagacaagggacaaggaccttgtcattaaggagctgtaagactcttcagatttaatgtagatagatgtgaagttataacagaaagtgttaagtaccaaaaaggagatacggaaaagtgatgcagtagcttagaggaaaaaatgattacttctgaaagtagagatgtgacatgatttgatgaaggatttgtcatttgaattgagcatagactatatagaggtagtttactttgagaaaactctaaacttaattttcactctcctaaaacaaatacttaaagcactttttgataaaaacctttcgtttttataggcaagaaggctttagctgatgcacagatcccttattcagcagtggaccaggcatgtgttggctatgtttttggtatgtattaaactgtgtattctaaaatttttttacctaaatctagcagcaactatacaaacaatgcggaggcatttgtgaattttaaccctcaaaaactcagaattcattcaattatatttgtattgaagaaaaaagaaaaaaatctcagaattcaaagtctgatttaagggaattaccactatttaaagatttcccttgtgtgtcaacctagtgtaatttttcttttggtgactattccaaattatactgtaaagatcttctttggcctttttaaaaatatggccaggcactgtggctcacgcctataatcccagcactttgggaggccgaggcaggcggatcacgaggtcaggagatcgagaccatctggctaatacggtgaaacccttcctctactaaaaatacaaaaaatgcgcctgtagtcccagctactcaggagggagaggcaggagaatctcttgaacccaggaggcagaggttgtagtgagccgagattgtgccactgcactccagcctgggc

SEQ ID NO: 53817 - DNA, 1040 bp, Homo sapiens
gtaaagtatttcattaataatttttttttttttttgagacagagtctcgctttgtcacccaggctggagtgcaatggtgtgatctcggctcattgcaacttctgcctcctgggttcaagcagttcttgtgcctcagcctcccgagtattacaggtgtgcatgctaccatgcccagctaatttttgtaattttagtagagacagggtttcaccatgttgcgcgggctgttctcaaactcctggcttcaagtgatccacccgcctcagcctcccaaagtgctggggttgcaagcatgagccacctggctcactgataatttttttatgttgattacatgttgaatgaaaatattttatatatatataaaatgtatatattaaataaaatatatactagaaaatttaaaagtattgtgtgggcattatatttctgttagacaatatttatttagataattaatgtaattattgatacagtaggatttaggttggtcatttaattatctgttttctatttgtcccctgtaatttttgttcctctgtgcccctcctcttgacttcttttgcattatttaaatatttttagtatgccatttcaacttatcgattgtttttttcaccatatctctttgttttttcttctttgtttatcccagtggttgctatagagcatggtttatcaaccttggcactattgacatttgagctctatcattcttgtgatacagcttgtgcatggtaggatattcagcaatatccctgcctcttacctactaaatgccagtagcaccaccccccacagttgtaacaaccataaaatgtcttcaaatattgtcaaatgtcttctggggggtaaaatctctcccagttggcagggcgcggtggctcaggcctataatcccagcactttgggaggccaaggcgggcagataacgaggtcaggagatcgagaccatcctggctaacacggtgaaaccccctctctactaaaaatacaaaaaattagccgggcatggtgttgggcacctgtagtcccaacta

SEQ ID NO: 53818 - DNA, 1024 bp, Homo sapiens
agcagttagaatgaggaatttataaaactagttaaatgtcacttgtatgtgacaactttttaaattttatagactagagttaccggagacagatttttgtttttttgagacagagtctccctctgtcatctaggctggagcgcagtagcacattctcagctcactgcaacttccacctcctgggttcatgcaattcttgtgcctaagcctcctgagtagctgggattacaggtgcatgccaccatgcctggctaatttttgtatttttagtagagacggagttttgccatgttgtccaggctggtcttgaactcctgaactcaagtgatctgcctgcctcggcctcccaaagtgctgggattacagacatgagccaccatgccatgccatcagagacagttttgatcagtgggaagagtaccttaatcaactttttgatcacactactggctttgagcatattaatttagccttttccttatttagaaaatactgaaaatatgtactttagggatcagaaaataacaaattaaaaatatctgccacacattgtagttgctcaataaacttttggttttttatttcccagtgcattttcctttcttctttcctatttctctagttgtgtcactggttaaaggtcaaaaatagttttatcttagtttaatttaattcaattttatagagacagggttttgctatgttgcccaggctggtctcagactcctggagtcaagcagtctgcccacctcagcctccagtagtgctgggattacaggtgtgagccactgtgcccagcctgaaaatggttttatttattaattataaatattacttaggggtataggaaaaaaatgaacttaaatttttagtacagtatggggaacatatccaactcattgaagcctacagcttggccaaagaggatcttatcatatctcccaccatacctctatgaggtttctttgtttgtcttccaactctcaactctgtgggctgtatttctatgtgtgatggacccatg

SEQ ID NO: 53819 - DNA, 1052 bp, Homo sapiens
ataaaattaggaacagtaaaatccaaagaactatgtaaacaaaaaagcttttgttttgcttacaaagtatatttaaggattattctgctgaagattcagtttaagagttttccttgggagaactaagtaagaaacacaatgccaacagctggccagtaattagtgttgtgcacttcatgtcattaatcaatttctcaatagttcttaaaattagtgagattaaaaatctaaaaattttgcatttcatgctatcagaaacagtattttcttcccaaatcaaaataaaagaaatatgatcagagcttgaacacaggcttatttttaaaataaaaatatttttaacatgggtttccttattgaaaaatcagtgtattagtcataaaacaccatcattaagaataattgaacaataaagtttgctttcagatgcagttttcaaattataatctcatttcaatttataacgttctcagtcctttgttataattttcctttttcatgtaagtttaattatctgcatttatcttttttcctagtttttctaatactaatgttatttcttaaaattcagtgagatataggataaaataatgctttgagaagaatgtttaatagaaaattaaaataactttttctggcctctcttgtttttactgtgtatgttcttgctcagggctctctagataatgcagaataaagagaaacgttgggggatttataaactgaatgttatctggacataatcactagtttttgattggggaggcagtgtggtataatagaaagagcacttgactgggagccaagagacttgcttctcttaggcagataactgcctgcctggacctgtttgctaaactattaggagatttaagtagatgatcccaaaggtcccttctgctcagaatcctgtgagtttcctcagagcacagtagaatggtttgggaattacccaggccccacctttctgttgtttactcattacttcacccataggtggtcagaggtagacaaccagctggtatcatttgtttaggtgtttggagcccttg

SEQ ID NO: 53820 - DNA, 1003 bp, Homo sapiens
cacctggtgggaattatttttttggtggacaaggctcatcaatggaaagccaactctgtatttttgtgctttttgttagtgattttgctgttgaaatggccacaggtatagtgctaaagtgctttctaatgttcctacgtatgagaaagctatgatgccccttacagagagaatacgtgttagataagctttattcaggcatgagctatagtgctgctggctgtgagttcatgaatcaacaatatatattaaataagttatctttaaacagaaacacataaagctagattattgattggttgatgaaaatgtgaccagaggctcataggaacctaaccctgtatttccccggggagtattcattcagtattccctaattcagtgtttgtggtggctttactgcacctaactaccatgaagaacaagaaatagtctgtattactggacatattactaccctgcagatagaaaagccttgtgctcaagccttgaaggaaggacaaaaacttcatttcatttgctcagcacctaataacagcagctagcatctactgagctcttacatgtgccaggcactcactatgctgagtgcttttattttattttatgtattttttgagacaatctcactctgtcgcccaggctggagtgcagtggtgcaatgtcagctcactgcaacctctgcctcctgggctcaagtgatcctcctacctcagcctcccaagtagctgggattacaggcgcctgccaccattcctggctattttttgtatttttagtagagaccgggtttcaccttgttggccaggatggtctcggacccctgacctgaaatgatccacctgccttggcctcccaaagtgctgggattacaggcatgagccaccacgcccggctgctgagtgcttttaaatgtgttacctcatttgattctttcaacattcaatatgaactccattgtcctttttttgtttttgttttttttaaatagaagacaggactc

SEQ ID NO: 53821 - DNA, 1050 bp, Homo sapiens
tccatgtctgctgtctacagaaagcttcatagggagcaggtgcccaaggcaggcttcctctaagaaggggatgagttcttcctgggtctcatactaggcctccaggggcagtaagtgcccatttggcaggaaggagaggggccatggggtcatcctgagagctcatttgggcctgcctcctcaacacacttcctttctaggctgaagacaatgagaacttcaagacaatagtggagtttgagtgccggggccttgaaccagttgatttccagccgcaggtgtgtgtgtatctttctggggaatctttgtctttggggaggggatgtatgaagtgacagccagaactgtgctacctacagataccatggactagacattctcctttctagcggtagtaataattgtcccttaagtggctgctgtatgcttgggcacccatgccatcatttttacatgttaccacatttaattcttatggtaaccctatgaatttattcatcctgttcttcagatgaggaaggaactgaagagattttgcaacttgctcagggtcacacagtaagcagtggagctatagtttcaacccagatctatctgacttgagctggtgctcatccccctttatttgtgcatgtttcacctcacaacaaatctgtgaggtaggcagaagagcaaatacttcatccccgttttatcaataactaaggtccaacctgggaaatgacatgcccaggagccttcagcaaaccagggctagtggaagggattacgctgcccctgctgccttctggtccaaggctgtaattcagagaaaccaccactctagttctgaggcagctgccgggtcctggaagctcagcagttattccaagacaggtactcatactgcatctctgtcctccatcccagaagtgtgagaagagccagcagcctggccggcccttacttatagcccaatgccttcttttgccaagactaactggtaccttcttgtgccctgcaggctgggtttgctgctgaaggtgtggagtcagggacagccttcagtga

SEQ ID NO: 53822 - DNA, 1462 bp, Homo sapiens
ccccaaagatgaaatgtggcaactgtggtgagatttcggacaagtggcagtacatccggctgatggtaactgttccccgcccaacccccaacataaacactcacaaacacacatacacttctgggcagggatttggggaaactggccttcatctctccagttctttgctccctgctttttgtggtttgggagggtaggtgtcagtgtgatcagcactggattcaataggcatctttgaggtatgaggcagagttcaaaatcaaggggaagccctttttttattttcctcaggaagccttcccaggagtcttgtcctagtaagttaccctttctgggtcttggtctctttaagtggacaataaatggtgggctcgatctcctcaggactgtacatctaattcatatgtgactgaaagttctgtttgctttttgccaggacagtgtggcactgaaggggggccgtggcagtgcttccatggtccagaagtgcaagctgtgtgcaagagaaaattccatcggtaggtcaggctgtgcgtactgagttctgccagggtggcccacagcttcctggcaccaggctgaaagtagactcatgttacctgagggtggagtcaggcctaagatgccgacacctgtacagcgtgatctttttcagggccacatgtgggcacctggctggggcgagggtatggactcaagtcaactttgtgttctcttttctatttcagagattttaagcagcaccatcaagccttacaatgtaagtttgctgctgtagtggcagggatggtgggcttaaatcctaactggagttagtaggtctgggttctagagtcatgcctgcatcagagtgacctgccataggacattcactcatgaacttagttcttctttgactcagtcatttatccactgtacactgagtgcttggtatattgcctcttgcagtgccttcttatgagggctgggctgtgagagctcaggggacctctgacacaacctagctgttcagtttgcatcactgagagcacttgccttgtcttcattttaggggactagcaagctttctctgaaaccatgggtggggtagtcgtttggtgcatcccatcctttatatcatcagtgttaacaagttagcccaaaggtgagggagggtgtgctttggatctgtttgtttaaagaaagccagttatatgtattcacctattccttatttggtatttatttaaagtatcttgagttgtgccaaattcttggctttgtcctgaagttaaagagaaattaaatgaggactcgccttcacgtacataataatctagtggaaaatacaaaaaacaagaatcgaactagggccctaacagagaagtgccttaccagtgccagagatgtggtcagtgtgcaggaaattactttacagtgaatgacaggatgagactgaatgtagggcatggcacttgtggtc

SEQ ID NO: 53823 - DNA, 1071 bp, Homo sapiens
ggcggcaggctgcttttaccgtccggtcgaaactcaaactccaggaactcgtggccgaacttgcccttgtgccccacgtagtaacgcagataaaagtcactctccatggctcccaaaagacaaccgagcctgaacttccaagagcaagccgcactgccgccgtctgcgcccgacactgacgtttgcggcggcgcgcggaagtgacgtcaggtcccgtcgtcgctgcgtggaggggttccttctcgctaacctcttcgcccggaagtggcaacaagactgcaacatcccctcacgcctagtctgtaaagaactttgtttaacccggaggcggggccagccagctccgcccctccagctggacgcgggagcgaggttgaggttcatacccctgggttctctccaggcctgaggcggagagccagccgcctgcctacctctgggctttgaaccccgggtctggtgacttcgcttaaagacctcgggccgaaggcccgccaggctcaacctcggttcacaggacccccgacttgtgtgagtcgtacaccgctctttaccgtctctggacctaggtcatctcggcagtaaaatggggtgaaatgacccgacctccccggaggatgccgcgcacgatgtgtgcctcaagttggcttccactgacctgaactgttaagaaagccctcctcagtgacgccttccctgaatccacagtggagattgccgttttcctggaactaattcacccacacttacccatttcatccctttccaccttttatttctacctttctgccccactgatctctagaataggtgctgggagacgttagagtatttgatctcccactccccagtcatcccacttaccgagcagtaattctctgcctggctgcacattgcaatcacttgggaagcctctaaaaatactgatgccagggctctaccccaagccagttaaaatctccagcgctggacctgggcattggtactttttgtaaagctttcaggtgagtcagagttgaggaccactgaccaaagaggtcctttcttttcagggtaaagttgtcctctgtg

SEQ ID NO: 53824 - DNA, 1087 bp, Homo sapiens
ggatgcattgccagcactttgcagaactgatattattcagcctcaagctttccagtggccaaagggaaatgctgactgcttttcatatatttgagtcaaagattttttatatggtcaatgaagactaatataagggcagtgggattttcacagatgcatgccatgttgtcgagagcctcttagattttctcaactgtgagaaagaaaaacgaaaatgttgaagacgttgagtctggagaggggatactaatcactgtccagttgggcactggtgggaatggggaaatggcacaggaatgcaagcctctccaccctaccccccgaactccagccatacactcatcgtttcacaaaatataaatgagttagcattaaatgtttcagagtaaataattccttttcccgaaatgcatgaagatagagtaacagacttctcacactgtatttttagggtatggagaatttagaaggttaaagaattactgcttcaatttttcagttaaaaaaaaatcaggaagctctgttcattcaggctatgcaccatgtgcacagtcaagaattagcagaaaccctctgcatttacaaacactttgtgctataaaaaagtaatttttaaaaagccacgtgtgtgtgtgtgtatatatatatatatatatatatttaaagccaaggttttgatacttttttacaaaaactacaagagaaaacaaatatacctgtccaaaccatatacttttaaaagagcatttttttttccatacaagctgttgttaatttgggggtaaagtgctgatttgcaaacttcatcaaattgttcccaagtggattctccttgtttgtctccccctaccaaccccaaagttaccatatttgatgtaagaatcaggcatgttagaatgttgtgtcacactaactgattctgctctttttgtcttgtcattcaagttccgttagcttctgtacgcggtgccctttgcagtctggtgtctcttccagaggcgagggggctgaggatggggtgctgcatctcactagctatactggcatcatcttggtaaactgaaaaccaaatgtggacatttgtaaa

SEQ ID NO: 53825 - DNA, 2259 bp, Homo sapiens
aaacagaatgatgaaaaaatctacagctttggattcatacagacctgggatcaaattttagttcagccacttgctatgtgatccagaacaaaccctacttaagctcattgagttttgtttctcatctgtaaaataaataggataaatcctgtctcttaggatagtttgaacattatgtgagctaatacctgttaaagtaacgtaagtctgtgatttgtcaatactaaataaatagtaactcttatggatctaatgatgaattctttggtttgtctccccagcgagtggcattaagccttgaagatgatggactaccctgaggatgggatcacccccttcgtgcctcatggaattcagtcccatgcactacactctggatggtgtatgactggatgaatgggtttctatatatgggtctgtgtgagtgtatgtgtgtgtgtgattttttttttaaatttatgttgcggaaaggtaaccacaaagttatgatgaactgcaaacatccaaaggatgtgagagtttttctatgtataatgttttatacactttttaactggttgcactacccatgaggaattcgtggaatggctactgctgactaacatgatgcacataaccaaatgggggccaatggcacagtaccttactcatcatttaaaaactatatttacagaagatgtttggttgctgggggggcttttttaggttttggggcatttgttttttgtaaataagatgattatgctttgtggctatccatcaacataagtaaaaaaaaaaaaaaaacacttcaactccctcccccatttagattatttattaacatattttaaaaatcagatgagttctataaataatttagagaagtgagagtatttatttttggcatgtttggcccaccacacagactctgtgtgtgtatgtgtgtgtttatatgtgtatgtgtgtgacagaaaaatctgtagagaagaggcacatctatggctactgttcaaatacataaagataaatttattttcacacagtccacaaggggtatatcttgtagttttcagaaaagcctttggaaatctggatcagaaaatagataccatggtttgtgcaattatgtagtaaaaaaggcaaatcttttcacctctggctattcctgagaccccaggaagtcaggaaaagcctttcagctcacccatggctgctgtgactcctaccagggctttcttggctttggcgaaggtcagtgtacagacattccatggtaccagagtgctcagaaactcaagataggatatgcctcaccctcagctactccttgttttaaagttcagctctttgagtaacttcttcaatttctttcaggacacttgggttgaattcagtaagtttcctctgaagcaccctgaagggtgccatccttacagagctaagtggagacgtttccagatcagcccaagtttactatagagactggcccaggcactgaatgtctaggacatgctgtggatgaagataaagatggtggaataggttttatcacatctcttatttctcttttccccttactctctaccatttcctttatgtggggaaacattttaaggtaataaataggttacttaccatcatatgttcatatagatgaaactaatttttggcttaagtcagaacaactggccaaaattgaagtcatatttgaggggggaaatggcatacgcaatattatattatattggatatttatgttcacacaggaatttggtttactgctttgtaaataaaaggaaaaactccgggtatatgtatagatgttcttcattatagacatcttctttgcttttcttggccttgggggaggaagggagaagtgctcttttctacttgtggggtctcccattggaaacataatcctatagtcccagaaggattcagtccccagtggctttcccatccaaagagaaagagtttgagtttcttaactctgctgttctgccacttactcccactagacaaccagggacaaggtgcaacatggaagtgtttgacttaagtaggagcagaggagctgcatctaatctcatcatacctggaacttgacacacttaagcaaatgccttcccatccctacctgccagatgcccccaactcaatgaagttggatgtctcaccagcttgataccctttgaattttcagtcagacattctggagttctagcatcctgtacctaggaccttcctctgtgtcactcttggcctcctaaactc

SEQ ID NO: 53826 - DNA, 1026 bp, Homo sapiens
aggcatgtgcaaaggcttgaaggtacaacacagcatggctttttgggggaatgaggaccacaaagtggcacagcaggtgtcactgttatacagcacagtcagggggctgagtgtgacctcagaggtcatccacagtgccatccccctgtcaggcaatcagcagctttgatcgcccactgtgggcagagccctgtcttggggagaccagagaaccggaagacccagcccctgccctcaaggagctttttgtcttgccgggggaaccaaggtcacagctgcaccaactcccgaagaaccctctttccgagctgcctgtcgtcaaatccaaggtagggcagtgccactctaagtctgaggggctggtgagtgagggcatgaaccaaggcaggcgcagccaatcctagaaggctttctggtttgggaaggctgcaaattgtaagctgggtgttggggcaaagaagaaaaatgggttagtcacagaccaatgaatggcatgtggaagaaagcaatcaagtttggggcagggcagacagaattgctgctgaggcaaactgttcatgaaggggagacatgggaaatgagatggagcaaatgaggagggttagcagatggccttgaggatccttaacctcggccagtccaaaaaaatagttgcttgaccagtttttgaagatcagagggagcacagtggaagaagcactgaacttggaataagaaaactcccagttccatccttccactgccctgtgatctcagtcacttctttctgctcactgttatttgtaaaatgagaataacaacccccattctacctgcctcctgagtttataaagtacaagtgagatagcacgtgtgagagcactttgtgacttacaaagcactctgcacatgtaaagtgacattatttccagagaaagaaatgactcagggggagttactcccgatgagtgttaaggaccaagtaataagcttctgccagttgcagagaaataaggaaatcaacatttagtgagcacctactgtgtg

SEQ ID NO: 53827 - DNA, 1050 bp, Homo sapiens
ccttttgcaatataattgggactaatagttaatacttcaaccgcatacacagattcatgtcctaatcttgatgtatagccaaggcctttcatttgagcctaagtctactgcattattaatgatttacaggttcaattgtttaaagtggaataagaatttcaatctattggtataacaatatatgagtgtaaaatccttctagatttatctgatttcccctccctacagtctttttattgctgatcttacaactaattccacagcaatgttttaatgactcatctttattgaatcaaagtgaagtgcttagcattcagctaaagaaaagatcatagcccactggggagattaggaaaggcttcacagaagtggcatttgagctacgccatgaagataagttcctaagtatatctcagaggcaataccttaggcaacaaaattatctgtccaagtgacctccatggtatttcccctccagcacctcaatctacctcaactacgacgttagcttctaccatgacgaggacagtacctgccaccacaagagcccccgggaccaccgtccacagatccacctaccagaaccacagcacagagacaccaagcctgacagctgcagtcccaagctcagttagtgtccccagggctcccagcatcagcccgtctaccctaagccctgcaaccagcaaccactcccagcactgtaaggaaatgagttctgcattctttcatgacatgggagggctcctagggaagccaggaagggggtatgtgataagacagaacctaccagagctgaatactgcatatctttgaggaggttactgcatatctgagagggaggtagagtaccagcctgcgatttaggactcataggtgcccctaccttacagagggtcttgtaggaagctgagaccctgtgagcctcagttgcttctcttacaaagtggaaataaccacccttccacaacctgcttcacaagattgccatgatagacaaaggtgtaaccggtataactggaggtgctcacgcacacagccgttgctgac

SEQ ID NO: 53828 - DNA, 1109 bp, Homo sapiens
tgcagtagtataagctaatgtatccgagggccatataataagtcagcttattggttgggaatagaatctaggaatcctactactaggttgtcccctcctctatcactaggatacattaattctaactgtaactgaagtgttggctgccagggtgaaagagggagagcaagggagtgtaaggagctaagattggtgcctgattctagacctagaaatttaaatgagagacatagtatgtggcacagggaaaaataaaaaccgcgggcttatgggctttggagcccagccgacctcaatttaagttctatctctagtccagacatggtggctcatgcctgtaatcccaacactgagaggctgaggcaggaggatcccttgagcacaggagctccaggcagcagtgggctatgattgcattactgcactccagcctgggcgacagagcaagacccctacctcttaaaaaaaaaaaaaattcctagagtataggtttgacgaatttgttctctttgagcctaggtgtctttatttgtcagtctgggatgtaacgtccccacctctcagaattgttgcaaggattaaatgagagtgtagggataaaacactaggtatggtgctggaaagtacccaataaaagtagtagggaggccaggcatggtggcttatacctgcaattccagcactttgggaggccaacgcaggaggatcacttgagcccaggagtttgggaccagcctgggcaagaaggcaagactctatcactacaaaaactataaaaatgacccttgtatggtggcatgcgcctatagttccagctactcgggaggccgaggtgggaggatttcttaagcccaggagtttgaggctgcagtgagctatgattgcactgctgcacttagtctaggcaacagagtgagaccctgtctcaaaacataaaacataaaaaaaattgaaaaagtagaagggcttcacaattgcagagatgtggaaccaacctaagtgtccatcaactaatgagtgaataaagaaagtgtggcatatatacaccttggaatactactcagccataaaaaggaacaaaataatgtattttgcagcaacttggatgg

SEQ ID NO: 53829 - DNA, 1262 bp, Homo sapiens
ctgagccacccttttgggatagctgtgtttgaggtgagtcctgtaaggagaggcaagggcccactaggaagctgaagcctagaaaatgcttgttcaaataggatgagtccctgagacttgttcaaatgaaaacaggaacagggaaaccaactgatttgtttgtaaacaatctgtgagctgcctgcacacaaaggctctgcagcccactctccacctggcagcctttcccacgctctcttcccaagacccctctcccagagcacttctcacaggtgagctgctaggcatgtatgtttcctctctgtgccctcagcacccagcactgtaacccatatacaaaaggcacccagtaaagggaggaaaggaagaaggaacatacatatccttagaatcatttactggaggaaatggcctgagagatgctgttcaattctgcacacttttattgacctctgccagaccctggggtcatagaagtgaatcagacactatcctagtctcaagaagctcccagcaaagtgaggagcgaagaccctcctgtgccctgaccctaatgacttttcttctccgggaatgaagaagccagaaccaaccaaggtctcacaccttcacctcttcccgaaaactaactccaccaccaaggggagggaaagcaaagggatgatggtctgtggtgggcattggcaggatttgcttgcagcaaagttactcagcactgctctgaagttgtgggcaaagctccacctctaagtccagcccctgctttaaaggacaggtgtgttggtacacaagtgtttgtgcttgtttatatacatggcatgtacatgtaaagtatgtgtatgtgcatgggtaaatataaatgcatcagaataaaagtgtgcattcctctaagtgctggtgcttatgtgtgtacatacatataccaagatgtatatagactgcatatttaggggcaaatgtagctttttgtgtgtggatgaacatttgggtatgtgtttagatctgtgtatgaggatgcacagttgtacctgtacgtgtggatttgctgacagatgcacatctaggcttatatggactaaccatgtggactcgtgtggatacccagaggctacaggaagcccagcaaggcataaccctcatagctcacacattccttccaatcttggtcccaggccccagtaatgataatgctatagagatttaaccttgggtttctgctgggctctagcaagcaggcttagttcagcatgaatgagtaatgt

SEQ ID NO: 53830 - DNA, 1337 bp, Homo sapiens
tcacacactggaggaggttctctcctaggactttctcagatgccagcacctgccccactgcatgtctgggccctcttcaggcagtcatgtcctttctttgtcctgagatccacttggcaggaatgccgatgaccaggcgctgggtagacactgagtcactgatgaaagaatgatgggacagatgggtggaagagtggatggaagcaaatatagcaagtgctactcactgacaactagattcctgcctccctgcaacatacagacactccgttcacacacacccaaaaacataactagaacaatgcctgtccaagagatgtaactgaaagaggcaggatttggtgacagactagatatggggctgatggaagaaatttactccttcatagtgaattttgggagtttcaggtttttggcttgggaggtttcatgaatggtggtgctgttctctgatgtgtgaagcagtagaggaggatcagggctcagggtttgggccgtctggttggccgaggggaagggaatggggatgaacagttttggacatattgagttcaaggtgtccatgggacatccaaggggagctagttagctttgcagtctggatcgtaagagagctgttgggattggagacttagttattgatggcagtggacactaaggaactaatcacccagagagagggcaagaagaagaaaacctctggggaaacagcatttgctattttgctaatgttgcctcctgagtgtctactgtattcttagcccttctttccattctcactggcacggtcattcttcagactctcttaatctcccacccagatgctgtaacgtcctcctaaccagtttccctgcttcattccctctccttccaacccatccactccatagatgccacagtgaactaacatgcttattggactatatcctctggcctgtctagttatcactggggagaaatcctaattccttggcgtggtactcaaagcccatcaagatggggttcctgcctacacctgcttgcagtctgacacccacataagcagctcccctaagtatctcactgttccagagcagactcacctctggccatttgcacaagcctttcttgttccctaatggctttctgtcctggtgacttcatgctcctggtgaactcgtccttcaggactcaactataaagccttctcccgccctctcggatgaggcagtctccatgcctctgctgccatagcctctaatgctttccataatcacattgtattatatctggctcaccctaatgggcagagctgtggagcagccccaccttagaaagccagagaccgtggcccatgt

SEQ ID NO: 53831 - DNA, 1051 bp, Homo sapiens
gggaagtccaggtgagcagggggttctagttttaaatggaatggtcagggaagccctcactgagaaggtatttgagtaaagaaggtgaaggggggtgggtgtggtggctcacgcttgtaatcccaacactttgggaggcctaggcaggaagatcacttgaggccaggagttcaagactagtctgggcaatgtagtaagaccctatatctaaaaaaaaatttaaaaactagccaggtatagtaccatgcacctatagtcccaagctactcaggagactgaggcaggaagatcccttgagcctgggagtttgaggtcacagtgagttatgatgccactgcactccagcctgggtgacagagtgagaccttttctaaaaaaaaaaataataataataataaataaaaagggagtgagggaggtgagacagtaagctaccatgcaattatctataggaacaagcatttcaggctgaagagacagaaaccgcaaaagccctaatgcaggagcatgcctagtatgttcaaggaatagcaaggaagctggtacagttggagcaaggaaactaggaagagatgaagccagagaggtggcttggggcagcccaaagggccttctagaccattgtaagagccagctctggatttcactctaactggggggaaaccattgagggctctgagtagggaagggacatggtgtgacattttattctgactgcagtattgagaacagactgtagaggacaagggagaaggcagggaaaccacttaagaggtcattgcaataatccagaagcgaggtgatggtggctgaacccttattcccacattattactgtgggaataatgaaaagtggacagactgcagatatagtgcaaaggccagccaacaggatttgcttatgaattgaatgtggaatgtggaaaaaaaagttacagcaactgaaaaaataagattgctacgtatgggcttgggaaagatggtgagggaagcaggtttggaggaatcttaggctgttttggacatgttatgtttaagaaaactggttagg

SEQ ID NO: 53832 - DNA, 1188 bp, Homo sapiens
ttcccagggctgggcctggctgagtcatccctgggtcccccagtcatggagttgctgtggtcttgttctttcagttccgccaacattcctgggaaacaggaggaggcccaggggtaaaggggttattccctaagcatggctcaggctggaagtgggggcaccccatagctgtgcatggcctggggtgggcagctcagaccagctatatgcatggccatggctggctcagctcagcactgcttggcttggctggagtggcagtgcatgagcctggggggcagagggggagaggggcgcggcacctctccttggcttgtggaattaaccttctgtgactctaaagctcaggagaggctgtaagagcattggtcctggattccctgacctcccctaagaccctgccagaaggtagtgagggagtggaggatggggaaccagaaccagatgacctctgggcatcccttcacctcttgcagcaggtggtaatcctggaaccgggcccatgacaagataggaggaacagggacaggtgctgagaggagaggagttaaaaaacccatcatattagttcatgataggagagaattgatttagcaatggctccatgttaaaaaaggcccaggagtcttaaataaccacaagcacattagggggggcatcctgtgttgttcaggttccttctgggtggcaaactagctctgggccctgtccagacagggacatggacagatggagtgagtccagagaaaggcacccaaatggcaggagaccagatatcagtgctttaagggagcctgtgcaccctggccaaccccacacagcagagctgggagcacaagcagaagcctcagcaggcagtgctggtccacagtggagccagctgccccaggagggaagtgggctccctgaggctggagatatttaagcaggggcattttggaagggattcttagggtatcctgagggttggatgtgacacacacaggacccttcaactctgaggtcacgaggaaggaggcgctgtgagaaacatgtttgtgaaaggaaagaccttgggccactggggaaggcctagctgcctccagcttggtggtggacagagccccagccgggaggccggggacctaagttctggttccactctaccctgtctctgtgtctggcctggagtaggaacctgccctctct

SEQ ID NO: 53833 - DNA, 1431 bp, Homo sapiens
agcacatcccagggccactgctcaggccatacctgtgtgggagtaaggcaggccttgcagcaggaggtggcaccatcctaagccctgaggagttcggacctgatggggagaccagacttggaggccagactaaagcgagacctggatggaagtggctgccctgatgtcggctacagctgtcagggtgggttccaggctagaaagaacagaggctccaggctgtaggtagggtgggcatcccagagaacatgctagaaacccagtgtggactccaggaaggttcatgagtttttttttgttttttgtttttactgttcccaggttagggcttgagggagatttgacagagaagccctgggaggacagaggctaggtcagtccctccctttcctgccttctggcagactgtttccccagcacctacctcctgggtgcttagaggaggttcatcctcctgagcttcccaggaagagcatatttccttccccttttgaagattaaaaaactgattgtgaaaggaagagtagttgagtgaaagtgactcagcttctacctgagctggcaggagatagacactccctctgcctccaggccctgccaagagaagtcccagaagaaggaacttgtggaaaaagagacagggaagccagaactactgagcctagctcccccaacacccagatttggagtagccagggactactgtcctactaatccctctcttctctctcgtcgtttgcatgacacaccaaagaggagtacgtacacacgtgcttgtgtctgtgtgtggcctctgtctctgtgttggtgagaggccggtgtctgtatccatgtcttcttctctgagtaaagcaggggaactgcattcatgcatctatgtgtgtgaccccatgtatgtgtgaatgtatctatggagtccatgggactgtttgtgctctgcacataagctggtatgtgtgcatgtagttgtgggcatgctggtgtgtgcatgtaggtgtgtgcagtgacaccacttcttccttccatggaaggaagccgcaaatactactctggcctctctgcaccactctaccccatccccctcctctcctggctccccagcggaatcacacccaggctaggtagaattaagaaggactgaagacttccctgcaggcatttggggaaaggttacagggacagacaggtgcagacctgctctcctttctcttcccctcacccacctgagccctggaggactctgtgccttccttcatcagaagccagtcactttgagttctctcctttccccttccccctttcagggccatcccacctacacatgccacttcatcaagtgctcagtaaatagaattgttgagttgttgctagctgcaaaaggagaggaaggaggcgagtggatgcatgatgggggcagtgggtgagtgggag

SEQ ID NO: 53834 - DNA, 1091 bp, Homo sapiens
ggacgaggcagccgagctctgcggccgtccgggccccggggccacgtccgcgcccgccgcctgcgccaccgcctcccagttcgcctgccgcagcggcgagtgcgtgcacctgggctggcgctgcgacggcgaccgcgactgcaaagacaaatcggacgaggccgactgccgtaagccccctccataccgcccagccccgcccagggattgcggatccgctatccgatccggatccgccaggtgcaggcttcctttcattgccttacctgaatacattacccgggtttactacagaggagaccgaggctgggagaagtgaggtgacttatttgaattcacgcagctgccgggctgcggagctcaggtctaactccagaagcctccactggtatctgtgtccctgctgtgagccctcccagtcgtacttcccacccccatcccccgaacccctccacccagaaacctggcaggctcaggagctccccccatctctttacccgctaggcctgctcattcctcaaggcctggcctagactcctctgaccttcccagctgggctgggtccctctgctgggcaggtccccagcagctttctcttatagctcatctcacactgatgtccccatctgagcattcctcacccttgctctgcaccctgagctcctagaggatgaggaggctcttaggagtctctgggctcccacccccacctccacctctcccagcacagcacctggcacaggaaggtttgccaaatggatgaagtcattaagtaatgagcaccaagactcaaaagaaggccgtgtgtctgttctgaggagtggccctggagagaggcagggacagggaaacaggagatctgggtttagtcctgaatctgccagccagagtgctgtgtgaccctgggcaaggccttccccctctctgagcttcagtctccccatctgtacactgaggtgccttggccaggtgtcctttgaggactcctgagttcagccactggttctgtttttgctgggggtggctatggcatggggattggggtggtggggaaattgtcctagcaccacactgactctgatcctctcccc

SEQ ID NO: 53835 - DNA, 1061 bp, Homo sapiens
gcctgtaatcccagcactttgggaggccgaggcaggaggatcacgaggtcaggagattgagaccatcctggctaacatggtgaaaccccacctctactaaaaatacaaaaaaaaaaaaaaaaattagccgggcgtggtggctactcaggaggctgaggcaggagaatcactggaacgcaggaggtggggttgcagtgagctgagagcacaccactgctctccagcctgggcgacagagcgagactccatctcaaaaaagaaaattaaaaaaaaaaaaaaaaaagcacttcccatcagaactcccagaaagcagtgagtccaccctccctgcacatgcacaagttgggtggggacaggcaggaagggagctcatctaggtgtcagcgtaatattgaggggcagtggcagtggcagcatgtgctttttccaccaatgccccagtgtctcaaaagcccaggaggggaaaaaaattcaactgtcagacacttggtagagctgtcagaaacgcatgacacgagctacctacctggtgaaactgaagacatcactctattttatcttcaataacaatgaaaattcacatttttccatcagaaagtgaaaacacagactctgggcgcccccacgtggaaagatctggtgctgccaccaccacctcacctttggccacagccactgcatcagtgccccaccggggcctacccccatcccggggccaggtcttggcctgtgtgtggacgcacaggagggagggaagtgaggaggtcactgccctgaaaaacagctggaaaaactccaggaagggaggagaaaaccagaaaagccaagaggaggagtcagagtaggaaagaaaagccccaaatgtgagttctggttctcttgttgtcatggactgtgtgaccctgggcaagctgctcctctctctgggcctcagtttccccatctataaactggcaatagggctggctggcctctaagttcctcccggccactgaactcagactagcctaccagagagaagcccagagccccaagcagagccatgacgtgtgtccttaatt

SEQ ID NO: 53836 - DNA, 1811 bp, Homo sapiens
caaactgaggcccagctggggcatatctcacctaagggcacacagctgggaaatggcagagaagagtgcagggcatggtggctccatgttgccagaacttaaagtggaggtttggagggatgggaggtgtggccaggaggggcaggcagaagtcaatggatcaaagggacttgagggccagggaccagggggccatgaaagatgttatgtagagaagggtcagatttaggatttgaaaattcctggcacagacagaggcttcttctcagctgatgaaactgagacatgggccagaagagccctgatggactcctagggccttggaccagatggctggaacagggtggtaggactggttggcaccatgccctgtgtcccccttggctaagctatgcatggacgtctgtctccacagccaagcaggtgtgtcctgcagagaagctgagctgtggacccaccagccacaagtgtgtacctgcctcgtggcgctgcgacggggagaaggactgcgagggtggagcggatgaggccggctgtgctacctgtgagtctggggtcagatctccagggtctgccaagcatggtcaggcagcctcagggagtggcagccacttctggggagggggcccagttccccgtggggcttggtggtggagaggaaaggataacgatcaggacactagtaatggctagattctatggagacatggtcttctttcatcttcacaagcacctcatgagcagccattatcatccccattttataggtgaggaaactgaggctcagacaagggaggaaaagtacccaaggctgagtgatgaaaccaagattcagattcaggactggacagcaaagcccatgagcttttgttaccatgtctgacatctgctcatccatcccacaagtctgccaatcttggagcaagggcagggggaccagggagggtgctgcgtggagaaatggcggtggtctgagccagggcgccagcaatgctggggggagggggacggattcctgaggtgtcaaggacgactgttgctgaaatctcagattcaagcacagacgtcacagggcagagaagacattctcagcagcctcggcagggacagatggaagtggtcactgggacagttccacatcactgagcttcaaacacaggattatctccttcccagggagcaggccagcagggcctgggccattggggagcatggccaggcctcactttttcaattcgaggggcacctactgtgtgccaggcctgaagccaggctctgaaagggacagtgaggtgaatcctacacagtcttccctctgggaacacatgattagtgggggagacagactggctgtcgctactaggctgtgcggctgggctgaaatacgggcggtcaccctggagggcttgccaggcacttgcccatcactgctgcctactcccctctgccagcctctatatttgcatcctatccatctttcctggcccagggaaaatgccatctcctccagaggtgtctgagtcgtcacactttaagattctaagtctggaatttgatgtgtctgaagcaggaagcatctgggtatggagggagatcctggctgggaacagcagtttcaaagtcccagtgatggcactggctcacttcctcagctgtgataattttgctgggactcactggccaatgagaatcctctttcctctttaccaagccccataatcagatgattcctccaatatgaaggccgctactgcaagggatgggagtctctccaactagggcatgttggaataggaacattccccattaat

SEQ ID NO: 53837 - DNA, 1036 bp, Homo sapiens
ccacagcttggctgactcctcttccttgaacacagtgcccctcctctgggaagccttccctgacccctgggccaggtcaggtggccctcgcctggcttgctggctacaaagtgggattgggagtcattacctgggttcaagtgcagccctcccacagacatgtgctgtggctttgagcagtcacttctcactaggccttggcttccaggcatgtaacatgggagacccacgtagggggcctcaagaccctggagtccaacacggcaggacattcggattgccaagaggaagctgcacagagcagtgcccctgggcagcccggactaatctttattttggagccttctctctgcaccggggctccacgatgcgtgtgggtggggagcagcatgggaaggatgtatactgtctcagggaaggatgtctctggaggcgggggaagccaagaagtgctgagtgattctaacagtttcacaggatcacagacactgagtgtggagagggccttaagacttagtcagcgccacacctccatttcctgatgaggaggaggcaagctcagaaggtttgacggatgggcccagtgttacacacacggcagctggggccagggctgtgacttcacacacctctaacttgcacctttttgcttctcagttcataaagccctggggccatccttagcttatttgcttctcacaatgaccctgtgtgtcccgtgaagcagacgaagaaagtgcggctcacaggagtcctgtaacttgtgtaaggtcacatagcctacaagtggcagggcgcagtttgatagaccatggactgtctggcactttccttggcccgtgttcttgttataaatagcatttcccacttcctttgtcctggatttcccactctcccctactctaccctggggtcagcccctcctcactgcccctagaatcccctagtcctttgtggcagcccatctgttgccatggcaccagattatgatgtcgcagaccctggttgactatgtatcactcctgggctgagggac

SEQ ID NO: 53838 - DNA, 1046 bp, Homo sapiens
caggggcgggctggcacgccccctgcccccaccccggatctgcattctgctggaagcggtcgtcttggcaacgctggggcatggcgagctctgtcgaagggtaactgttggtgggagcagccctttcatctccccgacccgggtacaagtggcccaactgccttagggccagagccaggccaccctgtgctggcccaggcctgggagaggaagtgggaacatccaagtcccttctgtgcacccagctctccaagttaggggctttacctttgctctcagcctctcaactgccctaggaggggaaagaacctgccccagcttgctgaacaacaatgttgagctggaatccacctttcttaggggtcgctgctctgccttcagagaacattctctagagcccaagacctgtccacagaaaccagagatcagtcagagcctgtaaggctgacagctccctcatctccctgtcctaggtggctgggtatcaattctctctgttctttccagggcctttctctagacgtgtccctgctctgaggattggggtctccagtggggtccctgcagcttcactctgggctccatgctctgtgaacactttgttctattttttatggcctagtggggctggcccagagacagacggctaagtacaactaccaggctgctgtgtcaacacgggctagtccctcccttctctgcacctcatctaatcatctgtaggatgagaggcttgtgccccagcagtgttttcctaggtgtggttcattggaccacttgtttcttgggaaataaacagatgtggcatctgaaaaaggagttccttggttaaacaagcttggaaggctggaggaaaccgtcaatcagatatctttactgcagtccttcccagggcctttataaaccgtgggcatcatgcatctccaagggggaaaataataagtgtctatcccaaatatcctggtgcatggccacccctgggctctgtcctgccccctacccctcccctcctctgctaagggccgattttctgtcttgcatggcct

SEQ ID NO: 53839 - DNA, 1051 bp, Homo sapiens
gtctgtgtgctgcagtgtgtgtccagcatgacatgcgtgtctgagtatgttcagtatgtggcgcacacctgagtgtgcaagtgggtggtgtgtgccttgctgtatgcacgggtgcccatctgcaagtacatgcgctgtgtgcatgtgcctgagtgtctgcacgtctgtctgaacatacctctgtgtgtggtccatgctcaggcctgcctttttggtgcagtgagccaggctgagctgtgtgcagatagggaaggggctcgtgactcctcctggctgaggtggtgggcacagacagctgtgtagaaggtgggacggggtaagtgtggcaagtgcacagctggccttcagtgggtgaggcagggcaggcatccttgccctcatttgacagatgggaaaacccaaaactggagcctgggctctggggctccctgcgtggtgctctttctgttccagcgggctgctgccctggctggcacctatgcttttggcatctttatgctgttagattttcatggtggctcaaagtggttctgagagagtaccaccccccctactcagtattgctcagggggcaaggtcaggattcccactgcacatcctgtgttcttcctgtttcaaggaggagatatcagggctgctggagaatgctgggcctgatagtcctctgactgctgtgtgacctgggcccatcctgtccctctctgaacctcaggggtgattgtaagaactaaatgaggagacatatacaaagggcttcgtaaaccaggagatgaggtgaggtgatgtagacagatgagggcctggcccagagatggcatcacaatacgatcagagccaaagctgaggcccaagttcatgtgtcccagggtttcctgaggagcaggccaggaggtgggacccaggacagaggcaggtgccctcccagccttgcagactctgaacctgtcctcagaaccatctgcctggtgccagcactctcctccaactccagccccagacacatggctcatggcagtgaagtaaagcaggaacagacccagggagcagtggg

SEQ ID NO: 53840 - DNA, 1051 bp, Homo sapiens
caaagggctgttggctgggaagattaaatgagatgatgagccccacgcactatcatcaatgacgcttatgcttatggggagtggggtgggaagcacctctgctctccatgcatgacttcatgaattctttttttttaaagatggagtctcactctgtcgcccagcctggagtgcaatggcatggtctcggctcactgcaacctccgcctcctgagttcaagtgattctcttgccttagactcccaagtagctggcattacaggcgcctgcgaccatgcccagctaatttttgtatttttagtagagatggagtttcatcatgttggccagactggtctcgaactcctgacctcaggtgatctgcccgtctcagcctcccaaagtgctgggattacaggtgtgagccaccgtgcccggcccatggatcctttaacagccctctgaggggggatctgtcctgtctctttactgatagagatggtgaggcacagagaggtggggaaacacccagggtcacgtagcataggagtggcagcagcaggatttaaaagcgggtctcttgcactccaaggtccacgtgttagccagtgcaccaggcaagggataaaggacttagtgtgagagctcctttggaattggagttgcagaggctctggcttcctgtgctgatctcctgcaagcctccagcccccagtcacgtctgtcagcagctctgagagccctccttgggcctctcacctcccacatgagcagggaatcagcaggcaaggtccgggcggtgaggatgggggatttcccgactcacttgagatccgtcacattaatgttaattaagccttgttaattcagccctctgcttacacatggctcctgacagcaaattgctcataagtgaggcagtaaatttattgctgctttttccaaacatttagcagcaaagacggtgccccaggaaaggcagaggagagacctggagggccagtgatgcttggttcctgctagcctgaaccccccaggatcctcatggcctagagaataaggtggggctccc

SEQ ID NO: 53841 - DNA, 1048 bp, Homo sapiens
tcccgttgatagatgtgtgtttggttgcttccatgtttttccctgctctgtgcaatgctaggatggacatccttgaactccatccttgtgcatttgcttggtcctttctttaagataagttcttaggaaaggagctgctgagtgtgtgcattttcatcattgccgttctgctctctagaggggagaatctttcccatctcacaactctctccctctatggccccatggctctcctttccagcgaggcaggcagctgaaggacttccctcttctctgagcacagggccacctcattctggtcccatgggacaaagcagccatatccaggccacagaaagcaaagccaggagagagaacaacgagcggtgttctggccccaagggctttcacccccaccaaaaaaaaaaaaaagcagaagagtacaaaactgttccttcattcttctcaggatattggtagaaggcatctcctccgcagcgttctaattcttctatctatgcccctaacttgctgtgtgaccttgggtgaatggctctccctctctgaacttcattttcctttcactcattggtccttattccacctgcactgcccccagcacttggagcagactcctgtgcctggagctgggttcagggctggagctggccagtccttgcctagggcagggatctgtgccttactacctggtgacagtgcggggagtatagctggcttggtgggctggattctgggcagggaaacagggcagctggactccttagctccacttccagagctccaccctgaggcccaggttccttgggtgactttcccttctgccttcttcctgcactcacaattgggccggatgcagtgcagtgatggagaaaaatggagtgaggcccaccagcttcatgagactttccgaaagcgggaaaatgagcccatattccggaggtgtgcgggctgaggaaagtactttgcccagagcctggccctgaaaatgagcgtttcccttcccttcctgagcctgtgattcctgcacagggaatggctgagtaaaagg

SEQ ID NO: 53842 - DNA, 1108 bp, Homo sapiens
taaaatattgcagtgagtttcctcactgggagttgttctgtggtctccttagagtgggagtactgaggacgaggcaaggaatagaaactgcgtgtctgggctggttatgccttatctccctggctctttataacaactgtccttgtgaggatggctgtgaaaagcagaaattttcttgtcattctactttctagataaggatgcctcctcagagaagttgagtgacttatgcaaggtcacacagctcaggatgacagaacttggtcaggatctctgcctgcctcgagttcagggcactgtctgctgaggtggggagtgtggtgcggaaagcaccaggagtgtgatctaggagctggaaagacgggctttaaatgttaggcctggtgcgtttcagctccatgtgaggctttggacgagatggaggagtaaagtagctgggtgctgagtgacgctcaggtgggccaagagagctccaatggccaagctgggctcctgcatggctctgagatgcatggggtagagtcataggcagggagttattaaacaaaagtgaatgacgtcaagcttggagtggaaagggtggcggcgctgctgatagtaccaagtagtaatcacacatggcttggcttttctgagcttgtttcctcatctgccaaacaggggcagctgtccctccaacgctggctgtgcacatagacacacagggctggcaagaagggaacggatggatgagtgttcccacctccacggcctttagaaacggactcctggtagccataaagggaaactgaagaaacggagtggggcttacgtggctgtgttggggccaggtgctggaaaatgttctttcctcagcccttcccgcattctaggccacctgcccagactgaatttctttgaactgttctccctgcaggagagagagctgttggctcgtccctgaggagctctttattaaacctgggatggaggggtgataggtgctgggataacaaaatctgctcctccctgagcagtctccgtgccttacccctgaccaccctctttggcacaccaccctgcaagagggcttgagctgccccacctttgtacatctctgggcctgcaa

SEQ ID NO: 53843 - DNA, 1054 bp, Homo sapiens
acccacattgccaacctcttctcccaaaggcccccctggcacttgagtttaagtcaccacatgtgccagacagggggtcctgtggggttgggatgcgttcagacccttccccagtgcagagcagcgctggacagaagtcagctgagtgggctatggagtcagccaacttgggatccagttctgccccttaaccacaaagcagctctgcggccctgggcctgtagcttcatctcactgaacctgtttttcataattacagcaagaatagtaatagaacccaccgcctaggattctgagcacccaagcacaatcgccctggcatatacagaagggctctgtcactgtgaccgttcagctgttcccatgcttatctgaggttgcctgtgttccttcttgccttcaataatttggcaggtgtttgctgaatgcccccttccaaatgccctgtgcctgtgtgtttggggccgtgcatctaccccatcaggagccccccacttcaggggtgagagctatgtttggtcagcccatctggctaactctctctcctctccgcctctctgctgtgtgtgccgtgcaggtgtcagaaccaggaggagacttccagccaagctactacctgccgccgccgccgccgccactgccgccccttccaccgcttccaccgcagccccagttcctcccgccaggctacctctctgcgctccacttcctccccccgccaccgccaccaccacctccatcatctttctcactgaccgtcctgtttgatactgacaaggagaacactggtgagtgagctccagtcttccagcttcagcgagagccagggagactttctggaggaagaggtacctaatctgaagaaaggttaggtgtggagagaagggacatggaatttaaagggtgttgagccctagaatgagctccttcttacacccttcctccagtccccataggcacacatctaagggaggtgggaatgggattccaggtgaggaaaccagggcctccagcagttctcttgggtataaatggcagagctgggatttgaaca

SEQ ID NO: 53844 - DNA, 1050 bp, Homo sapiens
ggtctcctactggaagccagagagtgcaggagcccaggagatgctgtctgtgggggtcagccccctgcacacggagcagggtggaggctgcatctgcttgtgacctgcagagggagagtaaccacccccacacgacacgcatcaggtcagtcccctgcccccaacccaccaatggcctctactgctcttcaaataaccccctgacccttggcctgggccttgagatttggagccatctggcccccaccaggttggtacatgagagacactcatcattggtccaggacaccttcacttgtttgtttgtttgtttttaataatgtgataagcacccatgaatccattgctccagacaaaaatccaggcccggacagtatctgacctccagccagcggacccccattgactctcacctctccggcctcagcagccagaacccggaatccctttgcctcctgcacttgctttgcttgttggatttcattgcatccatgtgtatgcctagatggtcttttgaacagctgttttaggatgtagtctttggggcgaggcttcctcactgaatatgacgttgctcacattcacccatggtgtggtgttgtgtgctgctgccttctctgctacagggtactctgggggcatcctggggttctcgtgctcttcctctggcatgtgggcatgcaggttacgctgcggggagcagggctgctgtggatgtcactgcccaggtccttgttggtccacctctccccacacctgctactccccttcctttctctcaccccccgcatgccagccacactggcctttctccattcctttgagctcgtccccaccttgggcctttgctcctaccgtttcctctcccaggaatgctctccttgcctggctcgtcctcattctggttcagcttgatggcatcttctcagatgcctgccccaacccactgggctctgtagccctcccctccaaacatctgtccccttgagggcaaagtattcctggggggctaagggagggactccagcagatgtggctggagcacagggt

SEQ ID NO: 53845 - DNA, 1091 bp, Homo sapiens
gtgtgtgagagagggagcctacctctggggtgcggtgggctgggggcagcaggggccatccgcggcaggcctccgctctccctcccaggccaaccccggcaagcttctcactgctgtctctctctttttgctctcctccgtttctttaatctggcaactctccatggcagcaccaaggtatggtcgtctctttctgcttcccctcctcatgaggtcccagggccatgggtacctctccctgggtctgaggttggcctggcctctccttagtccagcaggggcaaagctgccttgaggtcctgggggcagttccacgtgggtgtgtctggcaggacatggcagtccctggcactcactctgagaggtgtcatttcctccaatccttctcctgtcccctgcagtcccagcagggcagaggcttctaagagagcggaagcactagacgtgtccgcaaagggaagccttgtaagcttcaagccccagcagcggccagagtcctcaagcagggtcctgtggaagccttgggagagattgggattcaattagagccacgagtcccctgccctgggtcactcagacctaggatgaatcagacaagtcgctccctggctgagaagagggacactgagcaaacccagcacataggctggacagcgcttagggggatgttctggcccggggaggaggtggaggatgcgaggagagcttggagaggaggtgacgtggctgcgggagagctgaggaggtgctcgtggtgggaggtgtagggcctgcggtgccgggagatggcctgtagggcaccagggagccaccaaggggtttcaaaggcaagagcgggtctgtgagaaagaccttcccctctggctgtgtgtggggagcctgaggcctggagggcagggtggggcctgggcaggaattcaggaggggcagtggggatggatttggggtccacttcttatattctgggtgagccatgggggcctgaggggaagagacttgtccactccccatgcacagggcacagcccccagccccgccagactccccagcctccccagcctccccagccctgtgttctcagatccagccgt

SEQ ID NO: 53846 - DNA, 1094 bp, Homo sapiens
caaatgaaataaactgaacagcaaatacgaaataagaagaaactcacccataatccttgattttgaccattttaatatattttttaaatgctgctatgaacacaaaatgaaaacgtattactaaaactaaaaccatctcttctaacataaattgttgtcatctttataaatggttaaaataaacaagttttgggtaactgtttatttggaaattttgggaatgtagccatttggcgaagtaatttgtggctaattggcttttgacgaattggtcatttgacacattgatttttagccaactggcacttggagaatagatgttcatcaagttggcccacctcccacacgggcctggggcttggtgtctggggccgggctgtgaggcccacataggcgccaggcaggctgagtacttggtgtgggatccaaagatcctcttagaccaggagggagagccccacaagacctggccatccctggccttggctggcctgctcctggctgggctgggggagacttgggggggatacagaatgagagtgaccctttatggactgtgtgccaggccctgagctaagtgtcccatggggcattatctcacttgatcctcacaataaacccctgcaactagtatgatgatctgcatttgacagataagggaatggaggcacagagaggttaggttacctggccaagaccacactggcaggtgaggggcaaagttcagattccagaccaggctggctgtctctaaagcctatgttcctatccccagggccaaaatggatcagatggagtccttgtcctcatgcagctactggcccagtcagcttcttgataaaccatttctatgggccttattgtagcctgacagtggagcccatttctctttctcagatgaggaaactgagatctggatacggtgtgaggcttgctgaaggtcgcttagtggatcagcattagagctagaacaggcaccaggctgggtcctgttcgtcctccatcggctgcctccacctccagcctggctccgggatttctgctcttttgtgttcttctccctgaaagtgggacaggccctgcagtctcccgcc

SEQ ID NO: 53847 - DNA, 1031 bp, Homo sapiens
tccgttaagccttttcgcagggggcaggcctcccttctgtagcagcagttcagccccttgattacatacctctggggataggaagctcactccctccctgtgttgagcagaggtctgtcaccccagccccaatctatggccctccatccctccctgcactggtcctagctcttgtttggagacacagcccagcggagacctcaggacaggaagtttatcttccctgttggcagtcctgggttgaatgactcttcactgagttctcatctggtggtagccaacctccctgtccccagtcctgatctgtagtgttgtgtctgtcccaccatccctgctacttgccgtgcggtaggcacatcctggggccaccccagagaggggcagcatagaggtcccacagggagccgtggggaggaggagtctcgggtggctgctggaggcctgggtcctgcttgaccttaaggagtcagcgcctttctaggcctcctcgaatcaggccttcagggtccttcagcagcccagaaactctatcacgtcctccccacgcctcccctttaagagatttccaactgtgtgggcctctggagtggtctagggaagtctagaagaccaggcatttggggagttttcgatgttgggggattgtttctaataaaaaccaattaggctttttgaaaatcttgttccaggacaaagcccaaatgcatcactaggcaaataagccgtgtgatgggcccagcctgcctcttaactcctcctctgccttctatcctggatgtgctatttaccttagtctccctgtacctcatccccactgcccagctcaagtgccccctcctccaagaagccttccctgactgtctcgactgggtgagggccttttctgtcactaaccgtttgcttacctgtcctcccaacaggcagggacccccacctgtggacctcattcccaagaagcattagcatttctcactttgcaccttctcctgattgtgtcctatgagccaggcagtgctgagacatacatacat

SEQ ID NO: 53848 - DNA, 1068 bp, Homo sapiens
gggccactggggaagtaggtgtcaaaggactctttccgaaggaggtgacttgcccaggacctcacagctgctgagcgtagtcagggcttgaaaccacggttcccctacactgtgctgcctttctgtaaagcccttttggttcattccctcagcacagtgtaactggaggcatgggtatattttgtttttcctgtgtatctggggctgagtttccctggccaagtcgccccagtggtaatctaggccctttcagagtcattttatcactgctatctctaaatcactgcggcgttccactagcaacaacaacaaaaattctgtgggcatggtgtggacaagaggttaaagacataacacttatgagcctaaactgagtgtgggctcgggaaatgaaggggggcttgtggggacccagattggaacaaggcttccacctccactggcgccacttaggcctttataggcatgagattgtggggaacacggagtgcttgccagctcagggagtaatgtacccgacactggagcgacctggctgggcagagacctggggacagtctggctatgttgggcctaggggagggcccacgctgcctgagccctgcagccagtcccagcagagagtagggtagggccacagcagctccagggcgctcttgccactgtgggcagctacatttgggagatcacggcccgcttttatacccagccctgagctgggtgctgtggggcatagaaagagagaaaactcgaggtttgtgtcgggaaggggagatagaggagcaggtggaaagtcttgcagggcacattgtcaaacaaagcatcagaggctgcaggcagacttcacagagacctgcaaatgcaaggcctcaaaagccaactgggtttgggttggcagagaagccctgttgtcaatccagctcactgctctgtgcggttagagactgctccaagactcacagccgaataaatagtccaatgataggggatgttctgagtactagagaagcacacaataagtcactctaggcccaggggtaggaggtgatcagggatggcttcacagag

SEQ ID NO: 53849 - DNA, 1003 bp, Homo sapiens
gccccagaacagacagtggcccccagaggagggtgggacttgggggggtggcactgaaccatgctttgaagggtgaagagaggtcccttaggcagaacggtggggaggaactgcatgtgcaaagcaactggaataggaaatgaaagttggcagcagagtgagaacctcagagggccttgaatgccaagctaaggaagtcccaactctgccagtaggcagggggagtctctgaaggattttgggcagggtgacccactcaggttggcattgctgtctttcctccactttccttacagagcctgctattgtgtcattcttggggtttgttgctgtgaccgtcttcccactatccagacaatgtccaaaagttcttgtcctgcctcctcccagctccctcccgtggtcttgagagaagtagtcctcagtggttattgaattcatttatgaatccacccagtgaatatggacacacctcctataaaaatactggtcaccatgctaagcacaatgaaggggcatctcgagaggggctgtatggggatgccacgtggaaggtattctgtgcccagactcatgtggccatctcgagaggctgtcagccagggttgaaaggcgaaagtctttaagagacagagttctgcaggagttccaagagtggatgatgacctgttccagctgggggaggcaggcaaggctccgtgtgggaggtgggcccttgagcgctggcgggaagggagttccaggcggcatgggcaaagtgtaatggtgggaaagcagacagcacgtatgaggacagcagtgagctctgcttggctgcacggaagggcacgtggagggaaggagagaaataaagttggagggcctcatgagcatggccgggtggggtgagggtgggggagtttgatttattttcctgtaggtagagggggccatggagagtttttagctatgctttggtaagactaattttcacaccctgtggttctttggagaaagggcaagt

SEQ ID NO: 53850 - DNA, 1076 bp, Homo sapiens
ggattgctaatgcctgccttattcctgccataaattggtttaaggggtggaaagtaggctgagagtgagcaggtgggaactggtggaaagtgccattcggcaaggtgctgtttgacacggtggtcctgggagagcaccccaatttctgcagcattggctgtgggcaaacatttcttccaagtgggagagaagacttttcaaaggccacatatcatcttaaatgcacaagtgccactgagggagaagggttgtttgtttagtaggcaacactgattctcagaacaagctaaacaaatccctcttattgaagaatgttgctctgggctaggcttgattaaaataggaaaatctaagaggcttaaatgtgtgcggttttggttgtggagggatcaggagtgcttccccctgccctgtgtcttgctggacatggtcactgagttgtgaggctactgaaggtctgtgtagtgatgggcccattcagcaccaattttaccagtgaggggctggaaagccttcccggcccaggcaggcagtattctgagcaccttcctctgggctctgaatgccttgggttaggaggtttgtgtcgagggctgcttggagactagtttgctctgtggtctctttaggtcaagggctgtcctattgccttgatctatttggaaaagtaaggactcatgcttttttttttttttttttttttagagacagggtctcactctgtcatcctggctggagtgcagtggtgtgatcatagctcactgtagccttgaaatcctgggttcaaacaatcctcctgcctcagtctcctgagtagttaggactatagttgtacatcaccatgcctgggtaatttttatttattttttttagagatggggtcttgctatattgcccaggctggtttcaaactcctggcctcaaacgatcctcctgccttggcctcttaaaatgttgggattacaggcatgagccactgcacctggcctgactcatgcttttgagcagctctaggtgccagggcctgtaccaggtgccccatgtatgagtctcctttatacctctctgtctctgtt

SEQ ID NO: 53851 - DNA, 1098 bp, Homo sapiens
ggtgtggggacagcagatggtcagcaagggttggcctggctgactgctgcaccaggacctgggatattaccttggccttcctcggacttcccgggagcattgatgggaaagctcagtggcaggattagcctaattgggagtctttccgcagaggctaattaaaggatttgggtaaatataaaaagtggaaacagcttgggatggaaggctcccctcacctcccttcttccctttcctcccttcttctgcctcctgttgtctcagaaggagtctggggttggcagctgctgacccaggactgagcacagccagaaaactcaccttttttttcttttctgcacacctggtggcaggtgacctgagaactaatgagagcaagattggattttcttttcatatttaaaatgtctcagtaggacgtctaactagcttaccagttgttttataggagcagaagctgcagagaagagagaaggaaagattcctccccgctccaactccccaagaggaaaagtttgcttttggcaacattgactttctctaagatcctgtattgatcagcacttgccatttccctggagatttactgcctggtttttatttagatgcagagtgagggaggaatctgtggggatggggacgctgcctttggagtcagccagcttgaagttaccctctggctgtatctgccgctcgccaggaggtaccctgggcaggtggctctctcctcccagggctcagtgtcattgtatgatacatagtagctgtgggagtcaaatgcgatagtagctgtggaagttctgaactgggccccgacactgagttagaatgtgccagatcttcccaggaggcagcatgaggcctaggaaaagccctgaaaagcaaaatgcctccttcactctttggcgcaatgctgttaggtacgtgttgggggcaggtgtgaattcatgcgctccctcttcatgtctcctcccctggcctcactttactcatctgcaaaatggggaggagactctcttttctgcctcccatgaggtggtgcctgtgaaagcagctggcaagctgcaacccctgtaaattcagtgatgctaacaacca

SEQ ID NO: 53852 - DNA, 1069 bp, Homo sapiens
ccatgatgatttctgatacttggtctagactctgcatttcccccactctaccccatcaatttttctagatagtttatgaattttctgtctctctctcgtgttctgaaattttctgttgatgtggggtttttcccattcgttgggctagatacttggcaggcccactgtttctggagactcatgaccttcagttctagacagagtattagttctttgacttttttttaaatataatttctctactgccggtttctagaaatccccctagttgcctgtttggctttctgtattgatcctctacatttcttatgtttttataatacctagctctttgtctttttgatctgtttttggagggtttctttgactctttttcccatcttcttttttattttagttatttttaggttgcaaaagcactttcaggcattgtgcctccatttatggatgcaatatcttatcatacctctctgaggagatttttaggattttaaaccatctttttccttattccctgtgttcctgttttccattcatttcatctgagttccacttgttgattgttgttactcctttcaggttgagggttttcctgacatgccgatgatgactctctggccatacgaggatgtcagatctactgaccctcccctttccccaactggtcacccacttgtcctcacttccttccttgcctagcttagtgttcattataattacacctccccaagcaccttcaaccctctgcctccctctccccctgttgttctcactgttgggcccctaccctagttaagatcgaaccacctgtagctgtctgtcaaatggtgctagaggagacacacggaaccctgaaagagcccagtctgtatctgggagttgagagctctggcgagtactctccaagccttgcctcccctcctctgtgggagctggcaatgcctctcctctatcaacagccaaaccatcccagggctttgcatccaccctccctcttcctcgaagactgtgcttcagcagtgacctcccctgcagtgcgactctcgccctctccaggggtcactcctat

SEQ ID NO: 53853 - DNA, 1048 bp, Homo sapiens
catgttgtccaggctagtctcgaactcctgacctcaggtgatccacctgccccagcctcccaaagtgctgggattacaggcatgagccaatgtgccaggtctcagatacccctttgatatactgatttcctttcttttagatgtatgcacagcagtgggattgctggatcatagggtagctctaattttaattttttgaggaacctttatactgttttccataatgtctgtcctacattcccaccaacagtgtctgagtatccccctttctccacagaggatttggtttttttcaactcccactccacccccatcttactcacttgcactacccctccctccttcctcctgccccagttgcatcacaattctttgggtaaagtggtgcaccactaggactacgtgtaacggggtattagtgtaggcattgtgggtctggctgagtcctaagacagtggatcttaacagtaggcattggccactacattcctaagcaggacttcaggtgtgtaaactctgattttgagatccttactggcatacgctttgaggatatgaaagggttgaggtggaagagcccacagagaggatttcttcagagagaattgttgagaagctgacgttttctgccccccatgccaggtgggcagggagggaacgctttttccttacctcaactcaagagagaagggctctaagaggatcactcagagaactgggcacagccctggacgccgagcagtgagtgcatttgatccatgcctggaaatacggaacacgaaagactgtggttggagcccctgcttcgtggcagaatgaggagaggtggctgcattgtttctgccaacgatggggcagaggcagtgttcaaggacctgggcagtggtcgttttcaaactgatcctgcccaagagagcttcttgccaggtagaggagagaggctggaagtgtcccacgggatgcatgcgggtgcctgccaaccggaggagctccctaggaccccacagaagtggcccagggtaacacagtgggcactaagcatccaagt

SEQ ID NO: 53854 - DNA, 1212 bp, Homo sapiens
gatgtattttgccaactttccaaccctgtaaataaattacacgtgccggcagaggttgccaggatccactgtgtcagttggagcttaatttttatcctaaaccaccgaatacttttgtcctagcaagcagagaaagttacggagttttttgcttgtcactgggcccatcccaagacgacggtttaaagagcctgagaataggcctccgcggagtcactgattttgacaccgttttcggtggttaagtagcttcagcagtctcaagtccaaccctcaaggcagagaatgataatataattttaagcatatcgtaaaaatgaaactcaatcacttccactccccaaacctgtctcactccccatctctctggagaaaacggctgtaattgtgtgtttaatctcaagactgcctttgcattttatcttatttgagtgcaaagcccaggtaatatcgtggcatttccagcgcgaaacaaaatagggtttctaatttggagacactattaaatatttcatgcttcaaccaaactcaattcttttttcctataataagtttaaatattaattctctggaatgtcagatgcctaaagcaaagcatttagtgatctgcagtttcaagtatctcgaagaaggtttatgaaacaggatatttcactgggagggatgagtagtgtgcttcagagatatgtgaattcaaggcatcgtcttctgatttattttttaaagggaaaaggtcataaaataagttgctttatgtgctgatggattaagtggcttaggctgaaataacagcaggaactttactatttttccctgttttaacaatgctttttgggggaggggggtgggtctttttcccgcctgcttgtctcctccctccgtaccccccgtcaaccccagccagatggctttaattctaaccaaatcccacgctgaggccaaatgattgatcaaacagtcatttgtacttacggagcgctctttgtgagaatatctctgtgctagggcttctcgttgaggcaggctcttctttgggccttcaaacggatgatttcaaacagatcgagcggcttggtgaggaggggtccgcgggtggatgcggagcaaaaatcccagacctcaagtccgtagaacttctcgcttaaaacctctgtgttacttcccatccctgacagcaggggtatccaaatgttctaagtataaggacaaaaa

SEQ ID NO: 53855 - DNA, 1163 bp, Homo sapiens
acttataatcccagcactttgggagaccaaggcaggtggatcacctgaggtcaggagttcaagaccagcctggccaacgtggtgaaatcccatctctactacaaatacaaaaatgtgctgggtggtggtgacgctcacctacttgggaggctgaggcagaagaatcatttgaacctgggaggcggaggttgtggtgagccaagattgcaccactgcactccagcctggaggcagagtgagaccttgtctcaaaacaaacaaaaaagaaagaaatttgtgagatatagcaaaagccatgcttagagggaaatttatacccttaagtgcatatgttagaaaagaagaaaggctggatgtcagtgaggtaagtgtctcaaaaagctagaaaattgatttaatccctttagtttttaccacttttgtacctttccaatacacatgtcataatgtatgattagtgtgaattggcttgccctcttttccaaaggtctatgagttctttggatttagggatcgtgtctttctctttatatccctagtgcctattaaagtaccttgtacacagttgatatttgtttggactgaatggaactcctcatcatcagtgtcttggagctgttacacacccagggtcttagacttaagtgttcacaaaagccagacaattgatgaggtgagtgaggccagctggtcagggaacagcatactggagagcgtgtggaaggctgctgttgctgcttggccccagctgctgttgttgctatgggagagtgctggcccagtgtggctagagctccctatttgtttacaagaacgaggccaggcggctcatgcctttaatcccaggactttgggaggccgaggctggaggactgcttgagcccaggagttggagaccagcctgggcaacatggcgaaaccttgtctctacaaaaactacaaaaagtagctgggaatggtggcgtgtgcctgtagtcccaggtactcaggaggctgaggcaggaggatcacttgagtctgtggtggggtggggtggggtggggttgggggaggcaaggctgcagtaagccatgttcacaccgctgcattccagcctgggcaacagagtgagacccagtcaaaaaaaaaaattgcatttcgatacaaaatctccctttttgaag

SEQ ID NO: 53856 - DNA, 4285 bp, Homo sapiens
aactttctatcctttgacctacatctccccattccctgccacctcccatttactcctaatttaggctaatttaattctggttttccagcctataacatatcaaaaaaatttttttgagtcagggtcttgctctgttgcccaggctggagtgcagtgacaagatcatagcatagttcactgcagcctcaaactcctgagctcaagcagttctcctgcctcaggcctctcagtgttgggattacaggtgtgaaccaccatgcctggcccatatcaaaatttatttgaggggcagagattgctactagagtcaggagtactaatagtaaattgtaagggacactttactacctgctagcagagagaaatataatgggaaagccacagatttggtgttggagagaattccagagccattaagttagagaagacagcctcactagcacctagagggcatctttgtacagtaaaatacttgaaatggttcaattggaggtacatggttcaagaaagcaaagatgtctataagacattttagggcaattcataacacaattattaaaataagaccgttttggcacttttaaaagcggtgacctattcaagaactagaaaaccggaatttttcattatattcaatttttgcccaaaagtttaagaggaagtattatactagtttcagtatatatttgccctaattttatcaaggtgtaatatattttcgtgatggtgagggtggagagagaacacagtgttcacatccaaaacataacttatgttcaaagggagaagtaaatctaaaccaccaagctgttacctttgaaaacaattaatggagtctattgtgttttaaccaaacattttagattaaaggattttgtattaaaggcaattcagatactccacaactcaaagataatgttggaatctggtttaaataaaataataaaatccagaaaatctactccaaggcctggaactccgcacagcaggttccatagcagagcaggttaaagtcaatgccttcacttgtcagtcttaatttgtttggtcttttagaagatagaagcatgccattactgaatgcaagccctcctcttcattagattaaaaagagttttcatccagctttttcagaaatagtaataagtgaagatttctattcatttttaattgttttgaaaaatattgtctctgtgctctgtggttcacttaatatgcttaatgtaaaataaagcttatgctttgaatttatgtttcatttagtgctgtgcaagcatctgcagaacatcagaaaagacttcaacagttcttggagttcaaagaatagttaagtaatataaactgtgttcattacactgctgatacaactacagatgggacagtaaatgttcagcattcttggatcagaagaaaacggactaattagatgcttcctttgtcgtggtggttgctttgaaaactatactttaatgggagaaatcatggaaagaaattctcaacagaataactgaaaactgccttttctgtaccgattgctttttgtgtgtgtggtataataaaatctttattcaattttacagaagcattgatggcagtcgaaatgtctctagctcatataacttaatagtaataactaaaaaacttttagaatttacttttgaaaggagggaagccagttctgaaatgagtataggttgatttcatagtcttcttaattaagagtttagctctttgtaaactcaaaatacataaactttttaagtgtagtttcatttactgaaggataaaaatggtaacagtgcagcaatattcacaaaaaatattgtctaacggacatattttgttaatctgttaggttgggtttttgtttccagggacaaattaaatttgtatgattacccaaaaaagggtctcagtttacagatgctaactctatataaaggaatgtggaaaaactcagttcttaagttacaagattaaaaattcacatttggtctttaagaaacaattgactgacatctatgaatttattttgtatcatgctagtaaacacgaagtattaatgtatgggtattttcccagctagttttgctttctttttctggagcaaaacattaagtgattgcagagtttttcaagcaagagaaaaaggtttgcaaaaaaacccaggaaatgttcccttttttccccaccattcatcttcattagatcaaattctgtgaaacttgtctggtctctcaaagggagcagcctctgtagtgttaaatggctaattaaaataggaagatctttatagccagaaacaacttagtcatcaaatagcaagtgaaaccaaaacgtcagagggattactgtacttggaagtatgttgtgtgtcccaaatgtgaacgaagtattgttagaatttattagatcagcttctttggagatcaaagattggaaatcctagtcatagatattcactggactggctttggactgaaatgctcctttgtaattcttttcctattgtcttttccttctagtgtcccaaaatattttctttaaagtcagcacagtactgtatatgaatctttaatgtggtatcatatatgtctacttttgtctgattcatcgatgtattatatctttataattgaatattttagctccgggtcctgttgccccttcaagcagtacatgccaaattataaataggtgctactggccttgagcatatcactgtgggacagttccccaattgtcaagtgtttagatatgtagactattgccatttgtttttttgttttggttttgctttgtgtctgaagctgaattgatttcttttttttgaatgtgaaagttgaatttcaaacgtagtcatttcttacagatggccaagacagaaaattgtggctaggttgactgagaactgttgtcttccatgtattaacacaattaagctttttatattccactctctgtgctgaccctggctgaggcattttgggagacaaggactctgaatcttctgcttccattaaagaagaactgtgatattcaacattggatttctgagaataaagataggatgattcctttgaactttgacttacttgtataaaatgtccagctaggttaggtttttgccatttcctatatactttgggtaaagctacatttgatgagcaatgtgaatgtttctgagaatgttcattcctgttttctcttaagagaatgtgctgtgtactaaatacaggccacatagtgtctgcctgttgaagatctggaaactgcctccccagatctgtattgtatttggtaggtaagggggtcagtttctttttctcattgtgtgttgataatctacacaccatctgttggaaccagggtgttattatggggaactcctcctgtgtactaggaggaggaccttagggagaccaagaggagagaagcatttcctttgatgaagtcacatcctgtctatgagcccactaatgctgtaacattggcctgaaagagagtgttctttaaaagcctttctcggctgttagtataaaaacatgatggtatcagctcttagcatgtttgcttgacccttatggaaggtataaatccacagaacttccttcccagagaactgggaaattgtcctagaaataaaccttgtacagttgagtggacatggataagcaacaatttgttactttgcaggatttgttccttggtaattgtttggtgtgtcatcctgtaaatattcatgatagtctgtttatatccttttgtatatcgttgatactggattgggtagaaaaataaattggcaatttaaaaaaatggaacagttaattgaaatatgtgtgtttataaggtcaattatttaatttctgggcgggggggtggtggtggtgatgtttcctgaatcatttcaatttagtctcagagttgttgcttataaaaccagaaagagttgaacttcttgagaagtcagcttttgcccttaacctagactgatttggtgggtttcatggtaactctaaggagcctgaattcagaaagtctcattctttgttgtcttggctgacaaaactaaacaaagggtggaggtgctcaaagccatctcttaacagaagtttcttttcttgcaatagtgtttccaaatggatcgtattcccctaggctaacagttacgtctgtcaacgttacttaaattaatctgaacttcacctctaggtagttgaggtacctcaaaccccttctagctctcccaagccatagttacctttctttacaaccaaatagc

SEQ ID NO: 53857 - DNA, 2784 bp, Homo sapiens
tttccagaggcagatttcaaattggtggtgggagaagcaccaagtaactctagaaccacgcgtgaagggacaggtacccaaaataaagaggtttgggtgagagctgtttgaaaattagttagatccctagatcctatgatgtggggtaattgctcctcttccactgtagtctgaggtttatcctttaagagagagtagaacacccagtctgggggagttgtgggtgctgcactaaaggagagggatgagttccaaagccctggtgtccacctggcttcagaacactggggcaggccctgtagtcaggatactagaagacttttctttgggcactctgaccagtccaagaagaaagacctaaagtgactgagttgaaggttcacgccccaaaagtccctgcagatgacccactgtgaagccgctcgtctgtaatccccagtcatgcacttagaattggtgctcagctctttagcaggtcccacttgcatttgtgaacgaggatcactagatttctgaggaaagtctctcatgcagaagttggagactaaagggagcaaagggggaaaatcagcttggaagaaactaaaaaacaaaaaagctgtcatcagaatccttagaaataagaaaggatattgcatctttgaaacaaaaataggatgctaaaattaaaaagaacagatgatgttaaagagctcttgaaattaagaacttgatggcaaaaataattttaattatttttgttttcagttcttttggtggttacattcataactataaatagtacgcttatactgttgtatcttgtcagtttatttttccatggggacctcatgatgtaacagtatcataaatgccttatctgaattgaaaaggaagataaactatttagtgaataactatttctgtaaagtataaagttttggtctttttttttttttttgctgaggtcttttaataaagctcctcctggctgtcacatcataagcagagtaggacatcagtgtttgacttcaagctttgcattttcaaggatattgaatgatagcttcatttccaagggcaagtctggattttggggggggcctggtaactgtcatagtagctgagcctccctattgcattgtttatgaaactattttgactgtgatctacagtaagaaatgtgttacagcatagctatagatatgtgtatatctctctgtatatatccatttgtatctatctcaaatcttaattctttggactgaagtgacttttttctttttaattttttattttattttattttatgttatattatgtttgttttgttttgttatgttatgttatgttatgttatgttatgttatgttatgttatgttatgttatgttattttgagacaggatctctgtcgcccagtctggagtacagtggaactcctgggctcaagcagtcctcccgcctcgtccttccaaagtgttgggattacacatgtgagccacagcacctggcctaggttggctttctttataatctaaactgatgtgttttctttcttggtgtaggcagtcgacaagtactttaagcttcctcatgcttccagtaaaccaccccggatttcaggaagccttgtggacacttcatataaaacattaagatttgcattcagagcatcactgaaaactgccatctatcgaataactactacatttggtgaacatctgaagtaagtttacctgttttgatccatgatgatacctattctggggagctttccttagaaataggtatgggaatgataaggctcatgtgttgaaagtgttcttttgggaccttgatgattctcactgtaaacttacagcttggatgtggacttaatatttatattttaaaatttggcccatcataaagctttggggatttctttcaaatggacaaaagaagacagaaagttataaatgcagcagattaattatatatatatatttaaattatcaaaagatccttaagggagaaaaaagagcagaaaacccgagtacctttccagaaaagcatattaaaactaattctattgttatatcttggtcagcaaactgaagacttggggtgagcaaagtattccagaaatgaatccctggtgctttgtgattcatgctggaaaaacaccaacagatcacaacaccttgagaaacagaaccagagagaaaaccacaaatgccaagcctgtttatatttagttttattcatgtttactgctttcctcttgtgaaatgatctagctaggcaggatgagggatactagcttagtaactaaactgtatttatatttatcacaattataaatgaactttagaagacacgagagattgctctgctgtttttgtatgcaatcaatgaatagtttaagacttccaatttaaattaaagttaaataaagttaaaaattcaatttgtcagtcaccctagccacatttgaagtacttaataactacatgtgtttagtagctactgtattggacaacagaagtataacatctttccctacttccagaaagttttatcagatagtgctattctagacaatacacttagaacttaatgttttttcatttactcttttcaaagaccctgtgaagtgtagaaattatcataattgtacagatacgaaaactgaggcatagagatgttaaaatttgcctgatagcacaatctagtgcgtattaaacatgaacctgaaatcaagtctttctttctcttaaaaatctttcatctttctatctacaacactagactgcctccaaga

SEQ ID NO: 53858 - DNA, 1079 bp, Homo sapiens
aaaaaagactaatatgaaaacagaataatgataaaatcatgtagtattgcatgatttttcatgaaaagctatatgaaaagtctagacacacatctttgtagtcttttagttttcattgaatacaattgataattcataatttttaaattttctgtccacatggtaaagggaagaaaattgccaatatgttaaaacaattactgagacacattggaagacaaatgcagagagacagatagcagcactctagaccagttctgtccaatagaaataaaatgcagtcacctatgtaatcttatattttctgatagatacattaacaaaatacaggtgaaattaatagtacagtttatttaacccagtatttaaggtagtatcattttatcatgtaatcaagataaaattactaatgagatcttttatatccatttttacatgctaattcttagaaatctggtgtttgtttttcactttgtagcatatctcaattcagacctgccacatttcaggtgctcaatagctacatgtggctagtggttgccatattggacagcatagctctagactttaatgatgatggtgaaattgatcatataagaggaatttcaggaccgggcgcggtagctcacacctgtaatcccagcactttgggaaaccggggaaggcagatcacttgaggtcaggagttcgagaccagcctggccaacatggtgagaccccgtctctactaaaaatagcaataaattagctgggcatggtggtgcatgcctgtaatcctagctacgagggaggctgaggtgggaggatcgattgaaccagggaggcagaggttgcagtgtgctgagatcgtgccactgcactccagccaagatgacagagtgagactccgtctcaaaaaaaaaaaaaaaaaggaatttcagactgtgaaccttcagttgatgatattctagatatattttcctgaaactcaaagattacagaacaatatgtttttaaggagagcaaggaaatatatgtggtatgcttatctagtaagtcattcaacaggaaagacttcatcccacagtattttataataa

SEQ ID NO: 53859 - DNA, 1972 bp, Homo sapiens
ttctgttggtgacaaagtcacaggaactactaatgctactatgatttgttgcttacattcatagttgaaggaaatgctagattttaattagatcttagtaaagataaatgtgtaattcaagtttgtaccccctgaatttttcccttaggcctatggacccaatgtaagagcccttgctccaggcacagccgtttcatgtccttgctgcttctgtacagtttctttgatcctaccaggatttccagttccttttccccatgttctttgtctttcagctccctcctgacttgcgtatatgcctttctgtgtccagtttagaccttgcagtctattatttcaaccactttattaccaattccttcaactcctttgtccccatgtccttgagctgcacccatgtggcagttccattacccacccattctcttgctgatccttcctgccttgcttcaggatcttggcatttttgtcctgaattattacatcctcttgctcctatggactctcaactgagttacttcgtgctctgattccagccactctgctattcccatgagtcctctgctcttataactaccatagactattcagtctctgcctcccaccaaatatatcttattttcttaacttgactctaactgcacatgctgccttttctttccttttttgtctagaacatatttttctcctttggtctgactctactctgtaactcccccctcaacactttattgtctttattgacttttattgtctcctcttcatattagctagagtagaggtggggactttgtctcgcctctattcccatcatctgatatagtacctggcaaatgacaggcacttattaaatgcttgttggatggctgctggattgcatcattgctggttcagtggacgaagacttctgttttggggcttaaatttagtgacagttctgatgcaatgggttgattaaaatgctcccaaaccatctttttgttttgagaggcaggaatgtgatgtgactcatatgatccctgttatatatttttggctttctgttctttggtctagaagggatcaaagtgaagagcgtaagtttaagtatctctgtaatttaaggcaagttgtacattactggcttctgggtgttactaaggaacaattgtgtggaactgttctatccttttgttttacttttcagtatgaataacatcagccatttcactgaatcattaaaggcaaaatgtgaaagggaaggggagcctttcatccttcaaagtattcagagggcaaggagtagagtgatggatatgctagctagctcagtggtttcagccagtggccagaccatcctggagatcactgttattataagggacatatgtactttcatttgaatgattaccatttctccaacatatttgcagctgttttctcagaggtttttacatgctgttttggttaattaaaatacaaattcatttgaaagcattgctgagttcatagtagttatttcctttatcagtggatggacaacaagtattatcctctggaggtccataggattttattgttgtttttaaaaagggtgcttacatacaaaatgttaggaaccaaaatgatatattttataattaaaatttttttggctaagtgcgttggctcatgcctgtaatcccagagttttgagaggctgaggcaggaggatagcttgaggtcaggagttcaagaccagccagggcaacatagtgagacagtgtctataaaaaaaatttttaaaaatttgccaggtgtgatgatgctagcttatagttccagctacttgggaggctggggctgaaggatcacttaagctcaggaatttgaggctgtagtgagctatgtgactgtactccaggctgggcaacagagtgagaccctgtctctaaaaaaaaaaaaagaaagaaaaattaaacttagtaaaatatacataacataaaaattaacc

SEQ ID NO: 53860 - DNA, 1010 bp, Homo sapiens
ggtgtgatctcagctcactgcaagctgtgcctcccgggttcacaccattctcctgcctcagcctcctgagtagctgggactacaggtgtctgccaccacgcccagctaatttttgtatttttagtagagacggggtttcaccgtgttagccaggacgatcttgatctcctgacctcgtgatccacctacctcggcctcccaaagtgctgggattataggcgtgagccactgcgcccggcctgatttgtgtatttttagtagagatggggtttcaccatgttggccaagctggtctcaaactcctgacctcaggtaatccgcctgcctcggcctcccaaagtgttgggattgctgcaggcgtgagccactgcgcctggcttgatccacatcccttattctttcttcagagagaatgattctacccttagaactgtggctttcaaagtttttggactgtgatctgcagtgcatttacattagactcaaaatatagtgtgtgcgtgtgtgtgtgtgtgtgtgtgtgtgtagataacagaaataaaggattcttggaacagtactcaccttttactatgtgtagtgcattttaatatttttcattctatttcattttttaaaatgctggttaaaactcactgaattgatttcataaagatcacactgcctgccctagaggtattctataccaaaattactctgcttttaactctaccaccatcagaatttctggttcttcatagttggttagaaggaaagcaatctgtttgattatagtcattcatacctttgagtaggaaaataggaattacagatttgtcaaaaggtcaagccctgtcttgctctgtttcatgctgctctaacagaataccacagactaggtaatttataacgaacagaaacttaatttggctcgtggtcctagaggctgggaagttcaagattaaggggctgcatctggtaagggccttcttgcggaatcataacatggcagaagggatcacctgaacaag

SEQ ID NO: 53861 - DNA, 1868 bp, Homo sapiens
ccaggaggcagaggttgcagtgagttgatatcacaccactgcactccagcctgggtaacaaatagcgcaactccatctcaaaaaaaaaaattttttttttgtagggacgaggttatctaggctggtctcaaactcctgggctcaagtgatcttcctgccttgacctcccaaagtgatgagattacaggtgtgagccaccacacttagtctttttgtttgtttgtttgaagagatggagtcttgctgtgtctcccaagctggagttcaatggcatgatcatagctcactgcaaccttaaactcctgggctcatgcaatcctcctccctcagcctcctgagtagtttggactacaggtgcatgccaccacgcccagctaagttttatattttttgtatagagacagggtcttgctaagatgcccaggctgttgagcctggattcttttatatctttctctacttcaaaaaagtgcaacagatagattgtttttaacttatgttaacttatgttaaatatgaaaacttagttgttaaagagctgtttcttttcatcttatagatacagccgtctcagtgcttaaatgttgctcagaggcctttcctgaccattctctgaatactgtatgcccttaccacatgtttttttttttttttttaatttcctggcacatattattacgcaacactatattatttttaaaattttcttcctaatagaatgtaaagccagagactgttattttattcattactaatgcaattgagtacttttttcagtgcctattccaatttttttgcccgtttttctattgaattgctcctccctttatttatttatttatttatttatttatttatctatttatttattttactttttattttcgagacagtcccactctgttgcccaggctggagtgcagtggtgtgatcttggctaacttcaacctctgcctcctgggctcaagtaatcctcccacctcagcctctcgagtagctgggactataggtttgtggcaccacacatggctaattttgtagagagggggtttcaccatgttgcccaggctcgtcttgaactcctgggctcaagcgatctgcctgcctcagcctcccagagtgctaggattacaggtgtgagccaccgtgcccagcctttatttctttttatattcagaatattaatccttcctaaaatagatgtatttcaaatagttttgcctaattttgattgacttttaaccttttttttttttcccttgaggtctgtcgcacttagtagcagcatcatttacagaggatagatttggagttgtccagacgacactaccagctatccttaatactttgttgacactgcaagaggtaagaaatctgtgggttgggagggggtagaggtcatcttcccctcccacccagtgctttgtttgtttcctatatatcacatttatcgagtgacaaaacatgttggaagttaaaataatgatactttttcaccctcaggaaattacaatctaaaagacagaaaagatgctggtgtggctcatgcctataatcctagcactttgggaggctgaggctggagggtcgcttgaggtggagagtttgagatcagcctaagcaacatggcaagactcggtttttacaaaaaataaaaaattagctggccatggtggtgtatgcttgtagtcccagctactcaggagcccgaggtgggaggatcgttggagccaggagtttgaggctgcagtgagctacgatttcaccactgcactgcagcctgggtaacagagcgagaccctgtctctattttaaaaaacaaaactaaaagatagtttggaagagaaaacttttaatctgcttataaa

SEQ ID NO: 53862 - DNA, 1733 bp, Homo sapiens
ctgtctgtacaaaaacatttaaaaattaaccggacatggtggtgtgcctgtattcccagctacccaggaggctgaggtgggaggatctgttgagcccagaaatttgaggtggcagtaagctgtgatcataaaactgcactccagcctaggtgacaaagcgagaccctgtttctgaaataaaaaagaaaaaagaaaaaagaaaaaaatttcaccaaaaccacttagaattaattaatttttttttatgtcagggctctaatttgggggttaaacgtgtatacatgggaatacagtttagttggctcatcttggttgtccaatttgtagcacaaaggtatttagttacatggcgtattgtttaagtattattattctttgcccacaagatgtgaagtgtttcattttttcatttaagttactgtctggaagaactaggaaatgtgttatatttgaatagaatttaaaaggtaaatgtgttaattcttccttttttccaactcagattaagaatttcttgtcaaaacgggtgctgataatgtattttttcagtaaggtaagaatatgtggttatagcgttgggaatggggagggaggaaatgaaatatgaaataaagtagcagataggatctgacttgtaaatattttatagcttaatcctagcaagctaggcagctttgcatagtgcttcactgaacctccgttttaacaatagttgccctagacacacatctcacttcagtggcttctgaagcttgactctctagttgcctctcgtatctcttggctgctggcagctttgtgctgataggcaacacagaccccttcctgctgtctggatcttcacaaagtgaacacatttgtgtggctatctggtgcttcttggctcacgtcctgctagcgtctttgtgaccattttggtgttcaaaagagagatgatgatatcacagatgttaaatttatgatgaataaaaaattataattcagaccacacatgaaatgacttcccaacttgtgtatcagctgttccagctgccacaggagagtaaatctcagttgtagaagctaaagattgattcctgtttttgctggctacgactgttgtgtctctatttaatcctttgatgtgcaaaacctttgcccctatgtaggggaaagaatttttgtttttagcttttaaaatctagcctctctttctgcagatattgcagtattatctaatatcacgctcactccattaataccttcaagtgaaagtttatattggcatctgttatatttattatttcggagtcatactctggtggaaaagaggtctgagcaaccctgatagaatatagataacgcataacagtcatttcaggggcttgaaactgcttttccactatggtggaagggacgatccacccaactagccattacctttaccaaaaaataatccaccctggtctgcccattagaggaaggtgtcttgtcttccaccaaaaggaagaggggttgtctgaagttttacttcagtgcttggtttcaaaagaaggggaaaggccgggcatggtggctcacacctgtaatcccagcacttttggaggccaaggcgggcggatcacgaggtcaggagatcaagaccatcctggctaacacggtgaaaccctgtctctactaaaaatacaaaaaattagccaggcgcagtggtgggcgcctgtggtcccagctactcgggaggctgaggcaggaga

SEQ ID NO: 53863 - DNA, 4236 bp, Homo sapiens
ctctattactaaattggagagtcataagatgacttttgaaaaagctgtttacagatcagatttatagatattctgggcaaattagcctttggtgtgacttttgttaacttgaaagaactttcaggccaggtgtggtggctcatgcctataattctagcactttgggaggccagtgcaggaggattacttgagcccaggagttcaagaccaacctgggaaacatggcgaatctgtctctacaaaaaataaaaaaattagccaggcatggtagtatgtgcctgtgtcctagctactcaggaagctgaggtgggaggatcgctggagccccagaagttgaggctgcagtgagccgagattacaccactgcactccaatctgggctacagagcaagatcctgactcaaagaaaagaaaaggaaagaaaaagaaaaggaaaggaaaaaactggggaaaatggggtaaggttaatatttttttcctgtatatgttcacaatatagatttggtatgttcagtcaagtaatacttaaaatagtaatgcagtaaaactggatagattctaatgcagtaattaaaattgccaattagaaataaaatgtgaattgatgagttcattcaaaattgcttagagttagataaattgacgttgaagatgaagatattcatggggggggaaaaagagagactatatcgatctgacagaagaagatgtataaagctctttgagtggagcttgaatgcagtagtaaaatcgaatcttgagactataatcataaatggaaacaatctactgagctttgggtaaatgcgttaaacaaaaatttggtatgtgtagaatttgaaagcgttgctgctagcctgcttggatcaggttgcctcttcagcactggatctgttgttttacagaagaaactgcttttcagacaccaaaatctagccagatgcctcggccttcagtgccaccattagttaaaacatcactgttttcttcaaaattatctacacctgatgttgtgagcccatttgggaccccatttggctctagtgtaatgaatcggatggctggaatttttgatgtaaacacctgctatgggtcaccgcaaagtcctcagctaataagaagggggccaagattgtggacatcagcttctggtgagaattatatattttttaagattttaaatgtcatgttgcagaggatcagacagcctaagttcttatcttgccttttcttttttaaaaatagatcagcaaatgactgaattttctaatccttctccatctacctctattagtgctgagggtaagacaatgagacaacccagtgtgatttattcatggattcagaataaacgtgaacaggtaggatgatatggttataggatttatatttgcatgtaaaattgagaacattaaggatctcacatgagtaagtcatcaggaataagaagcttttttttttttttttttatgcttcgtgtattgactcaaatgaaacagccaatatttgactggtttgagctatacacattgtaatttcatatgacttgacctgataacttcatgtaagaaatatttgagttctttatatatccaaggtgtgcttttaggcactgggaaaaaagcaaacaaaacagagtccttgcccatgtaatatttacattcgagtgaggggaaatcagtgagtaagcaaatgtattatattctgtttctctgaaatataaaatatcattaattataagacttatgtgctattaagaaaaaagatgccttaacccatgacgtgctattgactgtaagatgcatctcaacaggtcatattcaagatatggaaaacatgcataagaaggaagaaatttgatataagtcttaactagaaaaacagagcaaggaagacagagagttcctaagggagagggtatcattttatgtggagtgataaggggaagtctcattgataaggcaatgattgatcagagacctgaagggagagctgggagcagcccagtgcatctgagatgggaatggccttggcttgtgtgaagaacaatgtggataccagtgtggctggagcagagtgagtgaggggagagtggtaagtgggtgataagatcagaaaggtagcaggcacccagggctcattggctgtagtaaagactggcttcatctctgagtgggatggaaagtcaccgtatggtcttgcccacaagaatgatatgatgtaacttatattttgaaagtgctgctctaggggctgtgttgggactaaactcttgcaaggtaggcatgtaagcccagagacggtgttaaggtgttaagtaatctagtgggagatggtggtatctgggaccagagtggtagtggtgggggctgtaagatgtggtcaaggtctaggtatgtattttaagttagatggaataggattagcttatggtttggttgtggtgtatactagaaagagtcagtgttcactggtaaggtttttggcctgaagatctggaataatatagttgcaatttattgagttggaatttactgatgattctggagaaggagatttgatagaggtgaggggagggaaatcaggagtttgattttggacaagccaattttgagatacctatgagacaaccaggtgaaaatacttagtaagaaattaggcatatagcggtagtgtaggggaaagttctgggctagaaatgtaactttggaagttttcagagtatagatagtattcaaagcatgagactcgatgcaaactcttgaatgtaaatacagaagaaaagagatatccaagaaaggggccctccaatggctaaaagtttgggagataaagaatagcaacagagactgaggtgggtagaaatccaagaaaagaaagagtttcaaggaggagaaggtgggagtgtcagatgctgctgatgggtagcatggggcgggaactaagaattaactgttgagctagaaatgcggaggtcactgagtccttgacaagagctgttggctggagtagtggggacaaaaaaatgcatgagttcaggagagattggtagacgaattggagaccacaagaaaaaccacatttttcaaggaatttgttgtaagtggaacagaaaaatggggcaatagctgggaggaattgaggggtcaaggaacttttttaaaaattttgagatgggttcttggtctgtctgttgctcaggctggagtgcagtggtatgatcatggctacactgcagccttgaactcccgggctcaagtgatcctcccacctcagcctcctgagtagctgggactacaggtgcctgccaccatgcctgcctaatttttttaatttttattttttgtagagacacagtctctatgttgcccaggctgatctcaaactcttggcctcaagcagtcatcctgcctgagcctcataaagtgttggaattacaggcgcgagccaccacgcccagtcatgtttttattttttaagatgggagaaattataacatgtttgctgatggaatgactgattaatagggaatgaatggttaaaggcatttcataaacttcgggatcccatacggctctatatgccattagtactgccgtgtcactttctacccaaccagacacgtgctgcttgctgcagccttctgactagtcatgcagctttgggtgagagtatggtaggagcagattcacttttaagttagttgggttagcttttagctgatactaagaacactttttcccccggaattgtcaactagtagaaaactactttgtgtcttaagatattttttttcctgtaatctcagcactttgggatgccacagtgggaacattgcttgagcccgggaattcgagaccagcatgggcaacatggcaaaaccccatctctactaaaaatacaaaaattagctgggtgtggtggtgcattcctgtagtcctagctacttgggaggctgaggtaggagaatcacctgagcccagaaagcagaggttgcagtgagctatgaatgtgccactgcactccagcatgggtgatagagtgagaccctgtctcaaaaaaaaaaagatttttttttccctgtgagagaaacatactctttttttgggtattaaaaggttaaagggcaggacagttatagagaatcgagaaataatgtggccttgaaaaatatctccagtctgtaatcctagcactttgggaggctgaggtgagaggattgcttgagtccaggag

SEQ ID NO: 53864 - DNA, 5441 bp, Homo sapiens
ttaaagaagttgtagtaattttacaaatcaatctaagtaagcataaatggtttagattgaatttgcaagttgaaattttaaactagatctacagtatgtgtgatcctgttaaaaggtcctttaaaaagagctaaaagaggctgtgtgtggtcttcagcactttgggaggccgaggtgagaggatcacttgagcccaggagttcaagaccagcttggaaaacatagggagacctcatctcaacaaaaatttaaaaattagttgaatggcatggtggcacatgcctgtggtcccagctacttgagaggtggaggcaattgcattccttgagcctaagagttggaggctgcagtgagctgtgaccctgccactgcactctagcctgccactgcactttagcctgggtggcagagtgagaccccatctctaaacaaacaaacagaaatgctaaaagaaagtagttagaacccagttttgatcacactctaaagaatttataaacaaataagaaaataaatagaattacttttaaatattaattataactaatttgttagagaaacttaaaagtatcagttactcatttggttactcaccaaatatttatttagtggtacgtcagtctctgctagttgtttgtggtagaatgatgaataagacatagcacagcctagtagaaaatacagacgcccaaaataactaaaatgtactgtggcaaatacattgggacctcttattcagcttgggaccaatgcaagaaaacttcagagagggatggtatcttgaaggatgagtaaaggggtttgcctgggaaaagatgaagattttcagtaaagaaaaaaaaaaaatagggtggccgggcatggtggctcatgcctgtaatcccagcactttgggaggccaaggcaggtggatcacttgaggtcaggagtttgagaacaacctggccaacatggtgaaaccccatctctactaaaaatacagaaatcagttgagtgtgctggtgtgtgcctgttgtcccagccactcgggaggctgaggcaggagaattgcttgaacccgtaaggcggaggtagcagtgagccgagatcacatcactgcactccagcctgggcaacagagtgagactttgtctcaaaaaaaggaaaaaaaaaattaggtatcacgtgctaggcactgcctttggatatggtagcaagtaagattttccgttttcttgtgggccgcacagtttggtgggtggaatcagatgggacaagtaaacattcaattacaatacatgatgttagtgccattgttgagagctatgtgagtgtatgtttgtgtgagggaaaccagggaaaattccaggaggaagtgatgtttcaatttcccaccgcagatatatgaaagagcacagagaattctgtagttccttgtagctagaacttgtagtaggtagggagggtagaggcaggaaagttctggaagtctagaaaggaaggttatggttctgagattttttttttcatgaaaaagtttaattaatttcctcttggatatataatgatgaacccaattagtgagattttatgtagaggttaaaaaaaattaaataatatgtgttttttccccctgttagtatttagccttgcaggacctgatgttgctttctcaatattctccttcacgaagacaagaagttttcagcctcagccaaccaggtattgctaaaagtaatagacttgattaggcatatgtgtgtagaaagtaattcacttggccaggcatggtggctcaagcctgtaatcccagcactttgggaggccgaggcaggcggatcatgaggtcaggagatcaagaccatcctggctaacacggtgaaaccctgtctctactaaagatacaaaaaattagccgggcgtggtggcgggcgcctgtagtcccagctgctggaaaggctgaggcgggagaatggcgtgagcctgggaggcggagcttgcagtgagccgagattgcgctactgcactccagcctgggtgacagagtgagactccgtctcaaaaagaaaaaaaaaattaattaacttaaagtttttggtgagaaagatgtatttaataaaatatcagatgtcaatgagtccattaaatgaagtattgaattaaatcttacacagcttaagagtttattaccttcagctccttcatttccttaacctgaagaaattatttagtacactgacaattttagggcagaaaaatacagcttaagaattctaaaagtttggctgggcgtggtggctcacccctgtaatcctagcactttgggaggccaaggtgggtggattacttgagcttaggaattcgagaccagcctgggcaacatgatgagaccgctcttctacaaaaaatacaaaaaattagcccagcatggtagcatgtgcctgtagtcgcagctacttgaggagctgagctgggaggattgcttgagcccaggaggttgatactgcagtaagccaagattgtgccactgtactctagcctgggtgacaaagtgagagcctgtccccctccccaccccaaaaaagaattctaaaacttttaatgctacaaaggatcttaaaaattaggtggtctactctctagatgggagatttaagtctcagagattggcttaaataaagttaatgtcagaattggaataagagtcctgtcatttggctccatgtacaggactcctccttctgctatgctactctgcctccttttaaaaaaaaattaggaagaaactagattcaatggtgactcaaggatgctctcagcaactctgaaacacttacagtgtatactgttcttgccatgctgttcaagactgtgactttgccagttctctgttgttcctagagggaaaacagtccagtcccaggcactggtgggaaacagagaacctgggtagcctttcttctgtattttaagagacagggtctcactgtatcaccaggctggagtacagtgtcatgatcacagctcactgtaacctcgaactgctgggctcatatgatcctctcgcctcagcctttcaagtagctggtattataggggcataccaggtgtgcaccaccacacctggctaatttttaaaaatttttgttgaaacagggtcttgccgtgtttcccaggctggccttgaactcctggggtcaagcagttctcctgctttggcctcccaaagtgttagaattacaggtgtgagccagtacactcaaccagcttttcatcttttttttaatgatttcttcattagtttgccaagcttgccaattaccagataaaataccagataataaaccttctatagttaaatgttatatggaaatgaaatccagttatataaaaatgtaattgactggaaccactctccttttagtaacatgagaaacccagagctgatactgtggaaaattaactataacaatgcttttctatcagatttgagttaacataggaattctatactctaaatgttttttaccagatattcaagtaaaccgtaaaagggtggcatttgctctgccagagagtgtacattctagcacataaaaaaaatttaattggatggacgcagctcacgtctgtaatcccagcactttgggaggctgaggcgggaggatcatctgaggtcaggagtttcaacatggtgaaaccctgtctctactaaaaatacaaaaattagctgggcatggtgttgcacacctataatcccagctactcgggaggctgaggcaggagaattgcttgaaccccagaggcagaggttgcagtgagctgagatcctgccactgcactccagcctgggcaacatagcaagattccatcacaaaaacaaacaaaaatttaattggatggttacacagttcctcatgtacccaaattacagtagtacaaaacatcctgaggcctagtgatagagtattgtgtgtgtgtgtttgtaggttaagtggtattcctgagttttacaatggggggagtgtttaaggagagatccaagtgaagagggaatgatcatttggcacataggatagagaaaccagttttcagtagacttctctgctattaacgcataatggagcatgcttgatttttatataataactctaggcgacaaagatctactatgagaaataagggaatttttaaaggaatggggacacagtagtttaagttaaataataagataatctgtaagctctctgagtgtaaagtgtgatcattattaacgagtcattcccacagatgtaacagcaaataggggctgttatatacatgaaaatgtaaggaagcccagggggtcagacgcaaaagtttagaggtcactggggaccatggaggtgcatctcactggacatcgtagtgttcattgtcttagttcattgttcacagtcatagcagtctgtttaatactgctagtgaagtaaccctggtctttctcgctcaacctatgatctagtgtttggctttattttagcgaccaatttgagaggttttttgtttttttttttttttggtatgtgtgtggtaaaatagcaagtttttgcttgtagacttttgggaaacttaattcatccaagtattcattgaactcctgctgtgtattagatgtcatgagtataaatagtagcttcactaagaaaagtgggtcctgatgccaagcataatgtagaatttcttactgactttttcccccacttcaagaggggaatgtaagattatttacattttaaaagctggtgtttggacctcctaggtggacatccccacaattggacagccatttcaagggagtgtttgaatcttttaaatggtatgactcagaaactgattctctatcaagaagctgctgctacgaatgggagagtgtcttcatcttacccagtggaacctaagaaattaaattctccaggtaatccctaggactactaagaggggaaaacatttacattttatttcctaagaaagatgactgtagtagactgggcgctgtggctcacgcctgttatccccgcactttgggaggccgaggtgggcggatcatgaggtcaagagatcgagaccatcctgacccacatggtgaaactctgtctctactaaaaatacaaaaattagctgggcgtggtggcgtgcacctgtagtcccagctactcaggaggctgaggcaggagaaccagggaggcggagtttgcagtgagctgagattgtgccattgcactccagcctggcgacagagtgagactgtctcaaaaaaaaaaaaaaaaaaaaaaaagatgactgtagttaattgaaggatacttatatgagtgtgaggtgtatatttttagggaaaattgatccaacatatagcatcttatattgaaccaagaaaatgacgtgggtatcattgtagattgaaaaaattaagcccaaaacat

SEQ ID NO: 53865 - DNA, 2383 bp, Homo sapiens
agcagtctaacagagtgtcttaaattgctttaacattgtttagtagcatgtgcttttaacgactatgaatctgtggtttatagggcataaggataaagctgaaatctggtccaggagaagtactagtcatgtttaatggttttgaggtattagactacaaagcaacaataataaactttcacccagctgctcgtagtgaggcttataggcttagctcattcctccttcgtagtaaaagtcagtgaagattttgaacacaggaaactgtagccccgatttaggtctgttcttcccttaaagctccctcatgtacctcataagaaagtattagggaaagagctttataaagatatcgaaggagaggagtctgtcaacattgttatttagacataatatttgtgtctcaatgtggagacttaagtgtgttaatatttagattgcatttttcctagaggattaatagtaatttctgcattcacaggcaggttcataggccacttgacacagtgagtggcctcttaaatctctcgttactctaccatgtctggctgtgtggtgtctttctcctgacgacttggtatgtctcatggatactcttcaaaatctatgccacagaggtatgttttttaaaatattttttcttaatacttttgtgttttggagtgcacagttgatttttagcagagcacactgatcagcacacgcaaaaccatttccgtaagctggtttttggtctctcttctgagactcttggggccatatcatttgtaaccaccatttatgtggtattttttttcagaggaacagtgtggatattcacttaatttttggagattaaactgaatggactgccactatgctttattgacatcctagttgtcttctgggggcttccatttctctactgagtacatactaaatggacttgaattttaaattaattttccatgtcattggcatagctactattaaaatatttaaatatgtggcagtaagaattttttttttttttttttttttttttttgagatagggtctcgctctgtcacccaggctggagggcagtggcctgatcttggctcactgcaacgtctgcctcccaggttcaagtgattctcccacctcagcttcccgagtagctgggactacaggcgtgtgccaccatgcccggctaattttttttgaattttagtagagacagggtttcaccatgttggccaggttggtgccgaactcctgacctcaaaatgatctgtcctcgacctcttaaagtgctgggattacaggtgtgagccactccacccagccaagatatttgttttctgaagggaagttttaaaatttatattaaagaaatgattttggaaattgaggtgagcttctggataattcccacagaaatctttttaagtgattgagaattacattgtttttatcatccaagtgtttgtcttagaaaattagtgtttctgttttattttacaatctccgtaggtttgtattcttcagtggcttcagagaatccttgtttgtgaaagtggtttttattattcagagacagagtctaataaagttgggaaagtaacattaaaaaaaatggtgtgtttgggtttatgtaactttaacctgtctttgcaaggagcacgaaagatgtcagtttgcttgtgctgtctgtctttatgttttaatttgtgcatgcttattgaatgtaagatcatgaaaataatcatttttggtttttaatttatttgataggctcatgtgtttcctgttcaaccaccatttgcagaagggtcagatgagtgccttccaaaagtgttaaatagcaatcctccccccatcataaaggtatccaaactgtgttgcatatcttcacacagttttctctaactttattcaatacacttaatatttagtatatttaagtagttgtattttttgagggcctataatattcttgtactggtatgataaaaatcacctacttgctaatgctgtttattttttcaattttctttccaagtgactaaaatgcaagtgcacagtacagtgtatgtgtataagctagttaattctatattcagaaacagatataagaatatttccaagcataaaatacagtgatatgcaatcatctacattaacttctcacaaactattcatgatagcataacaaaatattattgattttttttttttgagacggagtctcgctctgtcgcccaggctggagtgcagtggcgcgatctcggctcactgcaagctccgcctcccgggttcacgccattctcctgcctcagcctcccgtgtagctgggattacaggcgcccgctaccacgcccggctaattttttgtatttttagtagagacggggtttcaccg

SEQ ID NO: 53866 - DNA, 1545 bp, Homo sapiens
ttggcctcaagtgatcctcccaccttggcctcccagagtactgggattataggcatgagccatcacgctcagcctcattgcaatgtattgacctactacatacagtcagcctggttgttcctctagagttgtttatttgggctatttttgtgactatgatcatttccatgatttgctctttctcctataacttcatttatgttcaattcaaatttcgttttcagcattatcacttttcatttctttgttgcactttgattttttttttttttgccagtttcttcttttttttaattaaaaccattttattttttatggaacgcttcatgaatttgcatgtcatccttgcgcaggggtcatgcgcaattccccttttagtatgcgcaattccaattttagtatatgtgctgctgaagcaagcactactttcctgttttagctattcattttttaaaagtatcatttggatttattgtgggaaacaaggaggcaacacaactacatgctttgctgtctgtgtctgtactgaataacagatccaagtgaccaatcagcaacagactttgagagaattgatgggattgggtcacagattataatgcacatcggttatctacatattgatttgtgtcctgaaaagttagaagtgctatatgcagttgcttatagttaatataccacagtaactagagtttgaactgcatttttgggtgactggtattttttaactaaaccatggtaactgaaatgtgtatatatcagaactgtacaaagcaaagactgcctgtgttaataagtactgtcttttcctactcattcctaataagtctaacattttgactgaggtcttggtgtctgtgtggccatgtcattgaccttatattctaaagcttgactaaaacttgttttataactttttatgttcatagcttggtattttttcccttcaggctatattcccaaagcttggattagcactgctatgaaccttcacatagatgagtaagtgatacctaaaaagtctaattttaactctgtttccattcttttagatgtttgctattttccagatattttgtttagattttgcctttaacatttttttaaaaattgtattcatttttgaatacatatagtttatatggtttaaaattccaaaggtgtataaaagggtaaaattagcaggacttggtggtacttgcctgtagtcccagctacttgggaggttgaggcaggaggatcgcttgagcccaggagttcaaggatgcggtgagctataattgtgccactgcactccagcctaggcaatagagcgagaccctgtctcaaaaagaaaataataataatagggtataaaatgaaaaagtctcctcctctgtctccactcacccagttctccgcagaagtaagcaatgataattgttcttagatgcagcttttatactatacaaaagtggctttctcgagttgcatggaccaggcctctgtttcgtttttctccccaacaatcattccttctctggtgtctcatgatatataccaatg

SEQ ID NO: 53867 - DNA, 2061 bp, Homo sapiens
gttacgaacccctgacctcaagtgacacacctgcctcaggcctcccaaagtgctaggattacaggtgtgagccaccgcacccagccctttttcttttcttttcttttttttttaagctcatcagctatcattagtattttatgtgtcacccaagacaattcttctttcagtgtggcccagggaagccaaaagataaggcacccctgtcttagatcattagaattttcaggttcccactaaggaactatttagctggttcagctttcttgtctttcacataattagagaggaggcatgacttactgagggttgtacagaaagagggagcactagaactcacaattcttgattcctaggctagtgtcttcttcactgcctcccatttttttgcaaagagcatttttaaaaattcagtgcaaaggcagtatgcattatctttaagattggaggctctgaagccagcctgcctggattgatagctcagattttccttttgctggttgataacattggttgttatttaatctctctgtgccttgttttcttcatctctaagatgagggtagtagtaaaaactcccttacagggttcttatgaggtttaaatgaattcaaatatgtaaagtgcttaggacagacagtacctggtacatggtaagcaacaaaaaaatgttagctgctattgttactgtgtttcttgtactttcttcatctgcatagtgcttagtaccaagtatggattgatatggttaattttcttatttctgattttatatcagtgagatgttgaataatataaatattaattttttaacatctgaaatagttgatgtttttgcttctgcaatactctttgtcttcttatacaataattatgttttctatgtagactgttacagtaaagtgcttgctttaaggtgatgttgagtgtatcatttgatttgaatgtgtcatttgattcttttttttttccccacagcaatacaagttcttgcgttttaggagatctctgctcttattagttaaacacagttgtgtggaatcactgttcctggttagaaatttctgcattttatattattttcttggtaagaatttctgctttttgatacagtgatatattatctcatagcccagaaaatgtcagttacaaagtcattcttgtgtttttgtgttttctacagttataggtatgtgattagctcaactgattcattgtttaaattgtcaaagagaatgtatttaggaaaatattgttgaagaaaatgtgacatatgcctataacgaaatattatttagcctttaaaaagaaggaaatcttgttatgtactacagcttgaataaaccttgaggacattacgctaagtgaaataagccagtcacaaaaagacaaatactgtatgattccacttatatgaggtatctaaaatagtcaaactcttaaaaaacagaatggtggttgtcagcctggagagttgggaaggggtggagttgttcagtgggtatagagtttcagttttgcaaaatgaaaagttctagaaatctgttgcacaaaaatgtgcatatagttaacactactgtattgaacacttaaagatggctaaaatggtaaatttttttttttttttgatgatctgtcacccaggctggagcgtaatggcgcgatcttggctcactgcaacctccgcctcttgggttcaagtgattctcctgcctcagcttcccaagtagctgggaccactaccaggcgtgcaccaccatacccggctattttttgtatttttagtagagatggggtttcaccatgttggccaggctggtcttggactcttgacctcaggtgatccgcccacctctgcctcccaaagtgctaggattacaggcatgagccaccacgcccggcctaagatggtaaattttatgtgtaggttttttaccacaattaaaaacaaatgcattctttttttaagaaagaaaaaatactgtgcatcatttggtcattactctatctagaaatgacatcctcctttttataatttgtaacttgatactaatacaatgt

SEQ ID NO: 53868 - DNA, 1060 bp, Homo sapiens
agattctttgttctgtgagttaccaggagtgtaaaaaatacaaataataaaaaagatgaaaacaaaatcacccaaccaaaaaagaacaggaacaaaaataattcttaatgatggacccatagggaaaagcagactgttagtatgaagtagggcacaaagaaatggacatcaagacaactatgccaacaagactgttgaaagtattacatttatagagcatttagcatagtgcctggcacacagtaaatatttagtgaagggtagttcatagctacatcacagaagaaatccaacagagaattgaaaaacacttcagcatgggagcaagaggtgggggaaatggtgttttctgcctgtctgctgaaatgtcgacctgcttccctagcctctctgaacctttgtgaagaatggttgaggtgaaagctatagtaggaatagcataggaactatggcgtttttattggggcaggtgtgtggtggtggtagcacccagtggctacacagaatagtgcaattccacatcttgtactttgaaaatatttgaacagaccaatataattgaagcaatatgattagtgaccaagtatttatatgggctactttttgtttgtttgttttctttttgagacagtctcgctctgtcacctaggctggagtgcagtggcgcagtctcggctcactgcaacttgaactctcaggttcaagcagtcctcccagctcagccttccaaagagctgggattgcaggcgcctgccaccgtgccttatcttacatatattatttttgtatttttagtagagacggggctttgccatgatggccaggctggtcttgaactcctggcctcaagtgatctgcccaccttgtcctcccaaagttttgggattacaggcatgagccactgcacctggcctgggctgctttttgtaagatactgtaggcatctccattcataatatgaagatatagtttctgaatactataattatttgctgttcttcagcttctgaaattccttaaggaagaatcagtcgtaatataagcataaaagaagaccagg

SEQ ID NO: 53869 - DNA, 1124 bp, Homo sapiens
agctggggctactggcatgcaccaccaagcctggctacttttgtattttttgtagagtggggtctagctatgttgcccaagctgttctgactcctggactcaaacgatatacccacctcagaatacaggcatgagccactatgcctggctgagaccctatctctttaaaaaaagaagagaaagaaaaaagaaataaagttttcacatgcctgttgcatccatgagaacaagctaatgaaaatacacacacagcagggagatggtgcccactgaaaaggatctggccctcacctccctgcaatctgagtgtatgaaaaaaaagtcctatctagaaatccttcatatcttgtgaagatgaattaaaagcaggatgtcaacttggctacctcaaaatttcacaaggagaaaaactccaaaatcttatatagaaatgtccataataaatcatctttgattctaacaaaattaagaatattaaaaataaaagaaagtgttagggaaaaatgagatgccccacaataccttgctggacctccatggtccccagttgaaagtgaccatgtatttaacaccacagatatgcagtagagtgcacatagaagtctgatagttgacaatgctgataaattattgtttctaccatgtactgtaaaaatttgtaaaattttagtactttctttttgtaatttcttttggtaaaatgttagatttattcttaatcccaaaagtttattctatgatggtaatattcagctttggcttcagctttgacagagtattgatttttgataattggtaattcagtatttggtcaaaaaatatatatggggcatgtcttgtagccatgagtgtatagtggtattggtttgcccaggtgggcgctgttctccagcctggggatggttggagcaggtgttttgctgggtggtgtggtggaagggcagtggaatgaggaagctgaagatttggcaagactagtggaaatgatagctcttggtgcccagaaccatagtttcctgcctatcaggtttgtaagtgtcttgcctggcagggtaggtttgcctcccgagaagactaagagggagggaggacaccgtagcttatctttctttcattagctctag

SEQ ID NO: 53870 - DNA, 1071 bp, Homo sapiens
gacatgtatgggactctatctgctttaaaggccttgtgccccacaaaatccagtagcatctcttgtagcaattttatgggcacaggatccccgtgagggaatactcagttttaaagagataacacaaacccaatgttatggcatctctatcaggtatatataacttatttacagttgctgtcagcccagacacttgtaagcaatactgcttgttattatggtagatatacttaatcatgtcagatttccaggggaacagaggtagaattaattaaagatcagagtctcatgattcaggaaaaaaggttttgttaatcttgttcacacttactgaaaacgagccatcttgttagaatttgggacatttcttaagtcattaaagtaattaagctttgccttcagtaaacattgagcctaaaacagtgatacatgtccctgactgttgaattaataacttaattttttcccttcagctttggtagccctgctgcgcaaacctgcttaaatgaatatcatctttttttcctactgactggagcatttatgggctatagctatagcctcctgtattttgttaacaacatgaactatcttccatttcccatcatacaggtaagatcatttgagcattacttgatgtcaaaatttggctgaggtaaaattgccttggtgcatatgtatataactggatttatctgattcattcaagatttgataaccaacacttagaactgaaatcctcaaaatgccatttagcgagaagagatttgtcttcatgagacttaagcatatttttgagagttgcagctaccttttcctgttgccaatctcagaatacctctttgctacactgtttccctccctgctaggtagtggcacttgctgtgacccagcagggtttggggaagatgatgatgacattcatgcaaagtactctgtgtagcttctttttttttggagacagtctcgcttctttgcccaggctggagtgcaatggcgcaatctcggctcactgcaacctccgcctcctgggttcaagcaattctcctgcctcagcctccacatgccatc

SEQ ID NO: 53871 - DNA, 1130 bp, Homo sapiens
aactccgtctcaaaaataaataaaataaaataaaataaaataaataaataaataaataaaaagtcagtattcaggagctgaacccagtcactctcccacactgcaagaccattacagtagtccatatatgaaaaaaaaaatcattattcttttatggtgcttaggagaatactaggataggcactattggaactattaggaaattttaatgaaaaatgttgatcatgctgtccttaggtttcatctctagattctttgggtttttttgtgtctgtttattcatgctttcctcaaatttttttaacttagaatttttaactttaaatttttctgtattgtatttgcgttgactgtggatttctctctgcctttggaacatttgtgcaaggatgagaggggatagtttagatcctctaactgcatatgctgtaggttataaagccacagtaatgtgtttcctttgcagttgtgccttctattccttgctccagactagctctgatagggaagatcattcatcctcagcaactcatgcactcatttattcatgctgcaatgggaatggtgatggcctggtgtgctgcagtgataacccagggccagtacagctttcttgtggttccctgcactggtactaacaggtaatattaaatatatatttccttaggaatctcatttacttactaagccaaaggtgacctatataggttaatcctatgagtattctttgctttccagacttctgcaaaaggtgctttttgcatatatcaagtgtttttaatattttgtgtttattgatttcagcaattaaaaaaatttattatgtgcaaggtgctatgcgatttatgagagtgactcaaacatagactataagctctttgagagttgagaacaatagagaaattaagacatggatgcagagggatgtaataggatgaagaaagtgagatgtgcagacaaaacctgtggaggttcagaaaacaagagggatccacacatgttcttggaagaggtagcatttggttggagtttgaaggaagggtagtatggaaagaatgaagaaaaatttttaaaaattataactgcctttttatagagtgcttttataattttgaaacttgtatagttct

SEQ ID NO: 53872 - DNA, 1191 bp, Homo sapiens
atgccaccatgcctggctaatttttgtatttttagtagagacggggtttcaccatgttggtcaggctggtctcgaactcccgacctcaagtgatccgcttgccttgacctcccaaagtgctgtgattacaggtgtgagccactgggcccagcctcgctttctttctttttttttgagatggagtctcactctgttgcccaggctggagtgcagtggtatggtcttggctcgctgacgcctctgcctcccgggttcaagtgattctcctgcctcaacctcctgagtagctgggattacagttgcctgccacctcgcccgtctattttttgtatttttagtagaggtggggtttcaccatattggccaggctggtctcaaactcctgaactcatgatctgcccaccttggcctcccaaagtgctgggattacaggcatgagccactgcactcagcctgctttcttaattcctcactattgactagtaagctttttccatgcaagccctattcgaaactccttggcttacagccacacttaaacagagtgttctttcatactctcccatatgcttgggtcatcttctgtatgtaatatgtcagttgaggggtccccagccagtccttcttaaagcctgactattcactttggctcattccttcagtaaccatcccttatgcatttactatatgccatgcattgtgtggagagaaaagagaaatgataggtcccatctttctccagagatcgtgattaatggagagacagtaaacatgaagcatatttgattacagtacattggatggtaagagcttgtataggagcaccacttgccccagcatgggggaacttgaggagatgatccttaaaccaagccttgcaggatgagttgaattaagtagacaaagaaggaaaatgatgttctagagagaaggtatagcatataaaaaggcttagtgacatgagagggtttggtatatttagagtgttataagttagttgcacagtcagtaggaccttgtgggcatttctggttgggagggagaggtcataggaacctcttcctcaaagtataaagcacctgaaacttgtcccttcatacttaattttctacctcctgccatctctttactttgagtatagtaagagcaaaatacctacatagatagatcagggaaccctaggctagctgt

SEQ ID NO: 53873 - DNA, 1031 bp, Homo sapiens
gttcttgagttgatatctcattgaacctgtcagtggtgtacaattaaattcttgaagaaaagataacctttaaaattaatgacaattgtggttcaagctctttttatattgcagtgtcctgaacgtgactacatgactgaataacctttactaattcatctctcttgtgttttagattctttcagtgacctgtatagttcctatgtaatcttttacttcctgctgctgtcagtggtaataataataataagtattttcaatgtggagttctatgcaggtgagttttcaaatgttaaccttcttagaaatatgcgaatttatttaactaagggaagacttagtacattttatatgtgaatgtgttttgtgtcaaaaatttaaaaacgtatacagaatcatatgcttcaaatgttgtaccttaaaatttatttgggtgctagtttctgttttaaaaatatttttagactttttaggacaaatattatatgattctacttatacgaggtatctggagtactcaaattcatagagaaagaaagtagaatgctggttaccaggcgctgggggagggggagtggagaattgctgtttaatgggtagagttgtggaagatggaaaagtttgggagctggatggtggtagtggttatacaacaatatgagtgtacttatgccgcagaactgtgtacttaaaaatggttcgaatagtgaattttattattttaccacaataaaaaaatttagaccttttaatagttcataactagtattaaagctgtgatttagcagatacattatgaaaagaattcctttatagggaagaccaggtgatttctaagtttttttttcaaatataataatctataatactgtgattaaaaaaaaacttatgttttgccttggagaatcacctgctggattccagagcttttaatttttctgtttctcttcatattctttctgccttttcagattccttgagactgcctttaagatacaagttgtggcagattcacataaggaaaaaaagat

SEQ ID NO: 53874 - DNA, 1062 bp, Homo sapiens
caggagtttatgaccagcctgggtgtggtggcatgcacctgtagtcccagctactcgggaggctgaggcaggagaattgcttaaagggggagtggggggtggaggctgcagtgagctgagatcacgccacttcactccagcctgggtgacagagtgagactccatctcaaaaaaaaaaaaaatttaggtcaatgaattgtacttttaaaaataagtggttaatttttaagtcttagcaaacatgctcttatttttatttcattcatatttttaggcattatatatatatattttaaactttgagatggaatatcgattgttgaactactctaaaatgtgaatgtattagtatttcatgggggcatcctgatttttttgtttttgagttccgctcgtttagatgatgtaatgtatggcttattctatttccaaaaatgttactttagctatatgaggtaattgcatttatgaagaagagatctgaaaagtattctttatattttaagaaaaaactttgttggtatattactaaagatgatacttctctttcacatgattaaatatttgcatatgcgtggctgggtgtgatggctcatacctgtaatcccagcattttgggaggccgaggtgggtgaattacttgaggtcaggagtttgagaccagccttgacaacatagtgagaacccaaaaaatagccatggcgggcatctgtaatcccagctactggaaggctgaggcaggagaattgcttgaacccaggaggcggattgcagtgagccaagattgagccactacactccagcctgggcaacagagcaatactctgtcttgaaagaaagaaagacagagaaaagaaagaaagaaagttttgccatgttctagtgttttgtctgatgttaactgggtcatttaagaaattgtagtataattttaaagtacctggggccaggtacgaataactcacactgtaactccttttttctccccccctttgtttttgaaacaaggtctttctctgttgcctaggctggagtgcagtggcatgatcactgctcactgca

SEQ ID NO: 53875 - DNA, 1046 bp, Homo sapiens
atatcttcttgtattattcagcagtaaatattttcctcctatatgatagatacgggcaattcaaacatgaatagaatgctacagtgccgtagttgcccagtaaaggttcatatctgatgattataaatacagttacagtatacaggtggttcccataaaatgtgtacagcctttatatattaatatagctatcaattaagcctagagagacaagtattagttgctctaaaacagctgtaaatcaatgcccaccacccctcatacaaagtatgatatttgatgttgcacctaactttgtactaatgcaggcatcagctcactgatactataaattctttagtggtacgtaatgttattactagtagtgaatgtttgagttacggattatgatctgagttagtggttaacatcctgtatgaaaagataggatttgcataactgaaataatttaactgacttcatgagtgagggtttttctttttgtttataggttttgggctggaggatagttgcaagtattgtttggtcagtgctatttctacccatctgcaccacagtatttataattttcagcaggattgatttgtttcatcctatacagtggctgtctggtaggtgatactcaacttggggagaaagttataggacctacttctcaacataaaaattgcattatgtttcaagcagtttattttcaattactgcctatgttatattgacacatcaaaacattcactttgagataattttaagatgtctccttcgtaacataaatcacctttttattatgtaataagattaataagcttgtcaaagactgtgatcataggaacgaaaagatcattagaagaccccataaatgaaaacttagtttcatttgtttttcctttgggcagctttattgagattgtttgtctctttaaaatacagaatggttcctgtcatcgattcgaaattgtgggtagaaaatatgacatgtacctcttttaaaaatacgtctaaaattaagagcacttgatttctttttttgaaacagagtcttgctc

SEQ ID NO: 53876 - DNA, 1027 bp, Homo sapiens
aggctgtacaggggaaccatgataagacgatgtggactcacatcactgagaacgagacaattcgagcccagctggagagggacagaggtagagaacacaatggcaacagtttcctgggtctctcttttggcccaaagtacctgacatcgccatgttgagggtctctctcaacctgcccctgagctaggacttaagttatttcatttcattttggttgtaaaggccttcagagagtcagagcagcatctgagaagagcctgcccctcagggcccttgaagacttagcagactggtgtacacagatttgacgcctctgcgctttgctcagatctatgaacttggctgttagagcctccatttgggtgtcaagtctccaaatgaggtagtgatgaacagcttctttgcagcctccctggcagaagcatcaattgctttgctgatagagaggctgtccagagccctgaatgctgctgatttacgagctggctgtgccttctactgtcatctctggactcccagctttcactgaaaaataaaggcttctaatctcaccagtaacctaccttccccatgtaaatctgtgtattggaaaacttagcctagagcgcattcccaggagagcattggaaggcttagcttagaacacattccagggagaaccccttctctccctggaacctcaggatcataggggagcttccagttacagtcatgcattgcttaatgatgggatgcattctgagacatgcgtcattaggcagtttcatcattgtgccaatatcatagaatatacttaaacaaacctagatggtatagcttacaacacacttatgtgggatagcctattgctcctaggctacaaacctgtgtggcatgttgctatactgaatacagcaggcagatgtaacccaatcgtaaatatttgtgtacctaaacatagaaaaggtacagtaaaaatatggtgtgatctcatgggaccaccattgtatacgtggtctgttgtcaactgaaacatcattatgcagtg

SEQ ID NO: 53877 - DNA, 1062 bp, Homo sapiens
ggtcctgaaaaatgattaatgttactgaattttatcttcctgtttttttctgtctttacctagtgggttatgattagtaagcccctgctacctttcgtatattgtttcaggactccactgtggagggttacagcattatagaaaatttggaaaatagcaagggggaatgggaggctggaaatcacccagaattttattaccctgtcacaaaaacttttactgtatttattttcttctagttgttgaccatatgctgtacagttagaataataatgtgtgaacaattttgtgtcatctttttttttaacttagtattatatcacaggcttcgtaagtacaattttaaaataacatttgccagttggcatacatttaaactaattttctttttcttccctctgtcattacacagtttgtcccctctgtaatacacaggggacatctatgcatattcctgctactggtaccttcaccttttttcttactttctaagattaaatttcaaggaatagaattactgggtgcaaggttgtaaacatacttatagcttttaaaatatattggctaattgctttccagagaaattatataaatataaaaatgtagtcatgcttcagggtagcgtattctgaggcaacattaaccaaaggaaacttctttattatgaaaaatactttagaaagacactttttttttttttttttgagacggaattttgctcttgttgcccaggctggagtgcagtggtgcgatctctgctcactgcaatctctgcctcccgggttcaagcgattctcctgcctcagcctctcaagtagctgggattacaggtgcgtgccaccacgcccagctaatttcgtatttttagtagagacagggtttctccatgttggttaggctgttctcaaactcccaacctcaggtgatctgtcggcctcagcctcccaaagtgctgggattacaggtgtgagccactgagcccagctgacacttttaaaaaattagaaactgggcatggtagctcatgcctgtaatcccagcactttgggagactagctttga

SEQ ID NO: 53878 - DNA, 1050 bp, Homo sapiens
accatgttggccaggctggtctcgaactcctgacctcaggtgatccgcccgcctcggcctcccaaagtgctgagattacaggcgtgagctaatgcgtccggccttgacctgggttttgaaagaagagtgggagatggccagataaacaagaaaaagggaagagtaggaaggggcattccaggtagcggcaatagaggcaaccttgaatgccaaagttcccaggcaactggtgagttttgcttttcctaaaccagccaccaggcctgcctggtaggctcataaagccctgggcacagcaagatgaagttacatgttacaaatggcattttaattggatttgcttccctgtgccttgcttttacagttgcaaccaaggcaatgtcttactacctcagctcagaaaaccacctggacccagggcccatctacatgcgagaaaatgggcagctgcacatggtcaatctggctctggatggtgtcaggagtagcctgcagaagccaaggcctttcagactgttccccaaaggcttttctgtggagctttgcatgaacagggaagacgacactgcacggaaagagaagactgatcatttcatcttcacatacacccgagaggggaatcttcggtactccgccaaatccctcttcagccttgtcctgggtttcatctccgacaatgtggatcacattgattcccttattggctttcctgagcagattgctgaaaagctgttctctgctgctgaagccagacagaaattcactgagccaggtgcagggctgagggctttacagaaattcactgaggcctatggaagtttggtgctttgctccctgtgtttgcgaaacaggtgggtgttctgattagattattcggtattttattgggtgtgttaattctgtcaagctctggggcttagtgggctcaggggcttccctcatcaaatagcacttcagtttagaacttccaaatatgaagtaaaagaccatattgaaaaaaatcactcttccttctcctcacctcttagatgacacttaactttattctga

SEQ ID NO: 53879 - DNA, 1040 bp, Homo sapiens
ctttcctcggtgccatagaaacttggtggcagaacaggattgaggccaaagactcttgactcctggccaactgatttttctagcacataccacctctttagggtaggaaaaacccttacacattcatccatgccactcgctgtgtgcaaacagagacacctttcatcatattcattgcatacttaaaggacatttgactcatctttattttccttgagtctctgatccttggtgtctgtcagctaggtccttttttatcagtgtttgcctgatgaaaagctggatgaacggataatttactcagattaaccagatattgactccaatggtaagaggttgacagagatcatttacaatttaaccgagcatccattgactctatggcaggacagtatgatgccaaaagaatagaaagagcagtggtttgaggtctgaggacccttcttggtctaccacttttactaccagttatataccttcagaccagttatttaaccactttgagcattggttttggcctttgtaaaatgaggataataatgaatgtcctggctgggcgcggtggctcacgcctgtaatcccagcactttgggaggccgaggcgggcagatcacgaggtcaggagatcaagaccatcctggctaacacagtgaaaccccgtctctactaaaaagatacaaaaaatcagctgggcgtggtggccggcacctgtagtcccagctactcgggaggctgaggcaggagaatggcgtgaatccgggaggcggagcttgcaagtgagccaagattgcgtcactcactccagcctgggtgacagagcaagactctgtctcaaaaaaaaaaaagaaataatgaatgtcctccctacctcccagggaagtgtattcattcaacaaatattttttgagcatctacaatgtgccaggcactacgcttatggccttgaggactcaatgctaagtgtagtactctctgacgtgagaaagtaatatataagaaaggattctgaaaataatgcaagttggtaagagtggtgatag

SEQ ID NO: 53880 - DNA, 1047 bp, Homo sapiens
aaccaggacctctcttgagcagggctcaggaaggatcaaataaaacacctagcagcctggcctgagagtaagttgactggaccagtgcagcttcctgccctccgccctcagctgggcccctagggcgtggcagcagtgctttgcctatgtcttggggatctgttattgaaactgtttcaggctgattccactcacctgtcctcattctcatctcacaagggtccacttacttccctatttctgtctcagaatttctccatttcttcaaccgtattacacttcccttctatccgagagaacaagtatgctcctttattccagtcacaagccctttttttcttttttaaaaaattctgttccctaagatctccaacttcccttgtgctatttactaataattattttcccctcctgcccaccccccccccatcttcattgtccccctttgttggctatctgctttctgtggataaacacaaggtgtccttattctagcttggtcctcattccccagtgcagctgtgcattgtttcctgtccagtctgtcccaccccctccttgcctactcagttcttactcccttgcgatttagttctggcctcccctgctctcctgacagtgtcctcttgaaggagatattcttcaccttccttggctttcctgcagcattcgatagaaacatgcatgacttatgtatttttctctgggcctctctcctggctctcccccaactttctcactcctctggctatgactgattcctctttcttcctctcctcttctcccacatctccacactccccaggtgctctttcactgttctcagagctccagctgtccttgcgaggatgactctgcattcctctctcagacactagactcattcccaagtatcctctgtaaatctccacctgccacctcaaattcagcttgtcccgaaccaaactcattttcttcttccccatccccgaccagctcttattgacattcttatttctgtttagcggaaggaagcaccattttccctattgcccactgagtcaacat

SEQ ID NO: 53881 - DNA, 1051 bp, Homo sapiens
taaaaatggctaaaatagtaaactttatgttatgtatattttatcatgattttaaaagaaaaggaagtaaatgatgaaatcaaagtgaaggaaatgtaaaggtactaaataagaatccagggcataccaaaaaaatgtaaaataggttgtatcatttgctatttggctcttagagtcaaatccagatttcgaataatgaaggctgtcatttttgtggcctttagtgtgtgtcaagcattgtgctaatcactttatgtacatgatctcatgtatcttcatatcacccttatgaaataggttttgtatccctctagaggtgattaaacagaatctcagacaagtcacttacccacggtcacttctaggaagaggcagatctaggatttaaatccaaatctgtcagactgtagtatgcctccaacctgtgccgccatgcacaccacagcgacctcacagggcactcaaggcaaaatgcaatcaatgcagatatcaccctgtttgggcctttgtcatatccctgggtttatcctagactgatgagggaattagcatatgccagtgtagtgaactcatcatccctcccttctgtcacagatgggaagcggtctcgagcagaagccccactgaagtgtcccctggcagacacccacatgaactcttccgagaaactccagttctataaagagaaagccccagattgccatgggccagtgttgaaacacgaagctatctcaagccaggagtcaaagaagagcaagaagagaccttttgaggagtcagagacagaacagaataactcttcacaaccttcaaagcagaaatatgtatgtcttgctgtggaagactgggacttgttaaattcctattgattagtagatacaagttgacctttctctggcccccagctctagtgtttgagtaaaggagactgaggatgatttactttttgtttgaatttacctatggcattagcatagtaagcagatatttctacttttgtggtgtgggaggggaatgctatggaagtatgtaataatttctaatgtatatt

SEQ ID NO: 53882 - DNA, 1602 bp, Homo sapiens
cattcttttagtgtcttcttgtatatggtattaacaattaaggaactttatatatttatgaagacccttctatcagtgtgagagcatttcatgcatattctttgttctcgcagccttttcaaatagcatctatcattttccatacatgttaagctaaaacatttaggagcagaaaaacttgcaccaaattattttaccacttggtaggagagctaagatgttgaaggacttgatcacttaaggcatccatagctgtttttcttgatacccaattgttatactcctgaggattttaacttgagacgtggaacagctttctttggccatccattgggagctgaatcacatatctacaacactttgagaaaaagtattcttctttcttaaagttgtttatagaattttttttaccaactatttataaattaaattgttatttaaagactaacttggagaggttcctaattatccagactactaatgtacattggttttcttttgcagaagctgagtatctatggtgacttggagtttatgaatgaacaaaagctaaacagatatccagcttcttctcttgtggttgttagatctaaaactgaagatcatgaagaagcagggcctctacctacaaaagtgaatcttgctcattctgaaatttaagcatttttcttttaaaagacaagtgtaatagacatctaaaattccactcctcatagagcttttaaaatggtttcattggatataggccttaagaaatcactataaaatgcaaataaagttactcaaatctgtgaagactgtatttgctataactttattggtattgtttttgtagtaatttaagaggtggatgtttgggattgtattattattttactaatatctgtagctattttgttttttgctttggttattgtttttttcccttttcttagctatgagctgatcattgctccttctcacctcctgccatgatactgtcagttaccttagttaacaagctgaatatttagtagaaatgatgcttctgctcaggaatggcccacaaatctgtaatttgaaatttagcaggaaatgacctttaatgacactacattttcaggaactgaaatcattaaaattttatttgaataattatgtgctgaaatttgagtatctgatttttctagaccttccctcctattcctgcccaacctagataagaattatgaaatgttctgtgtttattgctattgctttataatgtgatggtcagggaccattttgatgcaaaactgatctctcagcagtacatttgatgttattttgcacaggctataggtttttgtttgatgagtgtttccaaagaactatttttctctgttagatagcatatcaagtataaggtaaacatattttcagagaaaacttcattttaacactaaaaattagactcttgtgatacagaattaagtataaattttacttggcaaaaactcgttttatttttacctgcaataatacagagcttaatattagaatgatatcaggtcataataataatacaccagaatcttttgagatggaattttgctcttgttgctgaggctggagtgcaatggt

SEQ ID NO: 53883 - DNA, 1050 bp, Homo sapiens
gcctggtgtgaattcttttataaaacaaatgatcattttaaatttacctattctataccttaactttttggtatattggttttcttaaagcaagtatcgtaataacttgcaaaataatatatgacatttgtacaacagtgtacaatttacaggacactttcacttgccttatatatttagcagaaagtcaagtatatctgattttattattattacaaaagtgatatagccatgttacagaaacattagaagtggaggaaaaagactttatgccaacctaatgtaatagctattagtataatatttccttctgtaagtatgttttttaatagtttcaaagataaccaacaaagttttaattgtactgttgagctaagtacataaggttgactaattaagaatttcctgtttcttataaaattttaatataactaattgttgattttttttttccagtaactctgggtggattttaactacaactcttgtcctctcggtgatggtattgctttggatttgttgtgcaactgttgctacagctgtggagcagtatgttccctctgaggtaaatttaattcttaccatttgaagactgagccctgtgatatatcattttaaacaccttatttgtttagctggaaaaacaaggcctttctactaatagaaagagagaagatgtggtggttttaatgtggtagaggttggcacacataaaaattacaggtttgcagcacaagaattgttgttctcagctttctgtgatgctaactaccgtggtgacatatatgttgactggcttgagaacggtgtctctttctgactctctaagactgaaaagacctgttgacatcagtttctaggggatatatgggaaagaagactttttttttttttgaggcagagtctcatctgtcacccaggctagagtgcagtggccaggatcttggctcactgcaacctctgcttcctaggttcaagtgattcttcctcagcctcccgagtagctgggactacaagcatgcgccaccatgtccagctaatttttgtata

SEQ ID NO: 53884 - DNA, 1057 bp, Homo sapiens
ttattggaatctggtcgtagctgttaaagagacacccttgtctccagaatggaaattgaggtcactctttcttcacttgcatttctttttgaggagccaggcactgtgctagggagttgagacctagtaaagatgtcaggagttctcagatctaaacagacatggacaataatgattgctatacacacacacagtcctacacatgtctcatacacagcatataaggactgtatttaagtctactggaggtttcaaggggaggattgacaggtgagatagaaatatctcaagtgatgagtagaaatttttgctagttatagcagaagatttacttaaaatttttttttcagatatactggcctcctgctcaatgtgtatagggtacattactatatatggaggataaggagagtcagaaatttgactgaactgggaaaacaggaatagagagaatcaggaacataagtgtcaagaagaggcttctatgtgaaggatagattagaggaccaggttggagaactttggtaaatcagggaagaaattatgaggtctggattagggcagtagataagaacaggagataatggagatagttgaaaatctgtaggatctagtcattgttttgttgtggagattgaagggatgagccccagttttctggcttaggtagttgctactggaatctagatatcaaatatatcctcattttgtggtaaattccttagtactcaggttacttagggctggaacatggagaggaaagtgggtatttgttcattaaaaacatattttactctattatctttctaaattggatacttaaagaatcatatgggagttccctgcttttagatacaatacattctccaaagtccacctcttttgctggcagacaaacaatgactgtgcttactgcatgttcaagtcttggcaaactatcaagtgagtgattagggtggtaagtatagatctcttactaggcagtgttggatgagcagagatgtgaaaattagggagtatctgtattacacagtttgtcagagttagacttttaatt

SEQ ID NO: 53885 - DNA, 1284 bp, Homo sapiens
catgttgcccaggatggtctccatctcttgacctcgtgatccacccgcctcagcctcccaaagtgctgggattaccggtgtgagccaccacgctgggccattaaaatcttatcagtagcttactacatatattcagcccataaatactcccttcaccctgtcgtgttgtcagatgtctaccattttatatatatattcttctgattgattttttccgttctcttttccattgatgttcattatagcatgatttattcttgatgaaagcattaaagatgagaatgatacgatttgtcccttcccgttctacccttaaggccttgctggtccttatttaattacatcttaagagtcttcttatttttggacttaattcaaaagcctgttattctgatagaggtgacaggtagctagtaagtgtgtttggtggcaaattaaagtatccttggtttttaagctttaccataatgtgcatagataactaagagtttactctaatgctattgattatggtagatgtatttaattgtttgtatcctgtcccaataaggattggagtaatcttgattatattgttcttttgaatatacatatataaaaataatatatttctcattatttattttatttttagcttatgtccctgatgccaaaaatgcacctactctttcctctaactctggtgaggtcattctggagtgacatgatggactccgcacagagcttcataacctcttcatggactttttatcttcaagccgatgacggaaaaatagttatattccaggtgacaactgagcttcatggattcatctaaatactaacaacagtaaatgtatatgtcttaaatgagtgtttcagcatagaaccatactcagtcacttacaaatatttatcatcaaataataattacttatttggccctacattaaaatattagacatcagttttattacccttccctttgcccgttagaagcctaatctaaagcccattagtttttatgtaaccagaactcttgagtcttttaaattttatggtggttaaattgataaaatgaaatttttaaatatgagagacaataattaatatacttcgaacataaatagtggccatatatgattacatatggatatcagataaaagcaatatgacataatttttagttttttacagtgcttttactcatgactctaataagagaacttgttgaagaagtattttgcctagagaagtaatgtctcctatctcatcgtttaccacatgataataactgttattccc

SEQ ID NO: 53886 - DNA, 1260 bp, Homo sapiens
ggaaatggatttaatgaactaaatgagagtatatctggtagagacccatttcaacattagaattatctgctgtagaacattttctagttcaattttcttagactttcagatgttaggctgattgttttatttttcttttgccatgtgcatacccttacttcttaactgagtgatctggttcttaacaataataccttatatttgtataaatcattaaaatatattatttcattcaaccctatacaataggttgtggtatttctattttacacatatagaaatcaatagtcagaggttaaactgctcagctcaggtcacacacaccaacaaatgatggaactaaacctttttgagtggcatcttcaggatgccaatccagtgcattttccaccacacaaggatcctcttatatgaatgtcatcatgtggccagagcctgggtgtataattaatagatttgtatctaaaacatttgacttgtaggagggagacaatatggagttctgttaaagatacatttcctactactatattaccaaatttggaaattcacattgatgaaacctttttaagtataaaaatttttttaataaaatgccaaatccttttctttcctctttccctttctcttttgtttcttgtaatttgactatttttctcttacagcatgtacagaagcatattcccaatctgatgagcaatatgcttgccatcttggttgccagaatcagctgccattcgctgaactgagacaagaacaagtacgaaacaatactgcctttcaaactagcctgcttagatggcactgacttgtattgcttgaagtgtttatcacccacttgatcctattttagtgttatattttatatttggctttcagcaaacaaaattagtttgcaaatagaaaagtcagttgaataattgcttttgtataatgctttactattaaaagttatgcttacgttcataatcttattttgtttcttctcacattccagtgaagatattatcctcattttacatatgaaaaaaccaaggctcagaggaattatttcagagttctttttctccatcccaactcccattggacagttgccattgccttaactcagataatcatttcttgtctgtatttttaaattaacttccaaactgtttttctaatttaaccctgtctaactccatcctttgctgtgtccagatttttttttctaaatttcatcatgccattctcctgtcttatataatcagtagctcccaa

SEQ ID NO: 53887 - DNA, 1030 bp, Homo sapiens
cagggccgattcctgaaacctcggctcttttcaccatgccatatggttttccgaaattggtactggatgacttattaaaggaaagcatatctgagaatgaaatggcatgtggtatagctcatactaatgagcttatgcttcctttgtgcaatataaggaaatatgtggtgctccagagacataaaataattctttaactgttttacaaagcctgcaacagctactcagatatgaaatctatctcaattgttaaaattctttcaatttcatcttaacagtaaatgcagttggaactgaggtccaaaagtgtgctaccttcaaagttgtatgataaagtatatttaatattagactgcaggcatctcttcttgatggattgttgctgctgcgtaaattttactaatccttttgctggaaagaaatacatagcttgtatttcattggttgctaactggtatatgcacatgctgtttccttattaggtgtctgccagtttgtacacagtggatcacatagtaagtcgagggggctcccccatatgcaatagctttttttaaatacttttattttatcaaagaaaaacagctgaagacattagtcttattaagcagttaatattttacagtaatgaagaaccagatgtccatcctgtcttaagctttcacacgtatacattgatgcctgtaattgttttctattttaaaaatctattaacactattaccatttattaagcaccttctacatcccaggcactatactggaaatagcttccaaattattgaggaatttggagataatggctgttctctccttttttgatgagaaagctgagattcttagacaggtaaaataacttatgcactcacccaaaaggtttgatctaggtctggctgattgcagtgtcctttcccatacaccacactgttgctcctgtgttttcatttaatgtaagcccagttttaaaaaatcccttcatataaacatttttatagatgtataccttactttatcaggcccttgtgtcacca

SEQ ID NO: 53888 - DNA, 1357 bp, Homo sapiens
gacataaaaagatggaaaactatgctggagcttcctgatcaaaccaaagagaatcttgttgaagccttacaagaattaaagaagaaaataccctccagggaagtgttaaaatcaacaaggataggtatattccttcttaattttattttttaagaaagcttatattttgtctcccttcttctttccttcctctctccttcaaacatgaagttatctgccttatcaatgctttcaactctctggtaaaggactgttgtttaaaaaattatctgttggttgcaggccaataccttggtaatatattaaaaaaattatcagaaaaatgaaatatacaaaatacaagccccagtttttaaaattagattcaacagatataggattactcttgtcaaattactatgaaagtttctaaatgcttacatttaatttatgtacttacttcatggactggaaactggcaataacacatggataacattttgagtgtgttagatgctgggtatgcagaaatggataagacatgatttgtgacctcaagaaacttaggatttgggctgggtgtggtggctcatgcctgtaatcccaacacttggggaggcctaggtgagcagatcacttgaggtcaggagtccaagaccagccaggacaacatggcaaaaccccgtctctactaaaaatacaaaaattagccagacatggtggtccgtgcctgtaatcttagctactaaggaggctgaggcatgagaattgcttgaacctgggaggcagaggttgcagtgagccaagatcgtgccactgcactccagcctgggcgactcagactctgtctcaaaaaaaaaaaaaaaaagaaacttagagtttggtagaggagacgagcatatagacaaatgggaacagtgaaatattgtaggtgtaaataaaaacgtgtaaatagtgttctgagtactattctaatctaaacaaggtatatactggggacttcagaaaaggcttcatagaagaggtgacatttcagttacatcttgatattatagcattggagatatttaaaaggtaagtcagggaccatgttgaattgccattttagtacagtacacaactgtgaataatacgtaagggagggccaacatgtgttactcaagctgctcccagctccccagggagtccaggacagtcattcacagctgctgttcttgccctcactagtgcagccattgccttggtctgcctccccttgacctcttgttcatgagaagcaggagagagagcagcttcagaactggcactaacagctgggaagagctgtgcaaaatccccagagggccccccaagagtcttagagttgtacccctgtaat

SEQ ID NO: 53889 - DNA, 1027 bp, Homo sapiens
gttacatcagttgctatgctgaagatttcatttggatcattgcctgagagtgtttacatttcttcaacctttagtcttcctgccttttcctatcctgtgggttataagggacaaatatttactgagtacctttcctgtgttgggaactatataggcataataatgaaggagacagatattgtcctgcctttttggagccttaagtctaatagaaacacagtttaacaagacttcatcatacaatgtgatgagtgctctgatgatggggagaagttagcaaaatgactatatgtgttaggagtagggcagaaggtattgaagaatgtgtcaggccggggcacatcacgtgagctgtatagaaggtggaggtgggagagaacatggtgcattccagaaactaaaagtagtttggcgtgttagaaatgtaatgtgcttgagagagcgtggcaagaaatgaggctggagagacattctggaccagatggagaaggttctttgtaagccattcagaactgtttggtcttggcatatgtattagttatctatcactgtgtaaaaattactctaaaatttagctgctgaagacaatatttattttttcacacaatttttttaagttgagaatccaggagcagcttatctgggtggttctagcacagggtctcttatgaggttgcagtcaagctgctggctggggttgcagtcatctgaaggctggaccagggcttaaggatctgcttccaaaatggctcacaggattgctggcaggaggcctcagtttctcatcatgtgggcctctccttggagctgctcatgacatggcagctgactttccccagaacaagtgatccaggaaagaacaagaaaacaagagaacaaccaagatggaagccacggtcttttataacctaatctcagaagtgatatatcatcagttttgtcatatgctattggtcacacagaccaacgccgatacagtttggaaggcaacataagggtatgaataccaggaggtgataatcattga

SEQ ID NO: 53890 - DNA, 1051 bp, Homo sapiens
aaaaccaatttgaaagtcaaatgtaaatgttttttatttaactgattcaattcagcaaacatttatggattgtctcttctgtgctaggcactatgctggggggctgggaatagaacttggagtaaggtacaggttctgccctcaacccgtttacagttttgaggataagatggacatttaaatattctaggcagagggaatggtatgagctaaggcacagaagtaggagcaggccagccagcatgaccccaaacagggacatgcaagctgctctctatggctagaagttagtgtacagaggcaaaagagtgggaggggtgaaagtgaggggagggaggaaggagggcgacatggtgacaggtgaggccaaagagattctaggtcatccagagttttaatgctatgttagaagttaatttgagggccatggagaaccatcggaggatttttattaagcgtatggtatgatcaaattgtgtttgaaaaaggtcattttgccttcagtagagaggatgaattggagagggcaggactggagacagagattggttagtgaagtaatacagtagacctgtggagaagtgatgagaacctgaatcagggtagtaagagtggagaacaggcgaggaggaagagtaaaagatagagggagaattaaggaagtagatctatatgacttggaatggctgagtgaacataaggttgaaagagacagtggatcctaaaatggtgggtgggtggtggtgccattctgtgaccaaaaatgttgagttagaggtgtttgcagaataagcaggtggagatgtccagtaggggactggatatttggtctcgtgctcagtgagaacctttggctagggacacgtagttgggagtcatctgcctgcaggtagctggaccacaggagtgggcaagattactcagggaaggcaagtggagaaagaaaagaggccaaggaccatgccctagctggggttcacagataattaaagattgggcaaaggattagcagccagcagaggagatagagaggagaagagactcagtaaca

SEQ ID NO: 53891 - DNA, 1365 bp, Homo sapiens
gttaaatgaatcatatatgcaaaagaatagtagtgcctgctgattagaagttatttaatggatgttggttacttcccatttaaaattccttcccttcttgctgaagtaaaaattctgtgatggactgtgttatggaatatcaatggtaaaataaatagctgtctattgaaaagactcagatcccccattttttgtcaacagccatatctttagctttaaggcataaaatcaattggatagacttgttccctaacaccttcatggcttacaattcagatgatgttagtggtttgaagtatacatgctggaagaaggatttttgctcattaataataatattcattgtcatcaaacaacaaatcttataagccgattaatactctggaaaataggacatataatattcatgtttcttccttatcccaggatatcccagagcaactctgctaaagtatccttaaagaacaatttaatattaataaaataagcaattcagaagtctgatttaaatgctagctctgttactacagtctctaaaaaaaattttagcctttctatctcaattttttatctacaaaagaaggacttgtgatatagtacttactttttttaaaataaagttttggacctgaagtgaatttgcaccaaagcagcagctgcattgccacagttctgtcttcaccttcaccatgttcctcttggtcaaaaacgcaccaagtcgtctccaagtttgaagcattcagcaaacaatggcaaggcagagccaccggaaacgtacacctgattttcatgataaatatggtagtgctgtattagctagtggaaccactttctgtattgctatatggacataggtagcaacacaaatcagaatagaatggaacctgtcccctgttggcagggtcaccccaaaggaatggagagatcagtaatcattccagctggtgtaataatgaattgtttaaaaaacagctcgtagttgatgccaagttaaagcactgtgtacccattaagatatggcattattgaagaaataaagtacatttgaaaccttaaaaaactaaataaagttttgggtttttaaatacaaacttctaatagaaaatgagaaaaatgtataaaagggaaaaaaatgtaacccagacataatcttgttaacacattggcacatttccttttttggtaaattattatgggtttttaaatgaatgttgggcaagttatgattatctgagatttatatagagtgaattatatgccaaatgttccataagatatttttattgattatttaagtaacattgcagaatattgatgtaattatttacatttgtgttctcttgaatcttgatcaattttagttag

SEQ ID NO: 53892 - DNA, 1103 bp, Homo sapiens
tgagagtagttcctgagacctctgagttacctgtaagtcaaggtgtgaatatgtcttataagcaagttcagttgctaggggaaatgtgggaaagtaaataccatttgtgtctgctctaatagcttattgatgcttttcttgtagtggttaatttggaggtcctggttgggcatggtagctcacacctataatcccagcactttgggaggctgaggcaggcggatcacttgaggtcaggagtttgagaccaacctggccaacatggtgaaaccttgcctgtactaaaaatacaaaaattagccagatctggtggcaggcacctgtaatcccagcactcgataagctgaggcaggagaattgcttgaacccgggaggcggaggttgcagtgagctgagatggcgccattgcactccagcctgggcgacagagcaagactcacctcagtctcaaagataaaataaaataaaaataaataaataaaaattggaggtcttggtcctctgtgtagggactcagtctctgtattttcattcattcattcaacaaacaaatattgcccatcttctgtgtgccaaggactagactggcactggggacacagcaataaaggagagataatttcctctgagtctggtgaggcagatagacacataactaaataaatagagtatagcatattgggtgataactatagacatgaaaatattgagaagatggggaaaggaatgaataacaccactcagaggaagaatcttcacagaggagttcatgtttgaaccaaagccagaaggataggtaggagttcttagcagagggctcagtctatgtgaaagcacagaagcgtgaggtgtatggctagtttcagtaaaggcaaataatatgaggtggctgaagcataaggttcttaggaatggtagtgagaaattgggcaaaaaaagtaaccaaggccttggaggccttatcaacgagtttggactttggccttcagataatgggataccatgggaagtttttgaggaggtgagggacctaatcagatgtgtgttttaaaaagatttaaaaaacaaaaacaaaaacagatattttaagaaaattttaaaca

SEQ ID NO: 53893 - DNA, 1050 bp, Homo sapiens
gagcctatacgcccatcagccctgccaacgcagaaggatactttgaagtgttaattaaggtgagttgacccttgaggatgctccaagatgccgtggagaagctatgggtctaagaatggagagctaaagggaaaatgtgggaaggaaactcagtgctgggaacaacatggacaaaggcaattggggaagtaagtcctttgtcctggaacagaaggaaggagtgccaagggagcaggatgcaatctgagaggattaggcaagaggtaggacatggaggagcttatagacaggactaacctaacatcacctcttaggggaggtgggcagaaccggggcatttgagttggaccttgaagaaggagtacaaattggcagtggccgtaaatggcattctaggctgaggggatggttaaccaaaggttgggaggggtgaaatagaacaagtcttctaggaactatacccagcctgagagccaggaggagagggtgctggtggagaaggcagggtggatggaggaattggcagatatgagatgaacaaagtaggttggatgcaaaacaccctggagacccaaggaataggaaacaaatatataagaagttgtggaggcccaattatgtggaaagaataattaggttgagctacatgaaattgctgatattctaacttttttgacttaaagaaacatcagcttcatgtgggtcaacctaatacacagctctagatcatcatttcccaaatggaatcattacgaatatttaagaatagtgttcacatccttaatctatgttataagacatgacttattatctatattgcattgataagtaaacggagtcccccagaggtcccaaggccccacagctagtaagaagtgctgctagtaggtgagtcctgccccctgacaccgagacctcagcactgcctccagctcccgccttcctacctgccgtctgagcccgagtgtttattcctccacacataagcttggatgggatcccttcttcatgcaactgtttgtctgggagattccacaaatcctctccaaa

SEQ ID NO: 53894 - DNA, 1009 bp, Homo sapiens
tgaatttgaatttttgtctacagtgtgattgtggacaagtaagccagcatgactcaactcaggcctcagtttccacatatgtaatacacagatattgggttagacattctgaggtcccatcaacttataaattatgcaaatctggattttagcagctttgaagaatgggtatgtcttttacacattggagatgaatgttctggataagagggcactgcttgagcaaataaagactcagaagtaggaggcagcagggtgttcttgggaggacaaagaaaagtctggcattagatgcctgggagataaaatgaggcatgagggtcgtccacagggcctttgagtgggcagctaaggaaggagcccgcattttaccctggagctgaggggagccatggaaggcttaagagcaggataggctcaaaggaaagcgctctggcattcttagatccaattttgaaagggaagtaaggtgaggctagtgtccagtttacaggaaacttcccgagccaagacagcctctccttggggacagtgggaaggatgctatggatgcctgtgtgtctgtggagccccggcctctagctgttggatctcttcctgttgcagagctgcccctccaagctgaacccagagaccttcgtggccttctgcatcattgccatggacaggctcactaaggacacctaccgtgtccggtttgctctacccgggaacagccagcttggcctgcggcccggccagcacctcatcctacggtacactcaggtagcgggaggaccaaagcttcacagccctgctttgctatttgctagctgctggccttgaccaactagcgtactctcccttaagcctccatttgtcatcttcaagatagacatagtgacacatgactcagagagttcttgggattgaactagataatgcattttcataataaataataacacaatcactttaatagcatttactatccaaggcacagttctgggtgcttataggcatgaaatca

SEQ ID NO: 53895 - DNA, 2256 bp, Homo sapiens
aggtgtacagtgagcagtcacgctcagagctggcttgggggacactctcacgctcaggagagggacagagcgacagaggcgctcgcagcagcgcgctgtacaggtgcaacagcttaggcatttctatccctatttttacagcgagggacactgggcctcagaaagggaagtgccttcccaagctccaactgctcataagcagtcaaccttgtctaagtccaggtctgaagtcctggagcgattctccacccaccacgaccactcacctactcgcctgcgcttcacctcacgtgaggattttccaggttcctcccagtctctgggtaggcggggagcgcttagcaggtatcacctataagaaaatgagaatgggttgggggccggtgcaagacaagaatatcctgactgtgattggttgaattggctgccattcccaaaacgagctttggcgcccggtctcattcgttcccagcaggccctgcgcgcggcaacatggcggggtccaggtggaggtcttgaggctatcagatcggtatggcattggcgtccgggcccgcaaggcgggcgctagctggctccgggcagctcggccttgggggcttcggggccccgagacgcggggcgtatgagtggggcgtgcgctccacgcggaagtcggagcctcctcccctggatagggtgtacgagatccctggactggagcccatcacctttgcggggaagatgcacttcgtgccctggctggcgcggccgatctttccgccctgggaccgcggctacaaggacccaaggttctaccgctcgccccctcttcacgagcatccgctgtacaaagaccaggcctgctatatctttcaccaccgttgccgccttctcgagggtgaggccccaggacgggcggcaagggaccgtgttcctctaaccagcaccgaccccgaccctctgtggctttgggcaagacattgaaactctgtgggtcttggtttcttcgtctgcgaaatggggccgtagtgattcccgtcttctgagggttgttagaattgagttgtaaggagctgggcctctgtgcaggagtaatagagagtttgcgtgtcagcatgaaaagagctgctttctaggcctagccctggctctctctctttgactttgggcaaatggctggccatcctgggcctctatttcctgggaagtgaatggttttgactggacagtccacattgacctttccaggtctgacattctggagattaactgtatattttaaaagtagttggagagagtttatagtggagacagcaggatgtttaatctccaggcctgtcacctcttaagcccatgactactcctctgtcactctcactagggacagatcaaaatgactttgccaaaaccagcctgtctatctagaacagtaccagaaattattttccagagtccatggagaagcttgtttatccctttctccattcttccatcttcctcaaatcaggatagggatggggcaggtcttgaaaacagaatggttgaggtaagtggaaacagtattttccaaggagtgattaggggggaaaaaaaaggcaaatctggcaagattgggggactaagccagagaataaatcctaggtttgagaaaacttaagtcaattggccagcctcttaagcttctcaattccattcctgaaagctgattttcaagcctttaaacacttccagtgtccttacaaggtagtgggaaggatctcacaagacttggcatccttgagtgaccctggtaacaataccaagtggatgaatgcattagcagtattttagacgttaagattacattcgtttgcctaggctgaaaatgtattgtgtatcctatgtttttgctgctcacagagaggttctgtaggctgtaataaaactctgcaggatacagggctagagaagccatttggggtaatggagagaggtgatgttctttagggtagacatactcagattctcctcctagccttgtcacttacaaagtatgtgagttggagcaaattccttagtctctgagtttcatttttcattttatgaaatcccatctaacttgcaggtaaagctcctggcacagggtagatggtgactttcagtaaatggcagctctaattatcacctatttttcatatgcaaatagaacataaagtcttaatattttatctattgtcaagtttaaggaacagtggcggtgtcagagctaaaacttagtttatctgactcccagtc

SEQ ID NO: 53896 - DNA, 2282 bp, Homo sapiens
caggctggggtatcttttcctcctctgtgttctttatgcccattctgccatcatagcacagattacactgtattgtcagtatctactgtcggttctgtctaccccactcaactgaactcctaatggctgggaccatatcttactcacattgtccacagtgtctaacagttcatggtacacagtaggtgctgactgaagggatgtgtaaatgcatatacctactgttggtgtttcaggcagggatgttcagagaacacaggtgttctaactggtggaatcctggagcaggaaaaccagctacggaatgatctgggatttcaggacatctgcttggtcaggatttgtgtatagacttcctggcaatgagtcagctttgcagaggtaatgacaccactaaggaaattagtgaacctcattaatagaggagtacttggcccatcatcaagtattacctctaattaaactaccccatttggagctgtcactggaggagggatatggagggaattgaatcagaaaccacacaagagtggtctgtggggagaatggaaaacccaaggttaagagaggtccatgcacatttatttttcttgcagattatatgtgaggaaacaggaaatactttagaaaactattcttgaggtgtgacagatcagagtttatccacccccagatgtagtatccctttcttacctatccagtaagggaggccacatgctaattaatgacagtgctgttgaccaaaccaattcttagacatacaagaaaaccggccttgatccattaccatcacactgtggctatttctgaaaacccaagcaccttctgagaaagatttgcctccgtggatactcctcaggaggccattctcaaggtgtttttccaggcacattttgtctggtggtagcatgtgacctcctgtggggacctctgtgaagggcatctatgcatgttcacaatggctggcttgctgatgagtcagatgtgagtttgttttcctcttgtcacctacgtctgcatgtagcatatatgctaatccgacttcagtgaggctgtttgactggctagggttttctcactctcagttgttaaggacaatctggcccctttcctaagtttaagaatctcctctgccttggctgggtgcggtggctcattcctgtaatcccagcactttgggaggccaaggtgggtggatcatgaggtcaggagatcaagaccatcctggctatcacggtgaaacccggtctctactaaaaatacaaaaacaaaaaaattagccgggcatggtgatgggcacccatagtcccagctactcgggaggctgaggcgggagaatggcgtgaacccggaaggcggagcttgcagtgagctgagattgcgccactgcactccagcctgggcgacagagcaagactccgtctcaaaaaaaaaaaaaaaaaaaaagaatctcctctctaactctagtctcagtgctcctctctctctccatcacttcttccctgctgtatcctactctagtcacctggatttctctccttaaattctgccacggagttgcctgcacctgacttttgcacattattcctccttaactagagtgcttttccccctttctttgcctggcaagctcttacccagtggttttcaactagggacagtttttccctctggagaacatttggcagtgtgtggagacatctttgacatgatgtggatggggtgtggggagttgggatggggagggagttaaaatggcatctagtaagtagaagccaggatgctgctaaacatcccacagtacacaggacattccctccccccactccgccaaagagttatctgatccaaatgtgaatagtgctgcagttgagaatctctgctcttatccatccttccagatgtcattttaaggcattgcttctttcagggaacttcccattcccagagaagttcagttttccccacctgtacaatttttgaatatgtttcatccttttcactgtagcactcactacctggtgggctccttgagaggagagagtaactctcacacatctctggttccccaggttacagcaggtgctcaggaagatctggatggggcaggcttcgctccccagagaccatcagccctcagggtttactaggaagggaacacaggaagaagagtgcattggttcatcccctcttagggatcccaggattaacatcctaactcaaagttttgtgttctgtgattaggctgatcaagaaatgctataaatgacttgaggcacatg

SEQ ID NO: 53897 - DNA, 1417 bp, Homo sapiens
gaacaagtactaaactttgattctcagcaccagtgttgtgtgggtcagttgtgaatgatgaggcaagtcatttgtcactaatattaaagtagtaaattttgcaaatgacttgctttcttttgaataattaccacagatttcaagttctccttctcctaacatcactgtcatctgtgtgccagaatgagagagaaaggtgtggagttagaactagcttgcaggcagcacctataacaggttggcaggcattttctgtgaagagtcaaaacagtaaatattttaggtgttacaggccacatatggtctctgtcacagctacccaatagtcatacgtaaatgagtgaatgtggttgtgctccagagaaaatgttatttacaaaaataggtagcaggccagatttggccagcaagctgaagtttgccagcccccgagctatagtgatagtatccacctttgttgagtctctctgtagcacctgtccctgggctaaggcgaggtgactttcctgaggctttgtggcaggctgatgaatcctttccacccctccacataattgtgtctcttgcaggattccaggaaggctatccttacccctatccccataccctgtacttactggacaaagccaatttacgaccacaccgccttcaaccagatcagctgcgggccaagatgatcctgtttgcttttggcagtgccctggctcaggcccggctcctctatggggtatgtaggtggagaagaccactgagttgctttacgtggtgttggtctcctcccttaaggttactgctcagaggaagaaaagggatataggggaactgatttcttgactgaggagttttagggaggagtacttcagcccaccctgtggagatgagccaacatcactagggggtgactgcctgtgcttcacctaagtagctcacttgatcacagtagcccacatgtttttactgaagtccccactttctaagctatgccatagaattacagggaggccatgcagcttatcagcattacacagcactaagtggtggagataggactgcagctaggtctgccccactctgaagtcttcagttgtttgtgctgcagcatgctgcctctgttcttgtagtggcagaagtggagcacaggcaggaggaagtggagcaatagagatggccaagccctgcctgccaactcaggatgggtgctggggacccaagatactcgttggtgttatcccctgatcctaagaggaggtttcagggacctagatggtatagaatacaaactaacttgtcacagagagctgtcccaagatggggaaagcctggctctgggagcaaaggcctccagggaggggagggctatatgggagccctcaagcaggcctgggacaccagatccctggtttggggtgtgttgggg

SEQ ID NO: 53898 - DNA, 1020 bp, Homo sapiens
ctggtgaaatcctggcgctggcatggctggagtggatactccagaaacatggcccgtgctgagttgcagcgtcagcatgaagcccagtgaatgtgactgccaggcccttagaagcaaggcaggggcgtgggggaagggtgtggtctggcatgagcctgtttgggttctacaccacccatcttcgtgacttccggcaagtcactttacctcactgagtctcagtttcctcatctgtcaaatggggtgagaactgaatgagattatatctatccgttgaccctccggattcacatttgatagctgatgtcactgtggtccttatcaagtaacgccaggagtttgagggatttctgtcattaaccccccagctggcctgcctgaactctggcttgcctggaaatcgcctctcagtggcaggaactattactttgatgtgctcaaatagaagagcaggcaccctggggccatgaggcacagccagcctgggtgaaggaaggcccggccctggacagtgccctgaactcctcattctattttaattgtcccaaagagaagccattcagtggacgtaggtggacgttgtaaagggaagaactagaagctgcctgggccgtgctgttccttacactccacagcttctgatttgttttccttgtccccttttcctctcagaatgatgccaaggtcttggagcagcccgtggtggtgcagagcgtgggcacggatggacgtgtcttccatttcctagtgtttcaactgaataccacagacctggactgtaacgagggtgtcaagaatttggcctgggtggactcagaccagctcctctatcagcatttttggtgtctcccagtgatcaaaaagagagtggttgtggtaagttgagccatctcctgcctgacccaggagggccatgcctcctcctacctggtgtgagcctcaggtgggattgctggggtgctctgtgaggagagccctggccctggggacttcccacccgggatctctgcctggaggact

SEQ ID NO: 53899 - DNA, 1662 bp, Homo sapiens
aactttttattccataaaacaagaaggacaaaactctcaaaaatgtatttcaagtcagtgaccagaaaaatcccaccccttgccctttccccaaaggaccttttctgtacatgacacttttttgttgttttttgtttggggttttaccattgttgggatttttttatttgttttcaggggggttttttgggggaaaatttttttaaatggaagcttctagcaagccccccaccccaatcaacctctatgctttcttcttaaaaaaaaaaaaaaaggaaaaaggaaaaaaaaaaaaggaaaaccagaagccctgctgtctgtctgtgcccaagcccttccaccagaaaagctagtctaggtgtgagagcccacattgtctgtagccatcaaaaataataataataaactggacagtttacaatcgttggtttctttcaaaaggccttttttggaaagaagaaaaggcagtcaccgttttccacttggggttttggtttgtgcaacaggcaggggaggagtggggacgcgtttgttctagcttgatttccatggcaacagcagcggcacgcttggaccccagaacccagcaccctcatcctgtggccagaggggccggaccactgacccctttcaggattccaccacagcccagaccgtcaccgtgacccggtggcatgcactgttcccaggacaccctcctcctctcctggacctcccttccgtcctggcctccctgcctctccagcccctcctctgcccccaccccagtcttcccagtgagaatcctgccagctgggtggtggcctggcgcagagtgggagaggctgccactgacaggatggctatgacctgggacatggaaacagtgacctccgcgttctggtcccgagatcctcgcatcagcgtcatcgtgtgcaccggcttggggggctggagttccggttttctttgttttttctctttattcgtcctttctcaaagatgggatactgatcagaattgctctgtatatgcttgggactggatggaaagactttggagcagctgtggggggtggggggacaccgacaaccaaacagacgtgctggctccagtcctgtttttactttcaaaaaccaacaagcccgacagtggagcctgtcccctcccgggagggtgctcatggccccactcacctcatcaccccacggaaacctttgtgtcttgccctggaagacacccgaattctttgtacattgacatgcccttctccttcctccctcccctgtagctggtctttgttttactccctccctttctgatccatgtatatcatattatgtgagatatcatctgcctgaaaaaagactttgtgcggattattgggaacattgtagctgtttctgtgttttttcttaccttgtagtctggttctgaattaagagaggaaaaaaaagtaattatgatacattgtagtttgtgtacgatatatgttgataacgttttattaaagggacatcttttttccgcagcccttcctgacatgtttggggaatgtgggttggagtttattacactgattacaaaatgcaaggtgacttcttgggcacagtttttgttcctggtgcataacaagatgttttgtgtttgaggcgtctgccttcttttcctgggcctgcaaat

SEQ ID NO: 53900 - DNA, 1102 bp, Homo sapiens
atttctctgccttgctctgaagccgcagctgtactttgcagctgtctttggaagtcagcatctctgtcctcctgtggggtagttgggtatccgtgagctgctcctctgggctggggctcaggtgtgactcagctctgcgtctgtggcacccagtcccggccaggtgccaaacagccctccattccaccacctccactcccttcccactcgatgcagatgcagtctgcatcacagggccttggcgctccaggctgggctcagccgcccctccccagccccgtgactcgtggctgtgggatgtgacctttctggtcttcctttccgagaagggtttgatagttccagataggcttgtgggtgggtagaatcgactcttatctccaagccctcatctgccacaccaacagttctgcatgggagcctcatcagtgacctcctgccaccaccccacagtcccagggtgccatgcagtgcctccagggccagtgccctagctctctcttccccaccactcatcaaaccccacctcttctcaccgcccagccccaggaaacatcttcatttctaatttcttccttttgttaacttgggagagggccagcatgacagctccaggcctgctgccaggttccagtcccagctcctccacctccagcctctgggacctcaagcaaagcgtttcctctcactgcttctgtttcctcacctgtgaagtggggatgagaagcacagatgttttggtccctggcctgacatggtcggagagctgtccacatgtgcctctgtctggggaaccacactctccacacgggggatggagagggccctgtggtgggatccgagaggctcagtttcagaggtgcctctgtgtggagttgggtggcagtgggccagtccctctccctcacctgggtcattggaatgagcacctctgccctgcagcttagagggccgaggtgaggaccctggcccagctgccaggcaggacatgtccgagtgtgagcagagcctgccggagcaggggttccccagggccaggactcaagcgtggctgcagccccctgcctgtgaggggtgcagagggccagggcccgctgagctg

SEQ ID NO: 53901 - DNA, 1050 bp, Homo sapiens
gatagaaacgttttagctggagacttttttggctaactggggagatggaggggactctcccccgccccctcctcggctccccatagcagggaagctgctcagctgcaggggtggagctggccgcagccgggatcctgggctcccactccggctctctctttctgctgctgcattttgatgagctgcatgacctacattccgactgggccacatgcacccactccatatgtgaatgcgtttccagccccatccctgcctctccctcctgccccatcagcctggcagggtggcctctgggtaatttgccacgtttccctttccctgatttgattaaaaccactttgtagggtggtgggagagcacaggtggtgggaggagagcacaggtggtggttctgctgcccccatgttgtcccaggcagtgtctggggaccagattcggtgtggggtggggagacaagaatttgaacccgtaatccccctgtgccgtgtccacactgctggggttgagtggttttcacagttgaattttctgtgattaaaaactttgtgaatcttcattaaatacaaattagccagaaaatggtggtacttagaggaaattttaggttataaaatacaaaagaatgagttccagtgccatgagtttgttttaattaagaaacgaattaatcaccccgacttgtgggtttccactgttctacagattcaacaaattccagtgacaacatctacacaatgattaatccagtgccgcctggaggcagccggtccaacgtaagtctgctttctaataatttacatatcagacaccataacaaatcataattaacttcatcagctgaggggaaagcaagtttaattgatttcagccatttgttaccaaagatgaataaaataaaccgtcagaaaagtgattaactcttgggcaactcagttcccatttcatgggcggcagggggtgggagaggaaggggtgggacgatgcccaccctctggttagagccagggtgcccgctgtgctgctgggacttgccacctcctgccgtgc

SEQ ID NO: 53902 - DNA, 1072 bp, Homo sapiens
tatgattgcactactgcactctagcctaggcaacagagcaagacgctatctcaacaaacaaaacaaaaaaaaactcacacacacatagtgatgatccctgagtgcagaaatggagttttctccggcttcccagcatcatgtctgtggagggcctctgatgctgacacatgggtggggtaggactaccacctggacctggggcaggttggcgtgtctgtatgtgccaggcctgggcctgcaccagcctcgggcaggcttctcaggagtgcctgctcccatccacattgacactcacccctcgcctccctgcctcctcacctcagagcctctcaatgggttccaagaccaagtccatcccctcttacccgcctgagcccagggggaaggtacaggatgacatcatgggagcccagagagggcagcggcttgctggatagccacatgtttttgagaacttcatcttgaaagctcctgaaaatgcactgaatgttgtgactgtccctctgtgctggcttgtcattgtggtccctgtgacttggttcccacccgccccaccgtttttgaaagaatgtattattttttctcatcaatccttttcacagactaaccctctcactatgttttgtctgtttgtttctcctccctcctcctgtctccggttcccttcttctcatagactgacccttggttatcgttgcagaattacggcagcggcatgagaccaccacccaactccctcggccccgccatgcccgggattaacatgtaaggcaaaaacgacccggcccgtggctcagagtccaggtcttcccccaccctctgccagcaccctgggagactcatgataaggggtcattgctggtacctctctggacctcagtctcctcatcggtaatgtgaggatattgatgatcctggtgatgagagctcagcctcatagagtgcctctgtgtgccgggcacggttcaggcatgctgcgtgcatcagctcacctcatcttcatgattaccctatgacgcgatgatttttatttttatttttattttttttgagacagagtcacattctgttg

SEQ ID NO: 53903 - DNA, 1093 bp, Homo sapiens
gctgggaacagatgtcaggctatttgagagcagcagggtgtgctggcagttcaggacttcctctgggtgtggtggatgtctcatcatgtctgcccctgacccgtagtccagcacactctttggcacactttaaagaagtgagggtcccagcggctgaggccctgcagtgagactctcctggcctcacccaagcagtgtacaaggggtagagctccccttagaccctaggagtgtctccagcgggagggagagaggctcacccgtctttatttatgttacacacccttgccaacctcaggaactctggaagcatatctcctgctctttattttactttatcaatgtggagaccctaaagtgcttcacccatgtttcctatactcctctgggtagggtgagtattaaatcccagagccaaacgtcccttgaagaaacccagggtgtctgcactggcccatcactggggtcaggaaagcctggcattgatgtagcactgggcccagacaaggttgatggtgcaggatggattacagggtctgtggtcacctacgggctcatcttgggcccggcagagcctggtggtttgggactctgaggtggagggtagggagagggcagactctccctgttccctaggccatttctgtctctcccctgaggatgatgccctgtggacaggacagggacaagcccagaacttagttctggaaagcacagtcctgacagcagctcagcctggctgggcctccagtctgtcatctgcaaaacgggcagcaagtgatggcctcatggggctactggagggtgggcgaaatagcagctgtgaaatgttacttgaagtccccacatggtgtcctgtggatcccttccccttcccgcaggccctgagcttgtgggagggagccctgcctactgccacagcccgggctgtcaggaagggcggccagccccttcagcataaagtaagcaccacaacacacacagtgctgtgctgagaccaggctcaaaggtgggagaccatcggcatgtgattcacagccgggaattagattgcttttagccagtgaccactccagaactttctgaacaaaga

SEQ ID NO: 53904 - DNA, 2980 bp, Homo sapiens
gggaacatctgctcctcggagctttccggaagtgagcagctcctcgcttggccaagaaactcccaggcctcacagcggcggcgccctcgggttcttgtacagccccctgcgatgttctctgcacacctcttctctgtgggcccacgcccctcctccccagtgggcaggcggctggcagcctggctctgcaggagaaggccaagggggaaaccctacctaggcagctcctctctctttttaatttagccacactcaccccctgtgcacattttgaatttttctaaaaaccaacctctaaaaaacagcacagtcatgggtggggaagagcgaatggaggcctgtctcctcatccctggcatcagcatcccacgctgggtgggctggaacgtgcttccgaggcagccctccgcgcttactgactgtgacccatggtaggagagtcctttggtggtgtgacccagtctacacacacatgaatatttacacacaaaaccggggttcatgaaagacacctgccttaaaatacacaaagctctctgacttttttttttattacctcggatttttaagagataattattgcagcttgctgaattgctgagtgagtttctacccatagtttgtaaccccaaggttgaagtgaattcatctgcccatgtcttctggggcggggtaggggggtcgaggtcagcatagcccagggttgaggcggtgggggtgggggtcagcttggaactgaggtatgaaaaggatagcccacccagtcgcccagcagtccggggtccccacccttcatgcacttccccctgtccccagctctgcaccggaactcttgggtttcagggctggagatgggccttggacccatggggcttctcatcccagctctgccactgaccagttttatggccatggccaagttccttcatccctcgagacttagattcctcatcagtaaaaattggaatgagaaaccccgcctcacagggctgctttgaagtgcaggtgaattcacggtgtgcgagtctgtgctgcccacaccgtgtggccctcactcactgtcccctcactccctgtgtgttacatctgtggtgccccttgctcctcttgcctctgttgtttatctgtcggtgcccccggccctcctgcccccaggaaacccgtcgcctgggcctctccctgacacttgatcagtactgcctcgagtcacccatagccgtgtcactgtcccccagactgtgagctccttgagggcagggcccttcccgatctttccccacctcccgtgcaagcggcacctacgtgctttgcacctgggtccctgtgtctgtgcatcattgtactccctctgagcccgtctcaaccaacgtatttaacatggcaaactccgctccaagggtaggctgtgtccaggactgtactcccgtgtgctttgacagaggtgcttcattttttgttctttcaaccccctgtgaatgtatttatcagcttctctcgctcccgctcgccgttttacaccgttgagccggcgaccaaagcagcagctccaccacctcccaccaaccagagcccacccccccgcacgcccgccgcccacccttcgttttggtttaatttttgttcttttaagctgcttctgcgcttctccatgtgctgtgatctataacctgcctctactgtctggcctcacagggtcctccggggtcacagccctcgccgcacgcacagcctccacctcacaatcctagcagcatgatgggaccccacagtcaggtaaacgcaccgtggcgctcccgcccgccggggacgcggggcgcggaggaagcagagagcccgcagaggaaaaacaaaaatcaaaatgtgctctagccactgcctgcgagtctttattgacaaattaaatttttttagaaatttcttttttctaaagatagtcttcagtcctcggatatcacacccagcttggatacgaaaccaaaaggaaaaaatatatatttctgtgaccttgtcagctgcctttgcgtttttgttttttcctctctcacttttggtttggttttgagtttggttcaccatttgtttgtaaccgaagctgcatcccgagccttttctttgtgcactcgtgctgctgagaaagctttcctgccattcccctgcattaagttagggagcccgctgtctccttggcgtttcccccccagtccttgctcccctctctgtccctgctggtggtttctgtgtgcgtgtgcctgtgtgcgtgctcgtgtgtccagctttgtctgcaggcccttaagatgttacgtatcagtccttcttaccctttcatttgcccttaccgagagcagaggtttcctcctccgccctgcgttgatttaactgtttttcgtttcttatgcaaagtcccagccgctgcccttcccacccagagtagatctccacgaacaaatgtggagtcaagagacacatttgttgtgtggatctattgttccctctgcccaaaggaagttttgctgtcaaagggaagaggctagcaggagaaagaacttaaaagatcactagttataacaaaactggactttgtggagtggagagcatttgtgtttgtcactgtgcagtagggcaggctgtcattgaactaattacctataattgcagccttttatgtcaccgcgatacgcaggcggccccaggcccccgatcagaatgggaaaccaggtactgtaccttttcatgttctctctcccctccctcagccatccttggccctaggtggactttgacacaaaatgaaagttgagggaaaggattgaggggtggaggggcaggtttaacgtggctggtagcttactagctgttccccagagagggccccatgtccccgctgtgcccatggtgcggcagttcacctgcctctccagatggccctttggacagcccattccagagttcagaaggtggcagcagatggagctaaggcgca

SEQ ID NO: 53905 - DNA, 1060 bp, Homo sapiens
gcttggcctctgtcaagaatgtggtatcatttttctccctgagtgactggcaggcctgggccaagattcctggtcctcatcattccaacccctagctccaagtcagagggaagacttctagctgctcttcccgccccagatttaacagcttgttccccatgagccagagaggttgtggggctgggctggggcctccctgaccagcctggctccatccttactgcttgtcagctttttttcttgaggcagctgcgccaagagcaagcttgtgccacctctgcttatccagggactggtctccagagtcccccaggggcgcttctgagggaggcgcagaggaggcacacctgccagccttgctgtctggatctcagcagaccccggttggagcactggtcctttgtaaaggctgccgtagattgaggccccaccgtgtgcgccacacgcccttgggtgcttcacttctgttttctctaatctgtcagtgagccagcctcctgccctccctgaccactgggcacacaggtgtgaggggcttgcccagagccccactgctcgccctgaggaagcactcagttaccaggaagggaaggacgcgagggaggaggcactcccttcttgccaagagccgaggaaccaacagaaggccttttgccccctcttggcaactggaccttacccttgaaccttcctcctctgttcttttcatatttctttttttgggggttggcttcaaattatcttgttttgtttacattacacccaagttacgtggtacaaaagacttgcaggtgcaaatatgtcccgccttcattaactcccctccctttttaatttatgtgatttcaattttccttccctgtactgttaattaggggaccctctaatcagtgccattatcacagtggtattcatgtttgggaaagccgctaaacaaatgcttgcaaaattgctaaatggctaattaatgtctgttaattaagaaaattgctcatggtaacaaaccatgccgttgctggcagccgctagaaagacacacacttgttgaaattagtagcgt

SEQ ID NO: 53906 - DNA, 1800 bp, Homo sapiens
gcgtgcgggagggctgggggtcctgctgatgcttctgaaatgcttttccgcagagtccttgaatccgttttacagtgggaatgctctgctccccacgctgtcagtgtgggtaaaggctttttcactaaccatcagtgtccacacttcggagttttcgtgaagtggcccagtgtttgcctcgatcacacccataacagagcctcctgggccctgcctaagtggctctcaggagctgctggatggaacactacccagtgctgaaattacaggagaaagaataacaagaaactgcgggagttagttgtctccactcagagatcttggggccagctgagatggaatagcgagtccattaacagggtccagggcagctggaaggctggacaggaagtgggcgtgtttcctgcctccttttcccagattcaggagtggggattttcccccatgttgaggtctaccccagggcttggtcctgctgccatcaccctgcagaggcagtgcagtgcagtggaaagagctctgacccgtcagtggaccccagttctcatcccagttccggttggctcatgggggtaccaggcctacatgctgtggccacactgggcctcagtttacctgtctgggagtgagagggaggtaggcatcaccctctcttggagcccctggcaggttaagccaacacttaagcttatttctctctgtgtaatcgtttttgtccttagcctggcagctcctcagggtcaggacaagtctgatgtgcctccagaccccagcatggggctggctggccacataggaggtcagcacccggcatctcggtgctctcccaagtccttcagccttgggttcattccactttgccctttgctttctgccctgacagatgacacggaggtgctgctcgcagtcttgtagaatgatgggctacccaggaccctgttagactctagaatcagacatcgaggcctggctccaccacgtaatagctatgcaatcctggagtgcctttatctttccaagcctcagttccttggcaataaaatggggcaattgatcccttactgcgaggagtccgggattagatgagcttatgtaggtagaggccacgctccctgttattgttactctcacggccccattccactgtcaagaaaatggaaatgcagtcaggggcagagccaggattcgaacccagttccttccaaaccctatttcttcatctaaaagagatgcaaatgggaatgtgatgttttgaggagagccctggggtagagttaggagatgtggttcagatgccaactagttttctgtggtcttggagaggtcacacctctgtcatgggcctctcttttctcctcccctgcaaatgttggaggaagggatgatagaatctgtcaaagccacctaacaggtgacccctgggcagatgccgttctccctaagcatctagtaaggacccccagccaccctagtctagcctgatattttgcacaccttcagggtgccatctgccctgatccaccgcatccctggaaggttaattaggcagcctctggaaccgaaggcatccagctctcatggagggagatgttctaaatggagctgggcctgctggccaagcagccctccagatgcacccattttgggttcctcaaaagcttccagcaagtggaagcctcaccagagatgtcctgcatggaaaagcacatcagtatcatcagctttgagactccctcctcctctcaccttccaccacagtccactctgcctgcctgctgggtctgttcagagttcggggaa

SEQ ID NO: 53907 - DNA, 1956 bp, Homo sapiens
tcagagctgaaggaaatctgttctggggggagaggatcagtttggcaaggccacgttcaccccatgttccagaggactggagtgggtctggatcccgggcccatctcttcctctccaggcttgtctctcctgcaccagtagaggtcagggagagagaggggtgctgtctggactctccccgtggggcacaggattcctagcttctgtgccagcattaaagaaggctgggagatgggcatggtggcccatgcctgtagtcccacccgcttgggaggctgaggtgggaggattgcttgagctcaggagtttgaggccagcctggacaacatagcaagaccctgtctttaatttttttttaataaagagagctggctgtgcagggctgggatgtgacttagcggggcagcaggtaggatggaaggagccactcacagatgggaatctaataattagtctccaacttgagagagggtatagaaacatctttggaaaggaacagaatagatatgtgattcccacgatacagatcgtattgccatttccttggtcaagcccccaaatgttagtatccttccccttggcctggtggtcccatccccaccatcttgtgcatgaagtcctctagaaccacacccaggcctgcctttgggctgcataaatgccatcctcacggtccagaatccccttccttttcttctctgccaggagacacctgttcattctgcaagtcctgcctaaatgtgactgttctgtggtcactgctccctcactccccagtgcactggtatctctgcctctattaaagtgttgcaccctggtctcactggccagtctggagctctttagggaagggcagaatactgcttgttcacgtgtctccggcacttagctcagggtactgggacctagtgcccagttagagtgactgccagatagaggtgggctctgcacatatgttatggatattgggctgtgttcttgaaaagagtgccctgttgtatggatacatgtggaatacacggagaatctccagcaggaaagccctccttaagcatttagtggctggaggcaaagtcacgtctcatatcctggcccttcccaaccacagccattcgaggtggagccttttcctggctgagatgaccccagaggatctaattctttgtgaattcacaccacaggaaagggtccaaacggtttgaacctgccaaaagaactcaaggctgggattcaagctcccagaatatttgtgctggcaaacaaggggaagggcttcttccccagcattgtggcaagaatgaaactggggacaccatcagcaaggagggttgtgaccagccagctggacgtgagcgctgggttttgtgttccgatgatgcactatcactgtattcgggagcagtggccaagagaccagggctcattgattagtgagcatggagggtgttggtgtgacagccaaattcaggtgtgctgatgcctggccagtgctcattctgtttgtcctcaggggcataacatcttggctctgataattaatgccttaatgtcactatacttcagttttccccctttgtaaaatggggtcaacttttgcttcatttgtcttacaagagaaatgtgaggttaaaatcaaagtgtagcactgttttgtttttccttgagaattacagaagactccacttttttccctcttcagtcttgaggaccatcatctaactcaggggtctgcagactttttctgtgaagggacagctaggaaataatcttagactttgtgggccatcaggtctttgtaagcagccgtggacagaacatgagtgagtgtggctctgttccaacaaaactttatttgcactgtgttccaataaaactttatttacattgtgttctaattaaacttaatttataaaaacaggtggcaggctagtttgaccctgacttgactgtagctca

SEQ ID NO: 53908 - DNA, 1065 bp, Homo sapiens
gctgtagaaaaggtccaagagcttaggaacttcggtctgttttgggaagcagctttcccttcctggaccatagtgtccccacctgtaaatgcagcagtgttagagagcgtggatataagagtccagtggtgagcagaagagacctggcccctgtcttctgggccgtcaagggctttgggggcaaaagaaatgggggactacttctagggccagatgactctggtggagtttgctgaagagcacccagcattgggtggagtttctcttgttgaggggcatgcttccaaccccaagagcagctcagattaggacagcttacgtgttgtaggcaagaggggtagctccgtgggctaataaggaaggctgtgtgaggtaataaggagggctgagccaaagaaaggaggttcctgaaggattccacgaggcggggcagattccgagccacagcttggtgtattaagagctacccttggtaagggctgaactaagtacttgactcctgatagttagacagttctctgtgaggcaggtagggtgaccacattttacaagggagataagtcagtttcagagggagctataggccgagctccaagccccatgaatctggggcttttccagcagcaccacagagctgcttctcattttccgtcaagtttgccaggtattgttgcacctgcccgtgtgactgtgggcccgacctcccacatctgtgtctcccagagtcctggttcttcccctgctccatcctgttgcttcatcttaacagaggaaggaggaagaggtcttgggccattccccaagctcctcagggaggaaaaggcatgaaaaactaccgagttttccagggggctgcaagactgaaagggaaaaacttggcagactttgctgttccgttcttagccctcttctgctcagtgggcaattggggttgaattaggggcattctggatttgtggtttccaaggctttgcagccccccttcctagttggatatgacgaatcattactttttataactgtcgggggtgaaggggcagggcaggaaggctgtgtgcacccgtg

SEQ ID NO: 53909 - DNA, 1881 bp, Homo sapiens
tctgtattgaaaatagaaaaattagccaggcatggtggcatgcgactggaatcccatctattcgggaggctgaggcaagagaatcgcttgaacccaggaggcagaggttgcagtgagctgaaatcacaccattgcatgccagcctagaggacaaagcaagactctatctcaaaaaaagaaaaagaaaaagaaaagaaagaaaagccccgtctcttgtttcttgctcaagaccaaatggtgggaaagagactggggacatggtggggtagaggggcacacccttcatgaagtgccaggtctgtatgcagcacaggcatggggttgggagggcacccagctcggccgtcagggaggccgcagagtggctgtgaacagggtctttggagcacgatggccctgcacttggctggcagtgtgatcctggcagtgacccagcctcttcaggcactgtttcctcagctgtgctgtaggaacagtcgcgcagcaaatcctaccgtgtcctttttggagctgtggtgaggattgactatacatataaacctatattcaggccacacgtggtggctcatacctgcaaatcccagcactttgagaggccgaggcaggaggatcgcttgcagccagtttgaaaccagcctgggcaacatagaccctgtctctacaaaagaaaaattaaaaaattagcgagactttgttgcataggcttgtagtcccagctgctctggaggctgaggtgggaggatggcttgagccctggagattgatactgcagtgagcctcgatcacaccactgcactccagcctgggcaacagagcaagaccctgtctcagaagaaactcagaaatctacattcatgtcagtaatggtttattattactgctgtggaaagatgactgggcttcaggatccgtgttgaccagcagctaagcctggagctcccagcgtgccagtcagctcatctgtcccttctgtcttggacagggaggtgctgggtcccatccctccttcaccttctgtgaaggtgatccatgcttcctggtggcctctggtgtcacacagcctgggtgggcacatgggtttcctcgagaaagtcagttcacctctctgaacctcagttgcttcatctgataattgggggcgatgataggccttgacatcttaggtcggctgcgagaatgccgtgagatgatgtgtatgaagccccacctggtgtctgtgctgggttggctctcgagactttagagttgttgtaggcgtgtctgggactgtactgttctagaggcccaggtctttcagtttacccaagaacaagagctgcctcagggtttctcctctttccaggagggagtcttaggggcatggcacagccttagtgacattgatgtgtggaagaggttctgggtatttttgagatccgctagctttttagtgtttaacccttcagtttgaccaacatatttgacacacctaagcaccaggccctgtttggccctttaacacgttacttcccttcatcttgtccacctgatttacctcccttagcccctgccaccttgactcctagtgccctgctccaccgcacaggagctgccgggggaggtcgaggctgggaggcaggtgttgtgtgtctgggaccctctgattcttttcctcccgggcttgctaccatgagtctgatggagaccagctctgacctggggagctgggtcttcacctgtgcgcctgcattctgtcactggtgaatttcacctgagtatcatttgagtttgcgttccccacctgtaaagcagaagcagctctccctggttcatctgggagatgaacacttgtaccagcataaggtgtgtggtcagaatgaatggcagatgggaaatccgaca

SEQ ID NO: 53910 - DNA, 1059 bp, Homo sapiens
taactctcactgatgaaatggaaagttgaacataaatcaatgtctgccgcccagttagctatgcatcagcaggcagcgcctgggagatttgctcggtaacaaagcacccaacagctgcttgggccttgactgccccctaacgcagagccagccccatgctacagagcccagctgggctacacaccacgtcctcctggcctcccaagtgcaggatgggactctcactcctctcttcaaccttttgagggagggaagggggaaggagtctctggcctcttggacttgggaggcctgggctctgttcttgctgctgctcctggcgaagccctcactgggggtgtaaactgactcccgaatctctggcttctgtggatctgatactggaaggatgggtgtcagtagctgcgttcacctcatgcttattaagagcttgggctggtttatcctttctcctttggacctgagtttttactttgcgttttcttagaatggagtgatttttccctgtgcctggaagctgctctgccgcaggtcggcagttctcccagcactgtaccgtggctgctccctctgcccccacgaggtccttctgtccttcatagggggatgggagtggagacccctgcggggctggagagtatttttgttttgtctcttcatagctgactgaggggtggactctcttgctcctgtccccacctaccttctcagcaaattgtactgaggtttttctccctttttttttttttaaaaaaaaggtcaaattccttagcccttgtagcagaagaggtttgaggaagagaattccagcagaatcctgtaataacacgcctcggcatgacatggatcaggatagaccccctgagtaagctcatgccacagtgggaggaacctccccttcaggggagtctgggctgggctctgggcccaggcactgccctgggggtcagaggccattccagcatctagctcagtgtgaggcactgttctaagtgcagggaaccacagtatggggtcaggttcatgtcctgtttctgcctaagttaactcccaggcaac

SEQ ID NO: 53911 - DNA, 1059 bp, Homo sapiens
ctgggacactgccaaggggaaagggtatctctctggaaggaggtactggctgcccatttccggagtaggcctgcttacaacaggaatattagctattgattgctggccctgcccttcactagtattgcagccggccactctgatattagaagggaaatagagatggtatcgaggattttatctgttaccaacaattgcactccttcccctgcttggccaaggcctgggtaggaagctctgctgcagaaaggctttgcaccagggagtcggcttgggatggctgagccagctatggccagaccctggcctagggtggccagcccagttttcaggtcaggacttcacccctagcctggtcctaaatgtagaagccccaggcctccagggttgggtgggagagagcagctgcccacctccatcccagcccctcggtaagcaacacagggccttgcttctgcaggcctctgactgccaggcttcagctcctggggtcagaagttttggccacccacaatgagggttggccatcagctttctcttcttccacgtccaggtttccaaggcgggcagtacctgtctggtcccgtggcatgagatgtctctggtagcaagttaagggctggcagggagatggcttggaaactgacctgaccacacctcacctttaaaaaaaaaaaaagccctaatattggcatccccagcacctggcatatactaaggacctagtaaatgtttgaactgagtttatttgtattgctcacattacagaacaggagcccaggcagccccaaagcactagatccaacattctgatcagggagggcctaacaggaagccagcttgggagttcaggagtggtgttctggtgttttgcagcagggaaggacagagaggacttggccgcatacttgctgagtgaccttgggcaagttgctccccatctctggaccctagttttctcaccagtagatggagcaggctggaccaggtggtctctgagggcccttccaactttgattttctgctttggatccagatggattttacataatcaagcag

SEQ ID NO: 53912 - DNA, 1108 bp, Homo sapiens
ctggttaaccacttgattttttccgagtgtgatcacagacagcatcccacaagcatctgtgcccgtgctctgcccgccacaggcaggaacagatcccacgtgggtcgagagtctggccttctccaagagacaccttgtttggctttttctggggtgtgtgaaattgggctttctgttttgccaggttgggcgcggctgccaccctctctgcgccgcctcctctgtctctaccttctcctcggcggttcatgtgatttaagccaacttgagactggggaatgccatcttagagaggtacagcgtgcagggctgtaaggaacttttatgatgacactctcgatcataacatctctcgttctttcaagcctgtcggcagctgagtttgagaatccgcccgagttctccacaccttttgaaagattggcactcccagataagaacatggaaagagctgttgtgtggaaaaggaggcagaaatttcctctgtacagccctagaattcagaactaggaccagtgaggcaaagtccaaggacacttttgcttggtataggccagaatttagcacctgtgctcacaccacatcaaggcagggggctctctggccctagagatgtctaagcaaagacctgacaaacgtctcctagggatgttaaaggggtttccctctaggtgagagatgatctggaagatgattctagttggcaagattttgtatttcggttggtgttaactcctgagagaagagggctgggacatgctgctcaccagctaagaaggacggcagtgaaattcaggtgttccccaaaaacagaagtggtaggtcacatgatggtggtgggaggagagagagggatgcaggatggccatccggggcattggatggccacatgtggatctgtatgcattcccagaacactgccaaaactggagccttgtccaaggggtggagatgagtgtagccccagaaataggtgtgtgagctccaggttggactggaccaggcattgctagggtctcagcttggggcaaggctgcagacatattaaagatgggttgagagttagaccttaaaatactggaaactcatggacccaagaaaggcagta

SEQ ID NO: 53913 - DNA, 1047 bp, Homo sapiens
gatttggtgactactcttgaaaagcaggatttcttttttcttttctttctttctttctttctttctttctttcttttttttttttttttttttgagatggagtctcactctgtcaccccagctggagtgcagtggcgtgatctcggctcactgctgcaacctccgcctcctgggttcaagggattctcccacttcagcctcccgagtagctgggattacaggcgcccaccaccacgcctggctaattttttttgtatttttagtagagatggggtttcaccatgttggtcagggtggtctcaaactcctgacctcaggtaatccacccgcctcagcctcccagagtgctgggattacaggcgagagccaccatgcctggccgaaaagcaggatttctgcaagaattttatttatccaaaaaatatttactgagccagcatcttccctgtgctgtgcacaccattcctgctcccatccctggaagatagctggctaatttaataaggaattaacagtcaggtgtgacaaacactgtgctgagaaacacataaatgacgaaagggtatcacccaggcctgagtagagaggagaagagtgttgcagagagaggaacctgcctgtgcagagggtggttgctgtattcatcaaggaaatatgtgtgaaagaaaggcctttgtaagctggtactaggtactaaatatgtgtaagtaataataggttattcttctctgaatgggaccccaataaatgttttgtaaagaccttcctttgtgttttcaataccatatcgatgggtggcatgagtaggggatggaccacctctatgagaagtcccgtgtttgtttcagaagctgagtttgggtcagaattctcagtggatgaactcccatgtcccttcagaagcctctgaccagcccgcgtgcctccgatcctcccaggccccacccccttagcagatctctcaccgggatcctaagcgatgtgtgtgttcttgggtgctctggccctcttcttggtgggtgcaaacaagaaagccctgctgtgtgc

SEQ ID NO: 53914 - DNA, 1072 bp, Homo sapiens
caaatatttggattccacttttttggaaccaacagtcctgcagggagataacctttgtctatataataagaccaggtagaaaaatgctggaagagtcaaggtagagtctcatataggattggagggtgaataaatcatcctgccttgtgtccagggtagcctaagggatatgttagaatggcagaaactagcagggaggtgggcattccagatggaggggagaagggcatgtgcaaaggctggggaccagctagtgtcccctgtggctgaagcttagagtacgagaaaagggggaggttggaatgggaggcagagaagaaaggctgagatgagatcacagccctttcattatctccttgtttttttaaaatctcttgtcaacccagagattgtcctatattacagggtgcagctcaagtcagaggtgaattgcctgcctctctgaattggtcagggagcccaagagctggagctcctgccctaaatccagtgctgtgtcggcttggttaggaggccattggtattgcatgctccgtgggatgcctcatgaaagggacacgggtggaaactggtaacttctagtattgagttccagctcatgaacctacttgggactttagtacccacttggactaggaagcagggggcatttgagctgggcattgatggataactgggagttctctaggtagatacatggaccgggatggagggagtggtgagggacctgagacttgatctgttaggggctggagccattcccaggacgtgatcagcacaggggtggggcagagtagggatgcggccggggggccctagtgagctgcagggatcctggtctctctgctctccccttctctctgcccctctcaagtttcatttcatgtcaagtgagggactgaggaagggacggggaggggaggctgggggtgatggattcctcccgcatgagctcagggcttgctctgtggtttgtctctgattgcaaaaaccatgtctgctataaatctgtggcttggagggtctagctgtaagggacagtccctagtttggtggaggagcctctgcttgt

SEQ ID NO: 53915 - DNA, 1542 bp, Homo sapiens
tacggcatggtagtgcagagaggggtccgagctaggcctccccagacctaatcagcttacagtggggcagggcagcgctcttctgtgattcaattcagagcctcggtctgcttgatggaggcagctttaatgagattagaaagcttaaccaagaggccaattaaatctgggcccatacctgtttgggcagctgttgaagccctgacctgcacccggaggcttcctgcaggcctcctaggagactggttggggagcatgagggggcagaagaggcctgcgcatctggcccagccatccccagaacctgggatctgtttcccctgctggggtcagggtagagacagaactgaggagggatctgatggaacatctggtccaggagctcccagaagctggatccctgccccctcaggaagacaggcagcttagttgttgcaaagctcactacatgattttgatgtgcaaccaggcttggaaaccaggaagtgaatccattccctttgttttatgggtacagggaagggccttctgggggcagccagccaagcctgactcctcacccagtgctcttgtgtggcatctttgttcccagctcctttgattatccagggtgatggggatggtggcgttgcccttctgttctcagacagttttttgtttgttttttgagacaaagtctcactctgtctcccaggctggagtgcagtggcatgatctcggctcactgcaacctctgcctcccaagttcaagcgattctcctgcctcagcttcccaaggagctgagattacaggcaggcaccaccacgcccggctaatttttgtatttttagtagagaggggggtttcaccatgttggccaggctggtctcgaattcctgacctcaagtgatccgcccgccttggcctcccaaagtgccgggattacaggcgtgagccaccacacccagccttgagacagtttttatgtctgtttcttcatttgtgcttcatgccactgttgtgaggtaggccaggcagggaatggtgacttctctttttacagataggcaaattcaggttggactcctgtcccaaattggtaccagacccaaaggacctgattcagggttaaggtctttcccttccattacttaaatcttccttctggttcccactggaggtggtggtgggtggtatgtgagtttgtgatgtctggatccagccaggaagaaaatcccagcatccattaactgtgaccttgtgcaagacacttaactgttcgtgtcaccagcaagataggtcggatataaaataaatgagtggattcactcacctcaggagattgttgggaggattaagtgagatcagcctcctttggtgcctacatagagtcttaggatgtgggggcttattattgttcctgggacagagagccaggaggctttgggggcagggatggcaaggctctgggagtctggtctgccggagagtgatacccagctggtccccaggggacaggccacccttggggaaaacaggtagagagggtttagaatgaatac

SEQ ID NO: 53916 - DNA, 1038 bp, Homo sapiens
gaaggcagagcctgtgggtgcctgggagcaggggtggccccgggagcatgtggctgggtcaccctttgtaattgtagcactgtggtgaaggccccggaacctagggtggtggtggcggccggacaggtgggtgggggatgcctggcttcccatctgctcagcctcgcttggctctgaatggattagttctgtttgggttggagcttactgttgtgtgtgtttttcatcccccttcccatttgttcttctctccctggcctgagcgcctcttcagggttatgtgccttaggagccgcgagggtccccgcgtgggagggagagttgtgaagtggccattatccaaacaagaaagggagtaattggagtttgcattcttctgggcctctatggaaacagggatgtggctgggcatgggtagggggtgttgagacctcacaaaagtggggcacagtctgcagaaactcagggtacagcacagtccggatgagtgagcaccacctggtacagtgtgccccttaggttagcttgtgctgttgaaccaaagttggcgtgctgctgctgctggtcttcaacaccgctttattgttgatgagattctgaatgggcattaattccttcctgccaaatggtccaggtgaggcttctgttgcggaaaactgttggcagagaattaatattatgggcattgtgatgtggtaaaagatgagatgcaggtcttctcctaaccttgccgagtgacctctctgagccccagttttcccaagcaagtggggatgttgattcctgtcctgcagggttgttgaagggggaaatagataagctgtctaggagacccagtgccacctgtcagatgtgggaagcattcaggagatcctaagagtgtccatctcttaaatgccacaccaggggcacagagcatttgggatgttggaaatgcccgtggatatcagtggatttcctgatggggttcagggaacttcttcaaggtaacgcagatttgtgggaaaacaactttttgctttgcccttctctctgaaa

SEQ ID NO: 53917 - DNA, 1742 bp, Homo sapiens
ccccagttgtgttcagaactcgtcatggctcccttgtcctgcacaggctcaggagtaccccctttgccacatcttggttcaagtttccccttgtctgaaacttgacaagggccaccttctccggtctcctgtcctctgtctccgtgctacccatcattcgttctgcaaacacgtggaggcagtgctgtgtggagcagcgctgtctggtagaaatgtactgagggccttgcaggttatttcagagctccttgtagccacataacaaagtaaaaagaaataggcgaaattagttacagtaatatactttaattatgaccaaatatattcaaaatagcactgtaagatgtcatcagtgtaaaaatcattaatgacatcttttatatttttttcccccaaactgcctttgcagtctggtacgtattttatgcttatggtgcgtctctgaaccgcccacatttcaagtacttggtagctgcttgtggctagggcttccatgcaggaccgtgtgagtgtaaagatttaagagcacgagatttgtagcatggtggacctgtttaatgcagtttcttgactgctgtttatgggcattgtggccttgggtgggtgacttccccctccgagcttatgtgcacctcatagagttgtcgtcaggattgaacgggatgagtgcaaggaagggctcagcatggaacccagtgcatagtgaggggaaatgcgggtgattgtttacattgaagtaatgagccagaggctggcttggtgccagggcctgccccctgccccctgggctgactgtctaggcggggttgataacaaactgcccgaacaagggcagcgaggcatcagaagtgtcaaaagggatcatctagcacagggactggtagcaggagcaccaaggaggagggagaggtagtcaggagaggctgcatggcagaggcgcccccaccccaagctcatctctgctctcttggcctccagagctttctgtggcagcaccagcaccccatggctcccgtgagctcaccctttgtgctgtgtaattagcgcggtgtgcctcgctcttgtctctaattgtgttgtacagcgtgtactttattatatcaggatataataccgctagcctggcagttatcttgttcactaattgtttcacgtgtctgtctcgtctgccccgctagatcacctgcttctcctaagcagcaggcaccatcttttgtgtcttttgtctcccccagtagggcctagcactgccagggcatggctgggtgtcaggagcctggcatcagggcctgggttcgagtcctgcattgaccgcactgacttggtctgcagctgcaaacaagtcatactccctcctgtcataaatgagcaggtggtttctgagcccccatgcagccttaacatcctctaatgtggtggagattcctccactggttgatatcacgtcagtgttctcgaagtggtgagttgttattcctttgctcaacaaatgtttattgagcgcccactaagtgtcagttactggggaggcaatgatggataagacaggtggtatttctgcccttagggtgcttaaaagctagagaaagaaacaaatattaaaggaataaacacatcaacattatgctaagacgagaccaacctggccaacatgatgaaaccccatctctactaaaaaatacaaaattagccaggtgtggtggtgcatgcctgtaatcctagctacttgggaggctgaggca

SEQ ID NO: 53918 - DNA, 1105 bp, Homo sapiens
agtattattatcttctttctaatgataataccagtggcagctcctaagaaatgcagggtcctggccctggtgtacccagctagtggctttcccactcagccaagggatgaccgaggtaagagttgaagatggcctcaggtgaggctgcagtgtggccgggctttttacttctgttgcacagtctggtttcagataacccagtctttgccagtaatgagcctggtgtcctggactgaaactgtactcctgtttggacttgtagctgtcccctgttctccaatggatgtgttttttgacacacggctgacaccagcctggggcttatcacaccaagctgtgcgttatcatattcctctcattctttcacttagcaagtgtgtaatatccactcactccttgggagggacccagtgcgttctgtgctgtgctgccggcaagactggatcctgggggataggggatagtaggggtgcttacagtccaggaggaggaataagaaatgaacccaggagctgccagtctggctagaagtgtgcaaggagttggggataggatgggagagggagaaccttcagctgggggaagtctgggaagggctaccgaggaatgtggtgtttcccctggaccctcaaagttagtagtacttttacaaatgaggactggggaagggtatcatggtagaagacaacatcataggaaacagcttgcagataagagtgactgggcttggggtgaaactgacagcagggagagacggctgctagatagaaagcaagataatagtgaccatctttgagccccaaatccaagcgagagtttctttccacctatggcgtgtcttttataataaatccaaactcagccggacgcagtggctcactcctgtaatcctagcactttgggaggccaaggtgggaggatcacatgagctcagaagtaccagcctgggcaacataatgagacctcgtctctctctctctctctttttttttttttttaaagaaaaataactaaatgatggcatccaaactcaagttccctggcttctccatagctcccaattgcccagtctggcaaaggaagccagtggcctggagcctgaaac

SEQ ID NO: 53919 - DNA, 1014 bp, Homo sapiens
agagggtgttgaggttggctgcgcctccccgaggtccacacggcctgctggcagcagcaggcactaagacgggcatcttgtcagccgggcagatggtgttcacctgctcgggacatgctccctggtgctggggcccttggagttgctgggataataacagacagctgccagctctggaccgagatctgcgggtattcaaaggcttggaagtgtgcagggagaaggagcctgcccgggcttccctacatgctgtgtctcgccttttgttttgagatttgtgctccccccaccccttcccgcaccaacatccgagcaacaagagcattttaatagaggacagttctgttttggaaacgacaagaaagcgccttgtcgagtgtgacctggcctcttctttgtcctgccttcccccgctttgtgtgtgcctgcaatgggttttgttccaaggggcaaaggagttggacatggatttggtgtgttcctggggttttctttcttttcccttttttggcagcagctaaagcttttggttatttctgagtacagggcaaccggggagttagggatttttcaggaccaaactccagggtctttgagttaccaagtggtgtcaggaacaagtgagtggcacagaagccaactttctgactgcctggcgttgtctaagctcattgactgtgtgcaaaggacaaatgatttctcacggtgcagtctgccttgaatcctaaggggaatgtttccctagatatcagtccaaagcaaggctggctgtttgagaaccagcttcatttccctttgctgcgcagagaagggatgccgatgttgtcttggttatcctgttactgcagcttgactaaaaacttcactcgccaatgtcaacttgggctggcccgactcagtatcatcagctctcattaggctacttggaaaacttgtgtgttttttgggggtggctcagtttgaaatttataactggcctcagggcagggctcatgcctcagtccttcagtccaa

SEQ ID NO: 53920 - DNA, 1096 bp, Homo sapiens
gtgcgatccatatctcactgtaacctcaaactcctgacctccactgatcccccgcctcccaaagcactgggattacaggcatgagccattgtgcctggccactgcatattctttaacacacatcccaagctgcaccctccttgagaagggaagccctctttggccacttgcccccagcaagactttcttttgaaatactacagagctcagagctggtgctatgtgctggagccccttttctgtggaggcaaatcagccggtggatgctggagagaggcagtcttgggtttaggcttagatggatctgagagtctccccagctgtgagtgcgctgggcaggggccttggctgctgtagatggtcaaggagtccccagaactgtggctccggggaacaacacagagcttgctttgggtagagtcatacaaggactatttctacatgccacctccttgcttttttatagtgatgatggtttggctcattctccagccaaaaaccttagaaattggagactctgactcggcacgggtgcagggtaggacaggagggctgctgctcagtgtggtcaggctgccctcctgagtctgccgcccctccgagtgacggtggtgatgctgcagctatgggtgtcttacccttgggggctgtggggctggctcacatgctctcaatgggccccatgaggtaggcagggttgtctcgattttgacatcttgtgggtaggtcctttaatagtttttcaagctcttttacctccattgtccctggaggagcctcacgacaggtcctgcaagtcaggcaggcagggtgattgtcttcactttgcctggaaagtttcccagggcctgggggcccagtagggcttggacccactttgacatgacagaccctccacactgctgcctctctccttcttggcttctgttccgaagcagggaacactccatctcagcccttcctatggtgttctcagcagttggtgcattaagtcagggaggaccctggtcttcactggtggtggatttccgtcttgagcccagaggctgcccagcgccagaccttccctctgctgcccccttctgggatggccagt

SEQ ID NO: 53921 - DNA, 1008 bp, Homo sapiens
tttttttaaattaaaaaaaagttgtcttaatttatactgaggctagcaatagataaatgggtactctaactgcattttaacttgcactggaagttattaaacattgaagaatctctttttttgcttgctctagatgaaaaatgttataactccgacttttctactttctgtaccaaacaccaagtccatctgctgtgtgcttctcatagtaccaagtggtgtgtggtgagttctttcttttccttgactgccagggacttgcagctatgtaagagaggagggacaggcggcggctggaaacagaggtagaccaggcatggtcttgtgctattgtgtgcagttatgagctgcaggctgtctcacaagttaaggagagagagttatgtggcccagagagccttggccttgaggaatgggtacagacagtgcttgatctgtacagggaggctccggtagtagccttgattcaacattttgttcagtaatgtttatgggggcctcctgggcaccaagctcagtgggaatagggagatggataagagccagcagcctctccaggcagacagaatcacacgcggggaatttctatatgctgtgacagatggctggatagggtgccatggatgatcagggccgagtgacaagctctgccgttcttttgttcttaggattttcagctcccttccccctttcctgcttatcaaggaaggttggccagatcaacaagtatcccctccctgtccagcgtctgtacccaggtggctttgacttcatactgggaggggacactggaagcctcctcattcacctcctttgctgggacactgccagttgaccgggtgctcactgtcttaactaggcagctcactctccaattctggtgagaccagttccacaaaaagaacaactcttttccttaagagccctttgaggtcccttttaggcaggatctaaggaaatatttaagttcatagaatctttgtctagggaagcatgttcaaggtatca

SEQ ID NO: 53922 - DNA, 1011 bp, Homo sapiens
acctctgaagattcacctccctctccagcctggcatgaagcaggtacctgggacaggaatggatggcaagctgcctcctgttggtgcatttcagaggggtctggacactgagggagccttccttctgtcaaatcttgaaaaatcgtgaagtctgtctagacagtgagtttgaagccagtttctccagcattagtctttgtggttgcttcattcctcagatgcttcccaggccacctgcgtccttcaaagagaagaggccaacaaaagaataatacaaattttctggaaataccatgtcttagctgctgctttttcttcaggacttttttttttctttaaacctaataaattgatgcagaacctgcctctggccatttttcctgcaggtggtcattgtccccttggaaggctcgcgccagcctggaaggttgatcattaacaaattcagggagggtctgtgtggtacaagcaggagcacagaaagttggcttgcgtggaggtaggggatgctgaggaccttcccacctgtggggctgaaagtgacactgagtgggtaaggctgagtcctgaggctcctgctgcttctgtgtttggaaatttcccttataaaggggtttctgcttcccgtccttcccccagcacaggcagatgtcttatgtacctacatagtgccaggtgtagacctggatgggagttgcagagcgggtcactctgcaactcccattcacgtctacattgtcagaggagctttccatttaatggtgagggtggggagaaggtgaccgtcactgtgcaaggggacatgggccctagctcttaagtctatctggctcatcatttagaagctgtttgagaaggatgttagctcttcgctgagcctcagttttctcatctgtaggctgcggataaggatacttcctcacttctctaggttattagaaggattagaaagaacacatgtagaagcacctgcaggtccccagtgctcagggctggttggttctttgccct

SEQ ID NO: 53923 - DNA, 1046 bp, Homo sapiens
ggaagagctttgaattttaaacattagctaatgaaattgcagacaagggcaatgggtggaacggcctgggtattcccatgaaacagttattagagtcagaatgctctggggtcggccatgagggagaaaggcaggcctggctcgcgtgtgtgtgccacaaacatttatggagccctttcccagtgccaggagctgcgtcaaggaagagctttgagtcctgcccagggtgtcccagcctggtggctaaatagaataagcttggggcagagaagcagcttgactggcaggacctttctgcacagaggagctggtatctgcagagttggaggagataccaaaccaggcttggaaggaaaaggaggctgacctggctgcaaagaggaagggatgcgggagggtattccgggcagatgctggagaagctggaggtgaggctggagttccggtgtcccccggaatgggcatgacggtgggggctggaattcgtcatttcccctgcttctgcctccccctcttgttgctgcgccttgtgcagttgtgtcagagatgggactggctgttcattcatccgctaattgttttgataagagactctaattacccactgcgatcatcagattaccctgagctccaggagggagatttgagagtttgagctgcggctgctgctgccatcagcaccgccatccctgctaaaaggaacctgctcctatacctcggcccctgtgcctgcctctggccggtgctcactaagccatcacatgaaggtgtgacaggctgctgggtggggggtggcgggggggagctgcctgtgaaatccacccgagagtacaatcccctgatgtcaagcaggattttccctttgattatctttgccactgtgttaagtccgcagataagaggtttggttctagggatttcaaaataaggagaggagtgtggaggaaaccagagaaaaacagtagcgcctctaatgaattgacatcggcagtcgagacaaattcaaaatccttttcgaactgtttgattaagttctacttacatgt

SEQ ID NO: 53924 - DNA, 1056 bp, Homo sapiens
tccttctggctcaggttgattttcaggcctgccttctctgctttgggggctgcctgtgcgggggatccatgcaggtccgttttgttcttgggctcaaggctcttgtgtgtatgtattaggggaccatataatatcccaaccaggatacttttataaccaggcagtgctattcatcagtatggtggggcgccaggtgtgaacgtgcaaagtctgggatgcgtggtctccttggtgttatgttggaagctctccttccagctactgggtattgaccaaaatctacccaaaagcagtccagtgttcctctcccctccgtactccagccctagcagcccaagatgaattgtggggtgagaaggacagccaaccaggcttgtcccctcccccatttctcagggaggggagcggctgggccgctgttttgtattgaacatttgctgccatggcatccagattcccaagaagctgggggctccctgcctgtgattgtgtaacttggaacagttgatggggagggagatccctgaattagatcaggaaaatgtccttttctggtgacccttgcagagcctatagtctccttgaggcttgctcacctcccctgtagcctggggccctggaccaagcacaggcaggtggcagaggcctgacagtgggccctcttgttgttgcaagccccagcctggcaggccatcctgcctcctcccagtacacaatcagtattgattgtgcaggaggctgggactgtcacatgcagtaatccttgcttcacagcaggcatgctccttgaaggaagaaaggaagaggttttgtccctgatctaacatgcctttaaaaatgcaccttgatttaagattcagctttttgcagcatattttaaaatgtcagaaagataaatgtgcagccttcttaatgtgtctgccttgaacagccctttaaaaaaagtatatcattcatcctcagggtcacaggctgtttgcctccctccctgcctttgatggtctatccacctcttctatgagctgagtttgggtgggggcaggggaatagactcaa

SEQ ID NO: 53925 - DNA, 1050 bp, Homo sapiens
tgtatacatggttttcattcttgggtttttgtcttggctgtgaagtggcacgattttctgaactaatcctgtttcatgtaacccgaacccaagtatctggacgtgaagggcgagctttttcttcctcttccttaaccaaggatatccgagactgtagcatctggaagtggttgggcatctggtctgagggagtgtgtgtgtgcatgcacacacttctgtaatactgagtgactgtgtccagacaatgcgcctttgtctctccagccaggcatatacctgtgcttctttctatatagaggacgttacatgcggaggttattatatcggggcatatgtttatgtggcatacacatgtataaacctttatttctacttagaagaaggaaattttgaagggctttctgtgtactaaagtgtttgcaatgatggatgttgatgtatttttctttacaaaatgtaataagccatttaacagtgccttcagtggctgtcattagccatttcttcattacttccaggctctgccgaatcatgcattgggggatccctgctccctggcaccaggagcagtgatctgcacccacggtggtgtgctcaggaggtagcacggacttcagggtggcctgcgttggcgatctgttaagggtgtctctttgctgcctggttttgacgtgggtgggatcctgtcctgggagatttctgggctggttgtgtccttgagagttaggctctgaaagggatttttttttgactgcacaaggttggagcgttgagatttgggctgtgtcagcaggtagagcccgtgtcctcaccttgcaggtgacaggcagacagtgctgggtacctccatcagagggatgtgcatgaggaacctagggtgtactggtggtggggagggactcctgtgaacaaagcggtcgcccttgctctggtttgcccccagggactgctaggcggtggattcatagtagaattttacactcaatgccagaaagaacttggtatagccataaggatgaataaaatgggaatggatggccgtggaggtgt

SEQ ID NO: 53926 - DNA, 1036 bp, Homo sapiens
ggatgccttaggcttatgtggcctttttggagctcttgtcaaggacccctgggagcgtgtcacttccttggctctggttagggagtggaggcacaggaaggtgaagtgacttcttagaggccacatagctagcaaatgtgggccaaagctatagtcaggccctagtgactggggccaggggggtttggaaagatgatctcttctgcccagccctttcatttacagatgaaacaatgcagccagatgggcagcttgacctggctgaggcattcaaggtggctgggactagactcaggtctcctggctccagatcccacatcatcctctccacactcccacccctcccagcagctccctgctccacttttagtttccttgcatctcacttactgttgctgcctctcctgcagggctgatgcgtgtatctgtgactgccatgtgggagtcctttcacctactgctcctgccaccttccttggttgccagtatctgattattctatttgccaccccccttgcctcctgggagctaatagcaacagctggaactgaggggaaggctcacaggctttggctaggcagcctggaatccactctcagcccttcacttaggagctgtgcgaccttgggcaagtccttcaacctttctgagccctggtttctcatctgggagataagatgattcggacttgataacctccagtgaccttgcagccctgcacaggtctgtggctggtgattttcatgaaagggagcaagagccacactgacctgttgttggaagctgttgggaagggcagatgacatggactggtgggaaagaccctgtgttaggaggctcaggcatgcatttccagctctgccttcaccagagaacagttgccttggctgtgggtgctggcgggcagttggggcaaggcaccaccctccttgttgcttctctgccacttcctttgcaccaatgctgggggcacagacattgctcttcctttttggtgaccatccagggtagagaagttgctggtgagtgtgtgagc

SEQ ID NO: 53927 - DNA, 1322 bp, Homo sapiens
cctcggcctcccaaagtgctgggattatgggcataagccaccacgccaggcctattttatttatttttgagagagggtcttgctctgtctcccaagctggagtgcagtggtatgattagaactcactgcagcctcaaactcctgggctcaagtgatccttccatctcagtctctgagtagcagacaacacatcaccatgcctgcctagttttaaaatactttatatagataggatcttgctttgttgcccaggctggtctcaaactcctgggctcaggtgatcctcttgcctcagctgccgtagaagctgggattacaggtgcaaggctctgtgcctggctacatttgacttttatatggccctcactgtgtaccaggcaccattctaaacagttacatgtatcacctccattattatctctgttttacagatgagaaaactgagacacagagagggtaagtcagttgcccaagatgatacagcttatacgtggcagagctgggatttaaacccagatagcctgtcttggagttctttgattttggttttgttatgtagaaacggggtctcactatgttccctcagcctcccaaagtgctgggatttacaggcgtgggccaccatgcctggcctgttgaagtttttaattaccaggccatgcagccttacggagagtcaggtgggttggggtggtgagaaatctgacggtgttttttggcaggatgatggctgtcctgtttggatccagggcagagctacagcctgagcatggctgtataaatgggagaggcatctgctctcctgactctgcacaccaaatggccaggaataggcagaggaggcgggaggatgcaggagaccatcttctctcccgagagtctatgaggttatgaaaatcctttccgtattctgtggggtatgcaaggtctccaggcacacccacgtagctggctggctcccagggctttgttgaggacaaggtcagctttcctggacattccccacccccaagcagtggtgtgttcagtggtgatggtccctgcggaccacaggaggggaagtgaccaggtgtttgccaggtccagcctggccctattaggaagccctggttgtcaagcgcagcagaactgctgacagtgacacaggggaacaatgctgcgtgggaggaggcgcacgcgtgtgtgtgtgctcgcgcgtgtgtgtgcgtgcatgtttgcttactcccctcctgacccgagtgccagcagtgacacactttacttgtcccctctggtcccctgtgggcactgaatctgactctctgatgcgcttgacgccctct

SEQ ID NO: 53928 - DNA, 1518 bp, Homo sapiens
ctttctggaatggatagttagaagtttaagaagttatgcccatcagaggtacagaagtccctggctaagaatccagagtgccagtgctagaagaactttagagatggttctgtttattcccttctttctgcagatgtagtagctgaagctcagagaggttaagtaatcggtcgaagccacacaggaagcggtaaagctggaattggcgcccatctctctggctccagtgcccatgcttgtcctgtgacatcatcttggctcctgctcttaatcctcccttgcgagacttatttctcctgcccttcccccagctacttccttttcctgcctggattccccaggaattcctctgcgttgctgccttgtccagcctgggagaagcgacaagagctgaccatttgagtgagaacccagccccttgctgtttctctgacaccttccagggatcagagtgcttgtcttacgggattgtgcgtgcctccctggctcctgaggacaggcagaaatgagccttgcgcctttttgggcctctcggtctcagggaggtttccttgaatcgatgtgtttgggcaccggggagatagactttaaatgttgtgaaactctggggcccatggcagcctgtggtaagtctggccggacacatgatcttcagccctagccttaaatcagcctctgtctcctgctgtctctgccagccatgcagggcagattgcatgagggttcttgacatggatcacagttgccggggcccagagtctggaaggtggtttttgtctcttgtctcctttttctttgcacacttatgcacaagtgccttttgttcccagaaatgcagctttctcagtccccatcctagaaacattgtcggaatgtaataaatctgattctgtttatgttgaagaaatgaaacatattgctctccaaggaggaatgcagcggaggccttgaacagggctatgtttatgacaacagtttgcacatgtggctttatttttgaaagcgtagtgctttgcccttcttgatgggattctggtaacaagagctgattcttgtgtccgggtgttgggcaaacaaagggcagagctggctgaggccctcacagctgtggctgtcaccttagttctgagagcctggctcctctaggcccttgtcctttcctgggggttgcagctcttcccggggcagtgcctctgtgctgcttgagtcagagcttattagttcagcctcctattcccatttccaggtccaaaacaacaggatgaaatttaataggcataaatgtaaagtcctacaatgtgggttcaaaaaaatcaacttcacaggcacaggatgaagaagattcatttgaacggcaagtgagaaagtggcccttgaatgtagctgccagtcggctctgtgtggcagcagttggccatcactgaaagagagtaatacaggctcactgcacaggtatcatgtccgcaaggagaaagatgatgttgttattgttaataattcatcctaatagctaggtac

SEQ ID NO: 53929 - DNA, 1779 bp, Homo sapiens
attactgctatcattcctgttttctggttgatgaaactgaggcccaaggccccatagctaaaatgttgcagacaggattcaaatctaagcagattaatttcagagctcacgcttctaaccattagctgtatagacacatccacactgagaatgtgtgtctgccaagaatctgctatctgtccagcatcaattatcctcaataagtgctttctctttaaaaatcttaactatgctttccatttaatccttaacattcctagtaacccatgggataagataagacccccttctcccccatttcctattctttttctttttctttttttttctgttacagattgcaccaaatggtgataggtgaagggtctctggagagggcaggatactttggaggctggaattgaaccatgttgtcttaatccagagcctgtgggagagagaaggcccatgaaagcactctgcagactgtaaagtgctacatgaaataaaaggcatgtgagaaaaggtgtgtgtttagaagactagctttaacttggacctcgtgcatcctatttggggatttcttgcaccgtcgtcatgatctggtttcaggtacctgtgaaaaattatggtaattaaagtataatttagaataccctgttggctcacagcagctggtccagatgtaggaggctggggctgtttgttaggggtgtcactctcttctgccctttgtgttgttggggagaagggtgggggcaaagagatacaggagctatttttacgttgttcacgtcatattcagaattactggatgcttgtggttgggtccctgtttagcctcggctgggaagagagaactcccttggctgcctgggtatgtatggaaacttgagctcataccctttagtatatatattgccgtaaaggcaaatggacgcagagtgaccggacagttaccctgaatagttggctgagattttccattctcttcagaatgcttctagcgggtggagaaagtggggttaggggtcgggagtgagagggcgggaagcataggcgggcagccatgtgctcatcactttggttatttattcaacagatggtttttcagtgtgagatacatgctagatcttttcccaggtatttgcaaagtaaagtagaataaggtattgtccctcaaggattttacagtctagttggggaaatggaaaaataaacattcgctttagcatatgcaaggcaagcatatcagcccgccctgccgtaggtgccggctatgcagccccattgcagtaggggcaccgaggctgtgaacacaggagagggacacctggaccacaggggcagtcacaggcaacttcctggagcaggcagtgagtgcagaagctggcttcacaaactggagaagcacttccggtttagttgctgttgagtgtaatatacacacatgatgtcatggatggttacaatcattatatctcattttatttctcagtcggcctgggactttattctcattatttttcaaaaataaattaaaagatagagatgggggtctcattatgttgtccaggttggtcttgaactactgggctcaagtgatccccctgccttggcctcccagagttttggggttacagacgtgagccaccatgctcagccagattttattttttatgcccaaaaaactcactgtcttcaaaaagtttgaggaggccgggcatggtggcccacgcctatcatcccagccctttgggaggccaaggcaggtgatcacctgaggtcaggagttcaaga

SEQ ID NO: 53930 - DNA, 1669 bp, Homo sapiens
tcaatcattatactttaagttttagggtacatgtttcctccacaaccataataaaggaattaacatattttacggcaggtagcaattaagctctgggaaggtaaggactgggctatcctctttactgtcctgttcacttttgcccttggtcatccttgcccagcacagcacttactaccatgggagctcagtaaatccttgtggaatgaatggatggcaggtcggcatctattctctttggcccatggatgcagtttgggtgaaggcaaggaaataaacattataatcagaaatcactgtaattttttaaggtttctcaaggtatgggcccactgtgaggtcaggatatggcttcagagtggagcccccaacacattaaaggggagacgtctggccagcagtccacaaggccagggtgcttagcagcatcccagaacaggcagggaccttgaaaggtctctgccaacatgttgtcttggtaggtggaaagacgtggagcctagagaacagaaagcactttgccaagaccacacaacagtagggccttgggagacctctacttgagcctcagtttaattgcggaaagagagttaatccagcaccaggtgccagccggcttactatgcagacattgtttcactggcctggagagcgactcagtttggcagcaccgatttacagaggagggaatggaggcttgaggaacttaagttgctggtctcaaaacacagcagaggtgggattgaaattcagatgttcctgattccatagcctggttctttccactgccctgctttccagcagggtggagtggaatgacagccttgtttcttggattggctctggtggggaccttctgcctcctcttagccagtggggctgtacctacttgtaggagcctgcagccctctgggctggtatgggagtgtcctgggtgttcatggagtccattttttctccccaaccttgttttacgtcgtttctgtctcctgcctctccacctctgaaagaacctcagaaattcctttgtccccttatcagtcatttccctgggaagccactgaggatcctggaaaggtaccgagggtgatgaagcaaaatttgcaccattcccagagtaactttccatcatgcgtggctaaaaataaagtgtgtactcatttctccttgctgtgcgtggacttgcttttggggtttcacgggagccacttggcccttttgtccctccctccctgccacccctggacaggcatatgcccacaacttggggagatgggtgggcttgaagctgctcacatctctggagagcagaacccctgagcctctacaaggaagcacctctggctctcaatggcagcaaacaccacattggtgggttggcactttggcatatgcggggataccgactccctttgcaaatattactgcagccgaaaagagacaagctacctttagaggactttctttgtgcagggtgtttctttttgatatctggaatgcacagaggcaagagagataaaattaatttgttcaattaattttgtaaatattgactgaaccaaagttttatgccaagtcacatgtcagggacctgagagcttaccaaaaagcaaatgccttccttgaaggcgcttatcctctaggtgggggaagaaaggtgtgttaagaa

SEQ ID NO: 53931 - DNA, 1720 bp, Homo sapiens
tgctagtggctctcctagccccttctcctggtccaaagctttttgtgattgatgttgccaagaaccaatgtctttcctttgggtagacggggtggggtgtaatccttgctccagatcctagagttcaggactgctgtgccagggtgaccttatgtgtgtcaagtagatatagttatatgaagccatggtttgtaacctttatggggccgtagatacctgggagactgaaattcattgccctcctctctgaacactgcacattcacatgtattcaaataattgtgcgccataaggccaggggttggggtttgcaaaccctctgaagcccatccctgatccccttcagaggcagacctgctcccctgccactgggtggcctggacagctggcatggcctcttagtgtccgttttaccttcagtaggatagctacagtgatagtcaccgtgtggtttgattatagcagcagttcatgtctactgagctctgatgttgttcacccagtccccaccctggccccatgaggggaaggtactaccacccctgttcacagatgagcaaagtgaagctcagagagatgaagtgacttgtccagggccgtacagttagatccaggatggggacctaggcagggtggcttcagaacacatgccaaacacctgacacgcagcgaggaatgtatcacgtgttcaatacataaatggtagtagcaatatgaaaagcggcagagggttagggcacagcctcccctcttccccccacctgtcctaagtatccccctggtacaggatccgggctatggagctcgcaggcgggtggaggcgagcgcagatccgccaatcctgggaaatgtgtaaaatcctgttcctgaaaaccggccgggttctcaaagtgtcccggctggcgtgttttgctagtcacgaaacatgatccatacgctgtattttaggactccccatctgtcggcatcggggagcgttttcccttgaggaagctcaaagcgtgtcagctcactgggaggggaggcagcagaagggtctgtgataacagagtggatccagagggctggggtgtgggagactcggggaagggtcctgcccagggtgtgccaggtgcctttccgcatgacctcacataatttttacacagatccccacgttttacttaagaatactgaggttcagggaggttagcttctttcttgtccaaggtttcaaggctgctaagaggctgagcagcagagattgaacttgggtttttagattgcccagtgttctctgccttcccccagtctgtcccttttgttcctgggctttaccacggtaggtggtgaaggacagggtgtgggaggccttgcctgggaatgggagggggtggggagggaaggcataaatgcctggctctcaggcccactttgcagagagcccacacctgccctggccccacccactgctctggtcactgctggtggtagaggaagagctaagagggctattgatccacccatctcctcccagggagggagggccacacattcagggctttctttttaaaaatgcattaacctgaccgtaagaaggccctggtttaaaaacaaataaaaataagaagtgaaacaagtgggcgtgggggcaggagtggagcaaaccctttggaaaatggaaagggcatttgaggagggcactttgcgaagtaccttccagttccagacctggatgcct

SEQ ID NO: 53932 - DNA, 1253 bp, Homo sapiens
tttcaccatgttggccaggctggtctcgaactcctgacctcaagtgatccacccgcgtcggcctcccaaagtgctggaattacaggcgtgagccaccgtgcccagcctaattttttgtattttggtagagacagggtttcaccgtgttgcccaggctggtctcaaactcctgagctcaggcaatctgcccgcctcagcctccaggattacaggtgtaagccaccgcgcccagcctcagtacagtaatcttctgttaggaatctgctctgtgccatggtcagggcttggtcaggcacagagactttgcttggcgtttggggtgagacgctagttacttctgtggaaaccaaggattttaaaggaaatcttaaaaggagatgttcatgcaagcacttcagagagggcctttgaaatgcggaaggcttttcttttctgccctattacttttgaggccagctggctcaggtgagattactcttccttctctctgaaggaaggtgtggggaaaggagctgggaccatgggcttagaggttcttccagtgccttggtcttttccctggatgggagggctgagactcgggtggtttttagagtgcggctcttggtgtcctctcttccaggctgccttggtagctgggaactgttttattggaagggcaaatattgcgtagtgtcaataaggatgttttttatgggggctcctgtgtttctgcagtggataagcatgaagaagccaagtgtaagttagtttctaacggctgggttcagccctttttcttcccttgcagaagtttcccatccgagcagagagaactgagactgagcctgctggccacgcacgagaactcttgtaactttctagtctccccgtgtatcaggagaatttccgcacagatgacaggagtggagtagaaagcatttgtagccattgtattggaggaaacaagtgtaatataaataggaagtctgaattatacgtctcctcagtgctgtgaggaaaaaccacacgcaccaaatgcaatttacagctgtacgcacgtggactaatgggcactgtctgccagcgacgcgctcaagcagtgggagaccttgttgtgttaatttctttctttttaatttgagacaatgtcttgctgtattgcctaggctggtctcgaactcctgagctgaagtgatcctcctgctttggcctcccaaagcattgggattacaagtgtgaaccacccaacctgagaacctgttctctgttgc

SEQ ID NO: 53933 - DNA, 1331 bp, Homo sapiens
tctctcctccatagtggctctttttgatgtgcccaacattatgctgggtgttttatatttgttaatcatgttccatcctcagaagagctttgttcagacaggtaattgtcatcttatctttgcagacgaggctgctgagaacacataatgggtaggtgcttacctgtttcttgtcgaatgggtgaagagcagcagcttgctggtcatcgggctgggtttttagcctggttctggctctcaacaagacactaggctacctctcccaggctttaccggcctaattttgtgacttgccttgagtgtaggtgagtgccagagcaaggagaggaggtgagatttagaggccactcacttccgcagccctgtgaactcacttccaaggccttggccttgctcttccaggcacattggtgcctccatctgagctgtatctatggtggggaagtgagtgggatgcatctgccccgctgccccatgaccacagaccctaagctggcacaggtgaggcagcgtgtagaaccttgcaccacatctatctgcccagccatctccttggccttccagtattgacttggccccagcaagtccccggtattggaaatccaaaacaaataaagcccaacccctggacggaagtgggctggtattctcactgtgggagcttgaagtgcggcagctgtgtgggtagccagtgctctgggtgtcacctgtttggcaggctgttggaggctgtcccaggcagacctcaggtgtgtgagggagaaagttagaagcatgtgactggctgagggggcaaggcaggaggatgtctacttcctgttgttgcttgtgtgtcctcttgacccgcaggctcctttttgaaccttttcctttttctctttctttctgcccactctctgctaatttccacctgtcctcacccgcccccccccccccgccccccatgccttctatttcccaaaccttgtgggttacctcagactttccttggcggttctcagttggcggactgaggggcagagtccgccacccgataaagatgactttgtgtctctgtccccagatggatatggggactctgacctctccggatggtgtttgcagaaggtcgtggttggttgcacggagtcatataatcctgaagtggcaacagtgcacacagtgaggaaaggggtgggtgattgggtggctgagagtgttgagagccttggagtgaatgatttccagacctgttagttttctagacgcagtaacaaagtaccacaaactaggtggctttaaacaacagaaacttagtctcaatgttctggaggctgaaagttcacgaggaa

SEQ ID NO: 53934 - DNA, 2287 bp, Homo sapiens
acccgatgacttgtagatatgtgggtagaatgctggagggagaagcggctcctggggcacccgtgcttggccccctttggatgtcggctccctttgcagctcctaagctctgtgtttggggtgggagcggctgcgaggcggtggggggcttgtttggcagacggcgcccatcagacaactggaaagtgccagtgcctgcgtggccatctgtccccgccgcctagctcccggccgccttctgcttcccacagaagggcccgcgctgttctgtagcacaagggcacggggcctggccgggaggggcaggcacagttccattttgccattgtttattcccatctcctttgcagctcctgcgcttgggagttgccaggtgcgtgaaaagtttgctgcgccgtggccgatcaggttgtttggtggggcgctggcgggaaggaaaggtggaagtgtgcggcgtttcctttgcaccgtgtctgtttgttcaactgtggactttcacccctccccctggctgctggttttcttttttcttgctttaatttgtaaaaacgcacctagagcaggccagctccccgggatttgggctcatctgcacgctaccctctccgagctagttaaagggttaaaaattatggggaagttcagccggcacttgcaagatatggttgccgtagcaacaggccttctaatctggtaggtgacctgagagactggagaagatgtaggggttggtttggcatttcattatttcatgaggctgcctctccagctggtttctctgctgagcttaaagcttgctgttcctgccactagaattactggcacattccaaaacaacagtgttgatggcacgagcactgcgttaatggggtctggccaggcagggtgggcggaggagagggagctgggttccaggagccctcacgtgggatcgtgtcccctcgcacaaagcgggaggtgtggatagagggatgtacgcaggggtttgccctcctgcatacaatagccgccttcttgaaacaccacctcacgtaaagagggactggctttttaggaggactttaagataactcctttagttttccaagaagcctccttaaatttgggaggcaggggagctctctgaatttgggggagaggctggacgcggtggctcaacacctgtaatcccagcacttcgggaggctgagccgggtggatcacttgaggccaggagttccagaccagcctggccaacatggtgaaaccctgtttctactaaaaatacaaaaattagtcacgcatggtggcacgtgcctgtactcccagctacttgggaagttgaggcgggagaatcgcttgaaccagaaggcagaggttacagtgagccaagattgtgccactgtactccagcctgggcgacagagtgagaccctgtctcaaaaaataaataagtaaaataaatttgggggagatctccctgtaatgtctgtggttggtgccctcctcttgtatttatctccagatagatattgtccagaaattcggcttagttgagcacagtagcctcatgtctgctgtgtgcccagcacagagaggaacaggacagagagtgcctggtctcattcattctctcatcagacgtttgttggacgccgcatgtggcaggcattgcagagaaggggcaggtcacaccgttgtcctggcctgagagcctcccattgtgtgagggaccttcaaagcaagagcaggagaggaggaggaaacaacccagcctcaccctccccttccttttagagggaccttgtgtcgagggcagtaagcagtcttctggccttggaaaggcatgaggcattcatgatttttcattcacctttctcttttctacccctttgctcttggctgtaattactgggaagtccacaggctgggtagatggcatgtacagatgatgtgttctgaagtccactcctccctaaggcaccgtgtcttaacacagagttgtgtgttacattaggcccaggttcacagggatctccgattggttggcttcctgggtttcttgttttttgaatttctttcccctggagaggttagtgttcctgggatttgtgagggagcggggagtgggctggagaggagcttagagtacttactgggacttcaggtggctcactccccctccccatctcggttgtaagctcctgggggagaggtctgtgtgttagaggcccagcaggtctttgtggaagttccttgctcccacgttagatgtgaacgccgagaaccacatgacaagagtggtagt

SEQ ID NO: 53935 - DNA, 1639 bp, Homo sapiens
tgaagcaatgctgtcaggtggcagctgagtgtctgtgccaggaggttatgcgggtgacaccaggaagagggcccaggcacacagagtcacgcgtgcacagcccgttggtttgctcttcatcattcccagccatggggaaattatataaagacattgcattttttacaaaaacatctccccctgcctcccaacaaaagaatagaaaaggaagaagattgtagaaaaagaggaggactaggcatagggtctgctggagtcagggaggctttgcccttgtcctggccctaccgttctccagctgtgtggccctgggttaattgcctggcccctggggcctcagtttatccattcataaaagaggggacagggtacaggtatacactagcaatacaggtgtgcagtgctcagccccatgcctgatgctcctgagccctcaggaaaggattgtgggtggaagagcgtcggaaacctgcagtgggtgggtttccagtcacgtggtcaccatttattgagtgtagcctagatcctgccacaggtatggcactagggggatgcagacttgagccaggattgtgttgattgttgtctggaacggcagacagactaattgacaaggtaggtggtggtcagtgctcatggggaacacaggcagagtttgaagggagcccagagaggggagtcgctggctgctttaggggctgggaaggcttcctggagggggtgttgctgctgggcctcaaggagtgagaaagaaagtggaggggaaggggcattccaggcaggtgcagatctttgtcttggaggattatggccagtgaacactgatagtgcctgacatttattgggctctcagtctgtgccagcccctgttctcagtgctttcaacatgaggtagtttaatcctccagaccaaccctgcaaggcaggtattaccccattttgcagttggagaactgagccacagagaagggaagtaatttgtcagggcttacacggcatgtgggactcagtctggaaacctttagagtcaggctcgggagaccaggcacatgcctagcctgccttgcctgacaggaacccaggtctggttgttggagatactcattaactagtggtttgggagagttggtgagtcccttccaactcagtttccttatctgtaaagtgagtataacccatgtccgtgaaaggatgaggttctcgggtggagttggctgtatgagatgtgctcagagagtgcctcatgttgtgggaggcccttccctcggttcctgtaccaggtggtggttgcagggtagaaaggtgtttaatcttaaggtagccactcccccacccctgcccgactgtcttcgtttttgaggccaggagcctgtcagctttggcaggattagataaaacgtgggcacggtgcccagtgcagcaccggcacatgcacagtccctgtacgcagttgtcatttttattattgtgtcttctctctcgatattgatgattgttaactgatggtcctctcatcagtcctatgggtgattttagcctcactttagaagaggcggtagcttgggggtggagagtgcatccagaggcaccatcattgcagacacactgaaacaccaaactgggtgtgtctctctcccat

SEQ ID NO: 53936 - DNA, 1154 bp, Homo sapiens
tagcgtcaagataaagtccagtccagaggaaggctctggctgtgggtcaccctttaaaggctgttactttacatagatggcttctatgtgaactctgaggtgctcgcccctcaccatcctttccaccaggcgactggaggcttctggagggggactggctgggggcgcctctcatgaatggtttttctggatcctgtctcctgggcccacaacttgacactcttgaagaagcactggagtcacagtcagctgctggtgtgaaagtggctggcagcaggagtatactgtagcagcttcaagcaggcctcagaatgtggatgaggtggaggtgcctgtggactggcctgtgggaaagagctcagagcagagtcctctggcagaccccagtctggctggtccaccacacatctttgctaaataaataaattgaatgcatgcatgcatgcatgcatgcagtgtgatcccccccaagtaggaatgaataaattcccctaggtggtttgtcatccacgtgtgggcttttctatctgatccttagtttccctgtcagtcccatggtggtgacttttcagcactgtcaggctgtctgatgatggctgttgtgctgcggagccctccaggctctgaccacggggtcctgcccaacacctggggacacagagacagaagcaggccctgtggacagctagtggagaagacgggtagcatgtgcagggccaggggcatatcctggcccagcctcctctactgccttttttggcttgccccaggataaggttacagattgggagccaagactcccacagtgacggggtggggtgttgtgcatcttcccacgggatgctctcgtcccctccccctctctggcccctggcctcctgcccacctgagtggtgcttgtgcttcggctgtatgaccttttcatgaaatgaaaactaaagaatgtttttaagcaagttcatgctctggaagtcagttagctcacgttgatagccctgatatctcacgttggattaggtggggtctgcattttacactctgtctgggttcttggggtcagggttgtgtgtggttagcatggatttgctttgcattctgtcccctgccaggtggggtgggggatggagggagaaagggatggggacagcttgttc

SEQ ID NO: 53937 - DNA, 3134 bp, Homo sapiens
ggaggaaccatggggaggggaaggaaaaaggagggggtgtgtgacttagcctgtccagaccacagagcgagtcaatccccctggaacagtggcgtccgctgctctgcggggagggtctgcccatgacctggtgtgggagccgaggccgccaccaacttgggcgcccagcccagaccctaggagagggaggagcctggagcagcctttccctggcgagattggccacattccattttcctctctgaccagagagccctctcacccctgggtgtacaggctctttccgctaacagaggccctcctccagccccattgtccccactgtgagaccaggagtgcccctttcccagccccaaaaaatgagtgcgctcccagtgtgaggcacagagtgaaagcctcgtgttttagaacggcgggtgggaaggacttgatgcgccgtgttcttgcaggaagggcagggacgataccgccttgtgctttgcctggcacatggtaggggcctaggtatttgggcgaatggagtgatgtccagagaaagcaggactttggctcgggcaaggagtgggtggcagtagggaggactgtggtctgtggaagggtcactgtggctcttggctttctcctactgtccctgccgatggtgacagccagccagcctcctggccgcaccattgtaccgcctctttcttggcttggtcctgggcgtggatgtcagatttgctttgttcatgtaaaatgtggtgggatcatgtctccctcaaatcaaattccaaccaaaatcaaaacaaaacaaatcaagcgtctcagtgaagacagccctgagggttctgttgtctcagcctgggagcctgggagcctggtcgacctcacctgcttttcagattttgccatgtttattgcagacgtccccgtcctggtgctggccactcaccttcattacaggttaattctcacaacctccaggtgtggtatgcagtggttttaaggaaagagaaaacagaaaaaggccacacaggtagggcttcacagcatctgagggcacccagggtggccgaggtgtgctgctggcgaaggccctcctgcagactagaaaacccgcatgtcgctcctgcgtagcaagtgtcatgtctgttactggctgacactttgagggtttttcttttctccaaataaataattctttgtctctcttcagggtggcagatcggggctggagggaggaagccatcaaaagcaacctggctgactatgaacaagtgggttggggcggggacctggccaggcggtggcggggccaggagagccagcgtcttgtgtctggcctgggtggggagggtgtgggagacacctgaagccacctcggaaaatgttcggtggggcatttcttgcccagagctgtgtgagtgaaatatttgactaaatggggagttccttcctcggaggaggataaagcgggctctcttttcctgtccctttgtctcttgtcccctttgtcccagccctccagctctgcggcctcccctcccccagcggttccttcctttgtgcccgccggccactcaccagtgaaacttaactcagccccgggcctcactcccctcgaaacaacagaaggagctagtaggggcaggcctggctgtcagcgccttggactaaaaggaaccaaaccgccgtcccagcccccaatggtggcagttaattttgaagtttggcgttgactgttggcagtcccttccgagggagcagctttggagggggtgttgctgccccagccagagggattgggggctgtggctgaggccaggagacctggccttacacccctttccctggtaaagggccctgggttctccaccacagcccctctttgtcctgctctgagtggtttggagttctttgtgcagtggcccagaaatatggacgcgcaaactgtaacagagccccacccacacctctgggtagcgaagcacccatatttgttacatgattgtcttaatcctctttaagcaaggattagcgataactagggggttaaacaaaaatcagaaggaaaaactgtaagttggggaaaatctatccatgaaagaaagttgatgagaatatgggaaagttgggctggattcagttcatttgttataaaaatgggaactctggcaccttgtttctaagctgatggccagaggtccgagggcatctgctttttggggttgtgtggcctgcacgtcaggagagtgcaggggaccggggcctgtagaggttccgtagacttggtgtggatttgtgctgtgttgaggccgagcagaattgtggtgaatcggcacggcttcattattgctggaagtatttttccttacttaaaatatctaatttatttacccatacatgtttaaaataatatagcagataacatgtaaatttagagatactatgttccaccctaaatttacatgatatattttattctaggtcttcatatgcgtttttgttatcagtgtcttaaatgctgtcatcaaagccagtttttatcttctaacccacctttctaggacgtatcaccaacactccaagttgtttgacatatattatttttcagctttgtgtatgatgcttcctctgggaattttgtcccaagccacaggaatccattagaacatttaaacagtggctttgtaaaaatgtgtcttataggtgtctgtcgctggaaatgctccagcagatctgagatccctgctatgatgctggggggatgggtagggaggcaccacccttcctgagtgttaagagcctggctgctggcgtcctacctcaagccacctgtgtgaccctgctcttttctgcaacctcagtatcctcatctagaagaagcagacaacaatgcctagagctcacttctcaggattcagtgtgtgtgcccagtggcctgtatacactcagcactcagcacactgaggttgggctgttggagcactcctgcccttcgggtttacggagtaaccttgagggcttatcaggcagggcctggaggcagaccttgtggggaaagggaggagcaccgtgggtttcagttttgggttttggagtggggaaaccattccaggggaaaggggtatgctttcagtaatggcgatgaggcc

SEQ ID NO: 53938 - DNA, 2182 bp, Homo sapiens
ggggagcaggggtgaggacaaagacagctaagggagccaaatgcttttaggttaggagtgtttatatgtccccagcacaagccatgtccttgagaagggccagggatgtgtttcatcctgctccctgtccccaaacgatctttctcttcctaagtgccagcttccctagtccatctggggagggactgcccactgcctgccatcaggggctgtgctcaggcctcatctagggatctgcgctcaggatgacttcctacttccttcctggcctgcggtttgctcttttcttttggttaggaagtatgtccttccctgtccctgcccaggcctactctggagacgtggacaggcagctggggccaccattagccagagaggagacagggtgtgtcgacaactggaggcccatgtgagctgttcaggaattagaagctactgctcttggaaaactgctgcagaaatggaaaggtggtcaatggggagaggtgagaaggtgatgggccttgtatgttggaaaaaaaaaatttagagggacttaacggaatatttctgtgttttgaaataaaaattatttggggacctaacattaaaaagacatctgtgtatttttctgttagggtggaatgtgaagcctgagattcctgggctgtagttagagaagggccagctctctgccttggggcctttgcacaggctgttctcccagcttggagcacttgctgccattctttctcctctcagggaaccctgtttatttttcatgtctcagtttagacatcacataattctaagatgcttctaataatctttgagcctctgggggcagagcccatggtgggtcttgtaaactgaggccctgacgcttggtggatccccactcaacatttgttggctgaaagagtgatcagggaggatcaggaggctgcccacctcccagggcccctctgtgcagtctgtgcatttgaatggttccctgaagtcttaacgcccttagaacaagtccaagttcgtctgctcagttcgagccctggccttggtgtttgcctttcttttctgaagtaggtctttgacacatcgatggagcttcagatgtgaagtgtcctcagaggtgtgtgggaaaatgctctctgttcagttaacccagccttttgacaacttctgaggcctctcgggctagaagccccgtgactgttctcctgcccagttcttgcttttttttttttttttttttgagatggagtcttgcactgttgcccaggctggagtgcagtggcacgatctctgctcactgcaagctccgcctcctgggttcatgccattctcctgcctcagcctcccaagtagctgggactacaggcgcctgccaccatgcccggctaattttttgtacttttagtagagatggggttttgctgtgttagctgggatggtctcgatctcctgacctcgtgatccgcccgcctcggcctcccaaagtgctgggattacaggcgtgagccaccgtgcccggccggttcttgctttttataaagggggctggggagtgggtggacagggatgtgatcctggaatccagaactccatcactcagcctgtgtcttagtggggtgttaatggaggatgatggaaaatagcccacttctgatttctctctctccctcatagctctgtagaaatattttattattgaacaccctgtaattcagggttggtggcgattttatcaggtcatacaagtctacagttgacctttgcattatctaagaagacttgtgtttgcttagccaaggataaacaagattccagtgtgggtggcttagggcttggagctgtggtctctgtgtgcagggttgcttctaattgtgaatggctcttatctgttcttcagggagggtctagccacactgtagtacagggacttctttatttcttttttctttctttttttttttccttttagagacggagtctcgctctgtcacccaggctggagtgcagtggtgcgatcttggctcactacaacctccgcctgccgggttcaagaaattctcctgcctcagcctcccgagtagctgggactacaggctcacgccaccacgcccggctaattttttttttgtattctaatagagatggggttttactgtgttgcccaggccggtctcaaactcctgagctcaga

SEQ ID NO: 53939 - DNA, 3200 bp, Homo sapiens
ccctgtgagttaagttctgttattcctattttgtagagaaggaaatgaggcacttagagggattcagtcatgggcaaggtagacttaataggtttgtcttcttaatttaaaaaaaaaaaatttttttttttgagacagggtcttgctgtgttgcccaggctggagtgcagtagcatgatctcggctcactgcagcctcagcttccccaggctcaggtgattctcctggctcagccttcccaagtaactgggactacaggcatgtgccaccatgcccagctaacttttctgtttttttatttttttatttttttttggtagagacagggtttgccatgttgcccaggctggtctcaaactcctggcctcaagcagtctcctgcctcggcctcccaaagtgctgggattacaggtgtaagccactgtgcctggcccagatttggcatcttttctgtctcattaattgatgaccccctgcccagcctggagtggtttgatgctgaggctggcaggaccaggtgggtcctgacggagatgagccagctgaagcctggcctgggctcatagggttcctgactggtgcggtgcttctctgtgggtagagggattgggctggtttttaatgacctcgtccaggaagaaaacatcttggctttgggacctatgtgacttaaagaaaaggtttgctatctcttcactcaaaaggctcccttttattaaatctcctaccaccccctgtggactccaggcttgaaaatattttatttacaaagagattgcatgcattgagtcaccattaattttaatgaagaaatgtggaaaatgagaactatatagctgctgatgagactttctcatcagctcaggggaaccaacgtgagcacaccaggttggtagaacagaattctagtcaacagaaaaacattggaaatttcagttccatttcaattgaggcagacccgattcttctagaacttaaacaatattagcaatgcctcaagagcccccagtgaagttttccagaaacctggttagaatccttaggcaggacccacctagcagtggtgccttctcactttgtcctggcatggccagggttgacctctgtagagggacatccctcgtgtttcccccaggactgaggaaggttagaatgcagagttctctccggagatggctgagctctctttaggcccatccacccctgctctcctggctgtgcatgcaaggcttctctgttagggcagtgcagcttggagggtagacacactgagggtgtaagagcctgtgtgaacagctcccatctgcagagcctcctctccttacagatatatcccaaggcaggggtcccatattccctgcggttctgagctggcattacctgcagcagatggatcactggacagcgagtccggaaatcatccttctccaccaagctttcccacttaatagcttggtaacctttgacagatgatttctttctttcctaatttgtagcatggggacagtgagggatacaacagcagtttctgaaacagcagtgaccaccatttactgcatttaccccaggccaggcactgtgtgtgggcatggcatttaatcccggtaacactctataagataggggctgttatgacctcatttctccgatgaggaagccagggctcagagaagtgaaggcatgagcccgttgttatgaagtcattagatagtagagctgggatttgaacccagagccccactctacctttgagccatgctgctactttgacaaacttttggatgactttgggagatggggaccttggggaaaaatgcactttgaaagaattggatcatttcagtagaaacctgtaaacgtgtgtcttaaaaaaaaatgtcagtgacagtttgcttctcggtgagatgaatgcagataaacctattttgactgttaacttattttgttgcttaaaagccagtgacatgtagtgttgaatttatttttcttcacaacatttaagtgtttgccacttcttgagtgacgtgtgtgaatttgggaattgcctgtactttgggaatggaggccgttgcttgtatgtaaggcttttgccttaagagggacttttgggaaggcttgttctggctcggggccttgctaagaagcgactcgagtgcagcaagggtacctgtgtctgaggatattgatagagctgaagctcactctgaagttggggtcatggtggagagccgatcgcaggagtctttgtgactggaagcctaaatatttattctgttctgtccctaatgaaaacaaattgtcaacagttgttcggtaactgactaaattaaaatctgtaattagtcaattagattaaagagttggcacaacctgattgtatcatgctggttaggttattaagagaaagggtgtgatttttaattactgaatgctaattttgacagtttcaaatagaaacagacgtgtttttcccctctttccctaattctgaatggtttggaaagtaaagacactcaatgtgtaaatgatgtttttttgaagaaaaataatccgagaaggcccttctgtagagtaggagggatttcagcaaagagcccacgttggatttagttgaaagggttagttggaaatccttcctttcttgaagaggcatggcttggtttttggcagcttcgtttttgctgtcaaggagaggttggatttcagctttaagcagtcgaatcattgagttctttttaagggtctccccgattctctcaacttcaggcttttttctggccagtgccctggaaactataagcaatagtaaacgatccagggaggaatcccctgcgaaggaagcccagtgggcgctttgggacactagcacgtgtgagtaatcatacccagtgttgtatgaagtgtcttctcatacactggcatcccaggaagacagacggatggaacggatgttcttacttcatggaataaaagttttgctgactgcctgaggaaagctgagagcagggaatgaggtgccccggtgtggagggtcagggggagaatgtactcggggtgggtgctgacaggcaagaaggaggggactcctgttgagtagtaagtagctggggatgacaggagagaggcctcttgcttgggaggaagatgggatcggaaagtagagccagttcaactgggtgaggtggtgtgcgcctatagtc

SEQ ID NO: 53940 - DNA, 1054 bp, Homo sapiens
gcctgtctgtgattgaggtgggtgggtggagggggttccttgccccccgtggagcttgcgtctgaacagggcttaggcagtggcagtagtgagaataggtcgtaaggcatcctgtctgaccgaggttgacccagcctcccaaattccctgtcccctcctggtgacagctgtttgcacagcttccagggcaggttttgtgtcccctgctctttgtgtgtttgggtgaagcgcctgacatttcacttctgtttcacagtcctctgaccttaagaagcacaactgctccctggggccgctgcctgaggttttcctctgatccttctttcccagtcacaaaaggctgtttgagagaggaggcagtggagaggggggagcaggcctctcccacattctgggatactgctgcagcgctttgagctctgagaggggcagagcgtagctttatagaccggatggaaatggcagatggttggtgggcagttattgcccgctgcctgccgggctttgccattagatgcagtgttgtgggctgtacatgggatttggacttggatgaccaaggtacaagatctgattctttcagatggccttgggtaagttgtctggtgtctgcaaaatgataggaaacagtggccggcttttttctgcccctccagctttttggaagttgggtgagagcacgtgaaaatgctttgtgagttgtggtcccctttgagaaggctgtttcagatgtgcaagaagaaggagacactcagtttccagatggggacactgaggctggtgacacagcaagcctggggccaccactgacttgagaaaacctccacctaagaggctggcgcccgtgtctgtgtctgtgccatcctttaggaattttgcagctttctttgggagaggctgagagcttcctgtggcctttggccatccagccggtgctgagggggcagatggcccagtgggcaggcctggtgccgggcgtgtgcgcactgccggtctctgctcgccggcttttagacggcttccagtagaaaatgttctcctctctctggaggct

SEQ ID NO: 53941 - DNA, 1309 bp, Homo sapiens
aggggccagcagaatgacgttggggtgagaggtgtgtgcctgtgaagcgtgaaccatcatgggctagcttccctgttgatcagctctctggatccctgggtttcaggtacccctgggggattgtgggggcaagtcacattatgttctccctgccccagtgattggaggagcaagtcacatatgccgcttccaaaccagccctggtgcttgtgaggatgagaaaacagtggacgcacagatgcttctggcctgtgcctggcctgaagttgccccatcactgtccattttcttctctcctagtgacttctcattttctaggaatctggaacaggtgctttctccagccactttggcctcttcaccatgattcccgcttggtaccataccacctgagagggttttttcctcccctgccaattattcttctgtagagccaatgctagcctggaatgtggctgcctccaccaggcctgccaggacgactcctatgggaagacatccctcttctgttttttccccaggaactaactctgtaactctcctagtcgtttgttaccagctgcctggaaggagagttatttcagttaaggttgtgtctcttccttcccctttctggaatgaaagctccttgaggggaggaactttacttgccctttctgccaccccattcctggggcctattgcaggtcttgaatgcattctggggtctgtgagcaaggctctgagccttgagaagtgagaaggatttgattcctgcccaggcatcaactgtgctaagtactcgttttaatgaagatggacaaggggcacgtggtgaagcactgtttgtaaactgtgagctgtgacccattaatacatcatgaaaccaacttagtgggtcatgactggtaattaccaaaaaagaaacaaccgtattacacagagtaaacacaaatattgtttctggaaatgtctgttttcagtgatttatgtgtgcatataaaagtatgtgtgccctgggtttgtgttgtagtatttgccttttttgggggctcaacgcaaagtcagaaggccactagcccagagacagctgagactgaatcttagttcctacaagttaagtgacttgggtcaagagacaagcaattgctgagcctcagtttccagatctgtactagaaggaaatgatccataccttagagagttctcgggaaattgtttccccaccacatgttgtgctttcagagtggtgcctggcgggcacttggtaccgttgtctctgtggtttgctgccatagtcttagtgcattgaacacacagaaaatcccaa

SEQ ID NO: 53942 - DNA, 3142 bp, Homo sapiens
tagagtgtaaataagtgtctgttgactgaccttctgttttctatcaaggagatccaaagattctcagggtgtggggagtttgtgcagcctggataccagacccatcttcggtgggtaggaagtgcttacaggggcaacgggagcattgggggaactcacatctggagtggacttttctgataaattggtttgcattaaatcagaagaggtcccccgggtcatgggaggagggtcacgggaggagggtcacggtcccattgtaatttccttgctgttaccctcaggccagagcagtgcatctcagagtgttgacaaaagcccatgggatcccattggggcatctctttgggttctcttagacactgttgtctgggtcctgaccttttgtagagtggacactttcagctgcatgagtgtctctaactgtgtgcccagaggtgtcctggccaccttctccgctttgactttctccagggtggacctgcagggaagtgtctttggtgccttctcaaacaacaagcaatcctttttctccatgtggtagctaattttgtgttttccttttgatgtcaagaaatgagtggaatttggaaggccaagaaatgagtggcctttgagccaaagagactagagaatagcaatggattcttacactacacatacctgctgtacttttttataacatgttttcatgtgtgtgattgtggctgggctttgcagctgcctcgtcggttgggttttgttacaaaatctcactcccattttacagatgaggaaactgaaccctagagtttaggtggcttgtccaagggcaggcagccaggtgttggcagagctgagactagaaatcctctatctttctagttctgcctctcagcttttattgacacttacttgataaagaatccctgcaaaacagaggggaggtatttgcagttgacctgaagcatacctggcaccgggtatgctggttggtgccccccgacatgttcactgaagaaatgaacttaacagaattgaacggaagcccccgcaaggtgaattgtggagtcactggcagaggcgagacctgaactctgggaagggggtttgttgtggtgcaacggctcttaacttttggcagggaaaatgtgataaaagctatggacagtatttccagaaagccctcataaaggggactttgtgcatggtttcaggaggctcatggacagctgctccaaccccaggcctctctgattcccagtgaagaacttggggagtgaaatggacatggagttccatgaccttgatgaattttccttgcttgcctcagtttcctttctctgaagacctgagttccctttcatcttggctgttgtgtgctccacctcagtgaggctggctccctggccctgtcctcccactccagcaagactctgctctcccaccccaacaagactgctgactcctccctcagcagaggggagactttgccttgaggagggttggttaaagtaggaaagtgccccagagtcatgggcgtgggcaggcactgaggtatttgtggctgtgtggcaggggtccagcgtccttggtgggtttgaaatagcaaagtgatatttgagagggctctccttggatgtgctgagctgaggttcctgccaggcagggagtgtccatgcctgccagaaccctttcgggggagggggacaagagggtggcagtgcaggctggaataggtggagaaggcctgcagctgggctgcaaagagctgggggagtgtgctgccctgtgataagccaggctagctatctgcccagaggtcctggcaagttcacggcgttgcctttggctctgacccttggcacccttgtgtggcagattaaaaacacaaaacatacacacttctttttcccctctcccccattccccttggagcataggctttgggttgcagcccctctttaagctcccgccctgttttctgcaattcctcttaaccccagaggctgccagactcctccatcggtagctaattaaacattaaatgagaaactggagttgcattttgccagcacccgagcagtgcagccaccttaatgggtttcaagtggcggcaagaccccaaattgcaaatccttgccctttatttcaaggcgggaggtggggcggggggagtggtggggacccaaacaaaatttttggcagtggtcacttcatttgaactcccagagcagcagtgtgcaccagtctttcgcataatgccatctttgttagctaagcatttgcaaacttggaccaagagttagctctgtgccagccagcactcagagggagctgggagatacccagctctccccacagttccttaggtcgtctctattttgtgagggaggcagggtctcgagtggggaaccctagtcaagggtgcctggcccccttcccatgacttccctgcctctgtatgtgagtgtgtgtgtgtttaagccttaacagggagaagtggcagggaggtgtgtgtacttggggatctgtcagccaagataacagaaatgtggcactagctgtagcctttataatagtgtctgagggtttagagtatttagaaaaattaatcttttttagcttggtaataattctgaccacggcacaagtgcattagactattcacataaacttctttaatacatgttgctgggagctcttagagcaaatagacaatcatgactgtttgtttttgattcgctggggtaatggggttgttttttttttttttttttttttttttctgagatggagtctcactctgtcacccaggctggagtgccatggcgcgatcttggctcactgcagcctccgcctcccgggttcaagtgattctcctgcctcagcctcctgagtagctgggattacaggcgcgtgccaccacacccagctaattttttgtatttttagtagagacagggtttcgccatcttggccaggctggtctcgaactcctgacattgtgatctgactgcctcagcctcccaaagtgctgggattgcaggcgtgagccaccgcgcctggccggtaacggggttttttgtagccttggcaaggtgagttttagcagtgtttgtgtctgtgttgtgtatttctttccctgggttttgaatcctct

SEQ ID NO: 53943 - DNA, 2133 bp, Homo sapiens
tttcttaagatttatgaaattattacgagagggttgtctgccatctattcatctcccatagcagtccccttcaggaaaaacaaacatgggtttcaaacctgggttgcagtcacacttgatgatctgatgaaatgggttaggatctgtcttggggagatggaagaggacgtgtctgaaggtcttccatagcctctgttcagttcttcttgctagccctgtagacagttaagcatgtccatatagcaggtgatctaatggtcttgctcttctgtgtgcagtgggtaggaatgatcctgggaaaccatgggtccttgggagttggtttcttgaacgtcattgggtcccacctgcttggcccagccatctgagttccctgcatgtggaggtggaaattggctaagagaccagacccatctggttatttcacaagtggtcaaatcccatgatcaccaatgtcttcatggtgaaaatttctcctgtaatgtgaggagttagagactcaggtggtggcctactggttttgagaatattcaatgtgatgcagttttgttgtgaatgaaaagttaatgctcttggaatgtaacgctgaggaaattgagcagttcttgttccctcttcagggctgaaaaagagaagctgatgaatggtacttctggtctggtaaacttgcatggtagtgaaagggagaggtcaccaccggttcacttatgatgtggttcttctgggaaaatcccatggtgatgataaggtttcctgacctggatgttcagggaggctaagaggtacacagccatataaaaatagttgatgaatttgacctttctacctagtaaaaatcttgcatggtttttttcctaaacctgtgaacagccaacactgttgctagtttttgactgctatgtaaatagtttcattttagaatctggggatgggtgggtgggtctttcactctcttgatgtagcatatctatgctattttttgcctgtacctttcagagaagttaatgattttaaccaagttcggtgctctacaaatttgagagtctttggcaacttgtggtgtcgtcttccatcctgaaacaatatggcggccatgaaagtttgcacatgggtttgctttcagtaatttgctgaggaatggcagtagaaatgtatagagatcactgaggttggcgttgacatttagaagatgctactaagagatgaggtcaccctaattgaggcctacacttcatatgtgtggggtgtaaaaacctttttttttgaattgggctccacctggtatcatgtggcctgagagtcagagcctgtgggaggagggatggagtgatgaatggggattatgaaggcgttaaggggtagcattgagttggaggggtgacagcagagaagcaagtggaaaactaagaagaacttcagaaaattaggaaaaggagcccacttttctttttgtctttctccagtcttcatctagtctctcccttcttgtggctacagtctagttaaccttcattccttcttgctagaatgattgcagtagcttcttgctgactccttcctcttgcctggaatgcattcctctcttacccattcaaatcctattcatcttttaagacctccttcttggaggacttatgagatagttttctgcattctgtgatcacgccttcatctccatatctataaaaaccacctatacaaagcctctgttggcagctttccgtgtgccaggccactctgctaactgctgtaggttcagtccctcatatcctgccagagacccgatgagagaaggcttgttgttcactccattttgcagatgaagcagctgaggcacacagtggttaattcccagctgggaagtggtagttagaatgcacacacatggagtcatgactgactctggaatgggtgtttctaacaccacctggcttggccctgcaggcccatggcaagtaccatttgttggcactattccacctaacttctcacttagggttgtctttcgggcgacagcctattaattttttccatggtggagaccgtgaactattcatctctgtagctcccacagtaccttccatgtagcaggcacacgtgctgattgtatgaaggagttaggtaagaatgagt

SEQ ID NO: 53944 - DNA, 1012 bp, Homo sapiens
gggagggagggaaggaaagaaggaagggaggaaggaaggaaggacagagggagggagggagggaagaaaggaaggaaggaaggagggagggatggagggagggaggaaggaagggagggagggagggagggaaggaaatctttccttgctctggagctccatgggagtcagctgaagtgtttcctgtgactgcagcacagctcagcttctccctctaccccaccctgcttccctactacctcacatgagtccagcccagaagtgctccccaataagcttcctgcttgcaaatctcctgacccaagccatctcctcatctcagctccactgtcatcctctctgtccacttacaatgttgtcctatcactctatcaccctatcctattttatctttacagccttttgaaactacctctttatttgtgtctgttccttcatcttttgtctctctctctctctccccctggaacacgagttctatgagagctgctgtcccgtcctctgctgtgtccccagtgccaatgacagtgctggtgtagagttggtgctcactaaatatttgtgaactgaacaaatgtgtttgaaggagcgagtgggtgaaggaatggatgactgtgtgagtgatgtctgcctttcctgctctcccctgccccgccccaccctgctgagcccctgagccaggcgttggccccctcccccatgtgaccccggctgagttggggcctcctgggaggatggagcctgcagccttcttggctgcttgccctgtattgatcaaagctgggaggctgccggctgaggtctgtcccagcccctgggggtgggggagtagagagggcttctggctgagatttgtgcagggcttgcctggggcatactagtgccactagagatccatctgctttaggggctgacagcacctcttctccacacctctcaagggagtccacacttgccccaggaggatggctgggcaggagtatgcaggagacagaggtagggctgcaactgg

SEQ ID NO: 53945 - DNA, 1021 bp, Homo sapiens
caggctctgttctctttccctctccgtgtcaccctccctctccacacgcacacaacacacacacacacactcccaggctctgttctctttccctctccctgtcaccctctctttccacatgcacacaacacgcgcacacacacacacacacacacacacactctctcaggctctgttctcttttcctctccctctctccacacaggatatacgcactcagccacacacacagaagcatccacacttttctccctctccctctccctctctccccaaggtctagttttgaaaaatataggcaaggggaggaagagcaggggcaaggagttctgacctagaaaatgggccctgcctccttctgtccctcccaggcccgggaaagggggcttatttttccatttggtttcactgccctgggtcaaggctgcaggaagaaatggagccccccatgcagaaggtgggggtcacgctcctggagagggagggaaggggctgctgggctatgggcctagcctgttggacacaaacccaggaatcagggaggagcctcccccttccttccctactcatgcaacatggggcttgcttctagcacagaggaggaagcaggtttagggacaaagtaaccagggtagcttagccacagagggatggaccagttgaccttttgacttgacttatgatgaaggggcccttgacccttcttaagtcatcttacacctagagtcaaatcctggactagaattcttcccaaacccctgggataagtccttccttctttttttatttttatcttttagagacagggtctcgctatgttgtccgggctggccttgaactcctgggcttaagcagcagtctccctgcctcagcctcctgagtagctggtactacaggtacagcaccaccaaacctagctcctcccttctttttaacgaacattcttgctgtggttccctgtaggggctgggagtgtactctctgtgtgactctcagcctcctcatttcaatttcctctgac

SEQ ID NO: 53946 - DNA, 1068 bp, Homo sapiens
tcattggccacatgtggcaagtggttgccatactggatagtgcagctctagaaaatgggctcttcttggtcagggactctatttttcatctctctctttagtgactagaagggtgtcctaggtagaggacacagcatttgcagaaacagaggcatgaaagaacagagaatattcagggaacaacacgctgtttggtgtggccggcgtgtaaggtaaatcggtggggagaagtgagctgtggggctgcatatgtgcctggagccaggtgaagaaaggccaaaggaatttggacttcggttatgtgggcaactcaggtcatcgtttatttataagcagaggcatgttgcattcaggttaaggcttcagaaagagacttctggtaggcagcctggagggtaatttggaagggatagtgaggaggcaaggggaccggctagaaagctgatgtaacaatatacgtaggtgaggagtgatgaggcagcggggaatgcctggagagggagtaagaaggcagaacctcaggacttggagactggctgcctggaggtggagtgggaagtcaagaataactcccaagtttctagctcgtggtgccagttttccgagccaggacacataggaggaaggggaggaggagcaggtctgatgaggacatgaagagttccatcttggtaaatgccgactttgagatattagcaagacatcttggtggataccagcagcagtggttaggatagactgtgctagagttcatagacggtaagggagctctctgtcacttgtggtattcaagcagtggctggacacacactagcctgggatgttgtagagggcctttgtgtatctcaggtgagctgggccccgtgatttctcagcctggacagtttctgaccctaaggttttgctgcatgtgtgtgtgggatgctctctatcagagcttgagcatgtctataatttggagacctctgtggtctagaggtggtttgtttttttggaccttagctcacaactggaacaggcatgacggctgcacgggggcagaggctccacctcaaccggccacaaggc

SEQ ID NO: 53947 - DNA, 1034 bp, Homo sapiens
tctctcttttttttttttttgacagagtctggctctgtcgcccaggctggagtgcaatggcacagtctctgctcactgcaagctccgcctcccgggttcaagcgattctcctgcctcagcctcccaagtagctgggattacaggtgcccccaccacgcccagctaatttttttttttttttttttttttgtatttttagtagagacagggtttcgccatgttggccaggctggtctacaacttctgacctcaggtgatccccctgcctcagcctcccaaagtgctgggattataggtgtgagccactgcacccgcctggcaaccacaatgtttcaaaacaaagctcacttctgatcccttcccactccctcatctgcatgtactaaagggactgaggagcccccaccccaccacaccccacctcaccatctctgtgtccattcctccctggccacactaactctgcttaacgttgctggtattactgcacctctctctgccctctggtctctttgctttttaacactcagctctgttctgtcacttctttggccagaaagcttcaggtcccccactccccaaattgtctgagggataaaaagccccagcttctgcccctcctaggcctgggtcccaagacctagcctattcctaacccctttatgttttccacactccattcattcaatgtgcaaatatttgttgagcccttactatgtgccaggaattatgttgggcattcaggagattgttgatgcacaaatgcacagaaaccaagtgtgttttgagagctcaggggttcaggggctctgaggaggggcaccgaattgagagagggactgggctgccgccagctctcttctcactggtttcctgtttaccattagcggctgcccatccctccttagcgcacaaatgcccaagtgaaccttggtatgttttcagacccgcagctcaatcacaagcatgaagcaggcgaattgaaatccatctttagctgccttgaaaacctgcacaggaccccctttagattc

SEQ ID NO: 53948 - DNA, 1001 bp, Homo sapiens
agggcaccggcacttagttggccctcagtcaacagtgtgtgttattggttcatcgtggagatgaaggtaccgaggctccgaggagaccccggttctaggtcgcaatctagcaagtggcaatgccaggattcaaacccctggcgtcctggggctcccaaggcttctctccatacgggcaactcggctcggatcgaggaggtgggggacgaaggcggcggcgggatgggggtgcaaagcgtggctccgcagggcaagagggaggcaggcgttctggacctgcacccccaaccccgcccccgcccctgccataggcccagtgcgggtgggcgccgcggccccgcctcgccgagcggcggcggctgccgggctccgggagcgcttgatttattaagctaatgttctagcacattttctccatcccgtaatgagctgtttccaccagggggtgtctgcagagcgactgcggcttccggctgctccaggagggagcagggtcggcgggcgggcgtctgcgggaggctgggggcgcctggtcgcccggggagggttggggttgcaaggtctgggtagaaaaatcacccctggtggggagcttgtgaggggaggcgggaggcctgtccctccgcgctacagcctaggagcgaaccccacacttacccctgtgccatcctgccagcttcctaccaacctcagggggcctgagagggaccccgccggcatcctggcctggtcctttccgccccctcctcccctgctccccgatccctcagcttgtgaggatgccgagctcagcctgcctgccgcctgcttgttatctccccagagctggcatttctgtggcttcaggcgtcagttaggtcctttgcagccagacagatctaggttccaatccgagcccagccacctgtgagctccgggaaatctctgggcctcagtttcccatttggtggggttgttgtggggatctgtgataatgtatgtggtgttctgcacagtgataa

SEQ ID NO: 53949 - DNA, 1047 bp, Homo sapiens
cttggcctcccaaagtgctgggattacaggtgagagccactgtgcccggcctgtgttttctagtctttattgctgcgttttctttagcacgtggctgacacctagaaggtgctcagcaaggggtagctgtcactgcttttctcaatggagaagataccgaccgtcccactgaccccatcccccaggaaggacagtaggttgactatgggcctcttgggattcataccccattacacagtgccaaggtccactcaccctacccaggaactgtcactctatggtatagggcagggtggttgagtgccttgcccaagcacccacgatataagcggcagagcaagactgaaacactgtctgctcaactgactcccaaaccagtgctcccccgactcctcactggaggccactgagggagactcctggccttcagcaggccctcaggacaaaagtgacttctctcagcttcttccttgcagagggctaaccagtcttggcccctggatgaatatggacttttgtggaatcttttcaggaagggctaagattggagtcagatgggcttgcagggacctgcccgggaccccactgtgtacccatgtctgttcttcggtttttgttcctcactgaacttccctgactcctttcccacaagagaactgagccacccaaaagcattaatgagcaagtgggatgaactgaagattaaagcaaagatggacaaggccatttctgttcatgccctacagcaaagaacctaaaaagagccacctttgtttttttgttctcccattcctctgctcagctgcctgtcctggggtggctcccccgacttcacacaccactccctgccttgctgggccctttctctcctgcctccctcaccagcctttggtccctccttgtggcttccctctgcatggctggtgcctttaggcatttagtcctctcttagccacctcctccgggaggccttccctgaccgcctgatccagaaaagcctccagccagcctccatcacattaccagcatctgctgtctttgtggcat

SEQ ID NO: 53950 - DNA, 1058 bp, Homo sapiens
atctcaaatgatctacccgccttggcctcccaaagggctgggattacaggggtgagccaccacgcctggctcacacctcttttttcttttttttttttttttttgttgttggggggtgcagagtcttgctctgtcgcccaggctggagcgcagtggcgtgatctcagctcactgcaacatctgccttccaggttcaagcgattcttatgcctcatcctcctgagtagctgggcctacaggtgcgtaccaccatgcctggctaatttttgtatttttggtagagatggggtttcaccttgttggccaggctggtctcaaactcctgacctcaagtgatccaccctcactgtaatcccaaagtgctgggattacagacgtgagccaccacacccagcctcctcttttatgtttctaaatggaaatgtcatccttgttgattatacataattattaagaaagaactccagacactatgaaggaagcataagtcctctatgatcccattccctagccataaccatcgttgaaagttttgttaatgtcccagttccaagggttctcagaattaccatccagattcatgccaagatccctgctgttctgtaggctatctcagtaacctcgcaagaaatctccctgtttcgttaaaaatagttgatgcttttccttccaggtgtggtcaaactcaagaaataggagattttcccctccacctgcaatctacccacttctaccctacccacctgaggctggttgcataggtcgtagcctgccattttcattcgagataagctcaggaacaagctgtaatgtcccagcttctgctggttcttggtgttgccaaaagtggaggctggacaagaaggctctgtttctcgaggttcctggcttgatttcttgggtggtggggaggaaggagaaagatctaaactgcataaagaagcagcaggaaggccgagtgcagtggctcacgcctgtaatcccagccctttgggaggccaaggtgggcagatcatgaggtcaggagctcgagatcatcctggccaacagggtgaaac

SEQ ID NO: 53951 - DNA, 2080 bp, Homo sapiens
cttcatttggagtcaggcctggctgttgctcaggtgaccagcttgtgtctctgggagggcgctgctttccccggccacccggcgcgatgatccagaatgtcggaaatcacctgcgacgggtatggagggtgggctggggcagcgggagggctctggaagctgggcacccagaaagagattgatgtttccattttaactcagacgctctgcatctcctcacactctccacgggccattttctagctctctttggaaggagaaatcgcagaacccctgggctggtttattatcagcagcaatctccaaacaagccccaggggctgtcagatcccccacgggctggctgtgtagagtggaatcaccttcagcaagtgtcggcctctggaattctattcggtgggtgtatgtttctccctgcagagttctgtgtatgtttctgggggatgtctgagctccatggccttgtggtgcttcatgctcagagctcaggaccccaaagccacaaagctgatgggagtgacagggtgtgaggtatgggtgtgagtgagtatgtgtggtggggtgaggtcggcgttcttggggagcagaacctcttggggagagcaagcacaggatcacatgacggctgcggaaagctgtcctgcaaggtgaccttgaagagaacttttccctgcgctttggagctgagattagttgctgaggcacacggcagacccaagtgcccagcagcgcctggcagtggatggagtgtatggagatgggctcaggacagactggcagaggttgtaagactggcagaggctgacctctgaggatattttcaggaaaagcctttttttaaaggggctggaacaattaaatgtcttatctatcctctccctccatctgcacagccactgcacaactcagcatcctcaccgggccctgtgcatcttgtctcccctggctcccccattccatgtcagcccctttcagtccactctccacactggagggatgcttctaaaaagtaaatgtgctgactcctcacctgctcacacggctacccgaggatgattttcacatcccttacttgagacgaagggatgttggcactctggctcctgcccatgcctccctttttcttccaccatccccacccctctgctgtccctgcttcagccatagtgagctgctctccgcggcttcggtgtcccacttttgttctctcctccaggctgttgtacttgctatgtcttctgccggagttacccccagccttcctgcatctccccaaacttgtgtccccagcaagttccttctgagccctcagatctcagctcaggtgctgcctcctctggaagtccttctcagatttctcatgacaccatgagcctctgtgttagccccttttcacactggattgtgtgctagactggcacatacatccctcccaccagccagggagcaacacgaggctgctcttggtatacccagcacggggacgggtgtggccagaggccagggaatgcttaatgaatgaatggggacaggcagcttttcagcagcgaggctaagggtgggatctgagtagcagggccgcttgctcttgtcacctgagtgcagggcagagtgtctcccaggagggaggggctcctcgtatcttctcttgtgccctgttgtatttaaccctttatgactttttccttcatcagtaactgggggcaaggcactggggaagaggcatatcgttatcactgttttacagagataacaatagtaacaaatcttcacatagctctttgcatttatgaactcattcagttctctatgaggtaggtacagttatcatccccgtatcccagataaggaccctcacagagggtaagtgacttgcccaagatcacactggtaggaagtggcagagctgggattagaacccagcagtttggccccagagtctgagctcttaaggagcctgaggctcagccagatgaaggcgcagatgtgggattccaacccacacgtcctgactctgagcccagctggcattcagcttccttgcactacctttgttgagtctgggggtggaggtgggtat

SEQ ID NO: 53952 - DNA, 1031 bp, Homo sapiens
ttaacagttagccagtgctgggtatgctgtggccaatgatatatatagcctgtttcctggagctgacagctagtgcaggagagatagggagaaggtattcaaataaacaatgatgaaaatctgcaataagtgctatgaatagtagtaataacagtaaatgccatacaagtgctagctgtatgccatgcctgcagtaactcattattccttataacaactctgtgaagtagataattgtgtccgtattaaagatgaaactgagacagacaggttaagtaagttgcccgaggtaacacagctagtaagtagcattgctgggattaaattgagactgtctggagaacagggagctgtgagagaatgatgagggggtcaggggagagctctctgagcagacgacagctgagcagaaagctagcagctgagaaggcagccttgggaagatctgagggaagagcattccagccaaggggaacagaatccattggcaggctccaaggctggggcgagcttggtgcatctgagcagctgaataggggcccagcagcccctgctgctcactcctcactccacttggagtggagggagcaaagggaacagctggaagaggctgagggcaggcttccaggacctgcaggctgggggtccaggccttgtaggctgagtttgggctttcgagcgctgtgggtcatgttgtcttgcctacctgcctgtgagagccatgagggctcccttgtccccaggcttagtgccaagatatgcagttcccgcacgctgggctcagcgacccagggaaacacatcatcatggttccccttctttgtatggccagcaccttgaaggtctcagctgcctccccattcaccccctgactcctcacaacagggaggtgggtaaaaggctcagcccccgtgagagacgaggcacagagaagtgaggtgacatgcctgggtttgcacacctggcaagagacccagagctctcatctgctagactgggtccccgtttccagcccttgtcttggctagcgg

SEQ ID NO: 53953 - DNA, 1029 bp, Homo sapiens
agctcttttcctataggctcatatcatgcagaaggtaggagtgctgggaggcaactgataacaaggtgtccaaagtcccaggctgtgtatcagaagttccagttgttgggtgacctgatcgccctccagctgatgtcccctctgctgcactcctgccaggctctggagtcagaaggacccaggtccagtctcccctttgccttttactggccaggagtgcatgggtggccctttccttgttccctgtccatttcctttctcttatctgtaaaataaggaatgaggaggattcctgcttcagagtgagaattaaagggcccccaagaacgagacctggcatacagtaggtacatggtaagtagcagtcatagatttctgaaaagggatctttgagcttctgcaaaggcaattcttagcccccgtcctgtagaaagctctcttgtctcagtaggatccctcctactggatctgtcccaggaccagatgaaccaaccagctttagtatctcccagactctaggcaaacaaagccccttccaactgctaccttgtttctttgctgccttttcccacacacattttggaaagagttttctctgttcccatggtattacctctcattctttccctaattcactctaactggactcctctcttccccctccctccctccttcctaccttcctgtcaaaaatcagtgatagcttgtttccccatctgccttgactcagagctcacgcaccagcagggcccccttccctctggagagccagactctcctggggtcctcccacctcactgactgcttgctcgcagactcctttgcagattcctcctccccacgtgacttctaaatagctgagtgtgagggcaggcatggtggctcacacctgtaatcccagcattttgggaggccgaggcaggcggatcacttgaagtcaggagttcgagagcagcctgaccaacatggtgataccccatctctactaaaaatacaaaaattagctgggcatggtggcgcgttcctgta

SEQ ID NO: 53954 - DNA, 1059 bp, Homo sapiens
gcccctctctttgaggggagtggtggggatagcaactgcgaggcttgtctctcagtgtgcttcaggggccctgcttagaggagcacagtatttccattctgacagggttctagagcttcctccctgggaatctcagctgggtatgcaaatcccaggctgagttaggccctggactcctggaaccaggggtactttagggactggcaattctctgtcctacttggtgagtgacagatgtggcttgggaagggggagaccctgctcaggatcacacagcacttgagggacacaggtagaatttgaactcaagtccgtctctgtttgtccctccacaaacctttgacgatgtcctcctgtgtgccaggcccctctaggcccaatttgtctttgtattctctatctttgcccagggccccgtacagaggaagtgtttggtgaatgaacaaatgaacaaatgaaccagtgagcaaggcacaggtcctggctcccgtggcatagggtccaacaggaaggtagggactcctgattcacagaacaggaaacgggagtgcatgggaggaggggttgaccaggtgagaagcagagagaggaccagagcttaggtatcatgactgctggtccaggactgtgcccgtgttcccttgttggtgaaatgggtcaatagttcttgccctcgtcctcgtgagggctcagagaagtggcggacgtgcccaggctggtaaagcgggggtgctgtgtgtcggcgtccctgtgtgtgtgtccagactgcccagaaaccccaggcagtctgccccttttgttctgccccttttgttctgcccagttgccctctgcaagtgggcattgtctccccatttcctcagctctccctagggcttctttctggaatttcttcccaatacccctggctatgggaggggtttgggaagagtgtggacgaatggagtcctgcctaccacctccctctacccactcccacaccccgaaagccagccacccgtatccatgcaggcccccagcgcacaaccaagcgggaagtgccttggcagtggttaccat

SEQ ID NO: 53955 - DNA, 1130 bp, Homo sapiens
aaaaaaaaaaaaaatatatatatatatatatatatatatatatatatatatatataaaaatctggcccaaactagtggctgaagcaccaggggcattccttctgtctccccacccctgcctcctcagccggctctgccgtgcccaccctacgctgaaggccattgaaatgttccacttccgaggcccgtcccaggtcggcgaccgtctggtgctcaaagccatcgtgaacaatgccttcaaacataggtgagggtctgggatgggtgcggccacgtccattcagggctgagggctcttcctgaccctagaaaggaccctacttcaaactgtccaggagccctttgccctgcagacagggtctaaatccctgcctggctgatgggttcctctgaaattcagctctgattttcccttcttgggagccttccctggctcccagtcctgcccacccctggctgggtcagggacccctcctctgggatcccccagcccctgtctcccgctgtctcagatcagtgtctctgtctccctccttggctcctggctccatgcctggaccgctgtagatgctcagatcacagggccacttcttgccagtgtttggttatttatcaaaccctttcccacacatttcctaaaataattagtccacagagtctttgcctttgcaatgaattctgaaacctactcccatgaaagctgactttaaataagtaaattttttgagaatttcagaggtcattatttaattattaaaagtgagggatcaggagccaggctgccggattcgagtttggctccacctcttactggctctgtgaccttagaagtaacttaacccctctgagtgtcagttctttcacctataaaatggggctcatcacaactacctcagagttatgaggattcaatgagccgttactagtagaacgccagagaaaatgtccggtaaaggtcagccattgtggctgctcttactattattgttgttatttgcagtctgacttgcacacgttctgccacggtgcaggggaaaagcccttttgtaggagctgtgaagcctggattttagtccagattccaggaatctggaatccttggaaaaatcattgcccagttctaggccttg

SEQ ID NO: 53956 - DNA, 1042 bp, Homo sapiens
tttttaaatgaggaaaggatgtgaatagacacttctccaaagacacacaaatggccaaaaagcacatgaaaagatgttcaacatcattaataattaggaaatgcaaatcaaaaccatagtaagataccattgcatacccactagggtggttatactttttaaaaaaaatctatagagacagggtttctgtcacccaggctatgtttcgtagcactcggatcacacgaccagagtagtacataatccacctgttatactggctctttacttgtctgtacccctcaacccctcagtagactgtgagttccttgggtacatacaggaagtaaatttaaactgctgctgccactgggtctgacatctaggcatgtactttgtaaatgtttattgaactgaatctggccactggtattccttaacacaggagcttgggttggatagaggccagagataataatttaggagcaggctagtgcaatagaagaggaagccaggtctctagagctgatgcatctaaatttcatttttagcgaattgaacagagggatgtgaggaaagccaacttgaaagaaaagaaggagaggaatcagaatgaggctttactccaggccatcaaggtgagttcttaaaccttaggtttttatggtcctgctaaatccactaatcctgtgaagcttgttgggaacctttcttgggatgctttacctgaaggaatttgttcattttctttctactttggtaaagcagtgtgacagaggagaccaggctctggagtcaggccaccccagttcagtcagctctctcatgtgcatgtgttggtctcagtaacatatacagttgtctccacttacctgaagcagatgtattccaggatccacagtggatgcttgaaatctcaaatagttccaaacctgattgccatcagtcagaacacatttctgtttgtgtcttccacccacaaatataatgccttttctatcttagctaaagcacttatcacacactgtggccataatttttgcagtttgaggtacatcagcaa

SEQ ID NO: 53957 - DNA, 1032 bp, Homo sapiens
ttgtgtgtagagctgtccctcagggagctcccattgttatggtgtttttttttgtttgtttgttttttgatgtattaaagttagttgtccatgttcattcagggtacagatgaagaaaattaaattaaaaataaagttagtcgtgcagcctgggcaatatagtgaaactccgtctcttcaaaaaataaaaataaataaaaaataaaaaaattagccaggcattatggtttctttatttcagtaaaatgggtttgcatcctcccacacaataagatgtgcattatgtgtgtgtgtttctgtctttaacccaggctaggaatatcaggctctcagaagctgcctgtgaggatgaagattcagcctcagaaggtctaggtgagcttttcctggatggactcagcactgagaacccccatggagccaggctgagtctagatggccagggcaggctgagctggcctgtgctctttctgtacccagagtatgcccagtcggacttcatctctgcttttcatgaggactccaggtactgacttgcccaggagccctctgcttttgcttgcatgctgtctctgtttttgtggcaggagggacgagtggatttttggttgagaagggaagataatggtttagagggtttcacaccatctggtttgataataacctctctatcctgtagctgactgaaccttgactaactaggtttgcaacgacagacaaaagtctcatcgtcatactaactgggctagtacatgcaacaccacagtattgtgtttgccaaagagtggtacacatcactggtgaaataggaagtcattttaggtaatacatgcatagcaatttaagtgaatattaattagaaaaaaaaatatagaggctgggcgctgtggcttatgcctgtaatcccagcactttgggaggccgagtcaggcagattacttgaggccaggagttcgagaccagcctggccaacatggtgaaacccagtctctactaaaaatacaaaaaattagctgggcatctgtaatatca

SEQ ID NO: 53958 - DNA, 1079 bp, Homo sapiens
cctgagtagctgggattacagctactcagataccacgcccagctaattttttgtatttttaatagagatggggttttgccgtgttggccaggctggtctcaaactcctgacctcaaatgatctgcccgatttggcctcccagagtgctaggattacaggtgtgagccaccatgcccggcctggattatgcatatttggctggaatattacagaagtgatgctgtattctcattgcacctatcagatggtacataatctccatttgtcccattactcatgatgttcactctgatcacctgattgaggtggggtctgccagccttctccactgtacagttactttttctttatgattaataagtgttttatagggagatgctttgaaatggtgtaaatatcccattgctcgtcagatattcaacatatttatttatattggtggatttatagtttcctgtttcatttaatgagttttaatctgttactatgattgtttcttttatgctcagaatatcccagatttggccagtgggaatctcttcaaatttgtttctgtgtccttttgacttgtgtctattttttaagtggttgctttcttacataggatgttctaggttcagattgcgctttccttgccccagctctggaattagctattttttcccaagaagccctggttctttctagtgaagaatggtatttagaagccgagatctctgtgcaataagtgtataagtgtatcgattaatacaatgggggtagagaggcaagcttactgcctcaatgccttctcagtgccacagcttgggggagaaagagagagaaagaaagaaaggagagagagagagagagagagagagagagagagagagagagagagagaagaggagaggagagagaagagaggagagaggagagagagagagagagaccatgaagtctcattggtatctccaactcttaattcaacatccacaggattttttctccctttctatatttgtaacaatgactttcttcttgttctttttttgtttttgtttttttgagacagagtctagctgtgttgcccaggctgg

SEQ ID NO: 53959 - DNA, 1079 bp, Homo sapiens; identical to SEQ ID NO: 53958

SEQ ID NO: 53960 - DNA, 1079 bp, Homo sapiens; identical to SEQ ID NO: 53958

SEQ ID NO: 53961 - DNA, 1079 bp, Homo sapiens; identical to SEQ ID NO: 53958

SEQ ID NO: 53962 - DNA, 1061 bp, Homo sapiens
tgccaccatgcctggctaatttttgtatttttagtagagacggggtttcaccatgttgtccaggctggtctcaaactcctgacctcaggtgatccactcacctcggtcttccaaagtgctgggattacaggcgagccactgcacccggccagccttccttttcctaatcgtacctatacctatgtctcctgatgctctttcttttgtttgctttttcttattttgaatttttttttttttaaatagagatggggttttaccatgttggccaggctggtcttgaactcctgggctcaagcaatccacccacctcagcctccgaaagtgctgagattacagatgtgagccaccacacccagcccctaaaatttttttttaaattatttttataatagagacagggtatcttctccaggctggtcttgaactgggttcaagcagtcctcctgcctcaccctcccaggtagctggaatatcaagtgcatgccagtgacccggctcctgatactgtcatatgaagaaagcattggctcttgaagtcagacccatcatcatttactggctgtgtgactccaagcacacgctgcctctctgggactgccgcctcatctctggaatgggagtaatacatgcctacacatttctcaagtatttgagagccaatgacaggataggagttgaagtgctgttgtaaactgcacagggcagtcctgctataggagggcatctttgtcattagcagtggcagcaagttggatttggcagttgtctcagagaagctgtgaggtgttcctggactataagggaaagccctcagcagatttgcaaattgactcttggactacttttccttaagctttgagcaaagcaaagcagagaaaagcagatgcttttgcacttaagctaaaagagcccaatgtattagtgtaaagagagtggttggatgtggtaggaaatgaggctagaaagctaagttagggccatacacgaaggcctgaatgccctgctaaggagcgtaaactttatcctgattgtggtgtacaccagggttgatttttaaa

SEQ ID NO: 53963 - DNA, 1061 bp, Homo sapiens; identical to SEQ ID NO: 53962

SEQ ID NO: 53964 - DNA, 1061 bp, Homo sapiens; identical to SEQ ID NO: 53962

SEQ ID NO: 53965 - DNA, 1061 bp, Homo sapiens; identical to SEQ ID NO: 53962

SEQ ID NO: 53966 - DNA, 1206 bp, Homo sapiens
gggaggacatcaatttgcccaaggtcaggctgaatgaaacccaagtgtcctgatcaggaagccagtgtttcttctagtagccaggggcagtgtgatttggcgaaaagatcagagccttgaagagacataatcctagattcacttactggggatgtgacctcagacaaattacttgccctgtgtgcctctcagattctccattggtgggacactcgtgctaatggtacccaccttgtaagtggtttgggggttgaccaagctcacttatatgaaatgcttaattaccccttagtctgcactcagagacacttcccttacaccagacgacttaggaaatccccccactgggagctcaggttctgccgttaactttgttatctcaagacctggatcttgttttcttgataagatgcttgacaactttcctgggaaatgccacaggcaagaattaggaggcacctgcagaatagctgtatctccttagagaaaagacagaaatactcaaactgtgtaccttactgtctcatttctgaacttgccaattttacctcttgccataaattgatgaaatgggatgctggcaaaatagcaggtacaggctgtattatcattgctcattccttggggagatctagcagtgactgcctgggaaatatttagcagaattaatacttggggacaaaggctggtgcataacaaaaccattgtgtaaatcaggcttagaatgtaaatcaaggcctccgttaatattctgtgttttaatggaagaaacacctgctgggctatccataaaggagctttgcagaaatctgttgaaattgtcatttccttaactacttgagtgccaggtctccagagttcccatgatccgtttccacaccaagatgcatgagtgctttttagaatgggttgttacgcatccaagggcatgtgaggcttgttttagagttaggaaaaggatttttaagtttccttataacgtggaaaatgggaaaatatttttatgatgttattgcaaacttaagtaacacctgaaaaaagtcaaggtattttgcttaatttaaaataatgaggctgggcgcacgcctgtaatcctagagtttgagaccagcctgggccacatggcaaaaccccgtgtctacgaaaaatacaaaaattagctgggcgtggtggcgggcacatgtagtaccagctgtttgggaggct

SEQ ID NO: 53967 - DNA, 1050 bp, Homo sapiens
gccattacggccttaattgcctcccagaagaaactgtcctacaagcagcttcccttcctgctgtaccaagtgacaaggaagtttcgggatgagcccaggccccgctttggtcttctccgtggccgagagttttacatgaaggatatgtacacctttgactcctccccagaggctgcccagcagacctacagcctggtgtgtgatgcctactgcagcctgttcaacaagctagggctgccatttgtcaaggtccaggccgatgtgggcaccatcgggggcacagtgtctcatgagttccagctcccagtggatattggagaggaccggcttgccatctgtccccgctgcagcttctcagccaacatggagacactagacttgtcacaaatgaactgccctgcttgccagggcccattgactaaaaccaaaggcattgaggtggggcacacattttacctgggtaccaagtactcatccattttcaatgcccagtttaccaatgtctgtggcaaaccaaccctggctgaaatggggtgctatggcttgggtgtgacacggatcttggctgctgccattgaagtcctctctacagaagactgtgtccgctggcccagcctactggccccttaccaagcctgcctcatcccccctaagaagggcagtaaggagcaggcggcctccgagctcatagggcagctgtacgaccacatcacagaggcagtgcctcagcttcacggggaggtgctcctggacgacaggacccatctgaccatcggaaacagactgaaagatgccaacaagtttggctacccctttgtgataatcgctggcaagagggccctggaggaccctgcacattttgaggtttggtgtcagaacactggtgaggtggccttcctcaccaaagatggagtcatggatttactgaccccagtgcagactgtctaaatgcccccagcccacccctgcccccatttgcagccttggtgttcgttctaacactgcattttcctacacccctttcctggactgctctctccagaaacagca

SEQ ID NO: 53968 - DNA, 1075 bp, Homo sapiens
agtctgtggcgtaccttagggttcactcaggtggtgtacatcctgtgggtttggccaaatgcgtgacatgcagccaccattttagtatcatacagaatagtttcactgccgtccaaatcctctgtgctcctccagtcactctggttttaaatatttaagacatcgttcctgcttagaatagtgccagactcaatacatgtccaacaaatgaaagaaagaagaaatggatgaaaaggagctgggcagtagggtgtggcaggtgcatggtgcaagagactaaccccgccccgacccgctggttggggaaagactgtctgtttccaccagcccttgtcaggggggccttgaggctggcccggcctccggcctccgggatgtctgcacagcaggatagtaagtgatgccccattgcttttctctggttgcgggggagggttgagaaaggagctcttgattttcctggcatagcagattcctttttctctctttttcttagaaaaaaaagcccagggaactgatgaatttcaagagctttgtagaagaacttaactcacatcacaataagaagcatggggttttttctaaacttccccgaaacccgaaaacccctacagagaggatttactgggccaacctcagccagtgcccccgcacactggtgagttcactcctatggccggccttcctctctcggagggcagctctccttccggggctgggcatggggtagggtggctaatttcatagggaatagctcagtcttgggatcagactgacttggtttccaatcctggtctggaacattgggacactttaggtgagactttgggcgtcggtttatacccctgtcctatgaagatggtgaagtggttgtgggaaattagatgaggccctgtactcggagcctacagcatggtgcctggtacccaggaagcgcccagccagtgccgaccttccccctgcacctccctcctctggcctcagagcgttggaggatgggcaggggaaactggagcagggcagagtgcagtctacccactgggacctgcccacttgctccgcccaagggagtggt

SEQ ID NO: 53969 - DNA, 1054 bp, Homo sapiens
actgttaggctggggcatgattctctcagaggctcaacttcagcattgtccatgaagcctttgccctacttgggctcctggctcagaattatgatgccaggaggcacagaagatcgatcacaggtgtgaaggatttctttatgcactctttcactgactgattcatttgaaaaacctgccctgtgcttggttctgtcctgagtgcctctgagctgctgattgttttcaggtgaccagaaaaagtctgccattccctcactgaaaatttcatttttgcattcatattttttaagttttttaagttttaagagttattttttgtcttctgaatgttcctttgataacaatatgctctggtttcatgaaggcagtgctttctcatctttcgaagatattaagacaaatatcttcaaaagattaaagattaatatattctttttgaagatattaagactatttgcttgacattgtccccatttttttttcaaatctcatttttctgtatgttcattttggcctcagtcttctgtatcagaggtttttcctcgaatgtctggtgatgcttggctctgcatacctgtccagctctaaatccttctgaaggctctggggcacttgttgattatggactccaccacacgatgatcaagctgggtgttttcactgggtgaactcccaatgttactactgttagaactttcctctctgggggttgtaagcttggctgtccaagctctaggatctaagtggaagggaaaaggctacagttctcaatatttagtgattaaacttccatttaattccctcttttctttctttctatttatttatttatttatttattgagacagagttttgcttttgttgcccaggatggagtgcaatggcgcgatctcagctcaccacaaccttcgcctcctgggctcaagtgattctcctgcctcagcctcctgagtagctggggttacaggcatgtgccaccacactcggctaattttgtatttttagtagagacaaggtttctccatgttggtcaggctggtctcgaactcct

SEQ ID NO: 53970 - DNA, 1859 bp, Homo sapiens
ttatgcaactctatcttaagaactgcccagcctcagctgaaaacccgaatctgagaaggaattgcgtcatgtaagggaagctggaattaagggagctgagccagtcatggttgtggcgtgtgagtcaggagacctaggtttcagcccctctctactgtcagcgagctgtgcaacgtgggcaagtcattgtcctctgagctgcagtttcctcatctgtcacatcgctacagacaagacctccctggaacccttctgattgtcttagacactgtggttgcaaaacccacggaaagcctcatttgtgtggaaagtcagaggaaaaatgatccagtggacacttggggattatctgtcattcaagatccttccttcaaccccaaggtcagctcccatctcatttccagaaaggctcatacctggcttgcagggaagcatctgtcttgtcattccaggtgccagaatcctctcagagtcattgaagggtgttcacccatcccacccaaggcttggcacactgccagtgtcttagcagggtcttgtgagggctgggggcatccaggcactcagaaggcaaaggaaccaccctacccatttggcctctggagggggcagaagaaagaaataaacctcatcctatattttacaaagcatgtgaattctggcattagctctcataggagacccatgtgcttccttgctcagtgcaaaactgatgattctacttgctgtagatgaatggttaacacgagctagttaaacagtgccattgttttgccagtgaagcctccaaccctaagccactgggacggtggccagagatgccagcagcctctgtcgcccttagtcatataaccaaaatccagaccttatccacaacccggggcttggaaaggaaggtattttggaatcacaccctccggttatgttgctccagtaaaatcttgcctggaaagaggcagtcttcttagcatggtgagctgagttcatggcttttttttgtagccagtcctgtccctggccatccatgtgatggttttggatggagttaaacttgatgccagtgggcagtgcatgtggaaagtatcagagtaaggctctcccctccagagccctgagtttcttggctgcatgaaggttttctttagaatcagaattgtagccagtttctttggccagaaggatgaatacttggatattactgaaagggaggggtggagatgggtgtggcagtgtatggtgtgtgatttttattttcttctttggtcatgggggccaaggagaaaggcatgaatcttccctgtcaggctcttacagccacaggcactgtgtctactgtctggaagacatgtccccatggctgtggggccgctgcttctgtttaaataaaagtggcctggaagctggcgtttgtcgtttcttgcttgggggaccaaaatgtggagtcagatctgggctcgggtgcaggctgtgccattccccaactcagttgctctcactgaacccatgagcccatggccgagggctagaagaacatgcaggaactgacaggtttatttctatcactgtcagagtgtgattggagtaagtgttgaaaggatccctctgtgtgcagggtggcaagcagaccagtgagaaggccaccactgcagtccaggtgagacgatggtggctctggttagggtggaggcctggctttgtcacttggttgtgaccaattaattttagcaagttaatcctgttgagactgttgtcctcatctacaaactagtggacccactagctgtccattaaaatgcattcctccattctttggacacatagctagactacctttcccagccttccttacagtcagttgt

SEQ ID NO: 53971 - DNA, 1147 bp, Homo sapiens
ctggactgcagtgattggagtccttggttgcatgcatgtgtcaagcttatccaattgtgtactttaaattatgtctagtttattgaaagtcaataacagattaaaggaaaacaaccccactgctccattagggaaggcagctgtgcctctggccaagcagaggggcagaagcccagcagtctgagctctactcctgactctacctccactgctaagctacctaacccccaagccccaattccctacctgcaaaagggggataagaatacctgcaccatcttcttcaccaggttaacggggttaaacaagagaaatcctccaaaagccttttctgggctgcagaatgagcagttgggtttctctcacgcctcgcgttccgtgtgcctcctggcgtcctcacccacttctctgcctctgcagcttccagatgctgtatgccgactgctacatgaaccgggaggagttctgggagatgtttgatggctccttgtaccacaagctgcgagagaagctgggttgccaggacgccttccccgaggtgtacgacaagatctgcaaggccgccaggcactgagctggagcccgcctggagagacagacacgtgtgagtggtcaggcatcttcccttcactcaagcttggctgctttcctagatccacactttcaaagagaaacccctccagaactcccaccctgacagcccaacaccaccttcctcctggcttccagggggcagcccagtggaatggaaagaatgtgggatttggagtcagacaagcctgagtccagttccccgtttagaactcattagctgtgtgactctgggtgagtcccttaacccctctgagcccgggtctcttcattagttgaaagggatagtaatacctacttgcaggttgttgtcatctgagttgagcactggtcacattgaaggtgctgggtaagtggtagctcttgttgcttcccgttcagcgtcacatctgcagtggagcctgaaaaggctccacattaggtcacctgtgcacagccatggctggaatgatgaaggggatacgctggagttgccctgccatcgcctccatcagccagacgaggtcctcacaggagaaggacagctcttccccaccctgggatctcaggagggcag

SEQ ID NO: 53972 - DNA, 1373 bp, Homo sapiens
tatatgagagaccacattttgttttgtcactcatctgttgatggacatgtgggttgtttcaaccttttggctactgtgaacagtgctgctacaaaccttcatgtgcatgtatttgtttgaatacttgttttcagttctttgggatatagaactaggagtggaattgctgggtcatatgctaattctgtgtctaactttctgagcaacaaccaaactcttttccactgaggctgtgccatttttcattcccaccagcaatgtatgagcgctctattttttcaacattctcaccaacacttgttattttctggtttttaaattattagtattattattatagccattctggtgggtttatggtattgacttgcattttccttgaaattaatgatgctgagcatctttttatatgcatgttaaccgttttgtatatcttctttggtgaaaagtctatttgaatcctttgccaccttttaaaatttggtcatttgtctttgttgttgagatgtaagagttctttgtgtattctggatactagaccctcatcagatatatgatctgcaaacattttctccaattctgtaggtttcttttcattgtcttggtaacgtcctttgatgcacagaagtttttaatttagatgaattccaatttatctattttcccttttgtttgtgcttttagtgccatatataagaatttattgtcaagtccaagcccctttgttttcttcaaagacctttatagttgcagctctaatctttaggttgttgagtggggtaggagtccaggctccattcttttgcttatagctatccaggtgtcccagcaaggctgcatgtgtttgaaaaacagcaagaagccttcggagccagcatgcccacgctgagctatggtgaggaatgaggtcaaacaggcaccagaggctagatcatatggctccttgtaggttaggaaggactttatattttattctaagtataataggaagccaatgagggctttgaacaggaaagtggcatggcctgatttttgttttaaaagaataactgtgacagctggatagagtggatggggacgggagtggacaagagtggaagagtagaagaaagaagatactgttgtctgggcagcagcagaggagaagtgtcaaatctgggagatgcagtgcaggctgaaccaaccagcaggatttccagacagattggccgtggatgtgattcaaaggttcagggccaaggttgactgccttttttttttttttttttttttttttgaggcagagtcttgctctgtcacccaggctggagtgcagtggcgcaatttcgcccactgcatgctccgcttcccgggttcatgccattctcttgcct

SEQ ID NO: 53973 - DNA, 1050 bp, Homo sapiens
tttgaaatatttggagacctgatctgattcccttatttcccaaggagaagactgtgaggcacagagagccttacccaaaggccctcccagaatcagcagcagagggatatttgccaagtgccccagtgagcaagaccctgatacctgagggaacagggctggggcagagtggtggatgccattagacatctgggcatttcattttagaagcattgcttccaaacatttctgtttctaagcattcaggaatttgtccctgtgtgccaggccctgtgatgggccctctgcaggcactgccccgtgtaaacattgctgcaatcctgtgagaagcagcctacccccatttcacagaggaggcccagagataggaagtggcttgcagtcaagggctggggtggactggagctcatgcagccacctggcctcctcagctggtgtgtgcctggaaaagacagactatctgggttctttcccatgtcctgggcttctctgcatggctcctgatgcatcagtgagcaccaggagcgcctgtatccaggtggccctaagtctcactttcattatgcagctgctgccactgccaggtatgtgacacacctcacctggggttagatcaggttgctctgtttcctgctgggttcccctgttcacattagcaggcagaggccagcgtgagtgttttttgcgctgccccataccatccacaccaaaactaatttgggcaaagaggctctttagccccagtttcctccctgcagagtggcctcaccagcagggtggccttaccagcagggtgggcctgcacaagcgggtggcacacagataagctgcaagtgctggaggccagagatccacggcaaagggttgcctggctgtagggtagagcaggtcaacaagggaatgggtggggactgatacttcagccacctgtggaccaggcaccgtgcttggcactttctacatcatctcttttagtcttccagaaatgctaagtaacctgcctaggctctgctaagtgtgttgtaaatggaaaaagcaaattggcaaaca

SEQ ID NO: 53974 - DNA, 1416 bp, Homo sapiens
actgggattacaggtgtgagccaccacacccagccgagacctatttctctgtgtgtgtgtgtgtgtatatgtatgtgtgcatgtcttcatttcattctgtaatatcccatttttgcatgtaaataattggcctaatttagcccttactgacatttatgttgcataaactgttttgctcttacaaataagattgcattgaagatttaagactcacatttatcctgtccttctgtacaaatatttgtgtaggattgagtcagaaaaatggactttgttacacaaaggtttgagcacattaaatattaatagatatgaccaaacagccctcgagaagagctgtgtttatgcctacttgtagtaatggtctgtgagaacacctttttccctacattcttgccaacactaaataggatcactctttcatttttgccaatctgatagcgttaaaaatagtatctcgttttattttgcagttcttggatcacttgtgagggtgagcctctctttgcagcattttgcagtttgtttgtcttcagcagtgatcacttggttcacatttgtcttttcttgtttattgttttttgttttgagacaaggtctcactctgtcacccagactggagtgcaatggtgcgatcttggctcactgcaacctccacctcccaggctcaagcaattctcctgtctcagcctcccgagtagctgggaatacaggcgcatgccactgcacctggctgattttggtatttttagtagagacggggtttcgccatgttgcccaggttggtcttgaacttctgagctcaggtgatcgcctgcctcggcctcccaaaatgctgggattacaggcgtgacccactgcacccagcctttttcttgtttattgtgataagcatttccccctgttgttacattgccttcataaccgtcattgttaatatccatcttttattagaactattacattgccttcataaccatcactgttaatgtccattcttattagaattaaagaatcccaattagaatggccaaccttgcattgcaccttgcactgaggaaatgaatgccctattgctgcccatagttggaaatttaagttgcttccaatttttttattactttaattaatggagcaatgaacatcttttgtctgtaatttgagtaatatcttttgtttttttttgagacagagtctcgctctgtcacccaggctggagtgcagtggcgggatctcggctcactgcaagctccacctcccaggttcacgccattctcctgcctcagcctcccaagtagctgggactacaggcgcccaccaccacgcccggctaattttttgtatttttagtagagatggggtttcactgtgttagccaggattgtctcgatctcctgacctcgtgatccacccacc

SEQ ID NO: 53975 - DNA, 1152 bp, Homo sapiens
agctacactgcctgacacccactaaagggtgtcaaggcctggccttggactcctgcccttgtgcaatgcccctgccattgtgggtcgttgggcagcagtgccagtcccagctttttcctgaatagcctctgggtcaggggctgtacctagatgggagaaggaggatgctctctcagtgagggtccctgagacagagggcagtattaggttccatgtcatgtcgaagctgcagggaggaaactaaagcccagcaagcacagtttgtaaagctcattgtttgggtttatacaagagagtgagagaatagggactctcccaggctttgctcccccactgactgcatgccacaatgtggggcccaaggtttcagctcacaacacatcaattctgtctcacagtccgaaaactcagacctgttctatgccgtaccctggtcctgtgggacgctgggtttcctggtggccgctgagatccgcatcatccctgccaagaagtacgtcaagctgcgtttcgagccagtgcggggcctggaggctatctgtgccaagttcacccacgagtcccagcggcaggagaaccacttcgtggaagggctgctctactccctggatgaggctgtcattatgacaggggtcatgacagatgaggcagagcccagcaaggtaagccagggtgtcagctgctgctgaccaagactggggaggcatgagtgtgctaggactgagccggttcccgtatcctgaccctggcagccacctcttcaaggctgctgcctgggtcaacccacctggggtacaggcaacaggatctatcatcagaaatgtattagacagtgatggaagctttcatctactctgcccctaccacctgcctgggatgtgcttgtctcttagtggatgtaatctttggtccttatagcaaacccattttatagatgaggaaactgagtcttcaagaggtaatgtaggctgggcacagtggctcacacctgtaatcccaacacttaaaagaggtaatgtaaacttccacaagattcgagtaatcgatttgatgccttggaatctagattgacattccttccacatataccatgcaatttttattagcagttttttctccatttagaaaggatttgtgcttattgtaagagac

SEQ ID NO: 53976 - DNA, 1162 bp, Homo sapiens
attagtaattctgaagaactaggaagggtgaattttttttttgtttgtttgagacggagtctcactctgttgcctaggctggagtgcagtggcacgatctcggctcactgcaacctccacctcccaggttcaagtgattctcctgcctcagcctcccaagcagctgggactacaggtgcccgccaccacgcctggctaatttttgtatttttagtagaaacagggtttcaccaagttggccaggctggtctcaaactcctgaactcagatgattcacctgccttggcctcccaaagtgctgggattacagacatgagtcaccacgaccagccaggatgggtgatttttgttttcttcttcacttttgctgtatcttctaagtgaatgagtatttctcctgtaatttagaaaaggttaagtcaaatatttagtataaagatacttgaagggcgaggttgaacactagctaaccgagagccagaaatcacattccctgtaattaaaggcaatgttctagaaagagcctgtaaaggctatataggaatccctgcagtgagtgtttgggaaggtttgagatgacaccttctgtgtgcagcagctccccttgggcctggcagcctccttttgacccagggtctcttttcttgtgtcaacagattgtccgtgtggagcccttggtgaccatgggccaggtgactgccctgctgacctccattggctggactctccccgtgttgcctgagcttgatgacctcacagtgggtgaggaccctatattaacgggcaagaagagacacacggtcctaggaccggagctgatgggccttggccaccctccatctagtcctggaattgccgctattccatctgtgacagaagtcattcagtctcttacttgcctgctccaatgacagggtgttcactgcctgctgttccatttctgagcagctcaagttatcagaaggcacttttaatttctggtttgaatctgcttccctgtgacttgttcccattgctccaattcccccccatggaacacacagaataagtatagtctctcttctcctcccataggattcatagcccccaaagcctcttcttcttcagggaaaacaccttcagttcttttaactattcccatgggacagggcttcctgtcacc

SEQ ID NO: 53977 - DNA, 1009 bp, Homo sapiens
tcttttcttacattgggtttaattttactctttttccagttttttaaggttaaagtttaagtcattgacttagaccttttttttctaatataaatgtttagtgctataaattttcccctaagcactgttttagaggcagctcacaaatttctatatgttttctttttatttcagttcagaatactttgatttcccttttgatgtctgctttgacccatggattatttagaagtatgttgattttttatcactagttttgagcaattttattatgatgtgctttggtatagttttattcataattcttgtttggaatttggcataatttttcatcaaatcaggaaatttgggggccattatttcttcatctgtttttctgtcccctcctttttctcatctagtttagagacagctaggccatttcaagttgttctacagctcaggtcattgaggcactgttcatttaaaagaaatttttttcctctctttcattttggttggtttctgttgctgtgtatttaagttaactaatcttttcttctgcgatttctaatttgctattagtgccatccattgtatctttcatttcagacattgtggttttcatttccagaagtttgatttggattttttttttttttttttttttttttttttcagatggagtcttgctctgtcctccaggttggactgggtgcagtggcgtgatttcggctcactgcaacctccacctcctgggttccagcgattctcctgtcacagcctcccgagtagctgggattacagatgcgcaccaccgcgcctggctaatttttttgtatttttagtagacggagtttcgccatgttggctaggctggtttcaactcctgatctcaggtgatctgcctggcttggcctcccaaagcactgggattacaggtgtgaggcattgcacctggccggatctttttaatatattcttaatgtctctagttaaattttcgaatatagagaatatagttattata

SEQ ID NO: 53978 - DNA, 1034 bp, Homo sapiens
gaaaaaagggtgtcatcgtaacttcctgggactgttgtaggaattacacaagacagtgtgcagtagatgcctagtgtgttgggaatacccagtaaatggtcctcatttttatacttgctattatcaccattacaaaaccttttctgaacttcccagctagagttaatgttttcagaacacttcgatcctctcttctagctctttcatcattctgccttgtggtgtagcaatatgttggcttttctgtcagccttgctggccagggaggtgccagagggtagggccagcaggccttttcattgttctgtttctccagtgcctgatggaggcatcattcccagctcgcccttgaagaaagcagggctgcaggctgctctggggattcccagtggggccagctcaccctctgtcctgtggttgcaggtgcgggaatggaaggagcagggtagcaagaccttcatgtgcacggggcgccctggctggctcactgtctcactacgtgtcgggaagtacaagaagacacacaaaaacatcatgatcaacctgatggacattctggaagtggacaccaagaaacaggtgagagtagcacttttccgggctctgggagcaggtggggcactgcccctggtgcaagtgactcatagggagatgattttagccaagggcattgcagagtggacaggaccaatgcccacagtcatagaagatactccctgccattgctgtcctcaagcctcacagccaccaggggagagatgggtcataataggtcaggggaaccctttgcgtttccacaggaagtcaggaatggggaattcgtgagcaaaaatgagaggcaaaaaggaatctacttaccccttcctgataaggaagtgtgctggtaaaaaatgggctacagaagtgactgagagacatgggtcttgttacaagcttcctggaaaccctcttgtttaatagccttcgaaatgtacatactttttggcccatctagtaattttacttctcgaaacctggcttaaggaaaaaggaaa

SEQ ID NO: 53979 - DNA, 1097 bp, Homo sapiens
atattctgcttgctccgcgctgggtgcttcaggcaagagcatgaagatggatgcggagagacgttcccatgaggcataagacctggggcctggtgggagaacgcagtgtctggaagtgctttgccctgtagctctggattttgctggtcacagtcatggctccagagcctctgcgtgtcctccctccccacctgcaccctgtttcctagctcttttctcgagttcaaattctccatttacctgcttgtctcccctgtcagactgtgagctcctagaatgcagggactgttatgtgactcgcctgtggcccatagggcctggctcaaaacagcctagcgagtgcctattaatcttggctaagccacaagattcactgtgagcaggaaaacaggggcccagctggactagcctctaccccagacctgccatgtgccattgccatcctcacagcaaccctggtagatcttgtgcctatcttacaaacagggaaaattgagtttcagagtgtgagtcatgtgctcaggaagactagtcagtaaatggggctagaacctaggttagctcgatttcagagcctgaactctgacatttcttctttcccaggctttcccttcccccctataggtctggttcagttgcctcacacctggcttgtaatagctgtctgacctagttgcccttttttctgggctctctgtttggcctccagcttcagtgcagcacccctaatcactccctcccatctctgggcttgtgtcaaactccgtggctgcagattcaggcagggacgagacctggttggtcgtggaatcctacctatcatcccttttcccccaaatcacaggaatctcttccttaatacctgccctggcctctgatcaaagaaaagtccttccccgtgttgagctgtttgcctagccagctccagtgcagccttctccaggagacctgaccagtatttgaccagacttttggttgcaagtgaaagaagctcaattcaaactgacttgagcaaaaagggattttattggctcaggtcctgaaaagtctgggagtacaactggatcaggcatggctggatccaggatcctctgtcc

SEQ ID NO: 53980 - DNA, 1100 bp, Homo sapiens
ccggccaaagggtgactgactcagggccggggcgcctcccagccctccggcggaaagccactgcaaaaccgcttaaggcgcgtttggaagaggcggccccgcagccccgagggcctggggccctgagtcccaactgcccacccccagtattcgcagcggaccccaccggcacccagtccctggcacccccgcctcgcgcggcggcggggagaaaagggtggagcggtccgactcccgcagccaatgaaagctgcgggttcctggtccgatccccggcgcggctcgccattggtcgccgcccgggtctcggcccaccgaacctcggcgacccgagccaatcgcgaggcggcgggcgatcccgggctccccgggctgtgggctacaggcgcagagcgggccaggcgcggagctggcggcagtgacaggaggcgcgaacccgcagcgcttaccgcgcggcgccgcaccatggagcccgccgtgtcgctggccgtgtgcgcgctgctcttcctgctgtgggtgcgcctgaaggggctggagttcgtgctcatccaccagcgctgggtgttcgtgtgcctcttcctcctgccgctctcgcttatcttcgatatctactactacgtgcgcgcctgggtggtgttcaagctcagcagcgctccgcgcctgcacgagcagcgcgtgcgggacatccagaagcaggtgagcggcgccgggtgcggccgggactcagggccggaggcggcgtgcgcggggatagcgggacgcgaggtggcgacgggagctgcggtgcgggggcggccaggacttcctgggggggtggggagctggcgttggagaggggttggaacgaaacaaaaatgtgatgggggcgggggaacagaacaggcaaagtgcccactgtgtgcagggcatatgcgggtacctggagggagatgaagaaggggaagagggggaggtgcgaagcactcaggtaactctcacccggcccaagcatttcagagaaggaaaggcttccgggaggtggagctgggtctagagattgggaagtatgggaaatgattgggggaaggtgtgtgggtggagggactggtgtgagcaaatgc

SEQ ID NO: 53981 - DNA, 1016 bp, Homo sapiens
gcgaaggggccgtgacagccgttgccatctgctgccggagccggcacctggcgcaggcctcccaggagctccagtgacagccccatcccaggatgggtgtctggggagggtcaagggctggggctgagctttaaaatggttccgacttgtccctctctcagccctccatggcctggcacgaggggatggggatgcttccgcctttccggggctgctggcctggcccttgagtggggcagcctccttgcctggaactcactcactctgggtgcctcctccccaggtggaggtgccaggaagctccctccctcactgtggggcatttcaccattcaaacaggtcgagctgtgctcgggtgctgccagctgctcccaatgtgccgatgtccgtgggcagaatgacttttattgagctcttgttccgtgccaggcattcaatcctcaggtctccaccaaggaggcaggattcttcccatggataggggagggggcggtaggggctgcagggacaaacatcgttggggggtgagtgtgaaaggtgctgatggccctcatctccagctaactgtggagaagcccctgggggctccctgattaatggaggcttagctttctggatggcatctagccagaggctggagacaggtgcgcccctggtggtcacaggctgtgccttggtttcctgagccacctttactctgctctatgccaggctgtgctagcaacacccaaaggtggcctgcggggagccatcacctaggactgactcggcagtgtgcagtggtgcatgcactgtctcagccaacccgctccactacccggcagggtacacattcgcacccctacttcacagaggaagaaacctggaaccagagggggcgtgcctgccaagctcacacagcaggaactgagccagaaacgcagattgggctggctctgaagccaagcctcttcttacttcacccggctgggctcctcatttttacgggtaacagtgaggctgggaaggggaacaca

SEQ ID NO: 53982 - DNA, 2517 bp, Homo sapiens
aagttgccagatgaagacatgtttaaattgcagaacacaagtcagcatagaaaaccttttctctaaccgtatgaactttaacttccttttcttttctgcagggttcagaatctcccatgatgattggtgagttgagaagtgaccttgatgatgttgatccctagaggaacatgcccagcctgagaggagtcaagacacaatactggatgctcagcaccttcttggaatcagaatctcgaaccctttggaagagcctggagattggactgggaaagctgctgtgacttgggcggatcgtgtatttctcaaggaaagcatttttaagccactagaaggtttgggagctgtttggcagtgggagaactccggcatgtggatcagctgtcccgggagcgtggtctatatgtggattcacatttctgtggagattttcggaaatagagccagtggcagacttttttgttacacgaacatacaagagtgagcataaagctgttgctttctctacgatgctacaaaagaaattcctttggtttttatattttaagaaaaagcaagctgcttttagatatgtgggggcaaatttttaatcttgcagtaatattaaacaggaatatccaatttaaaatgatgtaaagatgtaataaaattccttttcattgtaaaatagtaattaagtcaatttacacagacctttgtatttaatatgtctccctatttgtatagaatttcagatgggtctagatgagaaccctatgcataagcttggatcttgatgaaaggttaccaggatcaggatcaaaaattgggaaatactaagctcttgaagatatttttctgatataattagattgaaaagagcaattttgaaaatgctgtgttctccagaagtacagggtgcattatttgacatcaattacttaaagaagttatgagttgttccccaaacagattttaaaaacagcaaaataaaagcactttaagatataattttactgagtttaacttcacagaattatctttttaatgcttggagacatattgaataaactgtagtcttaaatcatgtgatctgcaatcgtttgcttttgcttaaaacataattactgaaacccttggtattggttgtatatgaagttaactatttgagttggtacacactgcttgtgagtttcatagttattgtaatgcagagaaggaatttgagaatttgtttctcctcaacatgactaattaacactgaaaagtcagtcaaggtttaagatttattttcccagaaataaatataaagcaattgaataaccatccatttagtcgtatttccaaagtatagcaccattcactcatttataccagctcccttttatggtgtgggggagaggtttacacccacatatttcatatatattttgtacattttgtattttgaattgctcacattttcggccctgttttgcctttagttacaggtcctgccttattttcatctcaccatgcacagaactagggagccttaggaagtgccaggttttcactgtcagatttgccaagtcacagaggcgcagccagccctgaagtgcctgtctggctgctgtggcattgtgtgggcatgtggccaggcagatggcatctcattactgtgctctcgccatggcccagtcttttcattctctggcagtgagggtttctgtgctgtcagacttcattgttattctgtgacttgctggaggttggcagtggcctttgtcaaacacactgagaagatggaagggccagcacttaagagcagaactgtacccttagagaaacggacagaggcgagtggcaaacttcagacggttccaatggtcttgcagtttgaaatgtgatgttctaccattggttttgagtacgtgaatacttcctgtcctactgtttcccctaccctattctcaccttctctccgcccacatcctcaccaagagattgtgtgggacatgaccttgaaatgctggcgatgatccacactgggatatcatcgctggcgactgcactctcaggagcccaaaatcaggagtgaaattgccacttctagtccccttatttcctatggaaacaacgccttccgcacccctagcacctgccgtcctcactgtaaagcttcatcaggatcgtccaccgtgtatattatacgcttcagatcatgttgcttatattgttgctgcaatgaccatcgttttcactttgctggtaaccacttgattgctgacagctacagtcaatgaacctgctgatgactttttttaatgtagtacaacagtgacagttatgacaggcttaccttggaagagttgtcatttttactgccaattttttggatgaagatgtttttataaacctttcaaaatggtctgcaaacagagcaggaattgcacaattaactcaataatgctgtgtgttctcaagaagctcccttagtgaggccgatcttaagatggccgattctgcccgttgaaggcatcctgggaaagaaaacaa

SEQ ID NO: 53983 - DNA, 1040 bp, Homo sapiens
tctcttctgccctgtcaaagcctctcttctgccctgtcaaagcctctcttctccctgttgcccctgccttcttttctcttctttgcagccaaacttcgactaattctctaaacttaactttccccattttcttatctctcactcgctcttcagcctcttccctgctaactccctcttctctccaactcagcagttggggtgacaggtggcctgcagctttcaggcctcatcttagccgactgctcggcagcatctagcgctcctggcgctcttcccgtttgaaacactattccagggctttcctgacacttctctctcgtagttttcctcaaacccttctggctgttccttctctgtctccttcctagtactgcctcttctggaccaccagtaaaggtttgtggagtctctaacctgtatcctcctgccctcactccatattctctccgcacccaccttggatttctgaacatgaacatccagctctcttgttcttgacgttctccacttggcataccttaaagacctcagactcgatgtgcccagcccctcctccctgcgcccaccaaagctggccctccgtcagtgttccttatctcacacacagcacccccatgtcatcccggacagctccctttgaaagggtgctcgtccctctcctccacctgtcatcagcccctctctgcctacatctgtaaggatcccctcacctccacccctgcttctctctggttcatgcactaaaacctttcaaaggctttgtatgaggagaaaagccagaatcctcaacacagtcctgcttgatctagcacctgcgcacctccccacccccattttctgattttttttttttttttttttttttttttgagatggagtgttgctctgtcacccaggctggagtgcagtggtgcaatctcacctcactgctacctccttctcccaggttccagcgattctccttgcctcagcctcccaagtagctgggattacaggcataagcgactgtgcctggcccattttctgaattttatttatca

SEQ ID NO: 53984 - DNA, 1021 bp, Homo sapiens
aaacatcaactggaaaaacctttcagcgaaccatttcagctcaggtgagagttgtctcttgtttttgcgtggtctaaatcacttatggaggattttcagtgtgtttctcagaaactgcaacctctgagaagagaggtatgagttgaagatgagaacaagcagaagaaacaattggatttctatgaaaagaaaacagattggtgtacacttacacaaatttgtgcagattatttgtctagaaggaaagtcatacaggttgggcagtctggtcacaaaaagggacaggggttgagggggttctggtgactgtgatgaaggcctcactctcaggcctccggtcccactgaaggtcagatgaaaggtagtcttccctggcggttgctgctgccactgaatgggccctaactttgtcgtcttgtgtttgaatcttctgcaggacacgttagcgtatgccacagctttgttgaatgaaaaagagcaatcaggaagcagtaatgggtcggagagtagtcctgccaatgagaacggagacaggcatctacagcaggtataacggtcagcatgtccttgtgtgcaaagggcagccttgctcttaagctttccaaaaagaatttccacagctgagggaaaacaagatgcttcctctggaatgtgagtccaaagagttaccagcgctgccctctagtgatctcagctcagcatatgcactaaccgtgtgtttacagggctgagtagtgctgcagtgtgaagtgaatggaaggcctcgaggtgtttgtggctggccaccctgatcagcctgcaggtagtcccgatgaagccagggcacagggggattcgttccagcttgttcactttattctgccttgccaggttactgaaagtccctcgtttgctctcaccagccttcctggaaatgtggactcttgaaagaaaagctcccgtgctcttgaagtatacctgcttgccaggggagtccaagaaaattttgacatgtatttttaaaaaaagaaaaaaaaacagc

SEQ ID NO: 53985 - DNA, 3097 bp, Homo sapiens
cacatagataggaaatgaatagacctttaagtataacttaatagttttttctcttagttttaagatatatttgagatatgtggcagccgtgtaatatttgtttgtattgggttttttgttttgttttgttttctttttttcaagacagagtctccctctgttgcccaggctggagccacagtcgtagctcactgtagcctcaaagtcctaggcacaaatgatccttttgcctcagcctcctgtatagctgggactacaggcacatgtcactgtgcccaactaatttctttttttattttttagagatgggatcttgctttgttgcccaggctagttcagaactcctggcctcaagtgatcctcctgccttggccttgcaaagtgctgagataacaggcatgagccaccatgcccgtcctgtattggtggtggtggtgttgttgttgttgttgttgttgttgttgttgttgttgttgtcaaacactaaattaatctcttgggtagaattataaagaaagcacccgtggctatgacaagttccttcttttatttactaatttttgtttcttcctttcccaggttattgaagatcctatacaagtagagcgagtcaaatttgtgtttgagacagaaaatggattactaggcaagtatgcctggtcttatgcacaaatgtctatagtaaatatgtggataatctattgttctggccagttctgcctcctgctactctcggtgggatctacagtgactgatacagtagaagtctggtcagggccactgggctccctcattctggtcagaaaaattaaaacccagggatcttctcaccctacacatttctcctcttttagtcaggaaggtgtagcttgggattcttttaccagataaggcaagattcaggggtgctgtgagtttttttcaacaagctaacggccactccctgatgcaagaaatttttcattctactctgtagccactggggagagaaaaaccaaaacctgagacgcaggatgttgtcaggctcatgaaatgtgaatgtctttttacctatagtaagcgtaaccatattttcacagtctactcttaagttgtttgggcagggctttctttttcagaaggctaaattggctttcctgagctatttattagaaaaagtttagttaagaataattttagccagcttccaccatttacctgtatttccacttaatctgaatcattttagattttgctatgtattaagagatttagggcctttttctgttgtagaaaaaagatttaagctaaaaagttttgtagcttcagcttttcaggccaccctttggaacgctgtactctagtcagagccacacacaggccgtctggaacttaaaaactataaactcctcaagagcaggaccaagtattattttttatttttatttatttatttatttatttatttatttatttatttatttatttttgagacagggtctcactttgtcttccagtctagagtgcagtggcatgatctcagctcactgcaaactctgccccacaagctcaagtgatcctcccacctcagcctcccaagtaggtgggattatgggcacatgccattagcccagctaatttttgtatttttttgtagagacagactttcatcatgttgctcaggctggtctcaaactcctgacctcaagtgatccacccgcctttgcctcccaaagtgcagggattacaggcgtgagccaccatgcccggcctatttatgtttaaatccctaaaacatagagcaggtgataattgctgaactgaccctagcatcataaaatttcatttatcaatctaaaagtactagaactactctcagtaatatgatatgtggaaaagtctctaggtgaataatcaggcagtaaaaagttttgttcctgttcagttctcctaaaagtcaaacttgcagcaccatgtatgttttttttgttgtggtttttttttttttttttttttaaacatacttaaagtagtgtttccacccattagaatttagggattctgttgagtcaggcaccaccatgcttttagttaagttgttccttatctgtttattaaaatagtttgtcgatttttagaacaagagagcttgttgtcacttggagccattttcagttgagtcttttattgttaaaatgtccttttctcttccctcagctttgatgcaccacagtaatcatgtggacagtagtcgctgctaccagtgtgtcaaatttcttgtcactcttgctcaaaagtaagtattgaattaaaatgcagggaggaaatggtgttttaattacaagtcacatatgagcagaaggggaacatgtgcccggttttgatacctggagaatctgactcagtcagggcctgcttgcttggaaggtacagaaacctatttgcatgatctcaaaaaaatatgaggggaagtattaaaagagtgacagatctttatagaatcccagaaaagctcacccatcaggccttatgtcagaaaggcaggaatcagggcagatatggaggctttaagagcaagagttcatgagctttcactcaaggtttctcattaatgtaacccagctaccagctcttcaggctctaggtccctaacctcagaatagcctttcaaatcatgtcacctgtagctcctgagcacttgtgaacccaggcaccgtgtcaagaaccttgcctgtattatcttatttcatctttgtaacaacttcatgaggttagtacagttgtgagtcatatatcatgggtagtttaagtgacatgcctagagtcatagagtgaaaacttgaacacaggctgattgactgcaaaatgaaggttcttttttttttaattgtggtgaaatgtacataacataaaatttactatttgaaccatttttaagtgtatagttcagtgactttaagtacattcacactgatgtgcaaccatcaccaccatccatctccagaactcttttcatcttctgaaactgaaactctggacctattgaagactgactccctattcctcccttcccccagcccctgggggaagcaattgtaatttctgtctccatgaattt

SEQ ID NO: 53986 - DNA, 1149 bp, Homo sapiens
atataaaatcggatctgtttagtgacttgaaatctcccctactctttcttttcttttctccttcctaatttcatagtaaagtatcagagtgttgcagctggaagaaccttagaggttgtttatttcagttcccagacttagcatttgagaaactaaggcctagaaagcagtattgacttgtccagggtcggccagaaggtgatagagctagaacgtggatccagcattgttaattgccattccaatatgctttccactgaagtttttatgcttttaaaaaatatttcagaaccaactagaaacggctccacctcatgagttaaagaatacgttccaactacttcatgaaatattggtaagtcataactgttctgactcacttttatttaggaatgtattagtcaacaagtgtttataaataaaaaattatatgtctttttattatttctccattcatttggtctgcatttattgagaccaaatcttcgtgtcagtcatgtgtctaatgcatttggtttagaggcgagcagtaataaaactacctcctaggagctcacagttgagtgagggagcaagacaagtacacaaacaactgtagtgcaggggactgaaggggagtgatagtgatggttaacccctgccagggcctacagtggagaaggcatcgtgttagcgcaaatgatattaggtttaaacttcacagtcaccctcagaggtacatttctggctttatagtttatcaaatcttagacactattgactgtatgtacgtactatgaaaaatatttttaagagccatgaaactgaaatgtaatcaattgtaggattctttccactctcagaagtgtgaagagcaggggaaaaaaaaatcctctggcagttgtattgaaggatggagtaaagaaggatgcaagattgggaactagaagaccatttaggagtctgggaatattctgagtgtgaaataataaggcctgtggtggggcaagggacagacagatcaagaggtattgtggaaagagaatcattggaatttggtgactggttatgagttaatgagtgtggttcagaggttccttagagagtgagggcctgggttcccttcgaattcttgatactccatagaggccttggcacagaataatcatt

SEQ ID NO: 53987 - DNA, 1084 bp, Homo sapiens
agtactctgtgagagtactcagtgtgtgtgcgagtcttgaaggaggcacattttcttatggatgtgtattttgtggagtaacaccaggtgagacaggttctgttttgtttctttggtctcctaaagctcctggcatatttaagcaacgaccacccattagcattgctccctcaagccctctgttgcccctccatgaggaggtagaagccttgttgttcatgtctgaagggaaaccttacctgttagaggtatgtacttgttattctaaagccatttttttccctcctgtttgaggaaaattgctttttgttacgagttatgtttggcatgaagagtattgttaagaaatggttctttcaaattaagttttcttatatgtcaaaaagaaataattagtggaagagaatgttattagtcttctgttcagccaaggtccagacctccaggtccagcccagccagctacccatcagggccccagagggaggtaaatggcacttcatccatcaaaatcatttcgttaattgtagagggtttcatccccaatctcttttgtgtgttcctggtcctggaatactacaactctgaaccacgtgtgttgttaaacctcaggagtgtgggtgggctgctctcagctctccatcatggtgcctgtgtggctcatcctcaatccaaccttccccttccagcagagccgcccccagctgtggactccatcttccagtccttcttccctacctgatttacagatatgtgaatctatgaacaatataattctggtttttttttttaaattaacagtgttgtgctatttaatacatatcttttttttttttttttgcttaatattttttggatctgttggtgattattttaattgtgggagcttttgcctttgaaaaactgatggaaacgactcctgaaaaagtgcacatttgcacaaaattgtgtaaaatttcagacaggcttagacaccctgaagtctatctatagacttctaacagttaagaaaccctgttttcaggcagtgttaattatcttaaaatctgggtagatttcagttaaaggcagcaacaacagatgga

SEQ ID NO: 53988 - DNA, 1423 bp, Homo sapiens
tctacttttgaaaacattttcacttttaatatttcatttagtcctcaaaatcacaaagtaggcagaatagggaggtggcaggtagccttacctctgccagtacatgaagaactcaagatactgttgtggtgaagaactcactcacattacgcggcacagtgagtggtagaggcagggccagacctgcagatctccagcctcagagtttttcccattatactgaggcacgttgtaagcactcagtacctacagtgaatccataaagggactggttttagaatatgagttaatataaccctttgagctggcttaaaacctgtgatttttttgtaccttgacctcttctgtcaagcactgagaaataattaaagcccagaatattatgaaccagcaaaccctgtcccttcctcttcatattatttctgacgacaacactaacagccactttatcttccctgatgacagatacgtcgatggagttcagcacaagcacgagaatttgggaatcttcacaatacagtggcgttacttgttttgcattcagatgtctcatcccaaaggaatgttggtaagcttaacatatcttagaatgaagagatactgaatttgtctagcttggagagtaattatattagcaagtaaatgaatgtctcttgtttctcattcgactacttgctagttgaggtgcacttaaaatttttgttttaattcatgttaaactttataatattttactagtttgccataagagaaagtgagtcatcattcatttgggagaggtgagagggtatataagtattttttttaaaacaactctttaggattaaaagctaattcagagctcatttatcaccttaatttgaaccactactgtgtggaaaatagccatggtgtgggctggagtctcctagtttcgtgaacctgaccgttctgatcttcagtgcaaaatgaaaatactcaaaacataattccccaggtataatgagataatgagataaagtactttgtaaaaacaaaggggatgcagatataaattacatcattgaaatatatttgaatgtaagatacagttggtagcattttccattttgtctcccagaactaataacacagtcatcatccaatacagcaaaaccacaaattgtcctatatgattatccagtgtcctaacttatgtgtgtactgtttttatactcttcctgggtcttgtcatgatagtgacaacaaccatagtaataatacaacaaaccagcttttcagtgttttctgtgtgctgtgctttaaatttattgtgtttaaagcacacagtgctttaaacttactgtgtttgatccccgtaacaaacctatgaggagtattcatcctgtctatggatgcaaaaactaaggcacagaaaggtttagtaacctccacaaggtcatac

SEQ ID NO: 53989 - DNA, 1586 bp, Homo sapiens
tgtctgtcttacgttctttttcttcatgtaattttatctttcctctaaccagttaaaaagccttcatcagttactggaggtactacttgctctgttggacaaagacgtcccagaaaattgtaaaaactgtgctcagtactttttcctgttcaacacttttgtacaaaaggtaaataatttttttcctaatatcttttcctaatacagaagatttatactctaaaaaatttttagactggatagtaaagttctatatggtatgttttttatgatgtttcttcctaaaaatcttgtgaattatattacttgtaagaattctgatgaggtgggtatagttactcattgatagcagtagaagtctgcattaaaactaggggttaattgtttagtagttattgtgaagcaatgtgaggctcaggagtttttttaattagattttaacaagtactttctatatggaaataatattcttaaaaaatatattgactccttaaaactttccatttagctgtgtttttaaaaccaatttttgtctggatagaaatataatttgttattctcaatatcttgtgacagcaaggaattagggctggagatcttcttctgaggcattcagctctgcggcacatgatcagcttcctcctaggggccagtcggcaaaacaatcaggtaaggactacttttatatccctagtggaatagctatggttttcatagccgctgtgtttctttttgtaggtgataaatgtttttaatttcataaaagtctaagtagtagtaccatagagacttgaaaattctttggagttaaattatctttacaacttcttcatacaatttagtctaataacccatggaaattactaactagtgacaaagtcataagagggaaaggtggattctgactggggagggggtttcaaaaacctttagggaataggtggtattggggtcttctacttcctctctggggctgtgaacaaggctgtcttggtggtggttcttttaagtcagatgctgaaaacacagccagaatccaaatgcaaagttgtgctgttataaactgaatgatagtgcagatataatactcttgttcaaatgaaaaggaagttgtttgggtttttttgtttgttgtctgtttgagacaaggtctcactctgtcaccaggtttgctgtcacccagattggagcacagtggtgtaatcaggggtcactgcagcctagaccttctgggtttcagtgatcctccctcctcagccccctggtagctgggactataggcacatgccaccgtgcctggctaactttgtattttgtatagaaacaggatttcaccatgttgcccaaactggtctcaaactcctgggctcaagtgatctgcccacctcggcttaccgaggttgttttgttagaatagtgttgaatatgtccaaaaccaactctcctgtttgaaattgctttattgcagtgtttctcccatccatcgtatttcttttatttgatagattcaaaatacatgaaatgctaacatgcagtggtaataagtactatttatggagtacttattatgtacttgatacgactgg

SEQ ID NO: 53990 - DNA, 1054 bp, Homo sapiens
ttttcagagtcctttctcaagaatttgtattagatctctctgaactgagactaatctgtgtctagagactcatctaggccagcagacattttgagccacctctggctttgtctttttcctcataagctattttcctgatctaaacctgcagctggcaaccaaaccaaatagtgctattcatccaggggcgttaagtccttacaggtacagcagttacttcccaagattgctgtttcaaacagctgacactacatggaaaactttgaaaaatgttattttcacaacaaattggcttcttataaacattagctggaggcattgtgcctcaatgaactaaatacagattctaggaattactgcttcaaatgcagatgttggctttgctgtgcaactttgagcaagtcctttaaggaggatgttgatccagatacagtgcctgccacccaagcacttagttccatgaacaaggcagtcaaatatgccccttaggaaggtcctcaaagactgtatctcaattccgggaatcattaggaagttgaggtttactgtaaggcagtggttttgatcagcttaaatagcagaaccattttttaaacaaaatcctacctagatgcaaaatatagaatacaagccacaggagcagctgaggacagttcaaatgccattgctccattccctgtggaagtttctaagatgcatcaagaatccttaacataaggaccatatcactctcctccttcctcccatgtaccaacccaaacaaaggataaaggcagagttagtgcagcctccctagagatggggtcaggccgtagcatattacccaccagcctctaaaggcaggacagcaggcggcagaaagagaagggaatggcggccatacacttggaagccatttgctcagtgaattctgtctgatgcccagctgatggattttcatgtctatttgcccccctccccccgtaaatggaaatggtgcctcttgccacccactttatcttgtaaagtactttgaaaatgaagtgctatgtaaatgctaaattttactgtattt

SEQ ID NO: 53991 - DNA, 1042 bp, Homo sapiens
acgggactcctgagcattgtgcaagcattagaatgttatagaaagatcatccatttggaaggaacatggcaaatatgcaaatattttattcattcccttatgtccaagcagacttgcttttaaatatctccagagaaactgtaacgtcctttgggtagtatgtttggtttcttggtattcctaatgctcaagaatcccagtgaattacttctacattcttcctgatggagtttattatagtttgtttctttctttataaagaccaatcactcatcactatcaattgctatgatttcgtgtttgaagaattaatgatctttttttctaattacttatttctttataatttttaagataggttgtcatttttgcaactaaaaaataagtatatatactatactcatattttagtaactttaaacatgaagagatattgtcttttagatcagccccttggtatagtcttctaaggcaattctttaaacataattataattgtaaaaaaattaattcatagtaaatattgcttacagattgatctaaagaattcagactactaacatgaaggatactttacatttttaaagagccttttattgtggaaatgtttaaacacacgcagaagtaggcagaatgagccctctcctgtacccaggccccaggcaagttgttgacatttgcctgtcttgccttagctatctcagctctcacacaggatacccacatgcaggcttttttgtctctctgaagtattttaaattgcagacattatatcatttcacaataaattttcagcgtgtatctgaaggtaaagttcatctctaacagcaaagttaaaaacaatgtaagtactttactgttatcacaccaacaaaattaatataattccttcatatcaccttatatctagtccatgttcagatttcctccaaaggtctcagaagtgtcattttaccattgagtttgcacaaatcaggatccagtgaggtccacacatggcctttgctttctgtgtctcttaaggctcttctgaccatcagtc

SEQ ID NO: 53992 - DNA, 1053 bp, Homo sapiens
tggagaggtttttggacagattttgcagtcaagaaactcttcagaaaaaatatatagtgacaacttcatttttatgtataataatcaaagatatattaagtgatctcagtctttattatctgaaaaagaaaaaataatgtatccctttcttttaatgtctggcataggattaactaattagtcactatgcctatcctggcataggattggtcacttttgtttgtgaaatttgctcatgctctttacacatggcccactatttccattttgtttatatggccattttacacaatgatcattttgggacattgggggatgtaagggaggtgttatgagggcttgggtagaatagtcattataccttttttctgcctgaatattttttttttattccataaggtaggatattaatgattttagcaataaagcataaaaatgtcaatgtaagctattctgaaagtggacattttgtgagtgtaaattaatgaaaaaaatgctatagttcaggccttttgtctaattcgagttgtttgatgaagatgcagaaggaaggtaaagtctaagacttaagcttctttacacttttttgtttgtggggaaagatgagccacaccacaaggagccaaggaatgcaaagcactgacttccagagtacactgagccatggtagtgggcagtcattaagtatctcttatccctccactctacccacgagagacatacagagagacattcatagatagaaaggataagaaccaacaagagtgcactgcatgaggtcattggctgggcttatgctcctaacattgctgtatctgcttttttttaaagggttgatactgaagaatggattgctaccattgaagcattgctttcaaaaagttttgatgcttgtcagtggttagttgaatattttattagttctgaaggacgagaattgataaagtaagtgttggagtcttttaattaaaagaaatttgtgtctcttccagtgatttagagctgaagtttcttataaccctttttatttcaacttgaaattattgttctgct

SEQ ID NO: 53993 - DNA, 1897 bp, Homo sapiens
acatatcattagaaatgtccttcacatattgaatatttttccatttcataaaaataattattaatcttcttttgtagatggtgagagatgagaacctcaagtttatgaagaatagagatgtatacagtagtgattatttcagttttgttttgtctttagcttcattgaatgctgtaagtaactaactggattgttagaaataagaaagggttacaattaaatatgctttagctaaagcattcagtgattcatcctcagtctcagtagttagcattcaggttagatgcaaaaaggttttcccgtgaatgtagcccgtattgggtaatattaaaatgcaagcagcattctgaatgtataatgtagatggtggggaggtgtgacttcccacatactggctttctaaagtgcccttgtttagatttataaaagaatcttagaatagctataactgtgagctcatgtcaatggatattggtctttgtggagattcctaatttgtaataaaatatcacaagactaaagattaactttcaactacttttccttgagtaccatgattgtaatttgccaataagggaaaacaacattcttagtctcttgatgacttaacatcctgcggtctaacaactgttttgagaggatttcataaaagaaatgaagacaatgtcttttcttaacctttttaaaaatttaaatggaacatttttttataatgaactggcaagattcttcttattagtatttaactttatcatgtgtgtatatcatattcatatattgtgtgtgtatcataatttagttcgtaactgtgtaataatctataaaacttctgtgaaaaatatcctctttcatgtttccctctcttagactaaattaaagcatccatattatccttgcatggcaaaggtgagcttacagcttgctattcaattcctttttcaaacttatctacggacaaagaagaaactcaggtgagaagtgatatgttttgataatctgttgtgacagagggcactggtgaattcaattgaagttgaatttataattaaaatattgtgaaagcagctacctaattttattcagaggactaagacatggtctctagctttaagaaacttctaacctaatggaaagaatagctcaaacaaaagagaaatacctaaaaagacaatttataccaaggtataaattctgtacatcttcgaattgggcaaaatcatatccagataaggagattagagtaggctttaagacactgatgttctcagagggtttcgaaaggcaaaacagagaaacacagagggctcattttaggcagaaaggaaagcctgagtaacagacaagacttggcctagggaaccatgagtgactaattgtgttttagtaggacgtgtgagagactcctggagctgaggctgaatgttgggtttagaactcactgagtgcccttagtgccagagcagggagtttgggctgtgttcagtgggagatcgtgaaaggtttttgaacagggaagtatgtccagagtaatgccttagaacaacagcctccaatatttttagcaacagggagtggtttcatggaagacaatttttccacaaaagggagggttggggggacaattagattctcatagggaacgcacagcctagatccctcatgtgtgcagttcacaatagggttcatgctcctatgagaatctaatgctgccactgatctgacaggaagtggagctcaggctgtaatgctcactggcacaccacttacctcctgctgtgcggccctgttcctaacgggtcccaggccggtactggtccatggcccagggcttggggacctctgccttagaaactttacagacattgactgtatcttattcatcattggttttatggtt

SEQ ID NO: 53994 - DNA, 1038 bp, Homo sapiens
tatagtattgtcagaatttgcctggatttggccgatcttggcagaaatggttaagtgaggccagttatcccatcttgtgccacagaacatatttttaaatgtcacttgctatttgcttacatttagacctccctaggatacttaccttctttctcttactccattaccatactgctcccttattccttgtccccacctatatcacttccaagtgagagatccagctaggcccacaactgaagtatcctgacttccatgctaagcagtactctaaagacactcacattttacttatactttgcattttacaaacttagggagtagttaactacttgctggaataatgggccctttgttttagattgtcaagacaagaaaaacttttatttacagatgtgtttcttaatgtcttgttataaagcaaacccatacactgatgtgcgccgaagatactggaatgcctatatgcttttctaccaaagggtgtctgatcagaactccccagtattaccaaagaaaagtcgagtcagcgttgtacggcaggaagctgaggatctctctctgtaagtgtctcttccatgtaatttgctgtgtgatttctatggtgatgatgtggtctgtgacaatatactatttgagattttaaagataattagctaagctggagagaaattctaaaaagaattccaaaaagaaaataaatcccttattgcttcatggttattttcttggcaagaagttgttacatatttagaaacatgcacgtaagttatttcattctagaattgaagtgttttgttttttgtttttttgagacagtgtggtctcactctgtcacccaggctggagtgcagtggcatgatcatagctcactgcagcctcgacctcccaggctgaagcgatccttccacctcagcctcttgaatagctgggaccacaggcgaggggcaccaggcccagatatttggtttgtctgttttttgtaaagataaggtctcccaatgttgcccaggctggtctggaactcctgggctcaag

SEQ ID NO: 53995 - DNA, 1513 bp, Homo sapiens
tcaattttcatattctgtctaccatgttaaggctgttgtctcagcattatgaagagccccttatcttaggcagctgctgttaccggaataggcagatctggaaacagtggccctcatttctagaaggcatcctagtgattactatgaaggaaaatgccttccttagggctcaaaccagaggctactttagacgttcccagacttaacatttctgagattttatacttgaactggtgaggtagttgttcctagcttaaactaggaaaacacttcctcttatttggatctcacttaactgggtactgctgtatatgttagtaatcaacgttaatatggtctttttgcttctacatagtttccctggatgctaaacatggagccttacacagtttcaggaatggctcgccaagattcttcttctgaagttggggaaaatgggcgaagtgtggatcagggcggtggaggatccccacgaaaaaaggttgccctcacagaaaactatgaacttgtcggtgtcatcgtacacagtgggcaggcacacgcaggccactactattccttcattaaggacaggcggtaagagtttcctgaggcagcacttactcactttctgccctcccctgctctccgttatcatccatactcaccgctgtggtgcagggacactttggcattgttcttgactgtgtttcattttgaagttttaaagcttcgtgcaactggttttaccccttcaatttgaaaagttgttttagaaattgaaataattgttgctacatatttcttagatattttcaaatggtaaacacctgctttatttgtagacaatacattgagatcaatgctaaggatgaggaggttgatttttttaaccttataatgtttgtctgatctctgggttctagagggtgtggaaaaggaaagtggtataaatttaatgacacagttatagaagaatttgacctaaatgacgagaccctggagtatgaatgctttggaggagaatatagaccaaaagtttatgatcaaagtaagtatttacaaatggatattttccattagtttttttatttatcgttttctataaaaattaatagtattctttatataaaaacacaacagattttgttatttttattgtactactgttctagcaatagaaccatgagcaagctctttaataaccaaagtgaaaatgttcaagctgtttataaaaatttttttaaataatttcttacaacaaccttgagggataggtaggggagctgggagtaagttaaaaggatgaaatgagcatcagagagaaagtaatgaatactgaaattgaaccttaaaaatagttttggaagtagttatccattaaaattttcagatttccttttcacttatgtagaggtgtgactaattagagaagacatttctagcacctgtgtttttaaaaccatatttattatgcagtgtggcaaagcagtctttccctctacaatccccactcccaggaaaaaagagtatg

SEQ ID NO: 53996 - DNA, 1756 bp, Homo sapiens
taagttggaaatggttttgattgatcaaaatggtttataatgctttagtttataggttatgttatgtgttactttagatgcatttatttaatcagatttaaatgaacttcttatgtttttccttacatcaaaaattatatcagcataatggaggcaatatctgtgttagataaatatttatatttttagcactgttacaaaccagtttttttttttaaatctatgctttggactacaaataaatttcggtgttaattaggtcttagaaataatcctgctgtaagtatatgtctgatgttaatgaagagtaagtaatacttaggaattccttgagatctagaagacctatacatttttgtctgctagttggttattacatggatgcagatacttaatatgtgcagatagcatgattctggtcatggcatgagaaccaagatctttgaatagcatttcaaagtgtaaaattacagtatccttttccacttgaagaagtgccatgttgaactttatccactatgctttttctggatcatttctacccagaaaagcactgtactggggtctatgttatttcaaaacacctgtaagtaaaatggtaggatagtcacctatttaattatatgtttactggaagaagtttaatagaagaatgttaccttctctaaaaggaattacaatatgagcctttttttgccatccagattggtcaggatccttcatggtaatcacttcgtagactcacattcctttttttcagagtactaccttaattcatgaatatatagtaggacatttgcttgattatgcctctttaccctaatagactgtaagtgccttgagatcaggggccgtgcacatttctgttctctcttatatcccatgcacagtgcctggcagatagaagggtatttaatcaatatttgttgaatgataatcaagtaattatataaataaacaaatacacacctatctgccaggtattttatgactgaaaaagcaacattgagatagcagtatttgataattatatcagcatctgcagaggtacttcatgaacataggttttgccagcatagctttcataacatgctggatgggtaaatctgtgaatatatctcccgcatagctatagtgtaaatgtgtctgtggcagaaatgctcattcttctcctctgctgtttctattcctctcttttccagtaccttcccccagtggatagcaggtccagttcagggtttgtggggctgagaaatggtggtgcaacttgttatatgaatgcagtcttccagcagctgtatatgcaacctgggctccctgaggtgatttcttttttctatcctttttggtacgatagataatacgtgcgttacttgaaaattgtttcatagttttttattgcttttggggtttcctaaaacaagacataacttgcaattctttagtagctcctgaaatgtgtaaagacatgttgtgtataatcacacatttttataaagttgctgttgtaataagctgcctgtattacagatggacttgacctaatgtgatttttgaactccaaagttgtttttaaattatattccataaagttactgacagttttagtattttagaaatatatagggtctaccatgagcactttacaataatatggtcagtggttttgagagtattccatgtgtactgggctacgcttatttcctgtagagaacctggtattactagaccagtttttcataatcagagtttaagg

SEQ ID NO: 53997 - DNA, 1053 bp, Homo sapiens
ttctgggttttacagctttcttttgctgccatcctaagatcttcttaggatgacagcgataaaatctttctacttacctattttatttgaaagacagttattcccatgtcatctttattacagagttctctttactctttctcctccattcttgctgatccattcattagatgagactattctgatcataagtgaaagaattttactactttatcatcaggccaagaagatagttactaattcctcctgtattcatgacccctggattactggatgtctggggttagacctgacttaagtatgtttgaggaattggagctcttctactttcatttcaactgttgatttagtttaatgagtaatttaagtagattattcattgttgaaattgacttgtgtcttttgtttctaggtgtagtacagcgaatagccgattggcagcctatgaagtccttgtgatgttggctgatagttcaccttcaaatcttcaaattattataaaagaactgctttctatgcatcaccagcctgaccctgctcttaccaaggagtttgatgtaggttttctagacgttgatgaacttaatttttttagaatgatctctgaaacatataattttaagactgtatttgcattctgctgaccacaaagaaagtcagtattactattttgcttactgtgttcacatactcaaatcaagtataagctatagtatcactctaatatactgaatatattatgaaatagtatccttttaattaaagagggagaggcattttcaagttgcttggtagttattctcagtaaaaagtagcattccaacctattttttcagtgactttatgctgggcataggccagaccctagagatacaagtcaaataaacattggctctatcacagtacagcctatgtgcagttaaattcaaccaaaatttattgagtttagtatgtgctaaaaggcatattaggcttttggaggtcaaaaatgaaaataggatcccagccctcaagaaggtcagtgtatagtgaaagagacaggcccataagcag

SEQ ID NO: 53998 - DNA, 1053 bp, Homo sapiens
cggagcaagtgtgctggtaccattattatcctcagaatggagaacaaataaaaatgtggctaacttggtcagtaacaaatgccaagagaaacgaaggttataaaaattatgtcgaaagtacaagtaaataggctctgagtaaaatcttgaaggtttctcaggagaaaacgataggtgctttagtgcatgaaccttgtcgtttgctgagtgctggctgtgttctgttaactgcaactgcttgtgatttattacagtagtaattttggaatcaaattttgtattagttttatgggtacaaatttgaaagatctctttgtaatgttgaccctccttgagtggtatttatactcttggaggtaggaagaagaggcagagctacaagctgctatttcatttgctccaaatctaactaactttgttcctttctcatgaaaaccagagttaattgagtaatcctgaagaaactatttgctgtttatagtgaaaagggttcctgtacaatttcagtggttattgaaatggacaaggcataataagcagtattttgtggaatcctaagaggtatcttatcacatataaatatttctctacttaaagttgcctcattagcaaaatctgttttaggtaagaaaaaaaagtaaaaccctttattagaactcttggggtattcctcaggctgtgactcccatcctcattgctaccccagccctgttttggaagatttggtgctaggtctatggtagtcttttattaaagcagcagaaacaagtgaatattttaattttcagtaaacacaaaagatatatctttagcagttttattattaataaaagtagttcctccataaatgaagaaggaaggagtgtttttgtaaaaatcatatacagtgccttgattaaaaaaggaaacatttgtttcatccctccccattgtactgaatggtgttgatttatcacagtaattcccagtcttttcccaccaaaaccttcaaggaagaaagagatttaaaatacacagaaactcttttcagaagtaatgctattttgtatcaca

SEQ ID NO: 53999 - DNA, 1021 bp, Homo sapiens
gacagagtcttgctcttttgcccagtctggagtacagtggcgtgatctcagctcactgcaacctctgcttcctgggttcaagcaattctcctgcctcagcctcccgagtagctaggactacagacatgcaccaccgtgcccgtgtaatttttgtatttttagtagagatggggtttcaccatgctggccaggctggtctcgaactcctgacctcatgatccgcccacctcagcctcccaaagtgctgggattacagatgtgagccagctcgcctggccttaatgatagttttttaaagatctgtaaagtgaaagattggggcttgactttgcttactttaattcaggactttgactccataaagggaaatccttctttctttgtaatggattttttttttccttcttagcttcagaaatggagcagttaaggatcagcccagctacgatgcttgaagatgagattacttggctggataactttgaacctaatcgtacagctgaatgtgagaccagtgaagcggacaacatcttactggcagggcacttacgcctcatcaagacccttctttcactctgtggggcagaaaaggaaatgcttggtaattattgctccatcttatcacatggcagattcttcagtgctcggttattgccagtactgtgtgtaagtgggaaaataagatagatgccaagtgttccatggaaaattgacccttcacacagtaggaaattgtccgttattttagtggctaacaaacttaaggtgtactttacctgtgtcattaaacaacatagagaattttatggtgttcaaaatagctggatcacataacttcctaataccaagtaagaattataattcaaagtagatttttctctttttgctgttatgtactttgtaatacataatttactgtctgtcttcttttaagggtgattctcatctgaagaggcagcccctaaccacccctgccctccagtggtggggtacatatgagattctcctagggtacacatgt

SEQ ID NO: 54000 - DNA, 1048 bp, Homo sapiens
gttatgcttaccaaaattatcttgctcacttgttttatgaatttgttcttacaaggaaaatgctttttattttcaaatcagcctcttattagtaactgaaacctttctgttttttagactgttatctcagtgtatggagtattttgatttgagatgccagttattagatgatctgacaagtaagtaaatgactaatatgtaggggagaggggctggggaagagtagaagagaaagtcacacggacatttctaaatatgatttacatatctcaggtgtaaatacaattacaattgtttgaagttgaaccttgttttcttgaaaatagcatataaacctgtgtaccagtgagctcttcttctgttacataaccagtcattaatgaattgagaacatttgttgattttttaaattgtcaaaggctcatattttaattacactgatacgaaactattgtgaagggtctttctctccggtgtagtctgttataattttaaaggttgattgttgaaggaaagagggactctttgttgcggcatgttgatagtgttagaagtcagttcattagtgttagttgtaaagtatcatggttagaaattcttttgttagtgtgctgagattttaatcatctgtacttacccttaaataatgtaaatgtactttggaatgctctgtgtaaattttagttcagatcatgagtttgttattctccgctcttcacaaagaatttgcttcagcttacaggaaattaataaaataaaaatcaggatccacaaaaatagcaattggtaaagaacgtcaagaccaggaggaaaaaaaatacctcagaattaatttctgaggttcctgaaggccagaggtaaaaaggaagcagcgtatggttagttgttcaaataccctgtaagaagaaatagaatagtttctcaaaagaagcaaatctctttcccagcacctaagtctaaaagaaatttcatacaaaggccatcatgtaatggacacataaagacagtgactaataatcctcaacaacatttctatggtggcagatgc

SEQ ID NO: 54001 - DNA, 1808 bp, Homo sapiens
taaataaatattcagaaatgaagttttagcaactccacttttaaaaagtgtactaatcctacccttagctgtttgatttcgtttaattttcctagaattgtttaacttagagatattttcaaatcaagatgaaaaaatgataacttccctccaagcttttatctgttatcatttgtaagtttattttaaggtatattttatagtttgcaactattgatagtttatcaaggcaagacatttattctgtaactggtatgtgcaaggcattgtgataaaatatagagcacaaaaataagacatggtttcttctcttgaacaacttagaattttatggggtaaatggacaggcatgaaagcaattgtaaaaggtcctgaattattgtatgtaaaagagaagagcttatgcttaagttgagcttaagaaattaatcaaaatttgaaaatgcattacctaacttgtttcacacacccacatcccccatttcttcttattagcatctttctataacttgccctgtgttgctgatttcatcattgatattctgctcggatcaccaagtgctgaggtaaggatttttcacattacttacaaaactcctttggtcctgttgttttgtgagctgtctcaactacctgtgacattgtcgggaatacaggagtggcattgagtgctctcagggagtgtacgaaggggctgcagaccatgaaagaaaagtaaccatttggactctactgcctttccttctactacctcctccatatgccaccaaaagttatgagactaatgttagtaagttatttttgtttataacaacgttacaaccagtgtctgatatccatagctcacaagggcagctggcactaagcatccacgttgttggtcagaatcaggaaagatcaacctcaacccataaactttcattagatattatagttctgacattcttacatgaccttgaggattaacttaaactttcttttttcttattttcatttacattaagttataaacctattgagtagagtagaatagtagaataatttgggaaatcagttcccaaaccgcagtgggttttaattagccattaaaaccttaccattaaaatctgaaacactcatacctttctagtatccttcaataacttgattgactaaataggctggactttggaagaaaatcactttttaagcagtctcaacatgttgattcatgtctgtcctttgctgctgatcatgtaatttcagattcgccgggttgcctgtgatcagctgtacactcttagtcagacagacacatcagcgcatccagatgtgcagaagccaaatcagtttcttctaggcgtaatcctcacggctcagctgcctctctggtctccaactagtattatgagaggagtcaatcagaggtaggtaataaaaatggaaaagctaaccttatacagagagaggataaatgataatttgtgtgctgctcccctgaagtccacagtgcattattgagatgactagaatttctttcttcttctgaaatttgggtcctgaaagatggcatttggataggagagttagaagaaacactaccaggccttcttctccatgtcctcagttctcacttcaccccatgtgattcatctaccccagagagaaaaaggagctcacctgattggtgagagcctggaattattggagcccggtcactgtgtaaaggttatactgatcctctccccttgtgcatcactttttcagtgcagatatcttgtagctccgtgtctagaggtagccaaggtatcctcctagcttgccttctt

SEQ ID NO: 54002 - DNA, 1418 bp, Homo sapiens
ataccatttcctctgggtgaggtaggcatggacaccagctcaaagcatgagcagaggatggttgaaggaattcctgaggggaggtctggcacagagaagctgggtagggaccttgaggaggtcgaggggatgggaaatagggaaatgatggcaaaaaggattcccaagtaccgtagaaggtgtggcacacatgtgtagctttattctgtgttccacactgtagaggtgtttttagtacaaactcctttcacatcactcagccatttacagggctgtcaaaataaagacattgaacatttggcttatttgtgtatgtcatttaattcatgtaccagatattgttcttaagcaatgagaacagagcagtgagtagattagaccaaaatccacatcctcatgaagcttacagtctagagggggagacaattaacataagtaaaagtatgtgtcagatggtgaggagagctgtagagaaaaataaagaaggaagcagggattcgggggctatgattttcagtagggtgatcaggaaaagcttcgctggggtgacatctagcaaagacctgaaggagataagggagcgagacccaggagaaagcttttcagaggagcagccagcgcacacccatgcgtggggacctgcctggtgccggcagaggccacaggaggccagtgtggttggggcaccgtgaatgaggcagtgtttcccattctcaaatgagacagaggtctgggacatgacattgcagagataccagaggtcaagttatgaagggtcttacaggctactgtgaagactctgctgtttttcagcataggaaataggaaaccattgaaggattttgtgcagaggagtgccatgatctgagttaaattttctaaggatcaccctgatgggtcttttgaaaataggtttggaaggtggagagtcaagagcagaagcagggagaatagttaggaagcttataggtatcataggaaattattatgatagatatatgtaggctctttttatgacagaatcatgtagaaactaagtaattgatgatgactgattacattacttatggaaaatttaaaatgaaaaaaaatagaagtctttaatatcctgcctttttttcttctttttgaagtttggttgtaaatgtcatgcagagagactccatcccatcagaagtagactatgaaacaaggcagggtgtttattccatctgtctacagcttgcaaggtatgtaaatatattgcattagtcttaccaggcaatacttgactttttcttcgcaaatcatgtttttaaatagtatgaatggactcagaataagtctagctgtttctttttaagatttttacttgtcggacaaacaatgcccacgttattagatgaagacctcaccaaagatggtatagaagcactttc

SEQ ID NO: 54003 - DNA, 1048 bp, Homo sapiens
ggtctcagttccctcacctataaagtaaaatacatatgcctgatacattgtagatgttcaataaataggagttagagttattgttgggaaactcatcttgcatttttaatatatgggctgttttataaaactttggtgtatatctttctaaagaatatatctagcatatcacatgaaattatctgttcttatctaagcctgagggtctgagactttcatgtttgccagtttcatgaaaagaacacaccagctttctctagaacggaaagatttttcttccaaagtaaatagaatagggaaaatgtgattattttatcgtgaaacatcagcttctacatatttctgggggaaaaacagtgtgcaacatttaaagagattctaactcaagttgtctgaatgttttatttagtaaaggagtaatttctgctgaaaatgtgtggatgaataattgtgcttatctgttccctaggttctaagctccaaactcatgccaacagctgatgatgacatggccagaagctgtgccaaatccttctgtgaaaacttcctcaaagctggcggtttgaggttagagtttcaatgtaatgttacatgagttgccgaaaatgaatatagttattttagttaatttcccctgcaaagtcttgcttattcctacaaggtatcatatgactcattgtgagagttattataagaaggaatgatgtttcagtcctttaaaatattttaaatcattttataacttctgattatttgaaaaacgtatggaagcatgtctctttcccctctggtagtgggggaaattttcaagaagagtagaagccaggaggctgtatctgtttcttttgtgtctcatgtcagtttgaaataaggtgaattttatcgctgtaaatccatattgtgcaaggtattagtgctggggatgcaaagataaattagatattatctctgcctttgagaggcagctgatggtttaacaaagaataacaaacagctaggtaactatattataagtattaaaacagggcaggcatggtggttcatgcct

SEQ ID NO: 54004 - DNA, 1030 bp, Homo sapiens
gctggtgtgatggcatgtacctgtagtcccagctactcaggaggctgaggtaggaggatagcttgaacccaagaggtcgaggctgcagtgagccaagattacacactgcactctggcctgggcaacaaagcaagaccctgtctcaaaaaaaaaaaaaaaaagagagagagagaaatacctttgctataaatggaaatcagaacttaatgttgacttttaaagtatttatataaagtcaataatgacatcaggtgtcagaactggaagagcctttagtaccatctacctttccacctcctcatgttatatattaggaagccaaagctcagagggatgaagttacttgtcccagatcagactctagttgtgattcagttgagacgtttttcattacccatgatgcctctttgaatctgatcattgcgtatgtctgagttgctaatataaatggattatcatttaattttttcacagttgatatttaaagttcatttttgttaattgttagaatgttgttccttaagggatttatccatatattgaaattgtgtcgtatctataatattgtttaattatgttctcagaataaattgatgtagaaaaagttgttagaactatattttctattttataatttagtggtagaaatttagatcagctcagtcatgtcatttattgcttatacactaatttaaaggataaaactaatgtaattataaaatatatcactagtattagcttaacagatttttcaagcctaccactttagcaatcttataattttattatcagtatttagagatacaaattttaaacacagaaactaattaaaatgaccttctcaggtgttgcttagaatacatgctcaaaagcattcacgtagtatttgaatcttattgaacatttagaatttgtatgatgaagtttgatgttttaatagttacggagtgatgtggttttatgaagttaatttttagaaaatagcattggtgtggcttatattaaagagggaaagaatattaggacgtgt

SEQ ID NO: 54005 - DNA, 1972 bp, Homo sapiens
tgcaaatttcagtctttgaccagtgagtgctaactgttattgtggttttggtgaaacagactagaactgagctcagatcatcacacttcaaatacattttaatactttttttttttaatctatagatctactaaacttgtaataattgagagattgctgcttctggcagagcgctatgtgatcactatagaggtaagccacttcctttttttaagatgtatgttgcttaggctggactcaagcgatcttcccacctcagcctttctagcagctgggagtttagcacacaccaccacacccagttagcctctcttttcttaaaaaagcatcttcattcatcatatatacatagatatgtatttttgatgtgtttatcagtggtgctgtccatctgacttgacttattcgttttttaaggatttttactctgttccacgaactattctacctcatggtgcctcatttcatggacatcttttaacccttaatgttacctatgagtctaccaaagataccttcactgtcgaggtaggtttacattaagaactacagccattttcatgttgtcttattattttcataaagcagtcttgattgagttagctgcatgaataatcattctaaaggtagtttggtaaacaaatgtagaataaagacctgaaatgaaactgtggggtacaagcagatatataaataaatattatataatgtcaagcggtggttaagtattgtaaagaacaaataagagtaaagcaggatacattggtgaggagggtgataagatgggaatgcacaaaatattttaggtaaagatggacagggaaggtctctctgaggtggtgacatttgagcacaaacttgagtaaagtgacagggtaaatgacgtttgcttgggagaacattccaggcaaatggaagaacaggtacaaaggcaagcaaggtggctggtgtgaggggagcacagtgagaaagggaaagagtggacaacgctgcagtggaagaagggcttgaggtctcattccacgcttgatggggaggaggtggagtgtagaatggaacataattatagcagaagggaagcctcacgagggcaggggttcttgtctttatgttctctgctgtgttcccagcttctagaacagtgcccagtacctagtagatgttcactcacagttgtttaaatgaataaataaatgaattctctcacaacgtgtttaattttattttacaggctcacagtaatgaaaccatagggagtgtccggtggaaaatagccaagcagttgtgctctcctgtggataatatacagatatttacaaatgatagcctggtaggtttaaataagcagttttgatgaataataaatgatataatataaatatttagcctgatatgaataatttcctcttccttttcctctcaataattaagaaaccactttttgcagctgacagtgaataaagatcaaaagctactccaccaactgggcttttctgatgaacaaatccttacagtgaagacttctggcagtgggaccccatctgggagttcagcagattcttcaaccagctccagcagcagcagcagtggggtttttagttcttcatatgccatggagcaggtactgggtgatcaatttccatttaaaaacaagaacttaacagtcactgtctttttgttctgactcttccaaactgtataacaaatgctgggattcattagtgttcaagcttgttgtgttatttcttccatcttaaaaaaatctcttcatcccacttacaccttcagttactgccccattctccttccaaaatcagcaaagctccttgaaacagttgtctgaactcgtttccagcttttcttttgccatcctctcttgatctctgttgataagaattagcctcttttcaagttggtctgtcacctccacctcttagtcctcatcttcttgacatttcattgaagctgatac

SEQ ID NO: 54006 - DNA, 4701 bp, Homo sapiens
cttataattagtttttaaatcatatggcctgctagatcaaattgccaaattgtctttttaaaatttcttagtacaaaagggttcattaaggtaaaaatgtatcaaggtatagaaatcctcctttcagatgtttcttttcattgaatttttaaattgagatataatttacataccatgaaactcactttttaaagtgtacaaatggtggcttttagtatattcacaaaattatgtaaccttcactctgttccaatcccagaacattttcattaccccaaaaataaacctatacccattaacagtcactttccattcattttatccagcctctaatctattttctgtctttatggattagcctaatctggacatttgatatgaatggagtcatacactgtgatctgtcgtctctggcttctttcattgtactaaggcataatgttttcagggttcgcccaggttgtagcatgtatcagtacttcgttcctttttatggctttataatattccactgtgtgggtataccatattttatttatccattcttgaactaatggacattttgattgttgccactttttgggtgttacggttaatactgctgtaaacattcatgtacaagtttttcagtgggtacgagtttgcatttctcttggatgtatatctagaagtcagattgttctgacatataattaacctttcaggaactgtctgttttgcaaagtgccacgctatttcgtaatcccaccagcaatatatgagggttccaatttcttcacatcctcaacaatacttgttattatctgcctttttttattttagacatcgtaatgggtataaagtggtatcaaaatttaatgggtgtttttttggtttgtttgtttgagatggagtcttactcttgtcgcccaggctggagtgcagtggcaccatcctggctcactgcaacctccacttcccaggttcatgtgattctcctgcctcagcttcccgagtagctgggattataggcgcatgccaccatgcctggctaattttttatttttagtagagacagggtttcaccatgttggccaggctggtctcaaactccagacctcaggtgatcctcctgcttcagcctcccacagtgctgagattacaggcttgagccaccgcacccggccaaatctaatggttttaatgtgcacttctctggtgactaattatattaagcatctatttatatgtgcttattggccatttgtttatattctttagagaaatcttaaaatcttttgcccattttaaaattggtttgtcttttaattcttgagttgcaagggttctttatatattctgggtactagctccttatcagatagttgatttgcaagtattttcttccattatgtgagttgtcttttcactttcttgttaatgtcatttgaagcacttaattttgattatatctgatttactaatattttcttttgttgcttctgctttggtaccatatctaagaagccaatgccaagagtcttatggttttagttcttgatccactttgagtcttttcattgattatctgtgttacgtagagtacatgaatttatttggcattctataattacaggttttaacttatttaaaactttttttgaaaatgtgaatctttgtgatcatcgattgaaaagacaaggagctcagttggtaagtacgttattctcaaatctagatagtttggataatctagtataacttgatattcagcaaaaaaaaaagtgttataattgagagataacatggatttttttggtaaagaacagcatctccttgactgccagcttctatgttgatgacagagcttctcctagtgtaagggaggctcctacctgcactaccatgcctcaccagctacctgcgaggacactgctctctctcacatctctctgtttctggctgatctagggacagccagtggcctcctgtggccacatgaatgcagagcagggatagttcacctaagcttcgaactcctcagatccagcaattcacatgtacctaaaaaagcaagaacagtcttcgtcctgggatcacagtggcagggatttggggagaaaaattgaggaatagacagtgaggcaggaaaactaggatgtacagcttatgtttatatttacacatgctcctttaaaaaaaaaaaaggcttattaactctttttccaagtcctttttattcaggacatggcttcctgggtggttagaatttttacaagattttacaagccctgggtcctactgtttactactgagctttagaaagaccagattgagccccaagaattagtgaccacttctggcttgactgtttccttttgaagaaaagctcctgaagatggtgcccatctcactcctgctctatttctgcttcagtagcctgttgggctgtgtgtccagtttgggtctagggatgtctgaagagatatctctgtacctatcctggttcccgtggaatttgcccagtgcttctgtggttggttgctttttaaagttccatatcagtataatattattttcatatagctgaggttttgcagccttaattcatattgaactgaagaggtgtggactcatgatgtaacaaaataattatctgtgattttgtaactttgtgatcttgatatgctttataatttaattttttttcttttgaacagtatgtagaaaagctggaattgataggaatggatttcatttggaaaatagccatggaatcacctgatgaagaaattgctaatgaagctattcagctaatcataaactatagttacattaatctaaatcctagattaaagaaggtaggtatctaaggaaagaagttatccatatacaaaaaagcagaaaattatatgtatattttagtgataagctgtgatccttggcatgaccaaaaattggcttctttattttgatattttgtcctgaataatgattacaactaaatgtcaaggactaattgtaatttccatatactctttcaggattcagtatctttacataagaaattcattgctgattgctacacaagattagaagtgagtagcaaattttatttaacatctctttgaggtaaatgctttttttctttcataattttatatttttagataatttataatgttgatgtttgtggctggatcctattgaagaatttatcaacagtaccatattgtggcatagggaacagatgtttgcccagtatataagtgtactctataggaaatctttctccctctcaccacctgtcttccccactccatccaccttcctccccttttggagtataggaactatcttcagaaaataggtcacctatacattccatatttgtaatagaatctttttcttttttttcttttcctgttcaggtattttatataagcactgcttctttttttgtttttcttcatgtttcacctagttataccataaatgttattaaaggccacagcaagacagttagtagtaggtggtattggttgtctttgtccattagaagcctgctgtgtaatgctagctcacatgtatctcttttatttccagcatgacggttaaagccttaaacattcatattcagttgatatgcttaagttttacatctaagcaaaaatgttccaaaagcataaaatgctactgcctcccaattccaataagttaagctttctggtgataaatatgtgctagaatatgtacggtatttccctaattgtgacttctatccaaatatgtcattataaaaaaaattcaagtattcgaataccccttatgaggtcccatgtaagtgttaacatatatagggcactagttctcagctggggcttattttgcctctgggggtcatttggtaatatctggaggcatttttggttgtccaactagaagcatcctactggtccctaagtaggtagaggccagggatcctgttaaacatcctacagtgaatgcccaggacagccctctgcaacagcaaattatcctgtccagaatgtcactagagtccaggttgagaaaccctgatagagaatgactgtttggtattttttaggcagccagttcagcacttggtggccccactctaacacatgctgtgaccagagcaacaaaaatgcttacagcaactgccatgccaactgtagcaacctcagttcagtctccttataggtaagtgatcagaagtgaaaaatacacaacacacatatgtcagttttttaaaatgattggtgttttttatgtaggtttctcagttattgatttcctcattttatatcataatttttgcaagctgtcataatcctgagaattacatgttccccatcatacatccctgaatctgtgcctctttggaagttctgtgtgtaggtcatcaccaggaccacccgagtacttccctgtccctatccttctacctggtggacaggtcttcttgttttagtttttatttgattcattttacttttattctatgtagtatgaataacttactgtttagaatgcaatacacatacattgtatgaaaactactttttttcaagttaaaaatatttacttagatatagcttttctccttgaatagtcaaactcagggcattaatagggtaagcagaatgaagtagaagatgattaattaaaagtatgcattatgcttgcatatgattagtg

SEQ ID NO: 54007 - DNA, 1473 bp, Homo sapiens
ataaagaggttgtatgaggtatctttgtagtgagggaacagttttgtatcttggtgtttgtgagttatctttcatatgatgaaggaataaacatcttttttttgtctttgatctgaaataataattgctaattcagtggataatgggttttgtttttcaaatcaattgattagtaacattattgttttttaaaaaattaggaaaaaaatcttaactcaccagttgtgagtttgtagtgttttactttgagattgctgaaattacattttattgacatccaaaatcaactgaatttctaatagacttgagatagatagcttctattacattgtactatcaatttgtaaacagaattctaatatttactttaccctaaattatatgaaaaaggattaagtaaaactgttgttaaaacttaaagttttgttttgttttaatgttgcttttaggaatgaatgcctggagttaactaattagcattatttctttttgcagtatttagaggcacatctaaaatttctagcgtttttcttgcaagaagctactctgtatctgggctggaatcgtgccaaggagatctgggagtgtcttgtaactggccaggatgtttgtgaattagatagagaggtaagaaggtggtattgtggataaagtaaggcagaaatatttaaatatttcactttttctgtgtgtctcacatcttctaaacacttttcagtttatataagcataaatagtatgggccaagaactgtaagtgctgaaaaaatgttttatataacatatattcatgataaaaataaatgtatgagttctttggtaattttgataccattctggataaaataccaaatttaaccaaatgagtataaagaattctagatatatttaagttttttcccttccatatgaaactaattttaagttgccaacagaaaactttgagttcctataatgatgttgcaccccaaaaacagtaaagaagaattagtacctggccacatttttttgtaaactataattaagcagccaaagatagattaaatcaggaacagaacacctgccttgacattttctaggagtaaatttcattttcctcatcttatttgacagaataatattaactacttcctagacttgtcgaaaggcttcactattgtgatagtgcccagcatagtgcctgttgtaagcaggcagtaaatgttgatggaaaaacccaagtataaaatccagtgaaaagtatgagtagatatttttattatctagaagaaagattgctagtaactgcttcatttaatttcagaattccaagcattttagctttgagtggtattttgacagtataaacatttgaagtattaaaatgtatctttacttttccagtttggaatatgtatgtgcctgaaatggatcttagttatagggtgatattcgtcttattccacagatgtgttttgaatggtttacaaaagga

SEQ ID NO: 54008 - DNA, 1676 bp, Homo sapiens
tatagactttttctttgaattttattgtataacaagttaccttcaaaggataattttcaatattaaataaaaatattgttaccataattgacttaattggccatcatgatactttttaatatatttgcttcttgctgaagagttcatatttatgtcccaattttgtaatccttttgggaaggtatctgtttggatataaaccttacagtttttattactgtcattttgcaacttttatagtgtagccagaagtagtctagctagtctcacaagtagttgacctttaatatataccttatttctgtgattctaagatgccagtgattgcaccctgcatctcagatttaataaacttgcaaagaagaaaaaaagaaactgtccgttttgcagttatggaccattggtttagattcttaatgagaggttgagcctaagcctttttttgaacaattatgaacaacttcatgggagcacactgctttgcattgtatatagtaatgctttggacctctctgaaatctttatgattggctgtataattttgaggcatgttgatgaatatggagttttgtgtgcttgttctcttttgtaaaactcaacttgctttttttcataattgagttatgtacactacaagttaaacaccttctcttgaaataaggtgcagcttaggacagagagacatttagtgctgagtggtacagcccttcacagggtatgagtctgtcatgccagcttctcctgacttcggaaaatgctttagtgtgagaccactgactgttttattttaattgtgttgatggacacaactggttagttagtgttgcattatagtgtaatctttttgataacatttaagtaacaaattagtgatccaaatttaagtgagaaagccattcttgtttggtactacctataccaggtaacaactaaaatgataggtagaagaacaaataccttttgtgtacagctaagtttgcacatactcaggtaagcacagctatataaaaacttactcctgtgcctagtggctggtgagtttcttttgacataattgtctaaagtgtcaatttcagatatgttaaaatatatgaaatctttgtcttagaatctaggaaatacagtatttgctgattgaggattggctgatccctatgaggcaaggaaaaaagtattgtgtgacaataacttgctcacatttacatattcaatagtgagatgtttctctacaaagacaacaaaagtgtatttcccctccacaagggtcttcatcttacactaaggctcaatagaacaaggaggcattaaaacaaaaacttcagcctctgaagaatgctgaggacttaagtttttactcagctttttggttagagatttaatagtcatgtttaaactgaaattcttaccaaattttgaaatttcatagtttgaaagatgctatttattaaaaagtagttctctttataaagagtattacacaaacagtagactttttagatctgtactatgacgatctggattgtcatataccagtttcagaaataatatatttggaagtgttttgaaaaatgtacagtgtaagtgtaaaatgtctgtaataataaaaatagaattacctcttatgaaagtgttttaactaggaaatacagattatgaatattttctttaatatttag

SEQ ID NO: 54009 - DNA, 2283 bp, Homo sapiens
actgtccttggaggtggtggttagcagattgagcggtaatgattgcagctctcctgttgttccagtccttaagcctcaagcctctcctctgagagggctgatcacagcagccagctcagtggactgtgcttctgttgttgcagcagccctaattggagcagcattgtcctctcacctagaccctcagggtgcccagaccaaacttaaagcctagcactggaaaggcttccgctttctgattttcattttattattaacataagaaaagttttggtagaataactagtggcttaataatttcattagtaaaacatattccttggcttttgttaagtatttctttaaaggatcttggatactgccaactaattttcattggtatattaagagactcttagctcagtgggcttttatttcttatgttgtgtttgatcacaaagtttagttgggggcattgaagaactttgtgttttatatttctgacactgaaatgtgaccaggtgaattttctacatgtaacccagctttagaaattttaaaaggtatttgcaaactggagctggtaattctcaggttatgaggaatttttcttttaactcaataacattgctttcttttcactcagatacaatttgaatttttccagtttccttagctcagtgattcaaataacttagcaacctctccttatgattaaaattcatccagttactgaagatgtttagaaccttcaatagtaagaggaaaagggtgtccatagaaaaatggtcttgtcttctcagcaacagacacgtttcttttatatataaaaggtcaaagctgaatggatttttccctccctccagggaagtggcgtttgaaaccagaatatccctcctgaccattattccttccttgttacagctaaacattacttagcttttctagtcagttgcatcactgcatctttattgcttctctttgcagtcatttcatttatgtctgttgttttataacaaaactcaaaaagtaaaaggagaatttttggagttattttgtgagactcgaaaggaatattctttcttttttatttccccactgctcccagtaaagaaatactggtgtaccattatttcattctaaacaataatatcttgccttttatatagcacttttcagtttactaagtgctttcatggacttttacaaagtacacattgctgaaggggggcagtgggaagatcaaagccccctggatatggctccaggcaggggggtgaattatttacttccactaaaggtgtttttctatgctatgccctttcctgccaggcagcaaggtgggctgactggggattatgtctccctgccaggctacacagaaactaagcaaagggtaagacaagatcacccacttcttactcccctcccaccctcagctacctctattcccccaactgattacccttccctctgcttttgatactcttaaaattcccaagttccactgttgtgttcagaaattctggccttgatttcctaactttatttctgtagattctgcagggtaccctcggctcccttggtcctctttcctttgctgcttctataccttccactgtctaccccaatccttccctcttatgtcacttctttttttcttcaattaaaaagtttaaatgtactcatccaaaaaaaattactaaaccaaaaaaaaacctcatttttcctcagttagttgtactgcatattccttaagttgtttatcttcaggccacctaccatagcgcctgacaggcttttagcaaatgttggtttccttcctcttacttcctccccttcaccctatgaggacaccaaaagccttacatagccatagctgagttgcctctacttaccaaaacacgtaacagaaagtaaaagtagcaagatgtcctcagtacagatactttcacatgatgtggttagtacaggaggaaataacttttagaaattgtcctcccaagcaaaaatttttgctgtggtcctagatagaaggataggtctggaaaaacaagacagatgaggaagtggggatgttcaactttgagaagagagaactcaagaaaatgtgaaagctttttttaaatacttagagcattgttatagagaagtttcattcaacttactttttatgtctccaaagaagttatgcagaagcatgtttcagtatcaatgaacttttatatgagaacagtctgaaaacagaattcagtcccttctgaggtagtgagttcctcatcagtggaaatactaagtcagtca

SEQ ID NO: 54010 - DNA, 1034 bp, Homo sapiens
acgtgttcagtcagacttgcttacttttaaattttcttaaaataagctcttttgaggtcctgaatacccctcctccccaccagttagcagtatttaaatgtacttttcttacgttgttaatgtttttagctcaagtttaaaatttttgcatattttgccagtttgatcgtgaagcaattcctgtgtcttttccgttctacagagctgggagactgagagtgatagagtaagacagaagcttttgagcctgattggacgaataggccgggaagctcgctttgagaccacttctggaaaggcaggagaatcaaatggatttttctagctacaaatgctcaaagcagctatttgcatattggctggctgatcatatgtaatattattgtaggttttagacgtactctgggaactggctcaccttccaaccctgcccagtagccttattcagcaggccttggaggagcacctgacaatccttagtgatgcatatgcagtgaaagaagcaatcaagaggagctacatcatcaagtgcatagaagatattaagagggttggtttcagcttttatctgattttgttgttagagcaacagtattccctgagtaattagagccaaataattttcctcccctgttatgtaaattaaactaaatgccatatctggaagctcttaccttaaagtccaagatcgggaaattataggtattgcttttaccaagtcacttatatttctcttaaaatgaattttcagcctggagaatggtcaggtttggaaaaaaacaagaaggatggattcaaggtaagaatttgcagatggaaccaactaaaaggtatactagtttaataatttcctttaataaattacaccacaattttaaaataatagtatgttttagtgtttcttaatgttcatattaaacttgatgtctaaaaatttgtttatgacctatgctttattatttaaagcttgggaggtgctcttaatgggaaaaaaaatctaggatcacattcaaagagtaattttattatataat

SEQ ID NO: 54011 - DNA, 1031 bp, Homo sapiens
gtctgttaacttcttataactggcctttgatatattttggctagttattgaagcacattgtaacattgtaaaaattatctatctatctatataaatatttgataatgtatattagactcagtcacaataatcttatctttttaggtaaccaaactaatagaagatagcactttatccaaatctgtgaagaatgctatagatacagacagattattagattggctagttgaaaactcagttctgtcgattgcactggaaggtaagttgctttcaaaaataaaaattacctaacacataatttaaataatatatctttgtattaaaaagtatacaaaattgttgctttgactgtattagtctttaaatgatcttatagtaagttattgttttgaatcaatagaattatatttagagagtcagtgttcactatatctgactttctctctcatgtttcttcaattaggcaacatagaccaagcacaatactgtgaccgtataaagggaattattgaactcttgggtagtaaattgtcgttagatgaactcactaaaatttggaagatacaggtaggttgatcagaattatttttgcctttggctaatgtttttggactacaggagagcgaaaagggtgatgagagagcaggaaaacggaaactttatcttgctttaaacagagcagctgtacctaacccactttacagtttcaggtttttattaagattgtatgtgtaaatccactcaccacaagaagtttcaaactgctgatctagtctggtcttctaattttttaaattaaaaaatgagaaggtcatatagcagttagtggcagagctaggaataggtgtgtgtctttgtttatcaatctagtgttcttttcattatattattaattttcattaataatttttttcccatttagtccctattaaataaagatgattggtgagtttgtagatctcatcttactaggactgtcaagaggtgtgacagaatccaacatagtcttcaatttttttttcttcactttg

SEQ ID NO: 54012 - DNA, 2442 bp, Homo sapiens
actcttcagagttagttttctggttgtgttaccattctggagcagtgtattgtatgaatttcatctataggcctcattcacatcagtaagcaaaaatcgttcatatgacagcataatttccatggtctgtgtttatattcagttttaaaaatcaagcacaaaatatttattataaaaacaattcatgctgtgttttaaaagttagactgtgtgtcttgagtcactcttcaaaattacctttataagatagtaatgacagaaaatgtactcatattatagtaaagaagctgaggcacctaagattaagcagagtcagttaagggtttatttggcagtattagctagttagtagctgctctgatatgaaaatttttatcttttcattgcaccttctcctttgtgaattgtagatgaagaagtattctctctctacttttgggacagcttcgggagttcttaactgtagcattttatttctacagcccatgctagacccagtcattcttactacaatccaggatgtacggagtgtagaagagaaagacctcaaagacaaggtaaatgccttctccagccagataggccccagtgccagttagttcacagaagcagagccaggacttagcagggttcacacaccatgctctttgaattctggtcacatgcattcacatcgaattaactttacatttcctaattaaaaagtgctgtttctgaagcaccattggtggttgttacctctagtcaatagagttaatacagtgttctcagtaagtgataccattcagaattttactaacatgattttgatggtatcacaattggcatagagaaagttttaaaataatacagtgttacaacttacccagagttgtttaaagcaattttaccatttaaatttaatatgacttattttgtctaccctaaatttttcacaggaccattccctttcctttactgctcacccatgtgctaagttttgtttctaagcaaaatgaagttaattggccttgtaaaatatcagatactgccagaccactgttaccctatattcttgtgtatgttataagaattgggatcaaaatgtttttacagttccttttttgtttttttgtttttattcaataaaagagattggttagcatccctgagctcttgtctgccgttaagttactttgcatgcgcttccaaccggatctggtgacaattgtggatgaccttcgactagatattctattgcgcatgctgaaatcaccacatttcagtgctaagatgaattctctcaaagaagtaagtttttcatttgtttctacaagacttaatgcacagatactaagttctgccaagatgtatgcttattaatataacaattttgggaaatatgaataatttattgtaatcatataaaaaagagaatgattgtgtataaaatgttgtatataattgttggtaaagacatcttctgtgttactttcaaaatttacatctgaaatatttaaaatatttactgtttttgtgaaatttcctagaatataatcccttagaatatacagtttgagatttacttttgctctaagggtacagttggttttgttttatttcaggtgtaagtttacttaaaccaaatcttctaactggggttgggacaaaaactaaatgactgcagcagtgttggtcaaagcaaaatgatggaaataattttctgtagctttctgaatttgttatcatatccacagaaacagcacagttggttttggtgtgtgacacatggagccaatgcagttcagttataattcacttattttttccttcggttttgtattgttaggattcttgactaccagtgaaagaaactcatcttgaaccattttagaccaaaagaggagttcattgaaaagaggctgggttattttacatgaatgaaaggtttactagccagacaagaaaggatgggcacatgtgggcaacagaacaactagaatttgcaagctgaccactgtcaggactctgtccaagtcttgtccctgcttttcttagtatgttggccttgctgcctctctacctgcatttggcatttttcatacggtagagatcaagacaatgaatagatccgatgtttcacatcctgcagttcccatcaccggagagggactgactcactccttctgcatatgaagtgtcttcctgacacttctgtatactttccacatataaaatttggagggagtgcctgattgaggtttgggttagatgttcatccctgagccaattagcagtggtccagggaatgacagctgtaagaatgactccatgttcttttttttttttttttttgagatggagtctcgctctgtcacccaggctggagtgcagtggcacaatcttggaccactgcaacctccgcctcctaggttcaagcaattctcctgccttagcctcctg

SEQ ID NO: 54013 - DNA, 1048 bp, Homo sapiens
agagtcttttctgccatcccccatcaggacctttgccattttagcctctctgcctggactgttctttaaacggctacatctgtcttgtcctttaaagattatgttttcagagaagtctttcatgaccaccaccccaagtagaggaaggtcctatttttctttcgaggcctttttgtttttcctttcgtgggacttagcacaatttgaattgtcttctgtatatgatgctctacttggttttgttgaccctgctagaatgagcttcataaaagcaggtacaacatctcttcgtagtcactgttctgtatctagtccctagaacagtgaatgctcaaaaagaaaagaaaaagaggagaaaatagagcttgcttaagagcattaattaatgatctaactgggactaaaacttttaatctctgctgatttactgcttcttatgttaataattaagttttaatttctaaaataaaacttttttggagaatttaactcaggttatcctgtatgttggagagcttaaacaactgatctcagctatccaaaaatgcatagatgctccacattgtggcagttccatcaaaatacagacttacagactcccaaaatcatatacagtaatgttaaagacatcttaggaagcgtttgggaaaaaaactttgaaaatagtttccaaacttttataatttttcttctgacttttcatttaggataaaagaaatgtaagggttaatggggaagcttttatattgccatctcaattttgtttttcttttctcataggagcctcatggatgggttgtggatttggtaaataaggtatatgacttttgttaatattgtcatgtagcatattttcaattttctaatgagacgtcctagagtttggtatattaagcaaatggcagctgcagagaataataaaaaaaatgctttaaggagtggatttcatattttcttcctttttttgtatgtacaatactagcaggtaaacatcagcttttggacttagtactatctgcagtatgccacaggagcattagaaggatca

SEQ ID NO: 54014 - DNA, 1666 bp, Homo sapiens
aaccccagtttaattggtgttccagtttcttagagagagttgagagactatagcatttaaaatgattacttgtacctagaaaaaataatctagtacttaatctcatatatattttcttttgaacttcatatgcattaaaacttgctttttcaggcctggaaccagtatattttatatcaaaagactacagtctgccaataagagtatactcacaagaagtagataatctaaacagtcctttagttaaaacactgtttggtttcagaaacagttgaaagaagttgagtttaatcaatagaaaactggttcattgctttagtggaagcagaggtttaggtcagcaatcatttatttaacatttactatgtgtctggcattattctaagtttgaggtataaacataagtacacagtcctgtcttttaatataaacagtaataagatgtgattactagcttgtagtatagtggaggaaatacgaaaacaaaaaaatgacagcataataaatagtaggtggaattataataatatgtactgtacatagaatccaggggaaggggtagttattgccaccttgaggagtcagacagttccccagagaggaggaaaaagctgagtggaaaggacagtgaatatgtactttggaatttaatccccacaatggctctttgagttgggtactatttttacccccatttcataggtgagaactgaaacagacagaagtgaagtacttgcccaagtccacatacctagttacagggagaacccatgcaggcagctagtctatgttctttaaccatatgcagtattgcctccccaaatgctaaactcttctcttcagatgtgttgtgaagatcaagtgacaaatacacatagaaatactgaacgtggtggttcactctagtgagcgctcagcagatgttcattctctttttttcactttacgtatgcatccactgagacccagaaaggtgcagtctttgtgtttcctctcattaccacaaaggaattctctctcctctagatcccctcttctcttgccttctcaagcatattcctccttcagctttctattttttctttggtatcctcaatctttccctcactgttgggattgttactcttgtatgcaacatgatgtagtatttcccatctttaaatattctgcctttaatatcatatccctctgtatggtcctctgctccccttcccaaccagacctcctgaagattccatgtcctccctctcagttattctttcagtggttatcctaaaatgttaacttactaaacaaaatctaaatttcactagtatctttctcctccttgagcagtacataaagaccttagaatgttgcatgtgctcgctcccctcttaaatgattcattacctctttattttacttgtgcattgtcttagtcccctcctatcattttttacccggtaaagttgatagtgcattctataaagaatcctttagtaaggttctgtttgtgggtaagtcttggtttttgatggcctgaactttactttatttcccattccttgaagtatgtattttcactgggttcaaaagtctagatgatatttcttttctctcagaatattaaagataccatttcactgtcttgtggctttgattattgctgtggagaagttggcta

SEQ ID NO: 54015 - DNA, 1127 bp, Homo sapiens
agagatacttcagaaaactgttttgtctcatgccttcagctgttaggagcagtataataaatggtcacatggttggtcatttttctgtaaaactgtgagtacaaaggtaccatgccttatattattcagttttgttaaagtaaaaatattaaattcttttgcactttagagctattaaaaaggttctcctccccgtcaattaggcatactttcttttattaaatcagaagagctagagttctgtgtgcctttaggcttgtctgccagaaaactcagtaggatttgatataattggtactacttacctagctgtgtttctcggttcgatgaccatccctctccccaattccccaggcttttctcacgagctgtcacacattttcttttagaagtaagggtatgaatgatatgtgattacataaataaggtgcacaaaggagctttgttgtcatttccaccttcttcaccttttaccttcaggctagcctggatttttactagtgtattcaggcagagaagataattcaggtttgaccatagtgcatggttatgtttaaaccttgtgtgcatcttcttcacaaggtactgcctgcctttccctatctcttctagaatgtaggcagaattgcattttcaaagtgaaaaatgagcaaatggaatggtgccagagggattgctgcttaatccacatacatttttattttgtagtcacttgaagcttcttaattggtaatctctgctttgttttgctttattatttaatttttaactataggaggaatatatagtcaggcaaaaaaaattctgcaaaaaatagtaacttactggtttacataaaatcagtcttatgacttctgctaatttgagcaagtagtgcggctaattagtatttagaaaatctggaaccgaggtttttctctgcagctattacagtttgggctcttccagcctgctctttttaaagaggttctcagtgaagccaagatgaaatttttgttgtatagtattttccctttgaatatttgttgcatagtattttccctttgaaaaatcttacaaaaacatgaaaccaccataccaatttaagtgaaatcctttgatttttcatttcttgttctggcacttgt

SEQ ID NO: 54016 - DNA, 1105 bp, Homo sapiens
tcatcaaaggtatatattctacttttaataatttcgtaagaactaaggttcctatgacatagttccatatgtatggatttagaatgatgtatatgatttttacgaactaccaaagacctaaataacgtgtattatttcattcattttactaaggtctttctgagtctgacttaaataaagtatattatttcatgcattttactaaggtctttccgagtctgatgagaattgtagaaggtttatggacaggtgtatgcctgaagcatttaaaaaggtaagaaaaatgtgctgctgtgatattttgtgtgtgtcggggtgggggcagggtgaaggaagagaagctttttgttttaattttagttttttatgtataagaccagtttatgaatcttgtttaactgaggaatcctctaatatgaaaaacggaactctgaatttggggcttataaatgatttacttcttttatattgtctgtatgtgtctttggttaaatataacttttattaataataaatacttcctactatttaattgctaaagaatagattaagacttaattatactagacttaatagattaagacttaattatactaggatattgcacatattagtaaacaaaggcttgtggcacttagaaagacagtatacacttatcaaaatatgagccattttaagtgtgtgagacaggagaagacattttaaactactaaaagattgactaggtattctcactgacatgcataaggcaccatctctattagagccagagtgatatgcctacttccatttgggtcacatctcttagaaagcagtgtttcttaacaatgggaatgggagatcacaagaattgtgtttctaaaaacagactgaatcagcctccctttttagcagatgagccttgaatcctcattagagcaaggactgtgtctgttaacatactgccctttcccccagcatataactaagtgcctagctcatagaaagagctcagaaaagttgcaatgaatgattcttttgctggcttaactgctggattttgacacccatttttgtccaatatgtaaataagtcactagaactacagatgggtaatgtttgcgtt

SEQ ID NO: 54017 - DNA, 1049 bp, Homo sapiens
caagtgatcctcccacctcagcctcccaaagtgctagggttacaggcatgagccaccatgtccggcctagacagttctttttatttatttatttatttatttatttatttatttatttatttatttatttattttgagacggagtctcactctgttgcccaggctggagtacagtggtgcaatctcagctctctgctcactgcaagctccgcctcccgggttcacgccattctcctgcctcagcctcccgagtagctgggactacaggcgcccgccactacacctggctaatttttttgtatttttaatagagacggggtttcaccgtgttagccacgatggtctcgatctcctgacctcgtgatccacccgtctcggcctcccaaagtgctgggattacaggtgtgagccactgcgcccggcctggacagttcatttttaacgaaagagatgaggtcaccttctaagcgagcgagtagagatgccaaaatgataaaagttgagaatatttgagatattcttggtgaaagatgtgattataggaaagaaaggtagaatccatgctattggtattaatagctaccattgattcagtatctgctctgtgttacataggaaatttttagagtaatcactaattagttttatttgctttttatcttaatcccttttcgtcagaagaatgatgagaatggaaactgctcaggggaaggaattgaattccctacaacaaatttatatgaactggaaagccgtgttttgactgatcattggtccatcccttacaagcgagaagaatcactaggcaaatgcctgttggcatctacctacctagcaagacttggtaagttttcagaccttagaacacatgaggacatttgtttcatagaaggcctgagtttaatcttagcctttgttgttgcctagctgtgtgttattggacagatcatttattctcttagtcttcacttatctcctgcagaagaaaagctttgaaccaaattaattgttttcttctacctttgatagagtataagattatttaaaat

SEQ ID NO: 54018 - DNA, 1035 bp, Homo sapiens
atagtacttatgaattaaatgtatttctgaaaagtgttacgctttaaaaactgaatttttcccatgcattgtgattctaagcgtacttagttcatcaccccctccttctacccttgtccaatttacattgtcttctatgcttaattaccttcctgttttttgttttatttagttacagactttgttggggtggggggagaaatgtgttggatttctttagatatcattgatatggcattgaagttagttttcttctgtgttttatgatttctgctttatatttatgatctttttcttcattgaggttaaacatgatttttaaatgggattattttattttgtaatgattaaattatatagtaaattgtgaggatatgtaggtttccaaaaaaaaaaaatacaaactagtgtgcgtattaggcaatttggggtcctgtttgctttgttacaaattagcatggtgagaactgaaggaaagtctggcagttaccctattaatagttgaagctttatatggattatttttccatttaacaatatttattaaatacctactttatgctaggtgccagcttctagagatacagaggtggtcaaaaatagataaggtccatgcccttaggcagcttggtctagtgaggggcaaacaaatcacagataaatgtaaaattacacctgtgagtagtgctgtgaaggagaggttgaggatggtaagggtatatgataactgaaggaatttgtctattttagaaattctggaaaggcttccctgaaagaattaaagatgtgtaggagttaagtaggttaaagagaacagaaagatgagttcaggaatagtggcgtaaagcaaccattgattgtgcccgtagattctgtggggatgggattcagacagcagtttatctctgctccatgatactgagaacctcagctggaagactaagtctggggatgacttgatgactgtaggctggactcatgtgaaggctcctcctctggccttcaggggctggttgtccaatgagaccttagtga

SEQ ID NO: 54019 - DNA, 1048 bp, Homo sapiens
gtagttgttatactgtatataaatacattatttgtaatgtaaattacaaaatgtaaatacattgctttctatgtatttaaggactaatgacaagaaaaaaatgtctagatccgttcaatacaaatgcaaccatccattttttcccaaatattttcagttcacaattggttgaacccatgggtgtggaggactgactttacctgaataaccaagaagggttaatgcagggaaccacatacaaaagtcagcttttgttgaatagtttaggaagttatttactactcataacatggaatgaagatgcattccaggaaaacatttgcagacttcagacacaatgtattcatacatggggactgcatacacttacttgtttatcatcttctctttttccaggaagcaatattttaggaattattttctctagtctgaattaacagggaatatcagatctgcatataaccatctccaaattgctttgaaaaatatttagtaaaactgacaacctcaatatttaatgaaaggtattataaattagtgacttgcaatcgaatgcccatgtttgcatgtttttccttaagctcttcacatatatgtttctaattgtttattataatacacaagtaatagacaaatctgtttaaaatcatcgtgaagagatcagtctgtcatcttcatttttctatatattgatcagaggttcttttgagcacatgttggttaatagcatagttcagtaattgaatttagtattcaaataaactttaagcaacactggtagtctcttatccgttaagttgaataattttcttttatctgtatttgttgagtcagtgggcagacaggagcttatctctaaactagcaggtggtaggtacctccccagtaggttttacttctttcaacaaagaaggcttaaattacagtaatgtatccttgttgggttcaagagtaatcagtttattgtctctttaaaaaaataagggtactttttctaaataaatattaaactctcttattaacttaaaagcttgcatgttgatttttt

SEQ ID NO: 54020 - DNA, 1049 bp, Homo sapiens
ttgtacaagtgatcccctgcctgagtctatccacagttgctcatggtattgaatattttaaaaataagctttaagagtcagtatacaggccggatgtggtggctcacgcctgtaatcacagcactttgggaggccaaggcaggtggatcacctgaggtcaggagtttgagaccagcctgaccaacagggtgaaactccgtctctactgaaaatacaaaaattagctgggtgtggtaatgggtgcctgtagtcccagctattcaggaggctgaggcaggagaattgcttgaacctgggaggcggagtttgcagtgagccgagatcgcaccactgcactgcaacttgggtgacagagtgagactccatctcaaaaaaaaaaaagaaagaaaaagtcggtatacaaatcgcttgaaacagtataccacctaatttaatacttttctgtttcagatgtgtattgtttagtttcttaaaatagccttttcgttctctgtgtatcaaacacagtaatgacggcaaatatcaaccgggatgtattatatacttgcaggtttgaagttaaacattttgaaatataccttggaatggtgtaaatatactgaaaatataacacttgccttaggttatatattttaatgaatacaaaaataaagcatggtgaatattgatgcgctcttagaggatacttaaaaaggagatcagttttaaaatttgctagatcctcttatgactccttgcctgtgcacgtgcattttctcctgcctggcatgccctcctctctcacctcttgccatagtgggctattccatagcactgtgtgtgtggtatcaatttgatccttgcacttgatcctttcactacaaaatagatttaacacagccttgcagttggcagagatagggtaggaacatctccttccttaagtcaagcaagtcccaagagactccgaatgctaacataccacctgtactgttaatcactcttgctaatggttttctgttagaacttgatgccttgcattatacctcctcccgttctttcttcccttc

SEQ ID NO: 54021 - DNA, 1025 bp, Homo sapiens
aaaaataagaagcatattaatttgtagttccttaacttacctcattcctatttctcttgttcccctttggtagtaagtggtaattataaatggattaaaattgtaatactgtcaatgtgtataattaaggtttatggtaaaattcatgttattcttttcctaaaatacaacaaccctagtatgagtgtggagtaaatatcaaatgagtagcttttagttaactattagtgatttggtacatgacctgtggtttatgaattactgtgatttggtaaataaaaaaaggccctttaaaggctttagagtaaaaaaatgaaataatttcccaaatcagttgaaagtagatgaaataaaaatagggaattaaagatgaatcagcatggcctaatttttaaataagaatttctttctgatccagtatatgtatatatatctcctttgggaattaggtctgtgagttaatctaatggttggagtctcaccttgtaattacctgcccattcacttttagaatgaatgtaatttggcatgaagagagtacctttcgtgtgtctgtgagtgtggttttagtgaaatcatagtaggttgtgacagctttatacagcataataatattgttagcttaaattttgaaaacaatttcaatgttagaaaagcaaatgttgtaatgttttagcaatttgaggaaaaggtttcaacattaatagaaaaatatgtccatatacttaagtatttttatacttactgcctacaatatcatataccatttacttgatctgagtgtgaaggagggcgttttttacttttaataagaaaatgttaaaaaagatttagtagaatctgaaatctggagttcagttttcctggaaattttccttatatggaaccacagagagaaataagaagtaaacacataagatggaaccatttcagaacaccttcgtacatgcattaaagctcatgcactccactcactaagcgctctaagtgcactaaagctcatgcatttctttcatttgtgttta

SEQ ID NO: 54022 - DNA, 1024 bp, Homo sapiens
agagtaaaaaaactgggtgaagattgtcagctattatatagttaatcctttttatttctaaaaactgagtaccttattttaaattatatacatttctatttgctgcacaggacatttcagtgtcattgtcttctttaaaaatgggaaaaacagaataaaatctaattgattagaaaagaaagaaatgacttaagtttttttatatttgtagtttggggatagcaatggttttctcttaatgccttcctgtcccaggggcagggagtagagtgttgaacagaacgtggtgtttacattctagtgggtcttagtccaagcctctcattttacaagaaaagactgtccaaggtcatgtagctagttaggtaaatcagtttgaggccctgctgtaattagggtttggtttaaaaattaatatttgaacagtgaaagctgttaacttccggttcagtagaagcaaggagaatgcagataaaaaagacccagatatctagcaaaacacacaactgcatagaaagccaccttgttaatatcctccaattaagtaaagatagtgttttgcagaagagatgtgtttggttctcactagtattgttggatgtaaatgttcttggtctctgggtctggaagggactttgagaagctgtccagttttgattttgaatagcattacttcaaaatcattccacggcacataagagtctgttctattattaaagagagtgagctctcacagctgctctaaataacttattctgatttttaaccacccccctgtcagaattcttcactctttactgcatggctaatgtaaactctggcctgccaagtgcgtaccaattggttctgttctctacacaacaggaagagttgggcctttgtaatctctccaggggatcagtagaaatctgaaccaggtatcctgtgcatctcacagaacttaacaattatgaaatgtaccttatccataaggaataccatcaaacattaatactataatgaataccttattcattaagtttgt

SEQ ID NO: 54023 - DNA, 1012 bp, Homo sapiens
aaggaagcgatcgacctaattttagaaagactcagactctgaggctcctaaggtatgagacgtggaaactcgggtgaggattatttatcatttatcagccttggcttccagaggaggggttggggctgattcagctgaaaagcatcccccatgggctttgaagtcagatagatctagggtcgagctgaacttggctgagtgactaatttcaccagtctgagccttggtttcctcatctataatatggggcaatagtatctacccaatagcgtttttttccccagagttaaatgagaaaatatagaaagggtctaataaattacgtggcccagatggatactcaattaatgtcattgaatgaatcttcatggagagagcacatgtttataaaaaaaagtcttcagtgaatcatgataagagtattgccaatggtctctaatttctttagattagaaaagaggttttcatgttgcttgcatttggtcttttccttatttaatgtctgccacactctgaagactttaagaatgtttaataattgaatgattctgtatttatatactcaaaccctggcataaaatattcttgctaattacataatgcactctggtttacattataggacttttgggtttttttttttttaacaccataatctctttttttcttcaaaattgagatagctttatttattttttcctggttctaagaataataaaattttgttgaattttttttttttttttttttttttagtcagagtcttgctctgtagtccagactgcagtgcaatagcacaatctcagcttactgcaacctctccctcctgggttcaagcgattcccctgcctcagcctcctgagtagctgggattacaggtgtacataccctcggctaatctttgtatttttcgtagagatggggtttcactatattggccaggctggtctcgaactcctcacctcaagtgatccccctgcctcagcctcccaaagtgcttggattacaggtg

SEQ ID NO: 54024 - DNA, 2712 bp, Homo sapiens
ctggattcctttgtgaggaaagggaaagtagtgtgaattaatgactatcactaattatgacctgcttcctttgttgaggaacttatctttcattgctattcgtttgccttgagaaataaggaagtatgggttgcagatatgggcaatggactgagagtccttagaagtggattctactgaaccagtgttgtgcaacctgggacatgtcactgccttttcccgggtctcagtttccctatctgtacaataaaccttgatgatatgatctctgttgtccttccctattcaaagagttatgatttggggccccttttcctgaagtctgcgctcctctgaccttccttttccctctgtacccagacccccgatgtcagttactgacttcgatctctgatttgtgcttctaggttttcttcgtgtctgacctcttcaagactaagacgacgctctccctgcctgcccctgctatccggaaggaaatcctttcacctgtggacattattgacaggaacaatcaccacaacatgatgtaggtgccacccacctcctgagctgtttttgtaaaatgactgctgacagcaagttcttgctgctctccaatctcatcagacagtagaatgtagggaaaaacttttgcccgactgatttttaaaaaggaaaaaaaaaatgttttactatgtggccttccaaaataggtagtgtttgcctatgtggaaacaacagcaaactaacaccaagtgccagagtcctggatgtgcaattggtttaagtgttcatgttctagtgaacacagcttgttcaggaacaaacactaaaacgatttgagtagaggctgctggtcaccttttgtgacctgaggaatcccaggcctgtgagaaaagcaaaaattcacattgcagcacatgatgccagaaatagcactgaatcaagaaaatagccattgcggagctgccctcttgagtctttctgtccatcccattctattctgtactgtgactttagttcaggaagttttgttttgtgttttaaataaaaggaaagagcaagtttgctcagtcaagtgatcagatcccgaatctagattcccagttctaaggccttatcacctcccctgcccataggccaacaaccatagttcctcacattagtgattagcagactctttgtggacgagtgaatttcacaaacagcacaatttcagaagaaatcgagggcacaggccctcacttttcttcttttgacgcatcatcctgtgatgttgaaatgtcaattgcaggatgctgatgttgtgcacgtcaatcaccgggcacttgcatactcttagaaacagttcgacttcggttactgccttctcccttgaaatccttgctgcgtgcccaccaggatttcctgtgagggcccaggaatgagcaaggcatggtctgccaccagctgacggaaagcagccttctgtacaacagatgggagggtgaagggggcagaatgaaaatcgaaccaaccttttagctgttgcaaatcagaaggagccagagaagcaggcagtctcatgcatgagaggttacccttcaggatgacagagctgagggtctttgtaggagttgctcttgctgtgtaaagcactattgtcttggggttgagccctagggcagttcttggtaggttctgctgggcagaacatatgggttaaatctcggtagagagtttccctcatcctctatccgtaagtgtccttccatgcaaggtcccactctaggtgatagacagggaccccttctactgaacctttgaggaaaggaggaaggaagaaatgcgtttagatcttggatgcagacctttcaaagggttaaatgtaaccatatggatcaaccacatgcacatccttactacagaatccgtcctttcatttcaacttatagcaagctatgatttttatatataaatattatataaataatgtataaaacattaaaagttaactatgtaagatattatttctgaaacaatttagctatatccactatgattataaactgtgtctcgacctgtgttatttacattagctgcttaaaaaagcattgagttaatttttttaaatatcaactaaaatatcatagttctgtggtagacattgttttataatgaaataactgcaactagagaaaactgtataaaaacattaaattgtcagtatttttgtaaggttccattttgtaaagagaataatattcaaagacttttgtagcatacaaagtgaaaacttgtatctgcgaaactatacttgtattaaatgtgctttttaaataaaagctcgtaacacaactaattaaggacttgcaagcctggagtgtttgagagatgtttgtctcaggtgtgtgggtaggagaaggaagcatcgcgggctggcctctttgagtgggcttgcctcatctcagcgcaccaactcctgatttttttcagtgggaaatgtggtggtcatagggtagataccgatgtctgccctgctctttcatctctgaaagcctgtttgcagaatgaggccctggctctaccctcatctcaggctcttctaaagagcttttgtattctaaagaggatttttccatcagagaggtaggagctgtaggaaccccgagggcagataagcagccctcactctagataaggtatgctgggggagcttactgagggaatcctgtacacagcccacatcaa

SEQ ID NO: 54025 - DNA, 1033 bp, Homo sapiens
ggtgattctgaaacagatggtttgaggacaacactttaagaaataccagaatagatgatgctcaattttcttgaggttctaagattctaaaattcttctgcttttatagttatctaccctttgctagcattttagctcaatgtgttacgtaaggatgggattcctattttcaaggagttcacttacactcagggaccctaggaacatttaaaggataattttattgtcataatctgcccttaacaaaattaacaaaatgaccctcaaaatttgctgattcagccattcctagcaatgaaaggaggaacctggctacctaccagacttcttatttctggtgtacttggttcttggtgacctctaggcaggcagcaccccagcagggctggactgtgtgtgctccctggaaggctgacatttccggagtgtgaatgctggcagtaagacatcggaagcatcttcctctttgagtgtgccaactcttggccaaagatagctctagaaattgtaagaactttgagagcagattctgtttgtcctatagaaaactcccatcagcatattgcctctacatccagctagaatgtgtcagatttcacatgttcattcatagtctcaaccactcttttttcccccctctctttttatctttttccagttttttgtttgttttatctcttcatcacggtgaatggggttcttacagcttagagttgtcttgtttgtgtgtactcatgctcttgaaggaaggggctacattgtccacagtgcttgggtaaattagatcatattccaccctgggatcacagaacagtttactccttttgactcaggaggaggtcagaatcacttccccacagataaatccatagaaacagaaagtagattgatggttaccaggggctggggagagaagggaatgggacatgactgcttaaagtttatggagttttattttggggtaatgaaatgtcttggaattagataaaagtgatggtggtacaacactatacagtactacatgccactggcg

SEQ ID NO: 54026 - DNA, 1269 bp, Homo sapiens
tttcaatattttccaacacctgagtttctgtattagatacctgtcccctttgatggaacacagttccagtgtcacctcatctctgatgaaaccttctgtattagctgcctctggctgctgtaacaaattaccacaaatttagtggcttaaaagaatgcaagtttcttttcttacagttctggaagttgggagttggaaaagggtctcactgagctaaaatcaaggtggaacacattccatctagaggatctaaggggagatctgttttcttgctttttctagctttctggagctacctgagttccttgactcatggccccattctccactttcaaagctagcagcatagaatcttcacttctccctctctctctcacacacacatatactttctctggcctttgcatccattgtcacaccttcttctgtgacttttgtccttttgcctccctcttttacagatgctgggaccaccttgataacccaggatgatctctccatctcaagatcttaacttaatctcattttatcatgtagcatcattcattgcttctgggacttaggatgcgggcatctttgggggacattgttcagctttccacaacttccccagtccctggagacagtattgtctcacttccttccagtcccccatggccttttgcactttcttcctaccatggctttaggcctcatctactcatggcctgctcatatgtctgtctcttcagctagattgtgggtgccttaatagcagaatccatggcttaaccttctgattatttattctcggtatgtagtacagcagctgacacaataggtgcttcatcagcattgggtaaatggtgaatgatgaattagcttgtggcttcaggccagacacttcccttctgggcctagtttcctcacctgtgaattgaagctggaggccttgtagctccatgacctttgtgcacagacattctatggcacagctgactttgtagtaactgactgaggtacagtgcattaaccctagaatgctggttccataactgcagagccttaggcaacaggcatgacagccgagaacttttacctgggtctgttgagggtagatcctgtcacaacaggcagacttgtctagacaaaaatcacatgtcaaatggaagtctggtttcctcctccattgcttactaattgaatgctttccagaaaaggaagacaatggaagccagcacagacagaaaacctatacagtgtcatgaactcaacacaaagacacaagca

SEQ ID NO: 54027 - DNA, 1047 bp, Homo sapiens
cctctgcctcccagattcaagcaattctcctgccttagactcccaagtagctgggattacaggtgtgtggcaccacacccagcaaatttttgtatttttaatagagacagggtttcaccatgttggccaggctggtcttgaactcctgacctcaggtgatccacccacctcagcctcccaaagtgttgggattacaggcatgagccaccacccacctcagcctcccaaagtgttgggattacaggcatgagccactaggtttggctgatttgcaaaactttctaaagaaaattgaaaggacacaatttcggcccaccagaggaggtgggaaactctgcagtcagtccgagaagcccttagaccctcccccagggcttttatgttgagctgcaggaagttctggagttgggcaaagagactggactccccggtgtacccagtgctgtttttttgttcatgcagcctgtgattcatagcttccctggggtgttggggagaatcacatttgggtcagccaggtttagcactgacagttttgtctttagaatcaagcagatgtggaatcaaatctggctgtatccatgaccagctctgaagccatgagtgggttacatagctttagagcctcagcatactcatctggaaagtggaagtgatcatgtctattttgcagagttgttgccacttttcctctctggaccccactttccccatctgtcagatgaaagagtgggatgagatggcctgtctatttatctctcaatcacaatggctctatttgaaaaaagtttgaactgccctaagtgctaaaaaggaagatggggagccatcaagacaaacttaggcctacattaccatcgagttcagagaatggcagaccggaagcaccagccagctccactccaggcttttcacagcagccacttctagaggctccataactttaagggcacttcatgttaggtcaatgaataaattttgccaaatgatgagcttggaaaaaccatgccccaaacaccaaattatcctgcacacagaagcttaagg

SEQ ID NO: 54028 - DNA, 1447 bp, Homo sapiens
ccaaaaatctatcctaatttttcttcatatttcctctccataacagttaaatatttgtaaatatgtgggcagttgagctctttttcaccagaaaagacaggaagaggagctgtcttgcagttggagccaacctctctccaaactgcagcccttctcaggcaaggactgatccctttctgtccccttgtagcttaattgcaatgctttcccattttattagtttccagattctgtgccaagtgctttaaaaggcaggtaggggagaattctctgcttgcctggcagcctgccatcacccccagaatctgttgcttgctgtttcagaaagggatcaacattgaaggcatttttctcagcagtgaaatttacatatcagaaccttgctgactgaggcagaaatgagggctctaggggcaggagtctgggagtggggacagagtctttgtaggaggagggggagggaagagcttattttcttacccaggaataaaaacattgtgagtaatgaataaagtccgaaagcagtaaatctgggactcgagagttaggtgtgtaacgtgtcggagaacaatttaagccttcgcctcgtctgtagaggtgaggtattcaggctgcctttcacaacccaaatttcattaaatagacttttaagggttaggattacaagaagccaagtccgcctggttcataatgatgatttatggctgtgttgtcgactccctgacccttctgtacaaggggatagagaaaatacataatttgttgctcattcactctaaaatctgtcaaggctgccccagaagccatgtggtcctggagtcatgtgtctgctaaatggcttcagcctggccctctccttaaaaatctgcaattgctcttctgcagtggaaattggttttaataacaatagaaatgataaaattatctcagtgtagtctgctgtgggtctttgagcttaagagtcagaatacctgggctctactcttaactctgtcacttactggcctcaaatccttcagaaaagtcactgtctcccagagccttagtatctccatctgtagaatggaatatcttcttcacagagaagattcaatgaaactacagtacaaaataaatgtaagagatggctgctgttaacattattattaggaatttgaggtactgcaaaatgttcttttcatctccttgttttcccttgagtgaaggaaacattttactttgcaatttactatcttaagactgtgacactaaaaatggaagttttagagatgggacattagagctgaaaagaatccctgaattgtaatcaaaccccgtctccctaaagtaactggagcagaaaggtgactcatctgagattaatcagtaaattcataaaagagatgctaatttgcattggaaactcacatgttctttctcagcatcaaacaggaaatcgtgttgactg

SEQ ID NO: 54029 - DNA, 1051 bp, Homo sapiens
agcattccgtagctgtctcctcccccaccttccaaaggtcacagagaaccctgggcccacctctgtggctgcagtcactgtgctgattgtcatgtctgtttacttgtatatttcttggctaccctgttagctgcacaggggagagacagatctgatttgatttggtattgctagtgtgagacatagaccttggtgctcaatatatgtttgtgaaaaatcacagaagaggccataaactgggggcagaaaatcaaaagcattaggtcaaaagatatcagaggattcacagagcaggggaaaatgtcctgttttcttccttaaaatctcaactatgctccaggaggcacatgggaacacactctgtaccacatgcaaatttcttgctggagagacaagaagaagagcttagtacctgcaagacttgtttattcagtatcatgcttcactttgcccacatctggacttcattagttcctccccacccctccatctccctttatctacaagagccctgccaagaaaacaaggttcctcaacattgcctcctcattaaaggctagtcgagttttcaactctgaaaaatgtgcagttgtgctggcccagtggtgcattagtgggagacccagtcccccagtttacaatccactacatctgtgcaattaccaagaccaccaacagagagaggccacattaatccttcaactgtgttgtcccctgatcagatggctacagagttcttctgagaccttcttatccctgggggaacagtgggagggggcatctatttgtgatttaacaacacaggcatggagagtgcactaaattttcatctgttccctttctccaccacccacactcactctcatgtcctggaagaagtgagaacagcagcaattcttccttagttaggtacagctcttagggattcatgactatttgaaaaacgtatcaatacggaggtgatgatatgctccatttgaagtcataatgcttaggaggccgagaaatactttctgtgaggggcagtgtgtgttggggatggggtggagag

SEQ ID NO: 54030 - DNA, 1031 bp, Homo sapiens
cagctctgctcactcttattggtagttctttgaacagtgaaagaaaagcctggaaaatggcattcatgaagcagctactatgtgccaggcactgtgctagaggttgtgtgtgcgttgatctcctttagtcatcaccacaactcattttactgtgggaaaaaactgggactcagggaaatggagtgggaaccagaggaagtgctggatctggggttcacatccagatttttttactccaaggccttcactaccccaggcagcacagccttagtgaacttctcaaaggggaaatggttaagagctaagaaatgaatgcccttggaagcataaatcatgagatttggggctatattagtaaatgttgcgattcgggctttaatttttagcagggtattgtagaacagtgggaaaacccctgctctggctctttcactgcctacctccgagctcttggggaagagaagaggataatgcctctctcctcatgggggtgtggaaaggaggaatggggttgtgcatagcgaaagctctctctaggcagtagatctctacaaatggaaggaacgattatcactctcagtgatatttgggatggtcttttcttgaagttcctctttggcactgatgttttccccttcctttttttctttttttttctggtatatgccatggttccacctggaccagcgggcctccccttcctcatcatcgagacaagcaccatcaagccttaccaccgagggttttactgcaatgatgagagcatcaagtacccactgaaaactggtgagacaataaatgacgctgtgctctgtgccgtggggatcgtcattgccatcctcgcggtaagtgtccagactctgctatggtggatcctgtctgacttcttcctgtattgtcatattatagaatgtctgagccaacagagacttataccaagtagaagccaactttctctggcctatatttagccaagaaggaaggtagttaatcctgagaacactaaatgtgaagtaagtgctatcaccccc

SEQ ID NO: 54031 - DNA, 1019 bp, Homo sapiens
aaaaaaaagtaccatgaactccacaatttttcaattactttggtccagaccagcagtgataaaaatgctcactttctaaaaagtgtatttatgtatcactgtgcatacacacatggatttatttggttttattctttggatttatttgaattctatggctatttattttgtgacccctaactgcttcctgctagaacaacaatttactttatcaaattcatactggtgctttgaaaagaaagaacagcaacacaccacagtattgtgcctgaccttctcaaagtaaacacagaggggccatgacaggcaatagccattaggttttaaaactttgtctctgcaatggaggagaggggggcagggaaaggcagtggataaacgttctggcttagaaatgatctttaggggttaggagcctgggagagaaatcatatggtcccgaaccatcttcatgccactgcctaaacattttgaaatgcaaccaagttggctatgaaaagtagctgagaagccagcagtatgatattattaatagtctgcttttaaagttccacatattgagatttaaaagttgagctgcagttgctctggtgcctaggagccaaagtgttgctaataaactcaggaagggaacagaccccaagttccttacatttgcactccactctcagacctccagcttctatttttaatagtgctcacatgataggcctgtaaaacatatgtttctatggacaataaaacacatataaaagagttttggagttagacagaactgggttaatgatcttgactctgctccctactacttgagtaagttatttcacatctccaaaactccctttctcatctgtttaatgggaagaatgaaatctaactttagggtggttgggattatataaaaattaaagcattcattcaacaaatatttattgaggcttaactatatatattaagttacaaggaacacaaagatgacccagaccctgccctcaagaagcttacaatccagcagggga

SEQ ID NO: 54032 - DNA, 1268 bp, Homo sapiens
gctatgacccaaccaacacctatgctctttcctccaagaattaagattgcaatttgaattttcactattagtttcaataatgagcatatgaagaaagcaagcaagtcagaaaatttaaaaatgaaattatcacaccttgtaaagtgttcagatttgacttgaagtttaaagtcttttgtccatttcagtatttcctgtttctttgtaaatccgtagaggatagacgtgaactccaaacctttacactggaagagagaggcatgaactttactgaatacttaatatgtggcaggcagtgagctaggggcttttcatacgttattaactcacttggatttcacaacaacactatgaaggtggaggttgaagttcattctgtttttctcagaacttggtcagcaatgtctatagcaatcctcattgatgggttggtgacacactgttaataattcagctaatcagtagcagaggtcatttactaacatttcagggaaaatgctctgctagaatctgctttgagctggtcacttgggccatctatccacttttactgaaaatatatcagagagaatctcagttccagttctgtagagccttagaagaaaaggtcaggagccatggtaggagaatacttggccaattttctacagaaatggaatatcttttctgcagagagacagcaatatcagattgtattgttaattcttcttatcagtcttctccaaaggtgttaaaaagccagggaaatgaaacattttgagtgaaggagcctgcactttggaaaacgctccgtgtatttcccaggctattgtagggcccctattcagttgggatttgaatggtggtgtgattagcatgaaagcaagtgtataaagtaggtcttttctccctttcctaaaagaagttttgtggcatttctttttctgacagagttggcatgaagctttgacaaacacagacccatggaaaagttaaataggacttagagtaggtccattttgtacagatcctacacacttagaatgcagagcaggaaagcagctggcaagaggcccctcaaaccataggaatcatagcaagggctcttcctccactgtggaccaaggatgaataggaaacacccacaagaccaatgggaaagtatatcctgggctgttgatcattttctgtattaccagaaaatgacagataagcacatgcctgtgagtccactgcctatctctcccagtatttgtggagataaatacaaagtgctgagggaaagtcta

SEQ ID NO: 54033 - DNA, 1771 bp, Homo sapiens
cctaggatcatttagtaggtaagccctgttgacttttctagtatggttaaaagcttttattcactgtccataatggttagggtttttttttttttttgagacagagtcttctctgtcacccaggctagagtgcaatggcgtgatcttggctcgctgcaacctctgcctcccggattcaagcgattctcctgcctcagcctcctgagtagctgggactacaggcacgtgccaccatgcttagctaattttttgtattttagtagagacagggtttcaccatgttagccaagatggtctcgatctcctgactttgtgatctgcccgcttcagcctcccaaagtgctgggattacaggtgtgagccaccgtgccaggccccttttctgcttttaacccttttgattacctgtcaattttagattcttcctttaccctttcttgtgcagttgtttgggctagaaagcccagttggtcacagcgtgatgctaatgagaccatagtcaagggcttcttccctgtgtaggcagttatatttatggagaaaccctgtcctgtgtgtcagttcaatccagtacacgttatgtgaggagtaatactttgttttggggttgcctattacaccagtatttcataaactcacctaacatggggcctatctggtatgaaatacagattctcggactcttctccaggatattcagattcagctggctttgagccaggacctgggattctgtgttttataaacgctgccggtgattcttatcaggccaattttagaatcactatgttgtttaacagctgatatcttaagggcaatttaattatgtagtgggctttttgtccctgcactgaatgttctggcattttctgcattgttaggttgtctgtactttttttgtttgtttgtttgtgaccagtgcacctgtctttttcagtaaagataatcaagtttgcaagaattcttccgaatggaaaattacccctggatgcagacctgaaggtgtcctgtgtctttcagtgcaaagacttggtgttgtttctaatgccaagaggctaaaatctttatgtattttctggttgtaaaccgaactctatgtaattgaagttgccagccatgtgactctttggataaatgaggtgttaattttaaatattttcttttgagatattgaagtttgtgcatgagtgcaaggtgaagcaggaataaattagattcctaaatagagcctttagaagataaaataagcttggcaaagtagtgtagaaacaatacaagctttggatttccccaaatctgtgtttgaatcctgacataaagcaaacagccaccttttgccagcatgtaattttgggcaaaaattatttaacctcctccaggcttcagtttcctcatctgtaaaataagcaaacctggtaatacttgtttgttgtgaaacccaggtgagataatgaaactgaaagcattttgaaaagttcaaaatcacgttatcattatcaggtaggaatgaagttgctgttgttcttcatagagtcgaattttcattttcctcccagttttcttactcctcaatggttctataaaatcctcttatttcttggcagcaaagttgcctgaactatattaaggaaaaagattctgagaagaatcccaagaaaacaccaagcagagtggacacaaatgttttccattagctgaagaaaagcagtggcaggtttcctgaccctttctgggaaagtcaaagtgcaggaacctcaataggctttggtgg

SEQ ID NO: 54034 - DNA, 1051 bp, Homo sapiens
tacgtcttaggcagcttaaggaaggggctgtgctttcggaatcccatccgagccaagtaaggaggtccctctctctctctccccccacgtcttctctttttaaaggacctcgtgaaataaaagtgcagaaaacaaacccaggcgatcacagcagcagccgccgcggcagcagcaccaacagcaggaggagcaggaggagccggaggaggaggaggaggaggaggcaaagttagagttggggctggcgctccggagttgctgggctcagcgcagctcccattcattaaggaaccagctgcggaggaaggtggccgagcgcccgcgctgcccactcgctcgctcgcgcactcagacgcgcgccacaacagcgcgccccaagctgcgcagctctgcaaaagtttctgctcgggatctggctctcttccccttggactttagaacgatttagggttgacagaggaaagcagaggcgcgcaggaggagcagaaaacaccaccttctgcagttggaggcaggcagccccggctgcactctagccgccgcgcccggagccggggccgacccgccactatccgcagcagcctcggccaggaggcgacccgggcgcctgggtgtgtggctgctgttgcgggacgtcttcgcggggcgggaggctcgcgccgcagccagcgccatgcaaaactacaagtacgacaaagcgatcgtcccggagagcaagaacggcggcagcccggcgctcaacaacaacccgaggaggagcggcagcaagcgggtgctgctcatctgcctcgacctcttctgcctcttcatgggtgagcccagccccgctgtccctcggcccctcggcccctcgtccctcggcgcgcgtcccagcccagtccggggccgcgcagcgccgcgccgcgccgcgccgtcagctccggggggcccccgcagccttcctggggagcctttgcgccgcccaggcccgaagcccccgccctccccgatcccaccgacttcttggcctgtacttgagtgggtctgggcgtgcttaagcgttcgtgggcaa

SEQ ID NO: 54035 - DNA, 1037 bp, Homo sapiens
ccagtctcaccccctattttcacccccttcggttttcctcagaaagggcctcctgcctccctcggcaccctcgcctacccccctcgcagcacctgtcgcctccgcccctcactcggaccccgcgcatctggcgcagcccctcccgcactcccgcccagcgccccgcgtccccggcccccgctgtcgctgcttcgggttccgccgcaggagcctctcactcccgggagcgggcgcctcgcgctccctccctcggccccgccccgcccgccgctcgcccgttgcttcccacctgggcccgaagcgcccagcgccctctcccgggaccccgcgcccgccccgcgcccctcgcggctcggggtccgccccctcgcccgcagggcccgctgcactgtgggtaggcggcggcggcggcggctacgcggagcggcaggcggtggagcgaggccgcgcgcgccgaagatggctgagaagcagaagcacgacgggcgggtgaagatcggacactacgtgctgggcgacacgctgggcgtcggcaccttcggcaaagtgaagagttgagtacgcgctccggaccgctgtgcggggctgcctgacttgcgggaggccgaggggagaggcgggagccccgggcctccggcgggcgcggggctcggcggcaggtggagcggtcccgggtcgcgcggagctggggccccgggagggtggcgcgcaccgcctcgcctggcaccggcgcccgggccccacagggtccagggaagagggcgggggtgtgagctgaggatgggcgtcctgggttccaggttccgcgcccatctgcctttctggaggtcggagcaaggcacttctgtgttctctggacctcagtgtcctcctctgcaaaatcgggagaactggactcgttctgcgaggcgccttccagctctgagcctgtaggcttagggcggggatcatccacgctactgaggactgaggcgccgtttcgtgccgggtgccctgttaggtgctttacatggaatctcattgaatcctcacagtga

SEQ ID NO: 54036 - DNA, 1117 bp, Homo sapiens
gtgggagttttgggaattaaatatgtacataaagtactatttaataaatatggtacttatttaataagttgtagataaaaaggaaaggaagtctcttgcttccttgtgagaaccatcctttagagaactttaaaggattttcagggaaaggaaatttggagaagagcaatgagattgttttgtttcaccacgggcagaggtgaaaggagcgttgtgttgttttggcaggagtctggggatggtaggggtcggaacatatgtgcattacataacgctgctgatcaccagagttacggcttttgacatgaatgagttaaggttgctgaccaccccatgaggcccaactggctgatacatgtgtgatctcttggctcgtcacagcttaggtatatagtgtcctccaaatgttcttaacgtttttattgtactccatatacaagagtatactggcatcttttacgtaaattctcaataaattttcacaaactgaacacatccacgtaaccaccactttgataaagacatggaaaatgaccagtatcccagaagtccccttgtgtcccatatccccttgtttccaacctccaccccaccaatgggaaccactatccatggatagtttcacctgtttttgaactttatagagacagaattctactgtatctggcttctttacatgggattatgtttatgagatctatccatgtcattgcatgtagttgtaattcattctcattgctatatagtattgcattaagactatactattatttgtccattctattactgatggaaatttggtagtttttacatcttggttgttatgattaatgctattttacacattcctgtacttgtcttttttctatttttattattttagaaaaacgtgaatttaaaaccatatatataaatattattttagaaatatatttttttctactgtcacatttcagattcttgtcattactgggagtattttttcaggtatctaccatggctttctagaataccatatttattgttatttaagttgtttgagatgcaatacttttgaatccatacacaatactgtaacaggtacctgctaatacaatgttacaaccacaggtgtttt

SEQ ID NO: 54037 - DNA, 1098 bp, Homo sapiens
gtgtgaattctctgttgaaatagtaattactgtgaatttttgatttattacactatttattcttctataatacaatgactggcattaaacagaagaagagaaacaaagagattaatgaaacagtgagttctctcctgtccaaacaatgttctaaagttgattatgtttttagtaagaatatagaattcagtaatcattttcacaaatattccacaaataggaacgtctctgttaggtgcaaaagatacagagatgactaagatacagtttctgtcctcagagagtgcatactctaatagaagaaatagaagtaaaaagaactgtagttttgtacaacaagggatataaagatggtatatatgagtagagaagtttagggcacaatggaaggaagcatgaataaatgattatgttgatatgatagcacattttttttcctttttcttttctttagttggagaacatcaattaacaggccataaagtggcagttaaaatcttaaatagacagaagattcgcagtttagatgttgttggaaaaataaaacgagaaattcaaaatctaaaactctttcgtcatcctcatattatcaaactgtaagtatttttgtatctaataataccaaagagacacctatcttaaaatgttttttaggaattttataataattgttaattgttaaccttttacaaagattttttttcatgttcatattcagcaagtgttaattcatttaacctttatcagtcctttttttgcatactcttggttagactgaacagacattgtttctaaattagtactcaatttatgtttctaaattagtactcaatttatgtttctaaattagtacatcaattctcaagtgatgaatgaagttgattcatcacatttagaagttgattcttatccaactttaaatgtcattcagggctttgacatttctagattcatttttataatttttatctagtcaattttcactaacattcagggtattttttcctttggaaagatagaaagtatatgtcaaagattatttcacatagtatattacttgtagaactgaaagtagtactataaccataaagcttttag

SEQ ID NO: 54038 - DNA, 1031 bp, Homo sapiens
ctgcgcccaggcccgaagacttatttttgatgtcatatttatcagtgttttcttgcctccatttctatatttactttcaatcattttatttttgtttgactgtctcatcctgattatttaattatttgctgttttctgaaggaattatagaagattgtcagagttggtcagaaagtaattggcagaggtgaatttgcagtttaaaacttttggcttccagccttgagattaattcattcagccacattgcctctttaattgtagatctgatcttaaaacaaaaaacaaacaaacaaaaaaacactcatgtatttttgctacagaagaagcttattgacatcgtctgtaacagtgttagtgatttaaacagagagagcaaccttaccctttcagtggttttcttttgtgtagccttggactgtcaggaatagtttccttattgcaaaagtgggactctagaattagcaagaaagtttgagcattgaatgccaagaatgaaggatatttattgcatgatttctttattaacccaaattgaaaaaaaaattacaaatgaatgacctaaaacccactggtagaaaattaaaaggcacaaataggatttaaagaaaaatccaaactttcctatgaagtagaatttgttgaattgatttttgtccttttttttctttcctccataattcttaatgcaacttgattttacttggtcaaaagatgcttgttagtctggtagagatgatcttgtctaattttttttttttttttttttgagacaaagtctcgctctgttgcccaggctggagtgcagtagcatgatctcagctcactgcaacctccgcctcctgtgttcaagcgattctcctgcctcagcctcctgagtagctgggactacaggcacacaccaccacacccagctaatttttgtatttttagtagagacggggtttcaccatgttggccaggatggccttgatctcttgacttcgtgatctgcccaccttggcctcccaaagtgctgggattacgggcgt

SEQ ID NO: 54039 - DNA, 2793 bp, Homo sapiens
tttaaatttttatcttacttttggataatatccactgcaatactaattgagaaacatgaattatttccaggggcacacaatgctattgaaattactgaaaacaaaatatctgacatcttatttacttgtagaaatctgtaattctattgtgcctatgataaattcacataggcaatatctttaataggttaatatcaatgaagatttttaattacaataatgagttcactacagacgattaacacaccacactggcgaaccatctcaatgtaagggtggtttggcaacacctccttgctttgctgtttggtgtaggtaaatctagtttacttcctaaatttcagtaggctttatgctgtgtttatgcccccaatttattttaacaaaagaagattaaaaagtaaaagaaccacgagtaagatattatttaaatgttgaaatcttaaaaacctgcctccaagatttcagaagccaagtttttctaacagtatttgtacaaatactgcctagtgtattcaacagaaggactgtggtcatgtaacaggtaaccacaattttcaggtttcttaaaaacagctgtaactaactcaggatttttatcttgagatttccctgaataatatatttatcttaagagccttcaagtttcaaattaatattggaacatctggaattgcaacaacttttgtcttttacataaacttacgtcatttaaaaaatgtcttcaaaatctacctttctcaaattctttttgcctctatttatttttgcatttcaccaacagtgataaaatagttaaatgaaacaaagcaaagtatcaacagtcccttaaatgagaatccttatctttgatctttattttctgtgttaggtgttagggtcctggtgcagctcataatgctaattcttcattggaagccactcccttcacctcacctcacctagtcactattgtctttgttcattgtttgatcctgagtggttgattgatatagctttgaatcttttctagtccaagtttgaaaacactgttctggccctaagggctggctatgacctttactgttgaacctgatagggcagggaagctttgaacatcaagaaaaaatttttatcttaaataaataaatatatatattcacacaccagtgcttttaagcaaaaaccagtttttttgtttgtttgttttgctttgtgcaggttttctttaagattaaaaaaacacaaactatagcagggtagataatagtttattgattatattttgttttagtaaaagtatttaattttaaattctgtgtaatttatctaatttgtatttattcatttgttatttttatgttgtaattaacacttatttacctggattaccctaaaaaaattaagctcttgaaaacaaaaaaatgacattaccttgacaggcttctctttgccaaaagtaatgtatgttctgccaagaagcaaatgagaatgttagactaagtttctcctgtgttagtggaaaacaagtgtgtctatctttaaatattctttgaatcaggagtttgcgttgtgtcacatcatatggctttgcagatcttttaaaaactgatgttaaataacttataagtccaacttcttaatatcaagataaatgaatagttcaccaatttgggaaggagggcgggttgcaatttgagatagtttaaggtttaattattgaaagactgccatcttgtggcaccaaaaggtaatttttacatgattatttgtatagtgataagcagtcctgctgtgttagcctggtccattatagatatggcatagttttgggttctctaaatgggtccatacctcttttgggaaaaaacagggccacctcataatatttgcctgattatgaatggaattaccttagaaataaggaactaatcagattacttaaccccaatgacaaaatccacaaaaattttgaaggcagagaaacagaaggaatccagtgatgttttagctccattagtctaataggtcagatattaaaaaattgttcatatcaaaattaccttatatggattattgccatgttttttgagagttaattatttactgttttctaattcttgccagtatttatgaacagctgtagcttgatatttacctactgaattttaggagaactaatggtcacagtttgggttcttttatgtgtatgtttttaaaacagctattttgtgaatctaggtggttggtttttagaagatttcaggagatgcagtccagcacaattagagctggaacattgttacagcaggctttttgttgctcatgggcagatagagggaaagaatcagttgttagccccaaatttccacatttcagtgttgtaaactctgaatgtgataggtagatgtgggctaagaataatttcctccagtgaagacacgggagaagagcttctattatgaggttatagataaggccttagttatatcatggaaatggactccatgtagttctagaactgcatttcccaaagtatatcctgtgagatgctccacagaaaaaatgattgcatggactaagtttgaaaaatgttgcatgctactcttcccctcgaagatgacagtggatgtcagcattaaagactttgacaggtctttctgtgaaaaaaagaaagccacataactttgttgaactttgcccaaattaatttttcattttaaaaaacttaatagcccatgaaaagcaaatttgggaaatacattttttaggaaaatactgtcccagaatgccataattagggtagttaataat

SEQ ID NO: 54040 - DNA, 1077 bp, Homo sapiens
ctttgaaaaagaaaaaaaaatccataggttgatacattgacccattgaagtacttcattacgtatttattgaaaattttttttaattgttgaaattgggaccactttttataattggtttcaagaaaaaaaaatgaacagacttccagtgcttttctgttcaaataaactccgattcaaatttcagttttgtttgttatatactttttgtgagtgttaaatgatatgggaaggatttgtctttcattaaccatatggaaaagatgtcttcctgaattacatagcatttcatagttacagattcttcctaattaatgtttgcaccatatgaaactcataggtaacaaacacaaaggagaaaagcagcctgtctgattgcttataagcttttttcacaaaatcaaattaaaagtctctgattcatttgaaagctatttttgtttctgctccatcattatgctggtattctgcacaccaactaatagttacaggaaagttgttagtggaaaagattgcctatactcattggtgatttcacaccatcttttttcatttttgtcatcttagttgtacattatagtttttaacttgagttattgcattggttttctactgttgctgtaacaaattactacaaacttaacgacttaaaatacaaattattttattgttctatatgttagaaacccagcaggcttagctggtttttctgcctcaagtcacacaagctgaaaaccaaagcattgatagggctgggctgtggaggagaatctgtttccagttgcattgagttgttggcagaatttcattccatggtgctgtaggattgaggtccctgttgcctttttggctgttggctaggaatcatttaaagcttctagaggccatcatcccttggcccttggctcccttcatcttcaaaaccagcaacaagtggcttatgggttggatctcttcttccttctcttcaactacatgtttctgacttgctgagactgactttactgccttccttttcaaattttaagggcttatgtgattaagttgggcccacctggactatgtgctttttgaaaag

SEQ ID NO: 54041 - DNA, 1128 bp, Homo sapiens
gaaattgtgatatgttattatctactgcaaccctgatgttacttgattaattgaaaaacaacagtgaggcaattacttgttgaaaagacccttatattccatccaatccttttttccacctctgtgtgttttttattgtttcatgtgtgaaagatattccatttcctgtatatgtgtataattccattcttattacctgtagtgggtttccttgataggccatttcaataatttttgtccagctcaaatcataaaacgttgtatagctcacttgtgccaggcactgggggtacaaagatgaataagactgtctactattttcatttgataagacagtatgttattaaattctataataggaatagatataaagcatagttaagacagtaaattatatatggcagtcataacagtcttcatgtgaagtggttaagagacataagagtatttcaagtaaacagcatgtattcaaggattgtcatgtagcttgatgcagcttcagtaaaggggacaaagatagagggatggggaatgacagtatgcaatggaccccaaatgtcgagctaagcagtgtggatctcatcttgaaagcaataaggagtttttagaactttgtaaatagaagggtgaccaattagatttgtattttaagaaatcactatgaattcacagtgagtaatggcctgtaaaggataaaaaagccagtaaggaagcgattactttaagtaaaggaaaaatctgtcttgtatttctgatctcatttggtataggttgatcttgtaatatatgatccaaacacaggacacttctaagagtggaaggaggcactcttaatcataataataaatagttatagatagatacattagttataaacagacaataccctgggcaaaaggagatatttggtcacactaatttggagaagtaggtacctgtaatctaagctgcgtattctggaactatttatttgtggtcaacagatttcagtgcattagaaagtgatgtgctgcagatgtataggtcagtttgtcaggaaaagatacccaaggtcaggaattgaatttctcaggagtttctaacaaaatgcctgcctgcctgtgaatacaaaaggagactgggaattgc

SEQ ID NO: 54042 - DNA, 1088 bp, Homo sapiens
aatcctcatgtttcatgggagggacctggcaggaggtaattgaatcatgggggtgggtttttcctgtgatgttctcgtgatagtgaataagtctcatgagagctgatggttttataaaaggcagtttccctgcacacactctcttacctgctgccatgtaggacatgccttttcccttcctcctttgccttctaccatgattgtgaggcttccccagccatgtggaactgggagtccattaagcctctttttctttataaattacccagtctcaggtatgtctttattagcagcgtaagaacggactaatacatcaagttaaagtgagttcatgagtagggttaatccagtatgactgatgtccttataaaatgggggaatttgagcctggagagatgcacagtggtgagacaatgtgaagatacagggaagacaccatgtgaacatgaagacagccatctacaagccaaggagagaggtctggtacagatccttccccaacaaccctcagaaaagaaccaaccctgctagcatcttgatcttggacttttgcctctagaactgtaaggcaatacatttctcttgttgaagccacatagtctgtggtacttgctgtgacaatcctagcaactaataagtgaaccgtatcagcaaataaaatgagagaatttatgtaaataactgtgtgcactactcttcccccatcaacctgggaagtgttttatatcatgttgttattttgacctttcccaagagaagaaatctgagaagtgtttattgcccctcagcatggaaaacggacagaaatgatcctgcgaccatggtcagtgttcctccctgatcactgacttctgggttttagcttttcacatctgtaaaacctgaaataacaagcccctggggagatttttaaagattaatcaaaataatgaaacattttgttaggacctattaaatacagagaagttacaaataaagtgcttcagaaataataattaagcaattttgtatcataatactggaaaaagtggtggttttacttattactcttcatggtattgttactgttaatcatcttccccatttta

SEQ ID NO: 54043 - DNA, 1049 bp, Homo sapiens
ttaatttcataacaaaaccctttcattcactttatcttccaaggtacagagatctgaagagggaggctttttgaacaggctttctttttactctttgctgaagaatattaatgactgccaagtggaaaaatgtctaaatattcttgcgagatggcagcctctggtgacttgggtctttaatcttccgaacaacctcttgccacttctatcactcactcggggggatcacagcttggagtggggagcaagcaggaatggttggagatggaagaagcaggtcttagagctggcatactgtcaacactaaaatgccacatgcccttcatactgtacctttagcaactctaccttatctcacctttggagtgaaatggtgggagaggtgaactctgaagtctatcttatttcagattacaggtcaaagtcattcacgtgtagctcagggccatgagatcaaaaatctagcaacttagttactaaagaaaagctgtttcctttttacctgtcttgtgccctttcagaccttcatagaaggaagaagaaaggtggtcaaccatcacacagcccatatttatccttttaggataaagcaacatggtgtagactaaaaataaggaaaccctaactcagtgattagtcccactttcatcagaagaaagacaaatgatgcaaaagtcaaggaggcagataatcgttttctttcttcctggtgggcgctaaacttaagcaaaacctgagaagcagggtatgtaaccaaatcttcaccctgggcttattgttcgttgcttttctcatttaagtggagcacactatcttcactggtgagtcgatatagaatagtttccacatagtggaccctgatttcagaaagtctttgacttgccagttgtttcacctcagacaagtcacttaaactgtctaaaatttcatttactcacctaaaattgcagctattataagaaataaatttgataatttcatgcctggaacatagtaaacgctcaatgcatgttacctgttgttaatatcaaagaaagtctaatcactat

SEQ ID NO: 54044 - DNA, 1449 bp, Homo sapiens
tatatgtcaatatcatcctaatgtggaaggtccgaagaaccagaaaagtgagaagggccgtttacctccctctgtagctatcacctgttggtccacagagtttcttgagaaatgagcaaacattttatgattaggtaaccctttcacatgaacgggaagatgggaaaggtggaatgaccataagagttggcctgagaccagtttgttttctggggatttggtaagataggcagttcccatgggaaattgcttaaattgctttgttgcctatgatttgattctaaacaagtggtgctatcttctccctcaatatggctgtcttgagtttgtcttgcagtatcacaccattataccaattctttgggttgcttctgacacattcaaagtgaactctggctgatgttgctgtttcaggtataccatctggagttaatttcctagcagaaggtgaaagtccaggagaattgtcctctttcattgaacatgattgaaaatgtaactggctctgaacttcaagaagatagatgcccaagtgatgcattaaagtaagggaaataaagtcaagtttttcaactgccatccatattctcattggcagaattctgatttttttccaagcactgtttggtgagcctggaagcaccgtatcctgtcccaggagtacagtgaaatttccaagcaagagctgaggtgccaataccaaaagaccatggggagtctgcacggttctggttagatcaatagaaaatccatgtgtacaactgttaattcctcatcctccactagcactaaatttgtcactttaaattttgaaaccagggaaacaccacctgtcattctgtccccattctccatagctcttcaatctttacatgccgcaagacttttttgatagctcgtactcatcccagtgtctcctgaaaccccatcatgtaatgtactgggcaccttcttttaaacaaatgtttactctgtgggtttggttcatttcaatttctgcgttctgacacatatttttttaataaagatgagaaagagaaaatgactgttgcagtacctttctagacctactttaactttacctcagatgacagtttgttaacatatatggacacattatttttaactttatgtacaatgcattcaacagaacagcaaaatttttagaaattttccattaatttctgtaacacaccatgtaaaactgttacaaataaacatgtttgagaacaacactttagcctggctttattctacaagtttccactggatattcaggcttggatcggaagaggaaattgctttacctaagattccatctgaccaagtgacagcctgtgtttccctggccctgagctaaaaagagcaagctttattggggagtaaggtcaatttgtcagccctcggttgaattcaagtgcttgctatgcttggaaaagcagccccaga

SEQ ID NO: 54045 - DNA, 1037 bp, Homo sapiens
ggaagggaagaaaaggaaagaaaggaagaaacaaaacacagagtcaggggccttaggtctgatttctacttccaaagcaggtcaccttaggtaagcatacatcctttcatatggataaatacagataattgcaatagctctctccccaagctgtccaagaatcaaataatatcataagtatgaaagtgttttataagctttgaaagtaaagtacatgtatttgggattattattaccattctctttttaaatacaaccaaacaacagacccttaaaataaagaaccacaaaacaacagaaaatgacctattttatggacacagaactcaatgacaagtccaacctaagtttttggagggcacagtgtcccacttccttggacctttatgaacagactccctgtcgaggtcctgtagctagaaagtgatggcactggatcaggcagaagatgaccagggtctagctaagggcagtgtcagccaagacctcaggcatagtgccaagagatgtttaaaagctgaaatcaacagaaggttaagaccgaagagacatgggaggtgaggaagaggacataaggtaggatgacacccaggttcctggcatggggatctacatggtgccagtcactgtgctaaggaacacaagcagcatgtttgagcagaaagaagacaagtttactttgggaccaactgaactcaaggtgcccatgagacttccaagtagagatgccagtaggctgctggatacaacctctggagatcaaaagagaaatcaaggctagacatggagatttccatatgggtttcagccattggagtagtgagtgcaagtagaatacacagatcatctaaccagaagttgccaaactctctgtaaatatgtgtgccttgtgggccatactgtctctattacagctactctaccattgtcacaggaaagcagcaaaagatgatacataaatgaatgaatgtagctgtgttctaataagactttatttacaaacacaggcagctaccagaattggctaacagaattag

SEQ ID NO: 54046 - DNA, 1042 bp, Homo sapiens
aataagttaggaaatagcatcatctttctatatatagattcatcagagtaaaaagtatgcactaagttttacaatcattcactgtctgatttctaagttctataacattaggaaaattcagctgctaaatgaagtcatgccaccctctcacttgggtcttagccagtaaccagtattttcagtgacaaattagaatttattaaaagaagagtggtatcaaatggcatatttgttctaaacctctaaaacaaatgagaggagatgtgggtgggtcagcccagaaaatgcgtatcctttgtccttatagaatcaagtaccagctgtgaagttgccatcagctacatccattttcccagatcactgagacactttctctttattcaacatgtgtttattgaatacctcctatgtgccaggattcagaatctggttctaccagttgccatgagcaaattagcaaacttcactttccttacctgtcaaattaggataacctctacctcaaagatgttttatgaggattagagatattgtctgtaaagtttctaacagtgtttgacacatgaaaggcgctcaataacgtgccctctgatgaaacacagaaagaagaaagcaaaccatagcccagtagttctcagcttgatcatgcatcagaataacctgtagcaggttgttcaaacacagagtctgtgattcagtagatctggggtagggtcagaaaatttcatttctaacaaattcccagatgctactgctgctgcttgtccaaggaccatcctttgagaaccactgccttacctatcagtgtggacgagctccttcctgaagtcagatgtgtgagaggaaagatcaatacgtacagagagagaattcaaatattcaactgattccactggaaataggaagaggaatcctaagatttgacttcaatataagcagattcctgaggtttctttgggatacattcatggcagccaggcacttaagatgtctctttttctgtggtctctgtgtagctccaaccccagcccctagacagagc

SEQ ID NO: 54047 - DNA, 1017 bp, Homo sapiens
atttctgtagctattgaatcccgatctccttgtgactaattgtccagccagtgataaggagacagggaagtgaactggagtatgtgatacaacggatggactggctcctgggggcttttgaatctaatgggccaggtttggatcctgattcagccattatttctaagctttagactcctgggcaaattacttgacctgtcagagtcagagtttcttcatctttataactgagtgtaaaataatacttactttgcaacaatatcaagagaattaaatgaatcactacattaactgcagctgtagaagtggtatcactacacactgaaaaatgctggcacatcatcaatatttagtgtagaatatgctgtattattatgattactctgatttctacagtagatgaatatatgtcctgttctacctatattttttcctttacctggaaattagtgcctgtaataaagtttaggtcttcagcctcttgactgcttatagcagacagcaggagaatgggtggcctggagaatgtactatgtatgaacacaagctctgccactagccagctgcaccatactcagataaatatcttctgagcctcagggaacttaccccgttttaatggggatgatcataattctacctcatagagtttttctaaggattgcatgagtaaatgcacattgtaaaataggtacaacagttcctggcagtgcttccatcagtaagcactcaacagatgtttgctacatggttcttcaggagccttggatctgctattcatacagtgtgtagctgcatcaaatctttccctcatggagttgcaatttctcctatacaaattaaagagatagcaatcacactcaccccagaggcttgtggaaaggatcaccttcacaaaaatgtaagctgcacagggtaagaatttttttttttggtgactgttttgttctttgttttgtctccacacactaaagcagtgattggcacctagtggaggtatttttgaatgaatgaatc

SEQ ID NO: 54048 - DNA, 1505 bp, Homo sapiens
ggagcagtaaactttgcctgaaggagtttaatgatgtcttcacccagggtatagagcttgaatagaatcttaaaagatgaggggagtttgtctctggagaaagggtggaacagtattcaggaagaaggaactgaatgtttaaaagcatggcaatgtagaagagcctgtcatgtcacacgggctgatgactaagtctgaggtggcaggaccatagggtgcctccatgggagcaggagatgaggatgccaagggaagcccccaaggagcaaagggtctgaaatgtggtgctgagaatctgggagctgttaggaagtcactgatgctttcaggtgttagaatgacaacatcagttttgcttttttcagtgtacctctggtggcttgtggcaggtggcttggcaggtcaggagaccattaagaagctaatggaatcatctaagtgtatccattcaggatagagtcagaaaaacagatcccatgccaggtagtttaatagaggggatctaatatgaggaactagttacaaaggtgttagaagagcggaaaaaccaaacaagggacagcagggcaacccagattaataataatcagaagtggctactgtccttagggatagaaggacagaagagacagtgttagcagagccagcaggcactgggaccagagagagagcactgcccagtgggagcccagaggacagagaaaggggctgcctggtggaagctaaacccctgcaggagactcagccactgccacaaatactgccagaagagagctgggagagaactcactgcttcttccttctacccactattcaaattccaactactgcctccttgttgaccaaatcaaagtggaagtgtgttggcaaaggagcccaggcaatgcagtttatggcaatcagcctcctgtgttacagtacaaactagaggaagggcaagaatgggtctgagggcaaagaggttaaggggaggcatgtgagggctgctgtgggtgtagcctaggggcaggcattgcagatgaaaaagcgagatgagtttgagtgtatgactgggatgagacaaacagggagctggagctagctctgaggtgacatgctttggaaggtcaagtaaccagaagacagggaccaagcaccctgtctcctccctgtaggctctgtcagttacatgcatgggaatttccgtctctaacttctttttttttttttttttttttttttttgagacggagtcttgctctgttgcccaggctggagtgcagtggtgtgatctctgctcactgcaacctctgcctcccgggttcatgccattctcctgcctcagcctcccgagtagctgggactacaggtgcccgccaccatgcccagctaattttttttgtatttttagtagagacagggtttcaccgtgttagccaggatgatctcgatctcctgacctcgtgatctgcctgcctcggcctcccaaagtacgtctctaacttctaagactgtttgtacatcag

SEQ ID NO: 54049 - DNA, 1089 bp, Homo sapiens
ctcactgagccagggattggcaactattctaggggattacacaccctctctggaaagccttccttaccccaaatagagtactcagtctctctgggctacctctaatacttctctttgcactgatcctaatggattgtcattttctcttaacatattcatgtgaaccattggactttgagttcctcaaaaaccttggcagagatcacatctcacgcggctttgcaatttcagcacctagcatagtgcctgaaatatagttcccgctgaggactgtggtagtaacctaagctatgagagataccggggtttgaatcctggcttcattactggctatgtgaccttgagtgagccctttgctctattcggtctttggtcttctcagctatgtaatggtgatgtgaaaaccaaattcactgagttctgagagtttagattaataacagtgatcactcagtgtacattagcaattaatagacacttactaaatgttttgttgcactgaactactcaccaggagttgtcacttttactccatacctccttgctttgtaagtccgttgaggacaggaatcatatcatattcatgtcctcattacagtaagcatcgacacagagtagctgctcaagtggtaaatgaatgaataaaaataaatgaacaaatgaatccctgtgtgaggaatgaatgaacaaatgaatgcctatagactcaaagctcatctattgtccattaagttctttttccttctggggccaaagacgccgtgtcaaactaagacagtgttggttctcaaagaagccctcttgcctggcccttcttccactttgtgtttaaccattctttccctgttccacctgcagcctccataaatatgtgttgttttttcttcatagcttggatcaccaggcggacaggtggccttctaaacacaaacccacacactcacgcacctgcattcactcccctcctacatcaggaactcagcatcaggcaaagccaaaacatcttgcttccttggcagggttatttttgatttttgttttttcatcctacctagggttggatttttcctcctggggccctgtggaaag

SEQ ID NO: 54050 - DNA, 1025 bp, Homo sapiens
gatatttgctatattttaaatagcccagatctcagcctcagcattgaacagtttaagctcagctgcaaactgtttttaatcacttcaggaacagtatagcacctccctacgcctcatttttgtctaaggaaatgaggattttttttttttaccgcatgacttctgaagtctatgtaagtttctagtctttgattctgcgagaagcccaatggcagagacgacctataaacctttgttaaatgatgcccactccctgtccccatctgatgctcctaagggagggagcctggcttgatactttcacaattagagcaggttcccatgggcttgtccctggggccattctcaggcacccttagccagcttgcagttgaagtctggttgctttgttctttgaaattggagtaccagagtgttttgactgtgctgaatttaatttttccataggttcccaccagccaaaagaaggaaggtgtttatgatgtgccaaaaagtcaacctgtaagtgtaagtacatctcctctccactgccaggtttccgtgacctggattcacactgaggctgtctacagcctgcggaaggaaacccttctcctggaatgagtgtcatggccccacatgtttctgctggggactgcatgctggggcatcttcagtgggccagaggaaggagacatgaggcagaaatggtagcactgaggaaaagttgccaatctggatgaaggtctggtcccatgagtgggagtgagttgaatcacgtgaactactctgtttaagggcctcaaggtcataggtgttctagggcaaaagtctccagccatggtttagaagaagtaattcttctaacacattacagtattatggtatctaatagtgttgtgtatccaatatccattttctcactccatcctcagaataacctgagtaagaggcagagctgatagtagtgaagctcagagctcagtgacctgctcaagtggaggatagtgtttctgttgtggaaagagagctgcccatctaatttg

SEQ ID NO: 54051 - DNA, 1075 bp, Homo sapiens
tctcacccatgggagagccaagtagaaaagcgttttcaattatgcacagtttgagtttatccattccactgctttttctccatttttagggataattgagaggcagctgcggttcaactgtgctaagtgcccgtagtgagcagtgaattacgggcaacagaatgttcttcatttttctcagtaaaggttgagctagtaaaaacaaaagtgagggctggtaatttattggccctcattaacaaggactctgtaggcattcttagaggatttcttttagatggagctcagttatcaggagcaaagaaacgacattcttcactggctacttgcacagtgaagcttgcaagatcagctctggaagtgtaccactgacacggccatgctcactcagtcctgttttctgcaagagtgtagatgagcttctgggaacataggatgtgatgtcaaagaaaaggcccacttgaaacaactgtctgaatagtatagcagtcaaatggcaaactccctgggctcaagcttttggcttccccattcacagactgcactcatggagtgagttgaatcacacaaactactctgtccaagggcctcaaggtcacaggtgttctagggcaaatatctctactgccagagatatttttctcctctgcaacatggggccaactgagttcttacctgaaagacttgtcttgaggattgcatgagaatgtatgtaagacacaaatgtttagaacagcgcctggcacataggaagcacccagtccatgttagctcacattattaataatagatgtcttgtttggccaccagaaagagctgggtttgaacctggtcacttaccagctttgacgatttgggcaaagtccctaacatctctgagcgtcactttctcctatttaaagtagagatgatactaccaatttcttagagttattgcaaagattttaagttaaatgagatgaaaaatgtcaaaggacctaaggaataagctcaaattcttacttcttatagaacaatggtgtagttagctagctcaagcccaaaagatacttttccttcactattccccacattc

SEQ ID NO: 54052 - DNA, 1030 bp, Homo sapiens
ttcccttatgatgtgccttactacctttcatcccaggctgaacctgttattctggacttgagagatctctttcaactcatttatgaattgaagcaaagagaagaattagaaaaaaaggcacaaaaggataagcagtgtgaacaagctgtgtaccaggtatacctgtgaatttatccttgcgctggagatcgggccttcaaataaacacatgtaaaaactgacagtcaggccttctcttcctgctgccaagtagaaataaacgaagatgaaagattcctgtgtaaattacaggacccaaagcaagccattagaaattattccttattctcttaaactctagacatgttagatgaagtgaaatctcgaatccagagaaagatttcaggggtggaggacccaagaaacacaattgcttttgctgttgttaacagtgcgggtggaggtgggagtggctctaaggattttgacttttttgtgttttttctaccttgatggcccaccagcctcttctgcccagagctggtttctttactgtcctgtaatttctgaatgcagtctcacatctcttcctttatgtcctctgcttttcaccctccctctccttactctgcaatagacaatattggaagaggatgttgaagatcctgtgtaccaggtaatttctgaaactagtcggggttttagattcaagagtgactagacctgtgccagagccattttgtcagaaacctgaagaatccactgactgcaaaacctggagagagaccaagattatttctgagggtgagggctgccagcccctccaggagcaaatttccataaaaactaacagaagtttggccggcatcggtatcttgggatttggagatccgcttctcccttcttgcctctgcctcggcccccttcacagtctgtaaaagtttgatcccagagctgaatgttttcaagagtctcttgaatattctgagttcattagagagaatatgaataatgaggtggcttctctgagttaagaaccagaggtgggggc

SEQ ID NO: 54053 - DNA, 1042 bp, Homo sapiens
agacctgtgagagtaaggaagttcgttccaggcacgaacattggaggaattcatcagttcagtgtcattagaaagtaaagttctacagatacacaaatgagggtggaattatttctccagggagacagaaggcatgccttgttcagaggaagtttcactcaggtggtactatttcatacggccattgaaagagaaagaggatttgggcaagtggataaaaagagttgatgttgcaggcagagagatctaccaatgaaaagcctgagatatgcatagccccgcctctacccccagtggtgactttgggcaaaacagagaaaggcatttattcctcaacacactctatcaccatcagctggaaaagtgttgtcaccatgcacatgtatagttctatgaatgttaataatactccctggagttgtgtagtgtagctcctccaccacagcacacacggtccccgagtatttaagtaaattaaatatcaatccaaaagttggactgggatgtgtcatgtaaaacgatcaaacagaagcctacccattgaattaaactggctggctctagcaagctgaataaagccactgttgcagatgcttattcagcatatgaacaatcctatgtttctctctggtcacagcattaagaccatagagggaagcctccatttctcaaggacaggcatagctctttttctttccatctggactaaacagcttttccaaagcccttcgggcctgttcacacgtagctgaaacacatttcttattgatcaacagctcgaagggaaagtcccctgaaatatgttcttccttttttttctctgataggcccttcagcatcatcatgctgttcatgaaatatcctacattgcaaaggacattacagatcaccgggcctttggatatgtttgtgggaaggaagggaatcacagatttgtggccataaaaacagcccaggcggtgagtatccctatccaagaagggagtctttccttggaactctggggggacagtccagtgactccgttggtctttgagggccc

SEQ ID NO: 54054 - DNA, 1076 bp, Homo sapiens
ttcccccgtcaccctgcacttcccctctcagggcacctggcacaccatgttgttattgctcaggcatgcccccccacccccctcccccgccagaccactgtttgttcgttctcacactgctattaagactgggtaatttataaagaaggaggtttcattgactcacagtttcacatgattggggaggcctcaggaaacttaaaattgtggtagaaggctaagaagaagcaagtaccgtcttcccaaggtggcaggaaagagagaaacccaggggtaaactgccgtttataaaaccatgacatctcatgagaactcactcactatcatgagaacagcatgggggataaccacccccatgatccaatcacttcctaccaggtccctccctcaacacatggggatttatggggattacaattggagatgagatttggatggggacacagccaaacaatatcaaccataatcttaaaaggagcaggcgccatgtctatttcagcactgtacctctagggtccagtatggtgcttgaaacgcaggaagtagtcaataaatgattttgttgaatgagcaaatacgtatatacaatggtgagaaccaatgtccccctaaggggtaggtagggtgtctttctaacggcatggtttacccaggagctgcactttcttattctaggccaggacagagagacttcattcaggtccttttctgcatctaatcccatgtgccaaagagagatgaaatgcaagagagagtcaatgatgcatctgaaagagtcagacagacctggattcaaatccttactctcccacttcttaactggatggagttgggccagttacggagtgctctcaactgtaggagaaggtacatattcaaaaagaaacaaaaaccaaaacaaacaaaaaccacacacttaggtaacatttattaggtgccaggaactgtttcaagtgtattgaatagtataagctattgaatcatcacaacaccataatgttggtactgtggttatccatgttttacagataagcaaacagaggcacagaaaagataaatctttagcaaaggtcaca

SEQ ID NO: 54055 - DNA, 1103 bp, Homo sapiens
ctaacgccattcttccacacaaagcaaagaacatgaggcatgaggccggggttggggggtgggagggacaggcattctgagcactgaggacaaaagacagtgattttttgatgctgactcaagcctcaagcctgacagtctgtctgatgagcacaaaatcagatgcagtatgcagccatttcagccctaggcagcttctgtattatggcttcagccaaatatttctattgtgatcaccccaattctcagtcccatctgcaggagcctcattcatatagttcagggatttacctgccagactagatttgacttctaaaaactatttagaaaattaggagattgcaaatctgcaagaaattaccagagaagtgtggcctcaatatttaaattaaaaatgccagcaactctaaagcctgagatctgaatctttcatgatgtctaagagatgtgcagacattttaaagttatatatttaaaattttgaaaataaagattttactggcaattgtctaaactcaagacagttataacctcacttttgaggagaagatagttcatcttccatataaatggctccaacgagagtgtctgagactctgagatactgagatgcatcatctcatgactctgactgtgctgtatgatatatttacccatgtgaatagacacgcatactctttcatattaatttccatgctgtcaaagtctgtgtctatattttcactcctttatctgtgtcctatggtacaatcacctttgcactgaacaaaaacttcttcatctgatacaataataaaaggaatgtcttatgtttgggaatctttttttgttgttttcaaagtactttcactttttccttaccactgatcctcacattaatcttacaagatgcatatgacacatgcagttttactggtggtagacctgaagctcagagtgcttaattgctggcccaaagttacacagtggtagttgatagagcctggtccttatgcttttttcagtttataaaagtattatatatttattgtagaaaatttataaaatgtagaaaagtcataaagaaaaaaactgcaaattatgtgaaatctcaccacttagat

SEQ ID NO: 54056 - DNA, 1038 bp, Homo sapiens
ttgctgtcatccaggtcagtgagacagtgcacaggactctcaaaagactggggataagggctagcctgtaaacatgacagtgtggtttagagcaggctttcatggatctgtctcatttacatccaacagttcctggaattttttattatcccccttttatagatggatcaactaaggtacaggtaggttaaatgacttcatgaagttccaccctggtcatttgacccccaggctgcactctggtcacccaaaagaaattgaattcaaattagaactctataatacctaagcttattttctttcttttgtttcagagattctcaacttgactggttctgtgtctctaaggagtggttaggaaatgtgtgtaggcagttttgtagtcacaactttttgcagaggggttggtaatgcagaaatttaattgttaaaagccaaggctgctaaataatctgcaatattcagggcagacacatatggcaaaagatattttcctatgctatatgactttctaatgtctttctagaaattcatgtagatgaaaaacctgttagtaattatgtgaatttaaaaagctaaccctatttagcacataaacaaagtattttacccatatacataataccgaattttccagaaatgcaactagactaagagaaagatgaaattatttctatttaaccaaaattttatacccatttactaacatctctccaatctccccacccaaccctccctctgataaccaccattcaactctctgcttttatgaattcagcatataagtgagatcatgtgatatttgtctttctgttcctggcttatttcacttaacataatatcccccaggctcgtccatgttctccaaatgacaggattttcttttttatggcctgatagtatttcattgcatatatataccacattttatttatatattcattcgctggtaccacacttaagttgattccatttcttggctatcatgaataatgctacagtgaacatgggagtgcagatagatcttcaatacactga

SEQ ID NO: 54057 - DNA, 1040 bp, Homo sapiens
agataaacaaaatgttgtatatacatacagtgaaattctatggagctctcaaatggaagaaaattctgacctgtgctacaatgtgtatgagccttgaagacattatgctgagtgaattaagccaggcacaaaaagacaaatattgtatgataccatttatatgaattacttaacatagtcacagtcataaagacagaaagtagaatggtgattgccagaggctagggaaaaggaaaaatgaagtgttattatttagtaggcatgaggtttcaatttgggaagatggaatcttttagagatgaatagtggttttggttgcacaaaaatgtgaatgtatgtaatgccactgagctgcacactgaaaaatagttaaaatggtaaattgtatgtcatatattttaccaaaataaaaaatagctaggtgtaactcgcattattgagtacctcccatgtactagctgtgtgttagtcagtttacatacattattcagtttcattcttgcaacattcctatgaggtgatactaacaatagctactttatcaaatacatattatgtgccaggcattgtggtaaatataagtaccaggtcatttaatcctcacaacaaccctaggatgtagatggtactattattctcattttattgttgaagacagcaaggacagaaaagtttacataacttgctggcagtaaggggtgacagaggcaggattagaacctaggcggtctggctcctgagtccttttgtttaacaatgatgcctattatctctcaagataaatcttttctaacttcacccacgttttgtattctttttctttttaaacttaggttcaggggtacatgtgcaggtttgttatataggtaaacttgtgtcacagggtttgttgtacaaattattctgtcagctaggtactaagcctagtacccaatagttattttttctcttcctctccctccttcactacaacctccgcctcccaggttcaagtaattctcctgcctcagcctcccaagaagctgggattacaggtgttc

SEQ ID NO: 54058 - DNA, 1068 bp, Homo sapiens
tcactaactcatagacatatcttcggcttataaaacatttgagacagtgaggaaacagtttttttgataaatggaatgtgagaatgagaggaacaagggtagtggtaaacacaaaatatctttggataaaaattataatcaataggcatttaattatattgatcacatttttttccagcaaaatggacagtctagcatttgtttttattttctattatctaaaattgattcatatgaaaactttttccagaattataaaaaataaaattatatgtaggaatatacttagcagctcaccttcatttaaaagattgaaaccatatctaatataaaacccagaaaagacattaatatgaaaaccatattgtgtctatcttgggacccccaattctgagctgaacatctagacaccattctataaattttgattagttaagtgagtgaacattcaaatatttctctatacaatgtgttagaaacactaggacaagcattaccctaaaacaccaaggagatgtgagccgcattgagtagagaaatatggaagtgcgaagggaaagcagtgtgcatgattggtggcattggttgatggtatcggacatacctttgggaccagagagaattttcaaatgaaaacacttaagtaaaaaccatgttcttcctttcaacagggcgttgttgctggcgctcgttccaaaggagaacacaaacagaaaatctttttaaccatctcctttggaggaatcaaaatctttgatgagaagacaggggtaagtaaagcaatcacatggcattgtgaaattttatccattgacagatgtacccttaaaagcctctactctctgggcaggaatatacaacaagcataaaaacacataaagcaactgacaaacttgatcaactctgatcatccatcaaagcaggtctctttgctgacttggccacagtatggctgcactgtgtttcttatagtgtaatggtgataaaagtgtcacactatcctggtaatctgatgggagattgatgagctttgaagatcaatgggtaatgtgacagtttaagttaaat

SEQ ID NO: 54059 - DNA, 1004 bp, Homo sapiens
gggtcaatccaaagcagtggtgagcctaacagaccttctcctgtacttcacctacagagctgttcagaggactcaaggcagtaaagtaaagcatataaataaagtgactggtattttaaaaagtgatgagtacaaagcaggatctcagaaaattataacttaatctgttcttcttgtttcaccctgtcaatccaatcaatacattattgttggattgttatgattggtttaaatctctagtttttctactagattatgagcctgctgggaataaagggcatattataatcattttgttctcttttctatattgcttagcacctggtagtccttctgaaaatgcatttaaatttattgcagtcaaggattggcataacttctaggggacagcaggacaatcctgggccaggtctgtatctggtattggaatgcccagagcagatattatggaatggttgtagagagggtggggtaagtcatgaaataccaatacagatagcaagtctggaaggccagtgatggaatactgataggaattgtggggcaagaagttctaaatcagaccagttttctccagctcccactctaggaatttccttccttttgtttccttctatcctgcttctagctaagatcagtttatcaaatttcatgtagctgtttcctgccaggcaagaggatgcttgcagaagtaaccaagcataattccaatccagggacttcataagggcagtgatcataccttgttcattttaaatataaaagataaattagatatttaattgggaaatcccatgaaatttcagacttacaaatcaaacaattaagaactccatagccccctgcaaggaatgaaattattgtaatttttccttcttggtgaaaaaaaaaatgtactctctaattgctgggaactctgttaataagaatcaaatcctctttatctaaaccatatctaaaaggtgaaatgctatttgggccctatgccaagtaacaaaagaaaa

SEQ ID NO: 54060 - DNA, 1022 bp, Homo sapiens
aggcctgtgccttattattagccatgtaacattccattgtttcaatggaaaatggaacctgtaaaacctgattcacatgaagatccattggcccactaataaataatgttttatagcacactctgctttttatatccctataatccttatctgccagagaagtgagaataaataagcacacctcacactgatcgattggggatggtgcttgtgtcaaagtggtggagagctggacacaacatgtgggtttttgtgagttggtttttcccatactaatcctggacttgagagctggggctgtttttggagaaacacggatacatattggagagaatttacattctaatgtaattggtcagtaaagaggtttgatttagttagtaattctaaccacttggttataccctaaacttacatagaacacgtaataaaccattacctgggcccaacctgcagggacattgattcacctggtctgagtggtcccaggtggtattgatatacaggcaagactgaggatccctaatctctgctctcaggaaaccaaacagttaatggacagtgatttcgtggctgtgagctgtgagtcccaactccacaggaggctttctgagtttaaaaattgtccacggttctgcttctggaatctcgtactcggggagggagtttgttccggcattgtggcacacaggaaaggtctcaacttggagtctttgagatacagtgtcctggtacttcctagctgtcagacactggaaaacttacctcactctctggaaaaaaagaccaaaaacaaaaaaccagaaacattattatgaatttggaatttcttacttcggagacagcattgttagttcagtgtctgagtaccaccttccatctgcgctaatactgctgagtgtgaggtgctaccaagaggatgtccctttttacttctcaaggctgtttgaagatttaacggggattatttcctaaagggccctctatgcgtgaggttgcctgtgaggtttgtcccattcttg

SEQ ID NO: 54061 - DNA, 1136 bp, Homo sapiens
atttttataaatgaacatgaaagtattttctgctctttctttaggggaactcatgaactgaagggttcaaagttttatcatctacattttcacgatatctggagcaaatgctatttgttaataatgaaaatgagtgtgggctgggagcagtgtgtcacgcctgtaatcccagcactttaggaggctgaggcgggtggatcacttgaggtcaggagttcaaggccagcctgaccaacatggtgaaaccctgtctctactaaaaatacaaaaattagccaggcacagtggcacatgcccataatcccagctactcgggaggctgaggcaggagaatcacttgaacctgggaggcggaggttgcagtgagccgagactgcgccattacactccagcctgggcaacaagagcgaaactccaaaaaaaaaaaaaaaaaaaaaaggaaggaaggaaagaaagagaaagagaaagaaagaagaaaagaagagttgtgtttgtcatttaagtgtctgggatgtgtcacatatcatatacatggcataacactcacacccttgttttacacatgagatgaaaaaggggctaaatcagggtttaattccaggtctttctgactccaaaacgcctgtgtccttttctgtttctacatattgcctcttgatgaagccccttgcttaggactcagttctagtttatagacactggccagcaaaagaaccaaaaggatctggattttaatatccagaagcaagagaaacagtgtgaaactcagacctaagcttcaactccgtttttgagcaaagagagaaccatgagccccaaactggggtaaatggcaccaatttgttcagtaagaagaacaaatgggaagagacagcgaggaggcacatgcgacctgagattttaacttatgtataaaagggaggtaaaaaataagcccagtggtgttaggtcactgccttttttaatagaatcatagactgtttccatattacaaatcttatcaatgaggtagtgggggctaggaatttgtgtggagctggaaatagaacccaaatcttttgactgccaagtgcagccctgtctggtagagggagataccatctcctttcatgccacaggctgtggagggaggttct

SEQ ID NO: 54062 - DNA, 2099 bp, Homo sapiens
caataacaacaataataatatttttctcactgaatttttgcaaagatctaatgagaaaatatttgtaaagggcgtaacagtgcctggcccttggaaagcagtaaataaatgctagtttctggccagtttctcctaaatggttactttgggcaaataaaaataaaaagtaacacatgaaaagaaccagggacaataatctataaagcaaaaaaaaaaaaatgacatttaactactggccattttaggatagaacatttctgttatttaaatatgaagcagagggtaatgttgcagttaggagatgtcttggggcattttgcaataggaacagaaaaaatggatattttttgtttacccttctctgagaaaatgaaccacaaatgtctgtctttctcaaggccaaagtagggagagtgtgactgctgaaagtacagactgagtatcctcatgatgttattctcaaaggccttactaattcaggagggaaggacacaggaattatggtctctagaagtcatgcatccaagccccatatgtgctaggcagttcaattccagagtatcatagttttgtgaaaatagtattttgtaacgttttgtgaaaatagatttgggtaaaagaaatgtcgctatcaggtgaccttaagcatgtctttttttttttttgtaatgccacatatggtcataccgtgttagccttttttaaaattattattatactttaagttctagggtacatgtgcacaacgtgcaagtttgttacatatgtatacatgtgccaagttggtgtgctgcacccattaactcgtcatttacattaggtatatctcctaatgctatccctcccccatccccccaccccacaataggccccagtgtgtgatgttccccttcctgtgtccaagtgttctcactgttcaattcccacctatgagtgagaacaggtggtgtttgaatttttgtccctgcaatagtttgctgagagtgatggtttccagcttcatccatgtctctacaaaggacatgaactcatccttttttatggctgcatagtattccatggtatatatgtgccacattttcttaatccagtctatcactgatggacatttgggttggttccaagtctttactattgtgaatagtgccacaataaacatacgtgtgcatgtgtctttatagcagcatgatttataatcctttgggtatatacccagtaatgggatggctgggtcaaatggtatttctagttctagatccttgaggaatcgccacactgtcttccacgatggttgaaccagtttacagtcccaccaacagttttgttcttatttctccacatcctctccagcacctgttgtttcctgactttttaatgatcgccattctaactggtgtgagatggtatctcattgtggttttgatttgcatttctctgacgatcagtgatgatgagcattttctcatgtgtctgttggctgcataaatgtcttcttttgagaagtgtctgttcatatcctttgcccactttttgatggggagcatgtgttataacttctctaaggctctgtttccctggttgtacaatggatatgctaataatacctgctattagaagactgataaaaggaccacaggttatgatggataggaagtcttatgtgaaatctgcaagtagtactaatgttaattatggttatggttgttaccatccaggtctccatttcaaacctcaccccaccaagccctcctgggaattgttttacattgcatgatgaaacgatgcagctgaatgattttagctcagagcatactctctatgggtatgttccactagtgtccttggaaagatcctcctggctttccagacagattatagcaagatgaccaccagccaaatgaacccctcaaaggacttttgaaactgcaaagcctaccatgtcacattcttcccagtgcttttggggcctgaaaaacataaattattactgacagccttgaatcagggccagtacagttcaccctggagcatttattctttacatttatgtgcagacaaccattctaggccttgtgagatcttccctcaagaagcttgta

SEQ ID NO: 54063 - DNA, 1039 bp, Homo sapiens
ggggaaattttagctctgttctctccagtacagcagctacagcagtagtagcactactactatttagatgtaaatttaaattaaaaatacagttattcagttgtgcttgccacattttaactgcttaaaatttacatgtggccaatggctaccatatcagcacagaatatttccctcacgatggagtcctatggggcagccctgtgactctgcctcctccgcattctctcgtaagacctaagggcctggcagggccagtgacctcagtctcccaccagctctctgccccttcagtttgacttgctctaccatggcatcagagtgatgtttcagagtgatgtgttctactctcatatatcaagatttctcattctacatgaaaatcagttgttggcttcctctgcccatgagaagaaaagataagctctgtagcatgacgtaaaaaggcattgttgatttgtttctcctgtgtcatccctgtcccatgtcccattaatgttactggtatactgaattcaccatttttcagtcatgccttgaagttcgttcttctagcccattgcctagaatgtaaccccctccctccttttcacgttctttgtgcttgtccttcaaggccccagttaaatgtctgctacaagttggccccttcttttctgtgctcctgtaactctcctgtagcgcttttcaggtccggccgaagtgatcttcatctttacatgtttcttcccctactcaactgtgagcttgtggtcttgcccaagtttgtgggttagtcacatttgaatcccctgcttctgacaaaggaggaagttgaaagttacatgttaaataaacagatcctgcaccaaggaataaattggtatgcaggtagtgaatgaatgatgaacaaactatctccctaggccaaatgaggattaatgaactccgtaaaagcctttgggtacccagtccaattctgctctcgtcttctttctgtaaaactctgggtgatcactcagcatccagagccaaatacctttgaactcaagatgttaaa

SEQ ID NO: 54064 - DNA, 1074 bp, Homo sapiens
cttagcccagagttaaaagatgaaaggcagaagaaaagcacctgaaaatgcttttgtcactaagatgctctgaatctccaaagggaaaaaaactataaagatgttttcaactcttagaaaaagttcagggtaagttgaagattattctaggaccttggagttggcttgtaaaatatgctgtgttctccaacctttaacaatttcagccataaacctataaccatttacttgtgatcccttttcatatataatatatagaaaaagtctagtctagtttctagtctaaaaccatatggttgtcatcactcaaacagactcttctatgagatgttctaagtctttaatataagattgagaaatataggaatgggggaaatgacttgactgtgactgaagtcactgacaagtagtattcataagagctgttggaaacctgggccttcctttagcttagctggcattagaatgcaagggtgttgatatgtggatggggcctagcagtagacatatgaacgataagtgtttgaagcccagcaggttagaggaattaaccccaaagcttcccttccatggaagatctcagccaagagctcagagtaagggaagtgaggtccttattccaaggacaagatctggcaaaggctagactcagaagggctagactccatatcagtgggtggcattcccattccagatgaggagcaatgtacaactgcaaaccttggtggcagtggtacagtgatatatgctgaccaaatgcactgaagagtgccaactcaattattatttcgatgtccagactccactctaagcccaacagatattgagtctatagcaacgtgatcaattctaggccctatttgctaatgaggctgatggtctattttgtgccctggttggtaggctttagatttgatagaatgaaacctgggtgttttatactaaggtcataatgtctcaattagaaagacactgataaggaagggacaaactgaaaaaggtcataccagcatatagcagtgtgtttctcagttttatctctgttcttctccttccctcaattacactgtatat

SEQ ID NO: 54065 - DNA, 1027 bp, Homo sapiens
tggcctccaaaaccttgagaaaataaatttcagatattttaggccaccaagtttgggggaatttattacaatcacataggagacaaatacaaatagaaagagaaatgacctgtcaataaaagacatagatcaagtccaagttctgataccatcacctatcttggcctcagtttcttcatctttaaagtgggataataatacattttctatatggattattgggaggatgtaaaagagataatgcatgcactttatccaccatagatacttacaaagaaaatgctaggcattaagtttttaatcaggctgcagttagcatggcagaatgtcacaggtcctaacagagcacacttttggagactggatgtggcagttggcattgtggaagcagctggcagtgttggagacatctaggcaatttgtttgcaggagatacaaccatggccaccaagtaggggctaatgcccagttcttgtcctagagcaggcctgtgtgctggggaaggcaattcagcaaaccccaagagtggagaccatggccaagaggggtttattatttcagtttagggaaacaaggttttggcaaggaagtcatcctgaagactcttgatcccaggtctgattgtcagtgaaggaaactcatgtaggacagctgagcccacatcacagctttctaaaaacaacttaaatgccaaccctaaaattctgaaaccatggtataaatcctgcttcagtcagactaggtctaggcactgggatgggtctggtccaggaacagtggctgctagactgccagggcttactggaggctgctttggcaaacagaggccagctagtccaggaagtctgagctggaccccagagtccagggtgcttctggagaaagccaaggcttgtcccatgtcaggaagaaacaggctagctgagcagcaaatacaaatcttgatgaagaagaaaattgagaatacagaactggcaatattattcaaggcttggagtctgaagaacaaggcaagatagtaaaagga

SEQ ID NO: 54066 - DNA, 1049 bp, Homo sapiens
tggttgtcttcagagttagctcttttaaccatgcttccatgctctacagtagaaaccaactccttctgactgaaagagctggcacagggaggcctgagaactgcccaggccctgcttgcatgcagtgatgggggaaggtatatggagaaatcactctgagtgtgagaaaaccaagagcactggatgctgcaaacctgctttgtgaccttaggtgagtcccctgacttctctgtgcctcagttgccttatctgtaccatgggggattaacttagaggatcctgtaaaggctcttttctgtgccatgcagcctcaggatctgtggggtttgtgtcatgtcattgactcttaacaggcagtctagttctcaggggttaaggtaccaggctttgaattcaaattgactcatgtttgatttgtggctctatgtttcactgctggatgtggaatccggatgtgtagcttaagttggacaaatgaagccttggttttatcatctgttaaatggatttgccaagagatcccctcccacaggttactatgaagatgaaatgagatgatatgagcaatgagctgactttactgcctgacactcagtaagcacccagtgaatgagggctttacccactcgtagtattaggtggactgtttggtcactgagactgaattatgatcatcgtgaaggatactagagactgtgtcatgctcttctctctgtgtctaagcacagagcacagccctggtgtattgttgcccttggtgagtatttgtggggtgaagggtttgcattgctaaatctctacactagcggggcaggctggtgaggctccttcttggccgagttctctatgtgcctaggatttaattcactgatgtttatattgtggggttcttaaagtcttctaaggataatttcagttgcgaattaacaatcaggaacaaactatgaaatgtgtaaacttgtgtcctgctttttaaaaaatctctcttcctcagaaaattagcaaataagaagaaatagaggttgatgttgaaaacaacaacaacaatt

SEQ ID NO: 54067 - DNA, 1034 bp, Homo sapiens
tttagcagttgttggttcatttctattttcatccttgaacggatacagtgtttatcttctgtgttttgcgggcaggggaagatgctaatttgttctcctgtagtgagaagaaactgagactttggagtgggctcccctttgcgggcatgtcaccactggggaccaccactctagtaaagcacgggaattaagatttgccaatgaatggctgtgaaccggagtgtgctttgctgttcagatcttttaacctcagcttatcaactttaatatgttgtcctggtgtcttgattttttggttcatctgttttaatgcgatgaaatgtaaaaatagagcttagttttgtcccctcacaatgactttaggggtttttagctgataaccaacccttcttctgtaaaggattcaaattttaaacagctaaaaatacatttttctaatatctgtcatcaagtgattagtgcaactatttagttctggtcatctttcctattcttggtagatttatattctcttcttagaattctactgccgccctctctgtctgggagactggagatgtcatttaaacattgcttattaggattccattatttgtctctcctatacagtcagctaaatcaaaaagtcagacagtgtttttaaattgcaaatttaaatgacaatttttaggccaggtctactggaaattttctgtccttggcatccatcattgcttgtgagtatatagttttatattctctctctctttttctctctatccttttctctttatcttcttgagagcacagcacacatatccatcagaaggatcagaactgcttgcaatcaaacaaaaatgcaataaagatcttggaaggaaattaagacaaacacctattctagaccttgcttacatattagttctcttcctcctccttatgctcccttgcctcttaaagaggaaacttgcataagacaatttttttttaagcagttaagcccatggcttagattaaaaaaaaaaaaaaaaatttggctgagcgcggtggctcac

SEQ ID NO: 54068 - DNA, 1032 bp, Homo sapiens
tgcacttgctcttggcgactcctgttcatccttcaaaactcagtcacctgttttttttttttttttttttttttttttttgagaagaaggcttgctctgtcacccaggctggagtgcagtggtgtgatctcagctcactgcaatgtctgcctcccaggttcaagcgattctcctgccttagcctcctgagtagctgggattacaggtgcatgtcactgcacccagctaattttttatatttttagtagagatggggtttcgccatgttggccaggctggtcttgaacttctgacctcagctaatcggcctgcctcagcctcccaaagtgctaggattacagtcaccttttggttaacattgtgagtttcctaacatcctcaattaattaatcactgattatcaattcatgtgagcttctacatatctttcaaatccattcattccttcttccccactggcccccgtccccgaaggtagttcaggctaccttcatctctcatctggatcatcctagcaccctcctaaatggttttcaggttttcactgctgtccatctccaagccattctcagcactgctcactaatgcggagatttaatcagatcacactcctgcataaaacccttcagtgagtggctcctcctgccctcaggaaaaagtccacactgcttatcatggcatcagagaggtgctgtctggtctgaccccttcttatctgtccaggcgcattcctcaccactcttgccaatcatacgtcaccgagtggtcccactgaatcaattgcagttccctgaccctaccatgttgattttttacacgtggggttttgtacatgttttttcttctcctgggaatacattttttctgtatttgtttcaaagctaactccatgtattctttagtctcaagttaaagattacttttctccagaaatgctttggtgacccactgcaacccacccacatgccccccagttgtgggtcatgaccatgctgtgtgctctcaaccactttgcattttctccattattta

SEQ ID NO: 54069 - DNA, 1051 bp, Homo sapiens
tcccaagatcagtgcaatagttcaaagttgttatcaggggctcaagttctttctttcagccctgtgccatccttagattaattgcttcctggtcccaggatagctgctatagatccaagtatcacaccttcatagaacttcatggaaaacagaaagaagccagggcagccaggatgataagaagaggtttccttacttatctcctttctttgatcgaggttatttttttttttcccagaaggaactcccacaaagcaagacaacccacctaccctctgtttattcgtattttgccagaactgtatcatagtgccacttctagccagaagggagtccaagaaagcaagtatctggctttttcaaaatctctgaggaaagtgggcaagaaaaggcagtgtaagggaaaaagcttcctatatgtcaatgcactaatgaaaatgtgagagctcattgccttaagagaggtcacacaaaatacctgaattgggggagggggtgttttgtgttaagaaacagacatccagagaaggaccaagggaattagggagggcttcaaggaccttcaagatgccttaccctaaacaggcgtctttccttggtgactcatgcagaggaagtggctggattccaaatatgtgtatagaaaaactgccacagaagaggcagcgatttgttcatgtttgcagctgctgactctgacccaaatctgccctcccccaatcctcagctgctggtaccaatgcatccttttgggagctggaccatgagctctgccaggaagaaggtgcccatctcaatggttccccgcttcaatccccaagcaagctgtttccagagaaggggagtagcacacacaatagtaaccggtttagtaattagcagcagccctggggccatgcaacacttctaaaaagacaaggtggttcaataagatctgccacgacccctgagaatgttctagatggaaagacaggtggggatctccaatgctgatgacatggaggcctttcaccctcagtggttagagggcacaggttaggaaatggggaac

SEQ ID NO: 54070 - DNA, 1113 bp, Homo sapiens
caactttcttattatcttattttgcacccttttattgcaatcattcattagcaaatatttcctgagctgctgttctgtgttgagttaaaagacagcagtcagcatacatggccgctgccctcaggagctcaccttttagtgaggagactgagaaacaagcagacaatgcctgtagagtacagcattagaaataaggtggtgtggttgggctgtgggtggggactgtcagtgaaggttcctgttacaggtgataccggggaatgtgatggtcattgcaggaagaatgctgttcaagacaagggctgagaagaaatactgaactgggaagaagagagttagcatgatgccagggcagagcacaggccttgatttaagacccaacaacgtgacttcgtagctggatgatcttggttcagtcactcaatactcttatcctcatggattaagatcaggatgatcgttataacacttaactttcattgtactcatatataccctttcttgagcactaggtctctggccttgagttaattacttggatattaacatgaccttcacattttagaggaggaggtttcctagcaggtgcctagcagagccttgatttcatctcaagcctgaatccagagtccaagctcagaagttgtgccacctctgagagtacaagactgttgaagattcaatgagctgatataattataggaaaatagacattacaagaatgttagttgttttttctgcatcataaaacgtcctctataaccactttgtaggccaatgcatggatatatatgtgtgtatcactcatatttcttacctgccatttttatattcatggtggaaaggcaaaatttgaaaaaggaaaatgttcattaagaatataaaacacttgggcctatagggaaaaatgtttttctgacttttaaatttccactttttagataatcccttgaatgtatatcttgatactacgtgggcatcaacccctgagggagtgttggatctccttcctgtccttccccattatatggtttattgggtttttactctcattgattaaactcttgctatgtcctagccactgtgatgaatcctcacagcatccatagcaga

SEQ ID NO: 54071 - DNA, 1092 bp, Homo sapiens
ttatttccgtgcaaatccaattgaataatttgtcttcgattctgtagactttttcttagaaaaaggaaccacaggcctctctgctaaattttctaattctgtaaatattcttgagttttaaagtttgacctgatgctttaaaaatagtcaaacataccttaagcaggatttctccgtttcagtagtattgacattttgtgccagatagttctttgctatgcattgtaggatgtttagtagcatccctggcctctacccagtagatttcagtagcacctccccacatcacaagtgacaatcaaaaatgtctcaaaacattgtcccctggggtgtaaagtagcccctggttgagaatcactgccttaaagtggtggccaaacaaagatcttcaatgttctacatacaaaatgaagtgaatctctgagagtttaaaacaagatgtagatgcaaacctgagcactacaaatacttgttcctatattgacttcccctgtagagtgagtcctgagagcagggctgtgagttttgtttccccatggcctagtactgccaggcaagtcatagagccccagtaaatattgagtgggtgaataagagaaataaatcacctgtcattagacgcttccataaatgtatatataaatatgagttgtatgtattcacatagttccattaaaaacttactaaatattactcttttatatcccagtgtctgaatagtaatgcgcacagatcagacattgaattggtattggctgaacggctacctggcacataaaaagtacattgaaatgataaattaacagaacacccatggccatatgccatcagacatgtgtttttgtggcgatttcaacagtcagtgagttggatgtgggatactcgacggtggccaccctgcaaggtctatttactttgcctcgtttgaaattcagtctccatgcctcggttgtccaggtcccccgtctggtctttctgaatccacactagtgagaaggagaatgttatggttcagcaggaaatggatcgttttgttttaaatttccaggtcaccacagctgtgcatatagccgctacttattcccagatctc

SEQ ID NO: 54072 - DNA, 1050 bp, Homo sapiens
tacttgctcttacatccaaatagacacacacagacacacatgcatgaggctactgtgctgtgtgcccagagttagggcagggtcatggcagtcagcgttacctaggctccagtgtggtggttaagagagtggggtcaagtggttcagagtttgggctctatgacaagactgtctggattcaaatgctggcccttatgtttagtagccctgtgatgttgggcctactgcatatatttctgtgtcccaggctccttttctgatatttactttaatctacgtaaaagagcttccttagagcttgcctgggacatagcaagcatcatataactcttggctgttgtggaggttaataagcatggcctttgtcaccagggttggaatcaagatctatctctgctacttcctagctctattacctgagcaagtgagttcacctcagcttctgcccctgcttaagtgatctaataatgttctctgacttgggattgttgtgagggttcaatgagatcctggagatcgagcacttagcttaatactaagaactcattttcaatgagtgtgcttagctgtgggggaggaaatgagtgggagaggagacagccacctgctcctgtggagggcttctgtggggtgaagctcaatcctagggtgatgggagttcctttgtctccatcagttgcacagccagggacagagagaagggttgggacctggaaatcagagtggcagaacaagcactaaatgaatgttctattgttatgatttgtgattctggaactgggcagaagcctgtatcctgggacagaatggcaggtcatagcaggaccagccattacaaaatgggctgctgcaccttatgaaaatttaggtagggactttcagccttcctgctcaaaagggtgggctttagctacactcccggaccaaacagagcccctactactggcttcatgtgaaatattttctagaaaatactgacgcacaggccattttcagaccaattacacctttgtccctagaggtgctacccaggtattttataaaagattt

SEQ ID NO: 54073 - DNA, 1045 bp, Homo sapiens
ttttgttaggatgtgacggggctgcttcccggacctgaacaaaatagagatcatccatatgaaaagagagagaacacagcaagcattctgcatgagtaatgcatgcaactctgtgataccaggctgtatttattctatagacattgcacatcatcagtattttaagagcaacatcttctatataaaaatactcaagagccttatgctttatactgtggactccaatgtaattacactctcttgttgactagatgtaagaagcttgagttgattacccaaggcttgttccctgcatttctgtttctctctcatttgacaggtaccatatccatttgttctattatcttctaagtttgaattggaaaaataaggtaaatcagagcagtctttcttaagttataaaaccaaccatgtgaagatgctttgaatgctgttctgcttgtatataactaagaactagcgcctcacggtaattttgcaggtgattagcctgccatgtagaaacggccctttgggaatgacagggaaacatgaggttgtatttctttacaataagcaggttacatgagagaatttctgtctccttactccttctctctggaagtcttaccaatattttaggatagggatggaatataagcttggaggagatataggagactcatactcatcaactcttacatttcaaatgtaatcaacaaatggattgaggtgctgcatgtgctaggcctggagtttgaaggaggacttaggcacagcctttctgttgagaatatccttttattgtatgttcatcaagctcctgtacagcctgcatgttataaatcaaaggctacctcctctgtgaagcccttctggattcactttagacaaacccacgtcttagttactgctgtaacatgttattagtgtgctttatgtctccccactggacctagccctgtaagagcctagaggccaatgccatttcacctttgtattcccattgttggcatgcaatataaacacattgtactcattatgatcatcattatcattatcatca

SEQ ID NO: 54074 - DNA, 1036 bp, Homo sapiens
gtttctatggggggagttaggtatctaaattttctgtatctcggaaagtatagggctagtgacctgccagatacatttcatttggggaacaatttagttataattactatggaaatagctattggtcacaaattgtacccatgtactatgcattagtatgctccttccttccctctctccctacctctctttctccttccctccatttatccatccttcatttcttttgttgagttggacccagaaggatgttaggataataggataaaggccaataggagttcatcatatatgcagtgggtgtggaaacatcatatttgaggcagggccacaggaactaccatggtgtgtttcccttagttgaacccacatgggtacaaagcagtcccgtgttactgttccccagggatcttggattgtgctgagtagaggaattgagctgtggtggtaggcaggggctacggcatgcagaaccttacatgccatactggagagtttcaacttcatgctgaaagtaatggggagccattgaaaccttgtcagctgggaatctaattgatcaaatttgctttttggaatcagtctggagtagaaggtgtgaagggcagatgaaaattgacaagaaataagtcaaggatgtgtgtttacgggtgtaggagagaaataattagaaccagagccaagataatgacaacaagaatggtaaatagaggctgtgtttgggggtgcataggacaaggttccacccatgtctcctgtttaaaataaggggggagttgaggcatgcattgtcagttacttttgtggtgtgaaagagaatatctttgaaatgtccttctaaaagaataacctaaaaaggaggcaggcagagctgggacagcttcaagggccctgaatgaaagaagaggccatgcagagctagggcacgttttgaaataatgtttgttgctgaggcttcagagtgagcaagaggaggagtttgtgagagggagcagtattctgtgaagaagagagatttagggtcatggagtaggag

SEQ ID NO: 54075 - DNA, 1060 bp, Homo sapiens
gctgtctccctcttctctctctctcctctctctgtgtgtgtgtgtgtgtgtgtgtgtgtgtgtgtgtgtgtgtgtgtgtttattcctctgcctttaaaaagaccagaagaatgcacagatggattagggcaacattgctccagaagcatcttatatagttattttcatctgatagcatcaagacacatttgtggggtcgtgagctgtattgtagtcttcttgttttccagaatatatctgcatgtagtagatgttcagtaaatgttggttgttaaataaaataatgaatccacaacatatggggctcatgctcttggagattcaagcttattgaagcattaattagttgatgtttttagtatacctcccatgtgccaagcagggaggtagaccttaaagattacagaggttaacatgactcaattgcttctcttagttgttttatgtttcatggattctataataaggaactgtgagttgctatgctcattaatgctatatccttgcaacaaaatagatcatgaagaagtaacagatgcctctgttgcagcctcttcttttttcatacatctttgagtgtgtttattatattcttcttgcttcttagcctgaatttcttgaatatctgagcaccaagcatactactgggttattaaatgcttgtgaatgaatggacattcttggaaccaaaaacatggagttagggcggcactgtgctatgctagaatgaactttggctgtgggtaggggatctggattcaaagctcagctctgtccctggctggctgtgtgaggtattaattaagcttctattcagctacagaaaaagcatggccactgggagcaaggtggaagaacttaaactatttgtgggaaaagattatttagatcaagaagttagaaggacagcaatggaatgcttgtcgtacagatgtatttaggagaaggaggacagctaggaatttgggttttcttaaagcagatttccaccttagaatgacctgggatcatagtatgcatggctaacatttgtaagcaggaagttgggagaaggaaaaca

SEQ ID NO: 54076 - DNA, 1073 bp, Homo sapiens
catcagaagctacctataatttcagtgcaatgagtgctgggcataggtggccattcagtgagtgagtaccccaacctttgggaagataagacaggctattctaatccagctgtacccatatagagcaattatcattttcactctggctcccaatgccttagatttactgggtcttcattgcaaggcaggaaccttggagttaattgaattcattggactatttatggctggagctgatgcatatgatttttctctcttgaatatgaatgatcagcttccatgggaaagcaacaataaagtcagtccaagctgtgtagcttactagctgtatgaccttgggcaagtcactttacttctatcagtctcatttttcttatctgtaaaatgaaggcttcttaccattgacgttctaagatatatagataagattctggtttttaaaatgtgcttactagaccagtgagctgatgagaggcatttaggtcatatgtactctccagattactgggattcttcaacttggcctaccttctaaagcatatacttattatacaagcaaatatgcctgtcagtgtcctaatttacttcagaaatgatttaagcctagaatcgcaggtttgaattaatattaatatttgatttaattaggacaattccatcttgagatcaggaaactatgccatccatccatccatctatcatgttatggtcttattcagtatttattaatattaagcacctgctatatgcttggtgctgtgcacagtgctgaggaaacaaagaagaataagattcagtcgctgtccacaaatctctcctcaccttccacaaagaaaaaaagaccctcacactaaaaaccagttgctcttaatggcattgccttttggttctgtgtggctggcatcatgttaatggtgagttggtgacctccaatagaaaagaagaaaaaaaaagttcctcaactctggcttatgcaaacatctttaatcatttcaagcttcaactacagaccaaattggaaggaagagctgtgaaaagcccatttataaacaaaagcccggccaggagtcgga

SEQ ID NO: 54077 - DNA, 1027 bp, Homo sapiens
gtatgttctgaatactgtgctgggctctgggcttacagggtgaggtgtgatggaaacaatagctgccctcatgggctagtctgtctactaagacacaaaatcaacgttctccatcaggggaccatgacaaagttggaggcatgtgccatcacatatggggagtcccaggtaatttggtatgaatggatcataaagtggcggggtggcaggaaccaggggaaatgaggcagggaaggtttgcccagcaacttcacagagaaccttgtcaccaagtgttagcaatgagattttggttgtgcacatggatgtgaaatagcctttactttgtgtagccttctctgcaattaactttattttcctattgcctggggtcaaagagcaatctaagaagaaatatatttatttaggtgaaataaggatgtgtgtgtatcaggtacggtataatttaatgatccttcaggtgtctcctgttataagaactacaagctcagatgcttacaagggccaggtgtttgtgggtgaaacagtgtgggtggggaccaggtaaaccgctgttaaggttcatctgatggttgcagtaacagaatactggactcatgtaggtctttggctttttcaagaaaagctagacatcttgttttcgtgtgaaatccctctgtttaaaaatttggcactaaattaggtaaaacaaaaaatattttgtggactaaagataactggcctaagggcttttcttagcttatgaaccaccactggtgaattctggcctgttctttataattagtatggtatgactacatagatctccctcacgtgcaagttcagtcaatataccaaggggtacattggaccatttccggtaaaggaaaaagtttctgcaggatagccgaatggtgcaaattggccttcatttatttctgtgtgtttcctcaatcccattgtttgtttttctttatcaaactcttctgttacatggcacaagcttccgtgaaaccagtgtccatggcaattctggggtgttcttagc

SEQ ID NO: 54078 - DNA, 1050 bp, Homo sapiens
ttgagaaggcatttgaatcagagctgggatatgatcctgcttttcttgatctcaattcagtatacttttcatttgtttatgtatttaaccaaatttactgagtactgattgcagactgggcatacataatccaatgctgcccttaagaagccagtgtctggggaaatcagacctgactgtagagcagtgactataacacatgttgaagatacagtgacagggcacagacaagtatacaggaggaagggctatcacagaggagcaaaggttcagcctcaggacacaggagaagggactgtgctgtgccatgcagcagagcactgaggatgatgataatttttccacatgaacaaggaagcaaaaggccgttctaaaacaccccaaaacgggaactcttagcagtttctatttcatctctatttttatcggtgttgggttattcttcaatttgacaaaaaagaaaaataaatcacagagaatagagtcccaactcaggcactcaccaacaggacacatttcctatgggtatttcctgggcctgtcccttaggcttgggcctgctcagctggagaagcctgtaaggggaggaagtggggatcggtttgtgttcatcagtatgcatttcttgaaactggccaccagcaaagaatcaaatctccttggaatattcttaagcttcctacatgtttgattagttttccccagtagggaatgaaataaaggaagcagctgttgagagagggatctttctctctgcatggtccgagactagctcatagcataatgttgatcctcacaagacccaggaaaggtcagaattattcagtatttaatagaaaggctactagtggttggtctttgtggtcaatgggggcagaggaggacaggagaatttgagggttctttttgactgttccatagccctttgacactcttttgtcttaatttccttttccattaaagaagatacggcacacatacataaggttatttcgtgcattcattttcttaatagcccacggagcatgtaccatgcagcaggccctctgc

SEQ ID NO: 54079 - DNA, 1115 bp, Homo sapiens
caggttgagtgaggccagaggggaaaatcagagtttacaaagtgtgtcatcaattagggtcctagtagaaaatagaaggtacactggattagagtaattcaaagagggtttaataaagggattgtttaagtgagcagagtatagggaaaacatacgagttacagcagtgtgcagggctgctaccacccctagacatggacggtgtgggtgagggagcaggtactggaaccaagactaggaagtcctgtgaagaagccaccttgagcagagcagtgacttttggttgagaaaggaagccatcctaaggtgactacaaagggaggaagccaacggagtgaatacactaacttggtctcttgtcaagaacctgttggcttacctcaaccggaggacaaaagagaacaagagagcccatggtgtagtccacatggatagcatctgggggccctgggctgagtgaggaagcctgaagcatggatctggaggatcagacagaagacagcttgcactggggcattgatgagaaggcagagcctgagagccagaaaatgggggagttaggttgtgatgagcaaggtgacataacccaacattaagaatgcacatgagctctctctggtccgtgcctccaagatgacaaagaaaagaaggaacaatggtcgtgccaaaaagggccgcggccacgtgcagcctattcgctgcactaactgtgcccgatgcgtgcccaaggacaaggccattaagacattcgtcattcgaaacatagtgaaggccgcagcagtcagggacatttctgaagcgagcgtcttcgatgcctatgtgcttcccaagctgtatgtgaagctacattactgtgtgagttgtgcaattcacagcaaagtagtcaggaatcgatctcgtgaagcccgcaaggaccgaacacccccatcccgatttagacctgcgggtgctgccccacgtcccccaccaaagcccatgtaaggagctgagttcttaaagactgaagacaggctattctctggagaaaaataaaatggaaattgtacttaaaaaaaaaaaaaaaagaatgcacatgaggccaggcacggtggctcacacctggaattttagcactg

SEQ ID NO: 54080 - DNA, 1034 bp, Homo sapiens
tttggggtgatgtctgccttccaaacattcctcaaatcagagaggctaagtcacttacctgtattcatgcaataaatggcagagcgttgatcccaacacaggcctttctgattccttccagtgtgtctcagccttcaagacaaaactagctctgctaaaattctacgacagtgaggaatgagaggcacagcccaaatttaatgactaacttcttgtttgacttggagcttcaagttgatttactccttgaatattcttttctctcttactctggcttagcattgagaatggcagacattgccttggcaaggttacaggataaacttgctgcttttaggacgtctgtatccagcggaatctttattttctgtcccttgggcataatcttggaaaaacacatctgttattccgggtgcttacctgactgggcttatttttcctcccttggatggagaaaaatgtgctatcaacagatgaggaagagttttcacatcttttgaagtcacggaccctttgggtattaaaaaacaaactctcagaatcttgattaagtcataaagtgttattgaaaaaatgagagatcagtccttcagctcgaagatgtcaaagtcactggacatgaatttggggtctctactgattaagtcactgaagtgtggacaatggttgggggttgagcacaccttaacagatggactgtacatttctcaaatacctgtaccaggacacatatcccttcctttcccattggctaagccacatttacatgcaactgcctcgaaactcatcctttctggtaactttccaggacctgaaaaacagaaacaaaggctaggatgagagttaaatactttgatctaccttattcattcatttcaaaacacttatgaagcacctatgtgccaagctctatagtagacacttaaaattcgatccctgaccttatagaggttttagatagtggaaacatatgaaaataaggcaattaaaagatggtatgctcggccaggtgcagtggctcacacctgtaatcc

SEQ ID NO: 54081 - DNA, 1031 bp, Homo sapiens
ggccatccagcatgtatcctttaaattcatccaagctagcagaaataagagagcttttgattttcctacagtacaaacaaaagttctgcctctcaatggattgagtcttgccctcaatcctgaaccaatcactatagccaaggaactgtaatccctaattggccaggctgggtcatatgtctaatcttggagtcaaagatctgaatcaattctatcagaaatagatgactgagaatatagaagaggttggttacgagaggaaaatgtactgatgtaccaaaggaaggcatggacattggacagccaatatgtaatgaccttttttgtgagcccaagtcccagagaggttcaaggacttgcctaaagtcatacaactaatgatcttgatgacacagcctatccacaatgaatctgtcttattcacctttgcctatctgctacctgtcccagccactttttgaatgaaaaaaggaataaatattacgtgattaagacttatacccatgtcttctgactttacaccttaatactctttccattgactatttccagggctgcacaataccgcttacactatgtgtgaagattaataaacaattgttgtttgctataaaaggtggctttgagttcctcaagggatatgctgctatgatgctgggacagctctctgtactctgactttctctctcctggatgcagctgtcgtgacttcttgatgaactctatcagcaatgataagggattcagtgaaatggtggcatttctgcttagtcctgcctaccatgatatgatgctgacagatccttctttgaagagtcacttcatggctggtactattggaactgtcaactactgtacttgggaatctcaatcaaacttgtgatgatgggaatagatttacatttacagctttcaagtacaaagcaatattaatgcattcatgttgaactaacattatgcctggggctcaatttccaagtgagagtttgcttgacaattattttctcagaagctggtaagtagaaattaag

SEQ ID NO: 54082 - DNA, 1062 bp, Homo sapiens
ccattgtcacttctaattgtgttgttcatacttgctagaaacatatataagttgacaccatgtcagaaagagcagagataatatctttatagtatatgaaaaagattttttttaaccagtggaattaaatgtaaaagaaatgttacagttcagctcaatgctttagaagaaattaaatagcagttgaaatacaagatgtatatatatactttaaattttatatggaaataagctgtatgttctacacttagttgcagaactactttgttcctgtcaatacttttcatgtgcctataggatttagatgataggctggttaacttagttgttaggagcatgatgctaataaatccaaggcacaaactcaacccgatcttttctataattcagatagggtgagactatcctctaaaactaaaggacagtgtgtatatttactgctatatacttataatgctttgcacattataggcattcaattaacattgacactgtacaataattatctgttcaaaggattgaaaaaaaggagaaacaatcatactctgtaaaatctgcttctgtagttgtggaaccctggacaagtcatgcaaactctctaaccctcatttcttaattgtaaaatggggacaaaaaaaatcctcctaggttgaccaatgaccaagtgaaatgatatacttaaagcatttaacacaaagtctagagctgcaaatgtaataaaaattgttaccatatactgaatgcatactttgtactattagtccattttcacactgctataaagacatacccgagactaggtaatttataaagaaaagggatttaattgactcacagttctacatggctggggaggcttcaggaatctcacaatcatggcggaagggtaagaggcatgtctcacgtggtggcaggcaagagagagtgagtaagagcagggaaaactgccccataaaaccatcagatatggtgagaagtcactcactatcaggagaacagcatggaggaaactgcccccatgattcaatcacttacctttcttgtcacatggggattacaatt

SEQ ID NO: 54083 - DNA, 1015 bp, Homo sapiens
atttgtttaccctcaaaacagcattagggcagttgttacagattattaatactattgttgttgtttttaaaataatactatttgaccaaatcatgaaaacaactgttcactgtagatttttcagtggttctcttttatgtgttataatcaagataccttttattaaaaaaataacaatacattctttgttttacatggagcatattagggattactgaaacaatctgaatacattgatgtatatatatagtatttttttattttattatttctttataggctctcaaaattagagagatgtgtaattgtccaccactgtctaatccagaccctcgattactattcaaactcagcacgaagcattttcttgaagaatcagagaaagaagacctaaatatcacgaagaaacagaaaatggatactcttcctattcaaaaacaggagcaaataccattaacatacatagttgagaaaagaacgggcagttgaattaaaatttatgagacacaagatatatgaagaatgttgcagtccttatcattttatgttactttttaaaaaatgatgtttgaagtgaaaaaaaaaaggatattcagggtcaaatcatgtacattacagatattatctaaattcttctagaatttatttttcatgaaatattgatgtattttaatctatgttaaaatatcttcaatgaggaaaatgtcacagaataaatttatattacacattttactctgtcttctacttgcttttgatttagaaggcagacccctagtggatgagaaatgagcccatacggtagtttttatagtagagaatgtttcaactgagcctaaactggatttctaagtctgggtcgttatgatgaagggggaaacagtctgaaggtatctgtttgcaggaaatagtttgcattggggtgggattatgtggaaaagggggcctcaggatagagaatttccttgtcttcacctgtggatgactggagaaaatgctactggcagaagccatt

SEQ ID NO: 54084 - DNA, 1059 bp, Homo sapiens
ttggtttaggaaacatacaagaccagggtatgtcccccattaagctagtgtcctccttacagctcttctacttgctgatttctctgtctgaaacattcttccctcagttctttaggcaaatgtcactgtcctggggaggctttctttgatcccataatcttaaatcgcttcccttccatgtactcattgtccgtccaacacacctcactctttagtttcttcatgtacttaactaaaattaccttatttgtttattggcttttaccctagtgtgtaaggcctttgtacactgctgtatccatagtacctatgagaagttgagatgattagtgaatattagttaaatgattgcatgatgtgtaataataggcaggataagcaatataatagtgggtgaaaaatagaaaaattggcagtagaattgaacagtccttccactcccttatagaaatttagcatgtaggacattaatagttggtaacgggagaaagatggtcgcaggaaatagtaatataaagataacagtggtcttaggagtcttcggttttaattctgactcagccatgtaacttggagaaagttacctaatccaacctttagttttcttcatatgtgaaatcaggatagcaatatctcctagatgttggatgtacatacttgtgcatttctgtaggtaaggtcctgctgtcttctttgccttgtccccctctctttggcatagacattttaatgataagtattttatgtcaggcccaagatttcaaaagtggttcaaattccaatgtcaatttagatgtgtaaaatacctcacgcagtgaaaggcacatagaaagtgaacagtagatgttagtttctttcactcatagttgtagtctttaggctggctaattctatatttaacttcaaatcttcctcaggattctcagaaccatatattcttgctattaaaatacattcctgctttttcttaaaccataaactcctaagagtattttctctatgacatttatcataatgatttattcatagctggtgttctataaatgtttgtttaaaatt

SEQ ID NO: 54085 - DNA, 1033 bp, Homo sapiens
ataaaatgagctttaagaagtgatgccatcagcaatattggaaaatgatgaacctgtggaggtatgtgagactgaaatgaactagtttctggtagatgatgacaatgatgattgtagtgtataataatcaataacatttttaatgtgctgggcactgtcctgagtgtattacatgtatttattcttttgatcttcataacaaccctgtgaggtataggtaaacctgagggatggaggagttaagtaacttggcaaagctctcatagacagtaaggtttccctctcccaaagtggaggtacattcatttctgaaagggaactttccatcttatatttgcctgctggaaacaattttggttttctgcagtattgcttctaaaataatgatcatttttatatctgttttggtccctttacatcttataacagcctcagtgtatttttctagctgtaggagcccagctccccctgccacaatcctttgtagtattgtctcagatgattattttacctatcacatgtctatgtggaatacaggagaggatgctacaatgactgggacaagtgtagggtgttaatggtttcctaaaaaaagattcagattcattcagtgtcaggatttacctttggaagggggtgatggctaacaggagctttgttggagtgtctagtgaatacagacagcaaaattcagagatacttttcatctttgcatttctaatgaaaacgttggctacaggtaacggtacagttaggcttttacttggtctagatctatttatacatatttctctagtattgttttggcattgggaaatggtgaaattataagaacaatttttatactgctgtattctttatgaatatcatatcccactgaatttataatttaatagtagcaaattctttctcaatatgttccttaatgcatattcatatacatttatattctctggattgtactagaaccttcttgtaaattcatgacatcatcacttaggaccaaacatagcattttgcaattaccataggc

SEQ ID NO: 54086 - DNA, 4691 bp, Homo sapiens
agctatggctgtaaaaacaccgaagggaattttaagtataattaaaaggagattggagagttaagaaatagttgatgacaatgtgcttctttatgcttttctaggcttaccttacaaatttgaagtacagcagatgttagaagaacctcagtggggattagtatttgaaaagacaagatggataatagaaaaatacaggctctcccataggtatgtactgtggtttgagatggttgcacatctgcagtgttgctcattaaattatgtttcagagaaaacccaagttaaatataaaattgtgatgtatggcatccgtgatagtttattatgaaactgattagtttatagtattcgtttcaccagtttgttttcatatttcttcctacagcagcgtccccatggataaaatctttcgccgggattctgacctgacttgtttgcagaaagtaagctgtcttcattttaattggttccattgttcacagattctgaagctattcatctcaatgtgttttcccatgatgcctaatactttgtggataattttctgtatatttcttttattactttttcctttggaaaattaatttctaggagataattagtaacgttttttgttgcccaagcttgcacatagaaaaaattctattttagaataaatttgtcagtgttggctgattttagcagattattattatacacaatggagaacatttttcttattttattaaatttgaaagtgccatgtttccattttagccttaacaattggtcatttttaagaatgatggtataaatctaacaattaaatttaaatagtcattttatttaactttctaataggaaataagagttttgaattctgtcagttcacgtctaggttttgcttctgtaatgattgaaggctagtagatctgcaacatttgtctttttaaatagcaattggggatagaaaatttaaacattaagtttctttttaatatgttttactcctttctgttatatccagttttttgtgtgttgttgaaaaagtatgtgcacatttccaaggaaatagactccagctagcatcctcattttgaaatgcagaatcctatgtttttatgtacctagatttttgtgtgtgtgtatactcaggattattttgctttgtaagtgtaactacaaatggagaaaagtcgcaaatacgtccgaagtagaaagcatcacataaacaatctcaggtttgtctccttatgtaaaatcataaaagtactaagctgagtgttcctcagcagcaatttcctacattccagctctgtgactattaaacacaagttaatcttcaaccatttttaaggagagtgtttctcatttgagcattaggaaatgtgaggtctggaaagggacgaaatagtgatagtaatgcaaaccctcatactttttctgtatttaaatataaaacttttcttttcaactagcttttggagtgtatgaggaagactctgagcaaagtgaccaattgctttatggctgaagaattcttgactgaaatagaaaatttgttcctttccaattataaaagcaaccaagagaatggagtaaccgaagagaactgtacaaaggaattgttaatgtgattattttaaagttaagacattttaatcttgacacagtagatcttactttcaaagttataaacttgaagtgattgtagttaacattggcacagctttggtattttttctctatttcacaaaatccaaactttgccacataaatcatgtgaaaaggaagagatacaaatttgttttcatatagtgattatcagagtgttctgcaaaccagggtccaccacggtgttctagtcctttactgagcaatgctgtaggctgtgaaactaagcaacctggtcggctttactgttgtgttcagcttgggatttggactatgtctctaagtcatttcttccctgaactagtcatttatgttccattgtggtatctcctatttcatttaaaagcacttccattctttccatatattctgctgagatttgtttatggctataaatgagatatggatgggtggtcactgagataattaatatggtttagaactactgattaataaatctaacaggagaccaggagaggcatgacaagaaaatcttaaaaacaggaaaaacccaaaggagagaactaaattaccagtttctaatcatagatactatcttccatttcattgtatagcagtagtatcataagatatgccattttctcagctatctgaaaatttttaaccaattttacacacataaaataattagcttcaattgtgagtccacttacattagtaggtgtgataaaacctcatttaactggaacataggtaatcataactcaaactttttttctactgcctactactaggagaaagaggcaaatgataataaagctggaataaatcagagatttaatttttaaaacaagcctttcaggacatgttacatattcagcccagtttcatatgctttctgaatctataatggaggtcagtgaacttttttaatgtaaagggccagtttgtaaataattttggcttttcaggccacatatgatgtctatgagacattcttctttgtgtgtgtgtgtgtgtgtgtgtgtgtgtgtgtgtgttttacagccctttaaaatgataaaaaccattgttaactcacaggcctcataaaacataggctgttggctattattctccaacccttgatctagagaattttaaacattagaattttgttttacatttgttaagctttacgtcatcttcaaatgacaccaaaactcagaattatgatctgcatttaagccaattttaaaataaaataagcagtcaatgctgcctcatttattgaaattcagtagattttagtttatttcttagtagtcagagaattgatttatagctattcaccaaacattcttactaacgtttccttatatctaaatcagattgattctatattttgctttgtttgtaatcaatagccaatgaagaataaggagtattggaagaagcagtgagtcagctttaggtgacctggttcttgtctcaactttgtgatttggggagatacagtttactttccctgagccttaattcttgtgtaactgaagtctaacttaacttcttaatgtccttccagaactaaaattttattgttcattctaatcgttggactactcttgtgaagtttatattttgagttaatacagtttccaaattaacatacatttaaaaaaaaaagggtagtatttttccatttctctgtgtgcacttaggataaacagtgaagtatagcttataaaacaattagtttgagggctgagagtgtaagaggaactataccaaaagtcaggaaacctgagctcttaccctaactctgttaccaactttgctgtgtgaccttaatcaaaacacataacctggaccccatgctcctcaccagtaaatcaagggcctgaattttatggcttagtattcccttccaagctccgaagttgcgtgattctgtgaaaggcagtgattgattcctttgtactcatcttccttttgacctgtttcctcatgatatattggggaacaaatactaaaaagtgttttatactagctttcttgattgacatttccctataatactgatgaatttgggtgatggaaagtaatggaaattgttaaaagttctgctctcaaatctgagtctccttgccctgtgtgccaatgtttaaccatatttgctaatctaagccatattgcgaggatctcaaggatgatacttgtcaagagtttggggccttgagagcacagttttcaaaataatacttagtattttctgactatagagtacatttgtcttgtaaagtatattttaaaatacagagaagtgtgaagtacaaatatctcagtgctactatttaaaaaaacacaattagtatataaatccttccccatttttttgacagtataattttagtatgttaaacttggttacttctttctctcttcctccatcattttccctgcttcctttttcttttgtcatattcttaaaacaattttgcaaccacaggtacccacattgctggcactaccagccttgggctactaccgaggataatggagccagggccttgtagaagcacagaggaagtctagaactgagggggcctatgatacaggaagttcaggaggcagagtctcaaaggaacacctgcctttaataatgtttacagaagtggagaaaggactaaaggacttaaagacatgcaggtgtcttcatcctgattctgtctttgttattgcacaatgactataaaataatgacctaatttttttttttttctggcttggctaatggaaatcgacactagcgcttccccagtattagacttaatctaattccaaagtaacattcaagaaaagaaaaaccagtggaacaggatcagtaagctcagactctccatctccattattttagccttgaccattcttctctaatccttttaaattatcttcagtttccagttcaagttacattgcttcagttacagtttgtttgaccctgtattcagagctgcattatgattcttgtgggccctagatagttttgccatcttagaccccttcttccatacaaaattaaaagtgatatttta

SEQ ID NO: 54087 - DNA, 1017 bp, Homo sapiens
atgtaaaataatggtatttaaacacaacatttagcagcaaaggaatacgattgctaagagatgggaaacaaatgaaaagagccccacattaccctagcttactgcttaagagggttttcagatatggcacaagaaggagaaacccacccagagccaggccgactcaattaaggtgatggagataaggagaccaagacagctgagtttgtgagacagagccccaagagaacagaaagcagaatggagagtgaactctggagatttgtagaagagtatccctggagtatttagcaaagtacagatcagcacatgtatgtgaataaactagcccagatgggaaagaactacttgaaagcattagagggaactatccatgatgctcccatgagctaccattggacagagctgtcttgtaaatgacttgtccatgcttaacactgcgtattagatcttaatcctaggtcttttgctttgcccttagaaatcctctggtgcaagaattaaggttttctagaagccatgggataccttgtgctacagtacttttaactcaggtcatatctttacaatatctctaatggtttaatgttttctttacttgtgacaggcaggaaatatatttagtgatcagttttcttctgatattttagtggataaaaatattctctataaaagaaacttattgactttaaaagtaccttttttaacttaaaaaatattcttaaaaataccaaatagacctgtatataatttgtgtgtatgttttcatgtttttgcatcagcatagattgaaaatgcattatttacctctctttattttcatcttcaactttcattgagagtaggagtcactctactggattcagatcccagctctgacatttattgcttattttaccttgggcagtctactccctcattctcctttgctacatctgtaaaatgagaaaaaattactaccttgcttacagtaggtatatggttgtaaggtgtgtcagtaatatatgtaaagtgttt

SEQ ID NO: 54088 - DNA, 1037 bp, Homo sapiens
ttgtttatttttatttatttttattattattttttttttgagacagagtttcgctcttgttgcccaagctggagtgcaatggcacgatcttggctcactgcaacctctgcctcttaggttcaagtgattctcctgcctcagcctcccaagtagctgggattacaggcgtgcaccaccacgcctagctaattttttgtagtttgagtagaaacagggtttcaccatgttagccaggctggtctcaaactcctgacctcaggtgattggcccgcctcggcctccaaaagtgctgggattataggcatgagccaccacacccagccaaaaaaaaaaaaaagaaaaaaaatacatatactgggggttttaaaagaacatgcatttttttttctgattgcaagattgataattgtttatgtaaacatttagaaagtcagttattttattaagtacaaacaagccatgaatgtatcactggtaaatactcccagagcctttaaaaattgatgggaacaactaggacagggactagatacaactgaagtaataagaaacataatgtattttttatagctgaagaaaaagttttattctgggattttacacttgatatgtgactgggtttgctgtagggtatttgtaaattattactgtattgataagaattacagatgtagggtggtgaatacaattagtaaatatattcatggcaaatacagattgtgtaggccattttatatttttaagggtcattttggatttggttgaacacatttttgcctgaaaaatgtaccgtgtgagatgaatatctaaggcatttgatttagttgcagtttggatgtgaactttttttttttttagagacatagtcttactctgtcacccaggctagagtgcagtggtgggatctcgactcactgcaacctctgtctcccaggtttaagggattctgctgcctcagcctcctgagtagctggggttacaggcacgtgccactacacctggctaatttttttatttttggtagagacggggtttca

SEQ ID NO: 54089 - DNA, 1080 bp, Homo sapiens
ttataaaagcatgatggctatacttacaaatgactttcttatgataagtgagttttgttactttgtcaggtgggtttgtgcgtttgggctaagtctgtcttgtatttcttttagcatgctcatgtttctatggcagaagtgattggtctgttaggaggaagatactcagaagttgataaagtagttgaagtaagttctctcttttaaaaaaatgttttagttatttagtcctactaccataccaaatatttttatagaattcagttaatataattaaaatacagactttacctatgatatatatgagaatatgcaaatgtagcaagttatatattcccagaagtgacttaacattctatatgcctagcgcctgtttctttttaccaccgagagaacattgccaggccttgggtcctcattacctttattagtaaaaagctacaacttctaagaggccagaaacaggtactaacactttagttgaaagtttgtatgcatcattctgttgaaattattgtcataagtaacaggagtcattgaaagaatacctttgtacaggtattatgtgggctgacctggaaaactaaccattattatgaccttgtttgagtagaaaaatgcatgctaagttcctagcatataatcagacttttggagtttaagtcatttgcaagttaaaggcaactgtggtattgttaaataaaagtcttggccttgaaaagtttccgtatctttgaaagaattataacattagagtaatagaattaacaggattttagtataatcatttgaggatcaatcgtttataggtctgtgcagcagaaccatgtaacagtctgagtacaggactacagtgtgagatggatcctgtatcacaaacacaggcctcagaaaccttggctgttagaggcttcagtgttattggatggtatcattctcatcctgcttttgatcctaatccttccttacgagatattgacacacaagctaaataccaggtattacatgtatatttatattctgtaaatggttgcacaccccctcaatgctcccttttaaatagataaactttaaacattt

SEQ ID NO: 54090 - DNA, 1494 bp, Homo sapiens
actctaaatgtgagacttatatttattgtgattttcaagtcattgttcaaggtcttcaggatctttttgaatccagatccacttttctcattttagcctttgtagcactgtatcattaacatttcaataagcttgcctttcctgccattactcactgattgcaatgtttaattgaataaatgtaaacctcattgtatatatttaaacaacgaagacattcattcttcaatcagctatatagattaccacaattaacgcatatatcttcatcttatacagaaggataatcatatcggatgtcttgtttaatttcagataaaatatatttaagtctttagtttctaacagattattcctatcaatagtgtctacaataaggtctacttatcatgacttttcatgaactcattattttacttagtcacctcttcacttggttaaggatcacaaatcagctgtttcataattttttctagaattttactactgttcaacatctagttcctccttttctgcagtctgcttttttgtattgtgaaacaagctcaataattgtctatttctagtccttcagcaactttcccattctctgcagttcctcaacaaacactgacagcggttccatatccgtggttcttaagtactccaggatgttctttctgtgctattttctcatctatcttggccttcagtttctttttgtgttgattaaacactttctaatttaaaggtctttctttattcaacaagtatctttgaatgtgtactgtatatgtcaggcacggttctgatcacttgggatacattattaagcaaaacaaaatgttctcttgaagctaaccatctatggttgaatggaaatggaattgccctgctctcttccagttgtgttaatgcgaatgtattcctgtgtgtttttctttccctgaagatagcctaaaaaacctttttattgttcttaatatagttctcaagcctcaattctttactgacatttctgagatttatgtgtgcttttgaccttgcttaggttctctctttttcacctctttttactttttcacttttttgttttttttttttttttttttttttttggagacagggtctcactctgtcacccaggctggagtggagtagtagagtggtgaaatcatggctcactgcagcctccacctcctgggcttaagtgatcctcccacctcagcctcccgagtggctgggactacaggcacacgccaccacgctcagctagttttgaaattcttttgtaggggtggggtttcaccatgttatccaggctggtctcaaactcctaggctcaaggggtctgcccacctcggcctcctgaagtgttggaattacagatgtgagccactgcacctggccactttttcacttgaagagtttatgataggagtaatacattaatatctttaccagaactgtttgtcattcattcattcaaaaaatgttttaagttcctattctata

SEQ ID NO: 54091 - DNA, 2522 bp, Homo sapiens
ctgcccacctgctactggtgctcctgcccttacctcgccatcactgatttattatatttgtaactagagtgctaactattgaacataaattaataaagtttagtcagtcattgccagaggttatactatttaaattgatagattaattgacttttagataattattgttttcattttgtgtattaatgtgctatgatttctccatattaatcttgctaccttttgctttactttaatctcatcgcagcgtacaaggagacgtagggtccgagacccatggggaaactggtgtgatgcaaaggacttagaaggacaaacgtttgaggtaactttgacctttcaaatggctcatccatgaaaactggtttttaaatatatatttgtacatcttaatgtcatatgtattgtacttgtttcatacattaacatgtatgtgttcattcccatgttaatttgtctggaagtcaccagtaaacaccaaagtagaaggcattggtggtgcagttaactaggagtttaactcatttcagaacttggattctctgtctctgtattcttgtctctaactcaagataagggtgtcaagaagttggtatgcccaattcgtttcattaaacatttattggaagaggttctgatataccaattaaaatattgttctaagcattagacattagacacacatgtgttctaaatatatatattttttgtaacagctagtgcagtagaatggatagaatgtgtgaatgtgtacgtactggctttgttactttaagcaactacttaatctcacagaatctcatgcttttttaacttacgaattgtgaataataataatacctccctcaaagtattgttgtaagaaagaaacgagatagactatataaagatgctagtactaggtattcagtaagccttgcatgcacaaagtactcaaacttgagttctctttcctcctccgcattccctgccctcaacttctcacctgagtactattctaggcacagtaattagtaattcatccttcccataaggggcttgtatttctaataggaaagacaaaacctatggtaagttcaataaggttggtcccaagaattgtaagtttctcccaaaggctgtgatcagggcaggtttcgtagagtatgtggggtataatctgatctgaaggatctgcagaagaatctcaaaatggagatgaatacactttaggctgagggaacaaagctggagacatgggaaaatactagatatattctggaaaaggtgcatagttcatttggactagggtgtaagttggtcgtagaaatggaatagagatttactttattttataaacacttataaagggcttactgtgtgtcagacaatgtcagtattttataaacattaactcagtcttcacaataataccatgacagtggtattattgtttactttttattattaattttattgttcccatttttaaagatgaggtaactgaagcatgaaagctttagaatttgcctagggtcaccaagctagtaaataactgggccagacattctagatccagaatctgttcttaatcattactctgcactgtctctcagttgtgaaagaaaactcaacacagtagaatatggtaagtagaaatgggaaataaaagactcaggtgattctgacgtttttgaacctgggtgactggtaccattgattgaaatgggcaaatcaagagaaggagtaaattttcagtttgggatggccgtgtcttttgaaacaattttttaaaaatactgtccagtctttctacatgttggtagcaaaaaggaagcccatctatatcaatttagtctctcttgtcctcacatgcccttcaatttgattttaaaggactatttttattctgcctcttagtagatgatggactccttaatcaattggcattttgttttagcatctctctgctgaggagttggcaaaaagaagagaagaggaaaaaggcagacctgttaaatctttaaaagtgccaagaccaacaaaaaggtgtagtgttatataaatgtggtttttaaacatttatcacaaatggctagataatatatgaaaaaatattcaatagctgcattatattgttcacattaagtttaaaaaaatactgctacaattttttagattttttttgtttcactgattatgaatttggaagaccttgaacaaacattttaaatttgttcagattcattgaacatatgatccaacatatgttgtaaaggggccctgtttaggacaggttggtcattcaactctagacgctatggacaggaaccttcatgaaatgactgggttttctttgggtggtactaattgttagcaagttgttgcatggtttgttgttttctaatgcatgtgtaatctaaaatttgagccttttaaaattaagggtcaccaaataagttaaatgttccgattttctattccctcttcctgcagatgccccattgaatagactgtagttttgtcagtgtaccttttaaaag

SEQ ID NO: 54092 - DNA, 1091 bp, Homo sapiens
caaatataaaatgtttaagcatttgtaagatagctgataattgaaagacactgttaagcaaaataagagtagatgaatctaagtaatatattacaaattggaaacgtctaatactaaatcttttctatatattatcaaactgctctttgtatttaaagattcaatttgtgtctgtacataaatttctgaattcaaggtcctgggataactggaatctatgaatttaacattggggaagaaatattgcttgtaaaaaattatgctaataagttattgtatcatttaaggatattttatttcagaaaaaaagtacatgggtattatgtattagtattgtatttattacacatttatacattgaaaggggttaaaatttagagatatttcaaatattgaaagttttccccagaaatcttttttcacgtttttatttatccaaaataattgtacttctgtctcttaattagggagatatgcaaaccaaaatacttaaataagacctcagtacgtcctggcctgaagaactgtggagatgttaattgtattggacggattcatacatacctcgaattgataggagcaatcaattttggatgtggtaaaaataaaaacccaacaacatcttttactcgacattttttatccttacagcacttattcatttctatgatggttagaattcaagtagttataggtatatagaattcagaggtgctgtaacattatttaataaatgttttattaagattttactgttggttaaactgtgttttcatttgacctacactgaaaattgagagtgtaactttaaaggtaaaatattcaatctaagtaatagaaataatttaagaatacagttctttagcagataaaagtaaaattattttatgaaaagtctaataatagcccatttaatttgcaaatactgtattcatgctagaaatactacctagcaatgtttaaataaaggaaataatttgtgagcctctacacttacatgtgataaaagcgtcaaaatattttttgtggaagacaattgtaccttagtttttttcaaatttaaagttaatgaatatacatattttaaaata

SEQ ID NO: 54093 - DNA, 1231 bp, Homo sapiens
gtctatggtcctaccaccatgaacgtgcccaatcttgtctaaaatgcagttattataaaccctttaaagaaaaacacattgcctgtaatcccagcactttgggaggccgaggcaggtgcatcacaaggtcaggagatcgagaccatcctggctaacatggtgaaaccccatctctactaaaaatacaaaaaattagccgggcacggtggcaggcgcctgtagtcccagctattcgggaggctgaggcaggagaatggcatgaacccgggagctggagcttgcagtggcctgggattgcgccactgcactccagcctgggtgacagagcgagactccgtctcaaaaaaaaaaaaaagaaaagaaaaaaaagaaaagcgcattagaggtataatgtaccatttacatgtattcagtttaataacactgtatatttatccttttttgtgtgtaccagtgattaaatttttaaatcttaatattatggggattttattttgatttttaataaggtcaaatgcggtctggataaagaaacaccaaatcagaagaccggccataatcttcaagttaaaaatgaagataaagggacaaaggcatggacaccatcatgtttaaggggacgtgctgatcccaacttgaatgctgtaaaaattgaaaagttatctgatgatgaagaagtagacatcacagatgaggtggacgagttgtcttctcaaacaccccagaagaattctagcagtgatctcttgttagactttcctaatagtaaaatgcatgaaaccaatcaaggagaattcattacttctgacagccaggaagctctcttttctaagtcttccaggggctgtcttcaaaatgaaaagcaagatgaaacactttcaagctcagaaattacactgtggactgagaaacagagcaatggtgacaaaaaatcaattgaattaaatgaccagaaatttaatgaattgattaaaaactgcaacaagcatgatggaaggggaataatagttgatgccaggcagttgccttctccagagccttgtgaaattcagaaaaatttgaatgataatgaaatgctttttcattcttgccaaatggtagaggaaagccatgaggaagaagagcttaagccaccagaacaggaaatagaaatagatagaaatatcattcaagaagaagaaaaacaagcaattcctgagttttttgaggggcgccaagctaaaacaccaga

SEQ ID NO: 54094 - DNA, 1405 bp, Homo sapiens
ttaaattagtgagcttcatcagttttatttttaattccttgagataatgaattttaaaagcaataaatacaatgctgtagtttttgacttcttttctaaatatttacatggatttacatgaaagaactaaagagatagtatttgtggaaccaatttaaactcttacatgcctttcaggatttgggaatgtattaacacctgctgctttgtatccagtctaagggagcctatttgtttgttatcacattgacttcctttgatgtcttttagtgttaccctcactcagacccaaggattatgtcttttggggctcccatcatcctgagctagagacacgtgacagggtaaatctctgcccccaggtagaggctgtagccttcttgttttgtttgtttgtttatttttaattcctagactcaaagtattgaatttagcccatggctatctataacctttagttacataaatatggaatgttccatttcagaaattttttttgcaattcctttttttcccctcagggtacactctcctacaaaaccagccagttactcagtaaagtggacgatagaagaaaaagagctgtttgaacaagggctggtaaatagagcaattttaaatttttagtaaaataattctagaagcaaatattggtaaagttataaggttaaattaatttatagagacctgaattttctttttaattacagttttaacacctttagttcttctgtagttagagtaatgatgtttatagtgtagtgcaagagaattccttttaacttagatctaaggtactaaaatactaaaatagatttagatctgtagttttcacgttcttgtggtattatcaaaatccaagaaattgaggtatatctgtatacatgacaccaactacctggattaaaaggcaaaattatttagtaatctctttttttttttgaaataaaataaaaacttgtatatttgaaactgttggggtgatcagctgagtttttattcagataatttggcattgtatacactgtctaaatatttcagcgactctaaatgaagaccagaaacattttttttttgcgtgaatgtctattacactgaaatctatttaaatgttcacaagttgcataatggaaaagatacgtattctggtttctaattctgaaaataccccttaatatgaagaaactttaaaaaaaaatacttaggatttttttttaatttttttactatcaagattagtttatatcttttcctttaaggtgcatgatacctagtaatgttctaagtaattttgaaattatgtatatttatacattacatatatagaatatttgtatatataaaatttatgtatgctaattgaagtatcattaacatttctacagatgatgagaataaaatgttt

SEQ ID NO: 54095 - DNA, 1030 bp, Homo sapiens
ataacatgtatttttctttaccaaaacagaagataatttcaaaaagcaataaataaaaagacaaatatattctcttttttaatagccttggaccttggataacaccatcagtgaagagaacagagctgttattgagaaaatgttgttggaagaagagtatcctttaatgattatgaggaaagtacaggtttcagggtgaaaaaaatctataaatgcaaaatttacaagaggccactgtttactagatggattttatacagcaccagactgctattatataatttcatgttacctatgtatgcaaaaagcagcattttcttcctcaggttctgttttactgtaacatctgagatctgattgcatattttgagtttctgtcactagccaactgtttatgatatctgaatattgagtagaaatgatagaatatttaagtcattttgaaccttaagtccaagcttgcatttttaagttatataagctgaaacccagagatgttaattttccaagggcacagagttggaacatgtaaaagttcttctcacttcataatttacaggtgttacgtgggaggaatctaaataaaaagcacaaaacaaatactatagaatgaagatgttttccctacatttgtggatccttatttatagctcagttttcgtacatgtaaaaggagaggattgaatgaaatgatttctgattttatgatttataaagatagctagtcatagtctaataagtagtggtttattaatctccttcatcttcattttatggatttctccttactaagccagaatttctctgttcccactatttccacttattgccatgttgattttagagtgtctctgtacctttaattatcataggttaaccccatttaggctttcttattctctaattctccccagacattgcagttatagcctagattattgctattcagagaaagtcacatataatttaaaattttccgatatcctcatttaacacaaaggaaattaattttaactatatattatataac

SEQ ID NO: 54096 - DNA, 1096 bp, Homo sapiens
tccttcttccgttccctccttttcaggatctcatcgacagtaactagaacaagagcggctacggacgagacctgaggtcagggactcttgttctatggcttgctagccgtgtgaccttgggcgagtcgtttcatcccttcttccacatggggatagttgtaaaacttcccgagaagcaggttgacttaaatgggccaggttttagagttggacagttctgggttttccttctgcatttgctcgccctaccagttaatagcaatgtgaccttgggcaagacacttaacttgtctgagcctcagactgctcatatttaaactgggagtcatgatatgtaattgggaggatcaaatgaaatgattatgagatatgctttagcatacggtaggtgccctctgaatgtattctttaccatcctgttaccctcggggacagtactgtgagaatccagtaagggatcacattttttaaaatacctgttccagcagaacaaacagcccagtgtgatttgacacagaacctcctttgactccttgctttctgaatcaaaaatgagtctccttttagtcatgaagagtcctagactagccaggaatcagaaagcctgagttctaaagtcagccagctatgttgtttataattatgtacaatttccttagaactgtattagcttgaaccatatgaaattgccaatatttagaccatttttgttctataaagcggcaacttcatgtagttcagcctaatattagggcctctgtgaacaggggagaagtactaacccagcgcttgaggcactaagatagtgtgtttagaagtgtatcatgaactctaaagccctataaagacgtgaggggtgattaaactcatatggtcattgtccctcaaagctttgcagatgagtagggagcccttaataacaatacttgttgacattcatttagtgtttaaatcttgaccaagtgcttttgcatgtttgatttaatttacttttcgcaacaagttaatgaaataggttggcagggatacttatctgcagtctagaaagaaatgagctggccttggaaacactgaagattggtcacctgagggcatt

SEQ ID NO: 54097 - DNA, 3562 bp, Homo sapiens
cctgagagcgacgcgagccaatgggaaggccttggggtgacatcatgggctatttttaggggttgactggtagcagataagtgttgagctcgggctggataagggctcagagttgcactgagtgtggctgaagcagcgaggcgggagtggaggtgcgcggagtcaggcagacagacagacacagccagccagccaggtcggcagtatagtccgaactgcaaatcttattttcttttcaccttctctctaactgcccagagctagcgcctgtggctcccgggctggtgtttcgggagtgtccagagagcctggtctccagccgcccccgggaggagagccctgctgcccaggcgctgttgacagcggcggaaagcagcggtacccacgcgcccgccgggggaagtcggcgagcggctgcagcagcaaagaactttcccggctgggaggaccggagacaagtggcagagtcccggagccaacttttgcaagcctttcctgcgtcttaggcttctccacggcggtaaagaccagaaggcggcggagagccacgcaagagaagaaggacgtgcgctcagcttcgctcgcaccggttgttgaacttgggcgagcgcgagccgcggctgccgggcgccccctccccctagcagcggaggaggggacaagtcgtcggagtccgggcggccaagacccgccgccggccggccactgcagggtccgcactgatccgctccgcggggagagccgctgctctgggaagtgagttcgcctgcggactccgaggaaccgctgcgcacgaagagcgctcagtgagtgaccgcgacttttcaaagccgggtagcgcgcgcgagtcgacaagtaagagtgcgggaggcatcttaattaaccctgcgctccctggagcgagctggtgaggagggcgcagcggggacgacagccagcgggtgcgtgcgctcttagagaaactttccctgtcaaaggctccggggggcgcgggtgtcccccgcttgccacagccctgttgcggccccgaaacttgtgcgcgcagcccaaactaacctcacgtgaagtgacggactgttctatgactgcaaagatggaaacgaccttctatgacgatgccctcaacgcctcgttcctcccgtccgagagcggaccttatggctacagtaaccccaagatcctgaaacagagcatgaccctgaacctggccgacccagtggggagcctgaagccgcacctccgcgccaagaactcggacctcctcacctcgcccgacgtggggctgctcaagctggcgtcgcccgagctggagcgcctgataatccagtccagcaacgggcacatcaccaccacgccgacccccacccagttcctgtgccccaagaacgtgacagatgagcaggagggcttcgccgagggcttcgtgcgcgccctggccgaactgcacagccagaacacgctgcccagcgtcacgtcggcggcgcagccggtcaacggggcaggcatggtggctcccgcggtagcctcggtggcagggggcagcggcagcggcggcttcagcgccagcctgcacagcgagccgccggtctacgcaaacctcagcaacttcaacccaggcgcgctgagcagcggcggcggggcgccctcctacggcgcggccggcctggcctttcccgcgcaaccccagcagcagcagcagccgccgcaccacctgccccagcagatgcccgtgcagcacccgcggctgcaggccctgaaggaggagcctcagacagtgcccgagatgcccggcgagacaccgcccctgtcccccatcgacatggagtcccaggagcggatcaaggcggagaggaagcgcatgaggaaccgcatcgctgcctccaagtgccgaaaaaggaagctggagagaatcgcccggctggaggaaaaagtgaaaaccttgaaagctcagaactcggagctggcgtccacggccaacatgctcagggaacaggtggcacagcttaaacagaaagtcatgaaccacgttaacagtgggtgccaactcatgctaacgcagcagttgcaaacattttgaagagagaccgtcgggggctgaggggcaacgaagaaaaaaaataacacagagagacagacttgagaacttgacaagttgcgacggagagaaaaaagaagtgtccgagaactaaagccaagggtatccaagttggactgggttgcgtcctgacggcgcccccagtgtgcacgagtgggaaggacttggcgcgccctcccttggcgtggagccagggagcggccgcctgcgggctgccccgctttgcggacgggctgtccccgcgcgaacggaacgttggacttttcgttaacattgaccaagaactgcatggacctaacattcgatctcattcagtattaaaggggggagggggagggggttacaaactgcaatagagactgtagattgcttctgtagtactccttaagaacacaaagcggggggagggttggggaggggcggcaggagggaggtttgtgagagcgaggctgagcctacagatgaactctttctggcctgccttcgttaactgtgtatgtacatatatatattttttaatttgatgaaagctgattactgtcaataaacagcttcatgcctttgtaagttatttcttgtttgtttgtttgggtatcctgcccagtgttgtttgtaaataagagatttggagcactctgagtttaccatttgtaataaagtatataatttttttatgttttgtttctgaaaattccagaaaggatatttaagaaaatacaataaactattggaaagtactcccctaacctcttttctgcatcatctgtagatactagctatctaggtggagttgaaagagttaagaatgtcgattaaaatcactctcagtgcttcttactattaagcagtaaaaactgttctctattagactttagaaataaatgtacctgatgtacctgatgctatggtcaggttatactcctcctcccccagctatctatatggaattgcttaccaaaggatagtgcgatgtttcaggaggctggaggaaggggggttgcagtggagagggacagcccactgagaagtcaaacatttcaaagtttggattgtatcaagtggcatgtgctgtgaccatttataatgttagtagaaattttacaataggtgcttattctcaaagcaggaattggtggcagattttacaaaagatgtatccttccaatttggaatcttctctttgacaattcctagataaaaagatggcctttgcttatgaatatttataacagcattcttgtcacaataaatgtattcaaataccaataacagatcttgaattgcttccctttactacttttttcttcccaagttatatactgaagtttttatttttagttgctgaggttaacattgctgcaatctgaagtgatttgaaaattaagaagcaaagaatttaggaagagtcaaactagaagttgtgatctgaatgaaacagtctcccaatttcattaattctttccctct

SEQ ID NO: 54098 - DNA, 1432 bp, Homo sapiens
atggagatagagtcagtgaacttgaagatgaggaattaggctggccatcttttcctgtaaaggaacagatagtaaatattttagaattgaatgaccataaactatgtcataactcctcagctctacaattatagcatgaaaacagccatagatcatatgtaaattaatggaaatagctgtttcaataaatctttatttaatgaacaggcaagctagatttgtcctgtgaaccatggttttctgaccactgagatagatcaatagaagctatctaatctgaaaaatacagaaaagtaactgaaaaacaataagcagtctcagggacaagtggcctgatatcacaagatgtaacattcatgtcatcagagtgaaatgacagaatgatagaaaagagaagaaagagattagtattagaaaaatatttgaagaaatcacggctaaaacttctcagattcgggggaattcatgtggaggtcaaagtggaaacaggtgtgagaggtccagcagaagaaaacatggctgccaaagtgtttgagtccataggcaagtttggcctggtctaagctgttgcaggaggcgtggtgaactctgccttatataatgtggatgctgggcacagagctgtcatccttgaccgattccgtggagtacaggaaattgtggtaggggaagggactcactttctcatcctctgggtacagaaaccagttatctttgactgccattcttgaccacgtaatgtgtcagtcatcactggtagcaaagatttacagaatgtcaacatcacactgcacatccccttccagcccgtcgctagccagcttcctcgcatcttcaccagcatcggagaggactatgatgagcctgtgctgccatccatcacaactgagatgctcaagtcagtggtggtttgctttgatgctggagaactaatcacccagagagagctggtctccaggcaggtgagcgacaaccttacggagtgagcagccacctttaggctcatcctggacgacgtgtccttgacatatctgaccttcaggaaggacttcacagaagcagtgggagccaaacaggtggctcagcaggaagcagaaagggccagatttgtgatggaaaaggctaagcagcagaaaaaggcagctatcatctctgctgagggtgactccaaggcagctgagctgattgccaactcactggccactgcaggggacggcctgatcgagctgcgcaagctgtaagctgcggaggacatcgcctaccagctctcacgctctcagaacatcacctacctgccagcggggcagtccgtgctcctccagctgccccagtgagggcccaccttgcctgcacctccacaggctgactggaccacagccctgatgatatttaacatcgacttccttctgcccccaccccagaaatcactgtg

SEQ ID NO: 54099 - DNA, 2138 bp, Homo sapiens
gccacttatcaactttattacctctggcaacgttggaatgcaaacccaggtttctgactctaagaaatgaatttgaaaaattattgtaaaggttagctggtcaaacaccagcctttatcacacaggtacccctgtctacagataagacatcattggagcttacctaagtaaagcaaagcaagcaattagaaaatgagagctctcttattttgctgattaattattcattattttcttaataatgactttatttttctatcatttttagtattattacttcactttgattagagaaagcaacttctgatggtttaagttaaaaatcccagataacacatttgtttggcataaatttttaaggtaaatatgaactctagaataaaacgttatcaaagttattaaaagtttagctgttcaaagttagactcaaaatgaaagaatcatacttgagactgggtgagatctgtttcccaccactatgcaaactctgacccagggcctcttttgtttgtattccagcacattatagttacctctccaagagctgactttgtcctcttctttgcattcccctgaggtatttgtagtgagaaagaatgactaaatgatggaatgagttcattacctcttctgaacccaggggtcttggaagtgctgacacagctaagacctccctggaggcttgtctgttcatccagaatggccactctggattcctataaaggctcctgtctctctgaatcctccctgtatggagaggctatggattagataaacttcagagtgtttagtaataaaaacaagcttgatctcaactctgtggccctgtcaatacccatacctgcaccctcttgaaaagctacatcagtgtagcttctaggcttgtaatctgaatgatcagtgtcttttggctcaaaaatgcaaagtgaaggaatattcagaggaaattagagagctgcctaagtggctctatcctacctggcctccgtttctcattatggctttgctaaagggtctgaaccgtggcatggacgtacattttttctcagtaacgccacatgtgtagagtattgatgcttacccaagcaaagcaaaacaagcaattaggaaatacagtctctctctcattttaccgattaattattcataattttattgataataagaactttatttttctatcattgttattattattattattattattattatttcaccactgattagtgaaaattattggtcctggactatcaccagtccctgttctggcatttgggaacaactggtgcgtgtaagccctgaaactctccttcgtgctggcattctgtgaacctgagagagatgagaagagaaccagggactagagtgaagcctactgcagttgtcttggcatgaggctgtgtggcttggctttggctgggagtcacagacaagcccacggacctgagaaagagagtgaatcactgtacaagtatttatcgagcacctcccatgtcctgggaagcagtagctggagagtggtgaaggagtactgagttttggggttcaagtggccagggctttcccccaggctttttacctattatctgcattatctgggcaattcagttcacttatgggccttagttttctgtctaaaaaattgtgttgatatactattatgtatcagaaggtatttgataaattgcagaatgctggtggtattgatagattttcagatgatagtgacagaaaaagttgattgttggaaagaaaattagtgaggtctatttttcatatacttacctttagaggcaggtaagaaatctaagagtgaagggaaatggaattcacattgtttgaagggtaggaaattttaaaaatagtgctttttaatcgtccggaagacttggggagagggtattattcctgtttgagtgggtgggaacagtctgagagacacttacctcatgcagctactgagtgggtagagctggggcccagctcagatctaactccagcctgtgctgtttctacagcagctcagaaaccaaagttcaggggagcagaggagctggagacagtgaatccatcctgaggcccccctgagtaaatgcttccagggcaattccacttgcactattattaatacctta

SEQ ID NO: 54100 - DNA, 1847 bp, Homo sapiens
cacacctgactaatttttgtatttttagtagagacagggtttcaccatattggttaggcaggtcttgaactcctgaccttgtgatccgcccacggctgagtgaacagataaaaactttactatttttatccctccctctcccctcttaaactctaatctactttatgtctgctatgaatttgcctattccagataccccatttaagtagacttatatagtatttatccttttgcgtctggcatatttcacttaacataatgttttcaaggtgtgtctatgctggagcatgtgtcagcctttcttttttatgactgaataatcacatcctattgtgtgcatatactacattttgcttgtccattcatcttgtccaaatggacctgttggtggacatttgcatcgtttctaccttttggctattgtcaatgatgctgtggcgaacattggtatataagtatctttgggtctctgcttttagttctttttggtgtatatctaaggagtgaaattactggttccatagggtcattctaagtttagcttggtgaggaaccaccagatgtttccactatggctgctccattttacattcccaccagaaatatatgaaagttctaattcctccacatcctccccagctcttatttccctctcctttaaaaaaattatacccattgtagtagatataaagtagtctcttattgtggtttaagaattgattttttaaaatactagaaatctgtgggatgaaagtaaaattgattgaatttatatcatcctagaagtaactttttttggcaaggataccccagggagtgtcataaaattaaaaattaaaggtgtctgagagtaaggggagaagcacagttacttctgatgtgcttgatgctaaagctccttgatttgcattgttttatggttgtgttgaaggatgatttctcagaacagtggtatttaaagcagctcttctaagttctaggaaggattcagtcatcctctctcaccagcttattttttagtatatttaatagtgctgagaaataaccagtaaatattagatattctttacccttatttttgagaaagaagagtgttttcactctctacagaagaaatatccttatctcttcactaatgatagtagaaataataggcatttcaaaataacagttacttaaacacataagggctcattctttcctgtgaataaatatagatatatggagtcttgggctactgtgatttccccataaagtcatcaaggacactagcttttttgatgttttttagtcctgagttctattttcaagatcacctcatggtccaagatggcggttgaagtttccattatcaagtccacagtccatgtagcaggaagaaggaagtgggtgtggtgcatacaaaggatgtgcctcacattggagtgagccttctttaaacaatcttcttagaagatctacgtcatacttgtgcttgtatattattgaccagcagctaggtttataatcaaactgaggtgaaggggaatcggggcagtgtaggcttttatctgggtgtcttcctatccaaatattggggttttcttactaaataaaaagggagaattgatatggggtgggtaaaaagacactcaaaatcataatttctcagcaatttacattgaccagtatcacagacaccaatttatagtccaatgatagtcacaaggtaaagggagaaggtggtgatcatgagggagatagtatataatctgagcaatgtaactcacaagtttcattattcattaatacattcattcattcacttattccttacatatatattagtaaagcatctgtgaggcatt

SEQ ID NO: 54101 - DNA, 1044 bp, Homo sapiens
ctccctcaggatacagtgggcatctcagtctttgtgaactcttaaattcatttcttacccagggtggctaactctgtcagtggactattttgtgaacttcatactttcggaatatgttatacttatgtgattcttggtagtctcaagaaccttggtagaggttcaaatcagtcaatctggttaaaggtatcagtattcagtcttggaatcaagtggcactagagctcttaaggcttggcggttttcaggacctacatcacaagatacagaagtggtgtggcttggagctcgtaagactcgtgtctggtccaaccaggtaacttggggcccctggcacccatatcagacttttctcatctgcaaaatgtgctgcttggagtgggtgatttatttagtacttcccaggcccaaagttctgagtctgtaagatgtagtggggttgaccagcatctccttttggattctcctttaaaactcattcctttgaaaggagattgctaaagtcaaaccttagaatccaaccctttgggctatgatttaatgttaaaatgctgtaccctttcctttcctcctttttctcctttactacttctattttgtttctttttcgaaaaaatataccttcttttaaaatttttcttcatttttccttcttctctgtaaattatcaagggcctttgaagagaattcttacatgttattaagaaattgcagtcagggagccctctgttcccagatcatttagaagattgcttttccttttgttaaatacaaaaaattgtcaacctgtattgttaaaatgtgccaaaaactgcattcaccaataaaaaatgtcagctctcattattgcccagatattattcttttcaaaagcggagcactcttgccaggctttctaaacaatcttcagctcattcatcttcctggttttgttacattttgaacctctctgggtctatataaggtggcagcctgtcttttaaaaattaatggattccaaatgccattcaaacctatttccgcccttaacctcctcctcttctc

SEQ ID NO: 54102 - DNA, 1024 bp, Homo sapiens
ccataattaacaggtatccatggagactttttacctaagcagggatgtgtcattatctacactggcttattccacttctttaatacctctgcagatacctggacgggtattttgcaaaatataaaggaagcctcactcatatggtcagttctatctatatctcttctattttcttaggtctctctgctccctggtgtgtaagtggacatattcagcagagaaaggctgggacgacagtttctggaaaatgattggtttggaagactttgttgcagataattacagcaaaataggtaaaagaataaaacatctgtagagtgattatgtgcattggaggatcttgatgggtttgttgttattgtggtttgtatgtttcttgtttttgtatgcatgaaaatacaggaatgaagttcactttttccaagacaaatgagttaattatgatgggtaggccatgactagtaggctcttgccttaagatttatatgaactgagtagagatacatgctatgaaaatctgcattgaaatatagaatcagaaattgcgctgggcatggtggctcacacctgtaatcccagcactttgggaactgaggcaggcagattgcttgagcccaggagttcgggaccagtctgggcaacatggtaaaaccccatttctacaagaaaaatacaaatgttagcctggcctcgtgcatatgtctgtagtgtcagctactccggaggctgaggtggggggattgcttgagcctgggaggcagaggaggttgcagtgagctgagatcgtgccactgcatgcagcttgggcaacagacagagcagaactctgttttgagggggaaaaaaaaatgggctagactgaggaagatatttgcaaggagcagcttgggaatagcatactcaaggggctgtgtatggactgcttccagtcagtactacgaaaataattttacaaattaggttcacaggacaaggcaaggctgtgaacaggtaaaaaataaagctaaaagatcaatattagaaa

SEQ ID NO: 54103 - DNA, 1036 bp, Homo sapiens
tgactgtccagtaattggaaccatctcggctcctctgaaattctaggagaagaataagtgaacagtatgatatcttgcaaagcttcatgtgccttaatcacattaaaattcacaattcagttttggatttatttttccttgttttttgaaagttattgacttgggacttgcttctggatctcagttggacatctgacctcatgccattattgtcatccatttagaggtcatttatttcagtgttcttgaaaggcagccattcccagtggttggccttctctattgcatgtgacacatcgcagctcttctgcttagcttttcttggtcacacagctatcaggtggtgactttggcctccaatgtggcccttacctctgactttgtagctcctctgcagtactcttcactctggttctgtggagttttgactccgagatacccatgaccttttaagtttcccagcaccagctaacctttctgagaatctgcatcagagggctgcagtggtcagggtggcaggtcaccagttgactaatggcctcctccaaggtttgctggcagacactgcgttgccatgaaccctattgatcccagaagtttgcctgctgcttagacagtctttgcgggcgtgaggaggtagtgagtcatggagccaccacccctgctacccatctgttcttgtggtgaggagaacaaagatgatctctttgtggtatcataaaacctagaaagacattaaaaattccgttaaattttcatacgcttttagctgttgaaatgtacaatctattatgaggggggaaaaacccactgtaattttccccccactgcccttacttcagaggctacttaagggaccaggtaatgattttacgatgtttattaatacttcatgttctgcttccctcccccattcatttatctttaaattgaaagcacagaaactgccagggatctttaaaatccagagtttttgcaatgtcataggttgttctgttatggatattgtatgtagagatctattgttgactcagag

SEQ ID NO: 54104 - DNA, 1140 bp, Homo sapiens
gactttgggggacttttgggagggcatgattggttttgaaatgtgaggacctgagattgggaggggccaggggcggaatgataatgatttggctgtgtctctattcaaatctcaactaacttatatctcccagaattcccacatgttgtgggagggacttagggggagggaattgaatcataagggccagtctttcccatgctgttctcgtgatagtaagtctcacaagatctgatgggtttatcaggcttttctgcgtttgcttcttcctcattctttcttgctgccaccatgtaagaagtgccttttgccctccaccatgattatgagacctcccagccgtgtggaactgtaagtcaaattaaacatcctattcttcccagtctcaggtttgtctttatcagcagcataaaaatggactaatgcagtaagttagtaactttcccccatatttttgttagtggaaagatagaatagtttttttttgttttaatggaaagatagaataagaatcttggattctttaaggcctgaacttagatgccagcagtggctgggaagggcacaggaaggtgatagtccatgatgacgggttgatacagacttacttaatatatgttgactatgttttatccttattatgccttcttatgccttcttatgcctctttctttacccttcaccttacagccaatccaagagttggatatctcaaaaaaattaggaggcctgggtgcaaatgtttcctttcatttctacctttcctatacccctattaggatgtggaggtgaacagatgcctgaaaatcttgaaaaggttgtccatgggtccaactctatattaactaaatataattgagtgaatgcaacctgtcagtgattggtctaggcactggagattattagcagtgaacaagtcaggcaaagtccattcgttttggaaagaaaattctcattgttctcccctgcctgcatgtttgtagcttaatagtataggtttgggacagctaatccctgagacatattgtgatgctatgacaagggcactcaaaatggaattttaagttctggatttagattgtgtttctgcctacaaatatggtgcttcgcagaacttttgtctcctgttatgcagtgaga

SEQ ID NO: 54105 - DNA, 1035 bp, Homo sapiens
agaatagatatttatcttacacttagttcttaaggcaactttatacatactattattctatttgtcagatgagacagttgaggctcacaagactacctaacattctgagctacacagttaaatgagagatgcgtgacttaagcccatgctttgtgcacacttatcactgtgttataaagaatggcctacctatttaaacatgatccactctgctctttaatttgaccctaaaaatgtgagcaagtaacaaattttgaaaaaggaaagtctttaatatttattgacgacccactttactagttcatggggttagacagtgactatgagagagaagtggacttctgggaatttgtattctagtaaagaaaatagacaagtaaataaacagttacggttacttgtgccgtgtatggaaggctttggaaaaacataaaatgggcctaaaattgagacttaaacaattattaaaggattcctagagggagtgatgtccagtaatctaattacgacactgctttccctgttattgcttcctggtaaagtggaatttatatattttttgcgacttttaaacttcaactaggcttcatttctaataataaaataataacattgttaattagaacaaatacaaccaccactctgactggtactactatgatgaccatttcttacatgtgtcctatgtgccaagtactctacctgatactgctcagactttatatcttgctcctcacgataagcctacaaggtagaggttgtttccccattctgcatgagggaattgaaggcagaaagaataatgtttccacaatcacataactaatctcatagcaagatttgaaattgagtctgcctccaaggttcatatatcttttctctaggccagtggttctcaaccaggggtgatttgacccctcaggggacatttggcaatgtctggggacagttttgtttattgcttctggggaaagggaaatggcactggcctgtggtgggtagaggccagggatgctgccaaacaccttacaatgc

SEQ ID NO: 54106 - DNA, 1049 bp, Homo sapiens
ttcaaagctgaaaaccagtctgggctcactggagccagttaggcatttgtatatagaaggccaagtgtggcttcttgtctataggagagagaaaatgtggaggaacttttggaaggcttcagagtttttttggctattctctctctcttgcaaagcaatctgggtgcattaactataaatgaatgagaaacatatggattaaattttatctgtgatcacatatgagtttcaagaatgataaagaataaggaattcagtgtttaaggagtccagaatactttgcaagtaattcaggatattgcaggcaacatttggctgcctccctctatccaaatttgaggactgtttggtagggtgacagacctgctcagtgccctccccacccactcagattgctaaacctcaggagatacctgtggataggttttgtgtgtatcttgttttgctgagactgaaataaagagattgggtttctaggaaaggcaaactctatgagaacactcttaaccactttgaaacccccaaatagaagaggaaaatttggtaagcccgatctttattaaccatgtcttgcttacagataatattagatgtgttttatatcctattattgcccttaatgttagtgtcattgtcctgttaatgataatggtagccatgtcctgcacttgtgtagtgatctaatttacaaacaggtacacattacctgttaatacacattacagatgtatttgtagagatgtacacttacaacatatgcagagtatgttatgacaagctacaatacaggaattacagagttaagtgaagatgcaggcaggagtacctaacccagcattgtggtagaagtcagggtttatggaaggcttttcagaggagataacattgagttcagtcctacacatgttcgtttgtttgtttgtttgtttgtttttgagacggagtctcaccctgtcgcccaggatagagtgcagtggcacgatcttggcttactgtaacctccacctcctgggttcaagtgattctcctgcttcagcctcccaagtagt

SEQ ID NO: 54107 - DNA, 1020 bp, Homo sapiens
ggatcctgtgtggcttttgaaccctgagcagccagccgtgggcctcccactttagccccagaactgactggactcaccagcccaaacaaccagccagagaagcccaccagtcccttggtcctcacagaaagcaagtttcatacagctcttgagattgatcttctttgttcaagtccttggccctcagtttcctcatcaatacaacaggaaactcaaatgtggtgtaccttatggaatagctagcattgtaggaattttcaaagagtccttgccgtctggtatatatgagcagtttctattcacaaaaaattggcgtggcctttgttttgtggtgtttgggatttttaaaaattattttcctgaaataaccactcaaccactcaacaaagcaatgaccttggagacatatcaggccctgaaaacacaccaaatgcaccctattcatcattggttgaaacatgttttctctgcttcatgttaaaagtacagaactacccagaacaaaaagtgattttctgcttctttgaagagctgtgacttctaacatcagagcgtatgctactcaaactgctggagaggttgaatgctgctccaacaactcttcaaagcaaacacagagatagtgtgtatgtgggagaccaggagagagtcagggaggaagcactgggagatcttagccagtttccaagggactgaatcccagctagctgtaggcatcactaaacagatccagatgtggaaggagtcagcaactcagggtatctgcaagagctcaatagagagcagaggttgcacccctgtggcttttccgatagggagatggatgatagagctggaagctcatgagctaattgaagtagctttcaaatgatgtatttataagctttggaaacacatggtctctttgatatgagtttgtggatgtttttgctgttatttaacactgatttattcggactttttttttacatatttttgcttatgaaaaatcaaatcctataacaaagcttaatatcctca

SEQ ID NO: 54108 - DNA, 1036 bp, Homo sapiens
gctaagaggaggacatgaaggatgaggcaaacaggagggaccaaggggcaccatcacatagtggtaatgacagttacctttcgtcagacacgactgtgtgccaggcaccaaagacggtgccttgcctactggtagcttaacactgtaaccctgtaagtaggtgggtttgttctcattttacagacaaggggaggaccatttgccgaggtcaaacagctagagtatggtagttggaatctgaacctttctccatctcactcccaggcttctgctctttccactttaccatgctgcattttcctttgatctgtttgtaaaagctacatgggtgaaataagctttcagatattcctaagaatcgtttttacttaatatatattagaaaatatcattaatttggccaggattgtctcacagaggttcctttcctggtaagagtactgcagcagaagtccagaaatgtataaatgaggttaaacttaatgcgggcaggagaggggaagaaaaaaagccagctacattttctcaagtaccacacacttggaaaatcaatcttgtatttaatgggccgtacatgtattaaaagctatcatatttattctgtccattgtcttaatgacctttataataccatgaaaggaaggcattttaagacagagatttttttcaataagccttttttgtggagtcaagtgaattgtgaggggttcagtctgttttgcaaatgtatctggatgtgctgatcttttaggcaaaaaaatgtgcattttaatgaggtattctgataacagatattttcccataatgttcaacttgggaaaaaaaaatgttgtttcattagccctgaatattgccggagcacttatttgttgtcggtcaactgaaagttaagcaaatttctctctatatatagtcatatctttgggtgctgttttgtaggggtgaaatgaaattaaagaggattgtaatcaagttaacttgggactgtgcaaaaccctccatgaagtaaaattctctcttgatcatgcttaattga

SEQ ID NO: 54109 - DNA, 1040 bp, Homo sapiens
gctggaatgtgttgagtaaggagaatactgtggggctcctctctctttcctttctctgctgccaacacttgtgttttctgtctcagactctagtttcactgaattcaaagaaatggtttggaattgcaaaatcctgagatgtcatccactgggagtgctggggatagggggacacgtgcaagagaattggcctaagaaaggttataccctgagtatcttccatatatacccatagccccacacatttttatcttgcaaagtcagttaagatgaacataaggcagaagtggaatcccagcacagttcatcctcagtgctccacagcacggaacagaccttggatatcgtacttcacacaagtttggtgactctttttttatgtctgcctctccactagactggaaattgactgaggacagagcttatgtcataatcattcttcagtcatttttctttcttgcattcattttatcagtaaatgcttcttgagtgccatctgtgtgccaaccactcgtactaggcccatctatctctgcttggataaaattccaagcaagaaagatacagtccctgctctcaagtttccaacagtattgcagaagaggcataccataaaatagcatcatacagtgtgctatgcctcagctttggggaggcagagaaaatgttccaaaggaagtgacagttgagtccagtcaggacttggaagtataaataaaggcgagtatatgtctgtatgtgtgtgtgtttctgtgtgtttggagaggggtatgcatgtgtagtgggcccgagatgggagagaatgtgtgcagaattttaaaccttgggaacaaaggattcatgaactcagaggtgaactcaactgtgtactggatgaaaatgtgaatgaatgagtacatgaatgtataaatgaatgaatcagtgagtgagtttttcagaggcagctcatgaaatggagattgtattagcgtgtttttacactgctataaagatactacctgagactgagtagtttaaaaacaaaaaaaggtttaactgac

SEQ ID NO: 54110 - DNA, 1019 bp, Homo sapiens
cttagagggtggtgaacatgaattccacacctgttccctactgactggaatcaggattcaaaggcaaaaagttgtgtgctttccagcaacattcattgggatccgcagcccaatttaatcaattgataggttgccagtgtctaagtcaagtcccgaaacacttggttccccttgggtcaatgaaatttggtcttggttctaatacaaactttaagttggctaaaaatggctgagaaaactactggttttagagtcagtcaagcctgtgctctaagtctgactctgccactatgagatgtcagatcttggagaaactgttcagttacttctgagctttagtttgcttcccggtaaagggacatactaacacctattccatgggtccattatatacacaacagccaacatttgttgagtaattactatgtgcagagcactgtgctaagagcacagtctatgttaactttttaatcctcatacagacctaaggaaatagattctatattggagattggcaaactactccccacaggccaaattttgcctactgactgtttttgaaaataaagttatattgagacacaatcacatccattcattcacatagaccctatggctgctactgtgctacaactgcagagttaaataattgtgacagcgaccaaatggcccataaaacctaaaatacttactatctggcccttcatagaaaaaagtttgcctctgctttaaattatctcaacttaaagatgaaggaaataagccaaaggtattaaaacctattttaagtaggttagctggggccacaaagctggtaacaggtaggactaggatttgaatcaaacagcctgactccagaacttgtgttagtcaccagtatcttatatataatatatatgaaatgcctagcatagtacctagcacacaggagatacttaatacatctgttttattagcatggtattccctttctttttacctcctttcccagtttcctatcaattccagttaccttttgc

SEQ ID NO: 54111 - DNA, 1050 bp, Homo sapiens
cccactctcactctctacccaaggctcaggcttgtctcacgttgattggccagagcccacgagggcacgtccaatcagcaatcccccctgcgcaacctatcccggttcttcccgcccccgccccgccccgcccgcccccccgggtacctaccgtctctgtgactggtgcgcggccaggtcactcagggcggcggggcgaggtgtgcgggagtgggcaggacgggtgggaggaggggaggggtgggagaaggcggggctcaggtgcctggcagcgcggccggggcccaggaaggggagggggcgaacgctggagcgaggcgggggcgggtgaggagggggtgacgccggacgcgtcgacagcgcgagggttcgcgcgtgagctgcgcgggtcgggcctggtaccgagctttcctgggggctagcaggtcgtggacgccggctcctggaggagagccggtaggagggagtgtgaaggtgtccgcggcgtcgtcgacggcggcgccggccatggaggagacgcagccgccgccgcagcctaagctgcccctgtgcgacagcctcatgatctgggtgagtgcgaggaggcgagagggcgagggggccagggggccgaggcgaggagcctggggcgcccggttctcccaggtgagctggggctacctgcacagggtcccggcgcaccctgcccttctcacctcgtgcccttgaccgagagaatgccacctgcgggtcgacgggcaggtgtgtgggcgcgggttggtgtccgggggtgggggtaaaggaagctctgggagcgtaacagtggaggctctggtctcaaccagaggattcgacctgcctggtgccctaacagctgggatatgaaccaagcacccatcctcttttctccccgctgccccattttctccccctgaacagcgcccgagccctccactttctggatcgccgactctcttgccttggtccgcttgggcgtgaagaccctttccgaaacctaaccctgcatcctcaaactaccttgctctacctggacacaggtggccaggaggt

SEQ ID NO: 54112 - DNA, 1074 bp, Homo sapiens
aagctaaatataaatcattttactatcctttcaagaaaatatattttacttcataaacatcacattgttatacttaattttattattttaatttcctagttgatgagtaaagaaatattgagctctcctccaaatgatgctgttggagaattggagcaacaggtgagtattttagtatggaagaaaaatgttgaaagcaatgttagggtttctttgccaattactctcataaggcttacaaagagagcatatacaataatattttcttctgtgaaatttggtttattcttctgcatgatcccaattgaatggcagtggtgttggtctccagagatttttgtgatcatgttgaaagagttgagtggcattgaacattccttctgacacttgtatatttggaccatgctgtatggtaacacagtgaaatagaggacaattaaaaacaaactctgctaagttttaatttatttaataatgtaatttttttcactgttgctatcctctcacttgatattgaagaaatagctcaaaggccctgtactcaaggctcctttccttcaggactgttttacagggggaaaagacactcttctcccatttataacccaatctgggttatagagtaaagggtaaaaggagaggcaaatgcattaagtactttttctgttatatttttaaacacttcttcttttatgagtgtcgccagtcatctcaagaagtatttcaaaagaaaatgtttaaagaaataatttatttaaatgtaaacatgctgtgttttttcctaaacatttttctgtaataaaactaaacaatgccttctctaatacttgtaaaaatattttgcagggatttacataaaatgtagttctgtgggactgtagccttcaatgttaatgaggtcatgtaaaacaaagacaacaattttttttattattattatactttaagttctgggttacatgtgcagaacatgaagttttgttacataggtatacacatggcatgatggtttgctgcacccgtcaacctgttacctacattaggtatttctcctaatgttatccctttcctagc

SEQ ID NO: 54113 - DNA, 1006 bp, Homo sapiens
atatgtgactgataattttatactctcaacctatcatgataactttgaacatatgtgtgtatattttggcttagcaggtgacatcattctaaaaattagtttatacctaaaagaggagacaaattaattttttgaagtttcatttgtgcatcaaattttagagacttgaaaacattttcttccccaaacaaaggcaggcatagcattttaaagatatagttactctattttctccatatgtgtattgatttgatttcttttctttgacttacatctcctagactctgaattctgcattcagaaggatccttagaactcatctagtatgacagaccaagctatttaatggcttagtcagatctagaatccagaactctagactctaataagaatttttatttttttgttttttttctactggtgcttatgtatgtgtatttgtttcttaggtgactacacttcaagatgaaaagaattcactggtttctgaaaatgagatgatgaatgaaaaacttgaccagttggatggctcttttgatgatccaaacacagtggttgcaaaaaagtattttcatgcacaattacaactagaacaattacaggaagaaaacttcaggtagcatttttaatggaaatcattttatggagttctgtctattataccagtagcaaaaagtcacagtattaacagctaattactaagcattgttaagcatctttaggatactgattaagctcctgaaaataccagatggtataagtggttcctgttatcacagggctaacatccagttaggaagtgggagatacacataaaaacaaaaccatttaaatatgtgttaaggaccaaatcaaggccataggacagccaataggagttcaaggcagtgattgctgaaacctggggagaacaaggagtttctcaaataagataggtaaccctgtaataaatggaaaaaaatgtaaatcgtaagccaagtaggtgcttttcattttaacttgtata

SEQ ID NO: 54114 - DNA, 1100 bp, Homo sapiens
tccttccttttccttccttccttccttccttccttccttccttccttccttccttccttccttccttcctccctcctccctccctccctccctctctctctctcattctttctttctttctaacatagacctttaaaactgagaggcactggtttactgttgtcccccaaatttgattgcttgtctttttgttattgtttagtttgaaactttttctaaattctgttgtgattttttttcttgacttgtgggttatttaggaatgtgttgtttaatttacaaagatttaaagcttttctagacttcttattgcgactgatttctaatttaattaacctttattattagagaacatggtccatgatatttcagtcttttggcatttattgatacatattttattcatcatatattttattgtgttgagtgttatatatgcatttgcatatatagtcatgcaagttacaattatataattataacaaatcatggaagttataaatacttacttttttatttgttcaaggcttgaagctgcaaaagatgattaccgtgttcactgtgaagaacttgaaaagcagctaatcgaattccagcataggaatgatgaattgactagtcttgcagaagaaacaagagccctgaaagatgaaatagatgttcttaggtatggcatgtcttaaaaaatataattatgccatttctgagctatttagtcaatttgagtatttcatattttaatcagggattcataggattattcctgtatatcaagtattgatcagtttttaatccaggctgatagttttaacttcttttatgtttgttgtttgggcttgcagttcatggataatactcaatttttattaggacattttcacattagaacccataaacccaaaatgagacctttaattaaaattttataaatggagtacttatagatacatttaacttgacctccctgtacctgtcatattttgtgaaatttttgtgtaaggaaatttttgtgtaaggaaatgtcaatccatattttgacatttgataaactatagatcaaatataggcaagaatcctaactttttttgggggaggattgt

SEQ ID NO: 54115 - DNA, 1035 bp, Homo sapiens
gatctagaaactttcttattgccattataaggtatatattaaaattttgctcaaactatagtttcttaaatctattgcttttcttttatgtgttttctaagcatatactatttgtttcctttagcgaatagtttctaaattaccaaagtaatataatttctattatctcttcaggaatggcataataacaatttaatgatttatagcataatcttatatggtacctataaaatttgactgcttttttttaaaggcacagtcttgcagtttacataattttttcttaaacactttcagaagcttttgttggagtttaagagtttcataccctaccagctatgctagctggtcctgcttgcatcttaaaatggtagctattgagtggacaggaatttcctttttttaactaaagaatataatgactcatatttttaaaaattaaaaaagattttgctttgtaacatcagggaggtgtttattcgactgcaacatgaaaataagatgcttcgcttacagcaagaaggctctgagaatgaacgtattgaggaacttcaggagcagctagaacagaaacaccgtaaaatgaatgaactggaaactgagcagaggtgatatgctccttagtaactgaaaatcttggtgattttattaccgagccataaaatcttgattcacagaaatggaaaatattattgtagctaaagtaattagaattacctagaaatagtttaatatttttgttagtagtctttcatcactataagcttctctctgtgaaagaagtcaggtgattcatttcagttatatttataaaatatatggataatccattaatttcagcattcttggttaaccaggctacttattctttttattctttttgagacagggtctccctctgtcgcccaggctggagtacagtggcgtgatctttgctcattgtagcttccaccttcccagttcaagtgattctcatgcctcggcctcctgaatagctgcaattagagacatgcaccaccatgcttggatagtttt

SEQ ID NO: 54116 - DNA, 1207 bp, Homo sapiens
gctttgactttcaatacaagtaaatgcttatgacccatcttacaataggctgagcaaagagcgtattagagaattgcagcagcagattgaggacctccagaaatctttacaggaacaaggttccaagtctgaaggcgaaagtgtaagtaacttagaaattataataattctgctgtgtatggcttttctttaatagatcatgatgtccaaattaatcttgtattggaaagtacagcccttatcattgagaatacccttaaataccgtatatatctgcataatagatgcagtgattttgccaacttggagcctgtcagttgatcatctacattggaaggtgatttctgtctgtcctgcttcaacagctataccaaagttcgtgataattcttaatcatcattcaacatcatttagcagctataccaaagttcatgatgattcttgattgagagcatactacaattgaggccttcatagttctgctggaattccaacagggctggcctgagaaaaatccaaatgagagtaattagcagtcagaattgaggaaaccttctaataggaaaagagagaatgggaaaatgatttctacctaaagagcatgccaaaaatggattatacccgtctctgaaggacagaaactttaatgcagccttggaggcatcactcatttctttctccttccttaatgattcatggccttaccgttttctgatggattttgacagcagctactgtgagagcagagataagaggatttaaaagagatcaaacttagccaaaatctgactatacctagcaacttttctacagtttgatctttttatgtgaagagaaaaagaagtaatgattgagggattgttgtacttaattaaaaataacaagaaaaaaggactagatatgtgttagggatatcttgattgattgagattagataaaatgctaggtgattatacctgtgttgatgggggaggaaactttgcagagtaaagagatgaaaaggaaaattgaaagagttgcattttctttctgtcttttatgtgctttatattattttcttttttttttccctgggggcttggaaaatagaaatcgtctcatgcatggcggcatctcatatgtgcatatatacggtattgtaacttctctaatacaaatattattttaagccatactagagaatacttttaaaatgaggtattttgca

SEQ ID NO: 54117 - DNA, 1022 bp, Homo sapiens
aaaatttttattctgaataaatgatttttaaaatattttaatgtttgatactcctcagtatatcacattcagcttgcatttggtgtttttcaagttcagatttaatttttattacattcagaaacatgaggcatttttctttctgtttttgtacctttttatatttcattttctatttttcctttcctttttgaagtaaaaaaagaacctaaaaagtttatgcttcttaaagtgtgttattggaaatacaaattttaaaaatatttataattttgcctggtacaccttcaaaaggaggtaaagagatttcgatgtctggaaaattgacctttgtcaagatagtcatcttacagcaattttttttaaattttatagtccagcaaattaaagcagaagttggaagctcatatgtaagtaaaactgatatttcttttcaaatatgagaagggaggggttgtaaaagcctctaaagttaatctccttttcggattttgtctagaaaagcaaatatcctgatgctaattgatacacctgctgcaaaagtgaaaagcatgctaaagattcagcctccctactacccccgttccaaactcctacatctttccattgttaatatcatttgaaaagtttaaaaaaacagattaactatcacaactagattatatgggatgttaaacctataaaatattttactttcttaggaagcaagggtggcaagggaaataatttaacctttttggcacctgccgtgtgcctgactgtttacatcctcatgacaacccctgcagtcatgcagatagtattcccatttcacagatgaggaaccaagggtcagaaagcaacttgcccaaggtccacaaatgttatatggcagagaccagtctccatgctttttctaccacttagggaaaaactcacagaggtccatgaagaattacagaagaaacaagaactcattgaagatcttcagccagatataaatcaaaatggtaggtatctgtgaaaacttggatcagacaaca

SEQ ID NO: 54118 - DNA, 1071 bp, Homo sapiens
acaggcattatatggctatccctgactttctaatagagacctgctataatgtttcttttaaaattatgcaaatatgatttcatctgggggatataaacctgacctttaccgtttaaaaaagatactgtgttgattcagtcaatcacatttttcttgtcttcagccgtttctcacctgaacctaaacaaacttattaatagtggaatttctgggagaaggaagtactcacagaattccagtgaactcctgaactaaagtggaattcttagttattaatcatgcaaaattatattagtaatggcatgctctcatcaattagctgagtctttaaattttaaagatatttttgtgttagtggttatattatttttatgagccttaggtaagtatgtcactatggaattctgtattcttagatttataattgagcacgttctggtttcctttgcaaagtgttttacaaagctactgtatttaatactgtagtgagatttgatgctattcttgaagtaaatatatacttccttttaataacatatgcataattgcagagccatattgaattctacatactggccttgaaattctcataaatggtactcagtttcttttttttttttcttttgatatggagtcttgctctgtcgcccaggctgggttgcagtggcgtaatctcagctcactgcaacctccgcctcccaggttcaagcaattctcttgcctcagcctccctagtagctgggattacaggtgcatgccaccacgcccaactaatttttgtattttttgtagagatagggttttgccacgttggccaggctggtctggaactcctcacctcaagtgatctgctctcctcagccttccaaagtgctgggattacagacgtgagccaccgcacctagctgtattcagtttctttttaaatcatctaggaatgttatatttcaaagaaatgcactctatttatgtgcctttttcttggtatttgagcaagtaggtatgaactgtggtagaaatatttttatttaaagacttaaagactttaacaccccctcctccctacatcca

SEQ ID NO: 54119 - DNA, 3406 bp, Homo sapiens
tgtgacatgtctgctcataggtggtacggtgatggcccaaacacaaaaatttttataattaagtctaattccaggccattcttttaagttactgttttaaataattttaaatttagtgattaaatagagaaaatggattttgtgccttcttactagcattaccatttcatagattaatcagcttctgaacccttattttctataaaaatgaggaaagccttagctttataggttggttttaaggattaagtgtctttatgtgagaagcactcggcaaactctgtttagtcatgttaaataaaaaatatatgtttttttttttcagagtctagcattccagaaactggggatggaatctagacttgtgagcggcggtggtgcctgcagtgacactggtgcgtgcactcctgcgcggtctttcttagcgcagcaacggcacatcaccaacaccagaagaaatctctctgttaaagtccctgctacaacatctgattaaactgcaaaaaaaacaaaacaaaacaaaaaaaccacataaaatagaagtgtccttaaaatattttgtacctttcaactaactaccagattgaaaaagagtttatgatgcgggatatcaggtattttaaaatcaacatgcatcaaattaattttgccagttgactttaaaaacaaattatagaattagccatctctctgagggagcacatttgaataattggagatgcagttatacacacatttcaaacaaacatttgtcttttgagagtattataatttcaaattggccttgtatattttagttaaatgttttcagttgtattagtaacttaattaattttcaatagctattcagtaatacttaatcttagaacattaattggatttgtttaatctttttttgttttttgttgatttatatgaaaacagtcttgaggcagggacatggagaactatgcaagggtgatttctttgacttaatatatacaaggctttacttctgtcccctaattcttccattgaatgtgtacctctaccttgtcatgtcatggaagatacaacatttggaagatctgacaattggaatgactttggaataataaaattgactaattggaaattttgcatattctgaaaatctaatctcatagttctaatttgtacctatggcaaataagggcttctggacatcatgtttaaaatgttaagcataagaaataaactgacatttgtaataggtgactttctgatggaaagcaagctatatatatatatatatatatatatatatatatatatatactttttgtgaaatgtctatatactttttaaggtaattaatgaagatttcagttattgcttttaagcataaagttgtatttagcttctgctgaaaaattgtatcatataataattttgcttcattgaaaagggatgttgcagtgatgaaacaaggtgggatcagtttgattttgtttacttattaaggagtttatcttgggctcagtttgtggtattcagttcgtttctgcccaaagctcttattttcagaggtgttacttttgaacttttggggtcatttttaaaagttagcacttttgaattttagttgtgttaaatatgtgctgtcgtatatcatagccatgagccatatatgacaatttaaatttaattaattataaactcagtctcttggttgcaccagccacatttcagatgctcaatagccacatgtggctagtgggtaccatattggacagggcagctatagaatatttccatcattgcagaaagttctattggatagtaccataatctttttatagtaacttggaaatactatttgatattagatgttagaccacaaaaagaagaaaaatgttaggactatttcagatataaaaaggaactgaattgtgacataattagcatcttacattccatacagttgaataccttatgctgtgacaaccatagttaatcatttcagtgctgttcaacatacatacctatcagcagtgtgtttagaccaggggtctgcaaactttctgtgaatggacaaagagtaaatactttagtaaatgtcttaggctttgtggcctacatgatctttgttgcaagtactcaactctgccattatagagttaaagcagccatacacaatatataaacaaaatgggcatagttgtatttcagtaaaactttatttacaaagacaggcggtaggccagatttggcttgcatgctgtagagctgtggtctaaattttattcatagactttctttgcaaatacagtgtgagtattgttccatttacagtattattattttttagatacctggtttttagattcttgcctggtaactttttactgaaaatacaagaatttcgtactgcatttgcatctccgagattagggagcacctgtcaggatatgttgttctatcagggttacttctgttgactacctcttagattttgatacagttatattgttgagtttcattttcatatattcttgtagtgtctgcttgcctgtgacttctggtaaaataaaataagcctttgaaaatattttagcatggtatttaacattttctaaatattatggcattttgacatattttagtcagcgaagacatctgcccctttggtgtttctacttgcttatgattgagattttacaagcccttcaaactccgttttaaaggaatttattgtaaaacattaactttaataaattagtgttttcacagatcagatcattatacttggaacttctaaatcatgcaatttctgaataaggacataaggctagattcatttttcttaatagagaaaaaggaaatttctgatttatcacttttctagttgataagtaggattcaaaacgtttgatatgtaagtatttatataagactaatgtaatttaaagttctgtattattgtgattaatcatacagaaattcaggaactgatcagaagtgagattcttttccacatctggttaatgtagtgagttgacaccctgtgggtggtaaagcattataaacatttcatcttgaaccatgatttatacacatctgtgttataagggaggcttgagtacatataccaatgaagagatattcagcatttgtctatttgataaggaattaaatgtcctagtgattataaagtaaaaccacagaccaatttgcaaatgatcttcaatgttaagcacttgctctaagattaaaattccttttctttttaaggttaagggtgtgtacgtatggcagtgatgtctatgttgagattaacttatgtattgaggaaaatttgaagtttattttttcgatgaataaggctgtcaaatgatttagtatagattaatgacatcttttttagaaatattaaagtgagtattcc

SEQ ID NO: 54120 - DNA, 1070 bp, Homo sapiens
atggctgacactgaatattaattcaataaatatgaatgatttgtatgcaatttaaattttaggttttgagctgatgattctttagtttataaatgaactaaaagctgcctgacacacaggtgtttaaataagaaagctaaacagatgactaaaaattgtttattgagctgaacaaggacagttaatactacccgggttaacaggtgcttaattgccatttcctgcccatggaacatgttcccaggagctgtctgctccagtgggttcccagggcactgaagccttgtgtgaagcctctctttgaacacctcttctagaggtacgacgtgtgtattttgacaatctgagcccaaagtggcccaatattttcagcaagattcagagctagagcatcttttgcaataacaaccagtttagcttaaagctggaggctgtgctgaccaaaacgaaagacagccaatgcttacttggcaactggagcacacagccagttgcagccaaaatgctatcgccccattcacaatggggtgccaatcacagcagtctagctcttccaggaagggtgctcatggtgtcccacctaggtcccctttatgaggccaacaacccatctattggtgatgtgagtgtttgttgctaacagctcagagctatcctcttcctgtgggaaatgccgttggcaccaaagaggttatgcctcctctctccctggagatatactccaggaaatgagtgattaaggtgggtctgcagaaggctggcctcttgcctgaagatgaggcaattcatctcgctccagtacttgctgcaggattaggctgaagctagtctccagttgagaccacatctgtagttttttccccttgcctgtcctggtcctcacactccctttctcctgggaatataccctttaataaatcatttgcacaagaatctccatctcagactgcctctagggaacccaatcacatttaaagcattgaattgtttcttgggaaacctaccaatgtaagtagaaaggcatctgtgatgccacaaagtaagacatcagagagtcatagctaagagta

SEQ ID NO: 54121 - DNA, 1078 bp, Homo sapiens
cgccttgtaaagtccccacaatgctctaatccagggctctgtgtccaaccccatcacataggggtttctgttaaggaactcgatttatatttggcatactttgtgcatgcagcaggtaagtgcgatggtgagaattcctcccactttcttgtgtgtgtttctttcctgatggcctccgcgttatgccggattcttcctgagctccccaagttgcaggccacgtacatgaagccagtgtggtttcaaagattgagagaggtgccaccttcattcaggtgaaaaagcatagctttgagcgaattctcactaagttcagctcttttggtaagtagtgttttcagaggcgttggtaatcagatatgtgatatgtttaaatcacattttttgatgaggggatgagagaagcctcgtgaaaacccttttaataaagagtatattttaactgacaaatgatctagtttaaaagcatttattttggtattgaggcaatatttttagttggttttctgctgggagtgtttttaacctactgaggcctcttgaaccccttgccaattaagaagttggaggtagattactatcaaattgctgatcatttaggaaggaaaaataatcacattaatacgcagacttagtagctttgtatttaggaattcttagtgttgtctcagatagctaagggaaacaaaccagctctttcagtaattgatggagaggttaatattaaaaataaccaacctgtatattgcatgaacacattgaaaaattgctattgataattgatgtagtgagttgctttgattgtaaaatcttaaattttttttctgttttttcaaggcatgtcttacctgtgcatgtttcagtgtttagaatagcatgcaggataaaactattgaggactggataaaataatgcatttttactttgttcctttcgtcttgttttagacaaaaggctcattgtgctatgtgaacgctcaggtcttgtgtaacttgttgactttatatatgtacatatcggtcttgctagattaccttcatggcagttacttgagccagatggaagaaagagggttgtg

SEQ ID NO: 54122 - DNA, 1957 bp, Homo sapiens
ttgaggagtccccttttttcctcccctgggagagtttaaatatgatgctgatttcttgtcatcttagggctcctcagctacaacaaagttaaatggtataaaagcaaagcccaaattagagaccctaaaataaccttggagaaggagagttctcagttatcagtagaattgtcttaggaatttgaggaagcccttgtatacagtgaaaatgagaccctaagttaattaacaaaatgaaaataacttacagtacatatctgccacttccagtactgctataaataattgcaagtgtaaggatttttagtgcaaatatgcagaaaacatgggcatagaaagtttagatgaccttaatgaagaaacagagttggctctgaaactgtgcttagcaggaacaacgttttgtgcacttgataaacactgtcagttgttaaggcatcttctgataggtgaaaagcggttttttgatgcagtactgcctggcatgcatcttctcgatggtctgttatcttgtgggaatgacattcgttaagttgttttctgtgtgcatcccacccaaataaagaatgtttcatcagcaaagtgaattgccgtatagtcatcagactctagaaataaattatcaacgatgactgcagtgggtgaggctgtttgtttatcacatcacttgagaacagagtaaagtgagtttcatattttcctgagtcttgaattctcattttagacatctgttcagaagctttctaagccatggagtattctaaatgagcattttgttaaatggatgaaggaagacttagttttccattgttaggtgaaacctaattaaaaattaaataatgaccttgtgttggcttgtaaattccttatttcctgcatgtgtgagtgtattttgttagaacattccattttaaagcatgccttttttatgacaagaaatacttttaaaatactatttgcttttgaaattacagtagggaatcaaaggatagtctcttgttgagaggaaggtattagaagcatgtagctttatgaactatattttctgtgaatatagcagaattagtttaattgttcaatttcaccctctccagcatgattgcacccatcagggcagttaacagagacaccgctatttgtgttatactaggaattctttataaacttaataaatgaaagctttttctcttataggcccgattctctagtggacttctggtgaaattatgtggctaccttccattaatgttaatggaggttatggatataaatccctccatagtgatggaagaatgagccccagagagaagaatgtttctaatgaatcactggattgtgatataggattaacttggtgtccctaataccatttttttttcctcctgaaagtttaaggtcttatgtttaggaactagtttctctccaccttaatcctttattgtcaagtctgcaataatgttaagaacaggaaaaaaaaatgtagattcctggataggcacagtttttatattaatgtaactatataggcatagtttttatattaatgtaactatacagcacctatttttgtgttttactattacttggcagacatcttgagtgttttacaaggttatcgtatatttcactaataatcgttgcttgataatttggtgtcctgacagactgcagtttattatttagtattaaagctctcaaatgtatttattgagcacctgctgggtacaaggctttgagcttagtgatgaaagcatatgacatagtctgtagcctcaaattttctataatctcgtgataaaagtaggtaccagttcattagttgctttccagtggggcacaaattatggaacatcgtctggctggccgggcgtggtggctcaagcctgtaatcccagcactttgggaggctgaggcaggtggattgcctgagatcaggagtccaagaccagcctggcca

SEQ ID NO: 54123 - DNA, 1089 bp, Homo sapiens
aattgaaattgggtgcaagggcagatttgcatgtgtaaaaacctttctgttttaccagcttttatcaaattatttaatactgggcaaaacagattcctttttcttgaagctgagaaagatacctcctcctagaggaagagttgcttcagtgttctaggaagaacaattggttttgaaagacaataaaataatgagccattaggatcatgttttgtaatatagggagttggtgtggaagaggagagagaggactgctggtgtagtgagttcttgttctagctgtgtatgatcattggccagtcgttcagcttcttggccttcagtgcttcctttgactcaagtcaattcagcaaccatttattgaggcaaatgtgaggatgttctgtgggctacctatttagctaggcattgtggatccatagacaagtatgactgggtcctatgcttatgaaactccaggtcttacaatggaaacatactgtggttgaacgatgtagagagtgttgtatatgagatatgggtgcacaaaaacaggaaaagtcaattctgtctggtgtagacaggaagaattgtattacaaatccttcttaaggattttctattttgacatgcaagaggagcaggcattccaggtatttgaatactgagagattcaaattatcagcaaggttctttccagttccacgtttgttgtgttatcagtgtaaaattatttgaatagctttccactgatgagttattagctgaaaagtgtttattgtcatggttgaaagaaaataataatgaaagaagaaacgattacctttagtgataaagttggggccggatgggacgaagcagtgcaatttttttctttataattattcccctatttgaaaaatcaacttgtatatgaggcagcaaacaccttgcagagcagcattcccttttagtttcaggacgtggtggtggatggaaccactgtaacctggcctccctccatgagaggagggaatccaggtggccatgttgaaatgtgcctgtgtgcagcaaggcttctgaaatgacaagagagcccagcagcttccaaagcagctgtgactctggatc

SEQ ID NO: 54124 - DNA, 1079 bp, Homo sapiens
tgcgttaatttcctgtcgatctttcattcagcaacagacctagagatggggagcagacactgccccccccacccaggctttttaagactgtgctttgtgtagattaaaaagacgaaggaaaaaagaataaactttttccaaacaagatgtccatgtgcattctttaagatcctgtgtgtgcttaaaacgatcctgtaaaaaagccctctccataattttgaacctctcctttttctaaagacttttataggcatttttttttcttcttctcagcatgtgaaccaatgtgtaactcaaatagatgttactttgctgtttacttagattgttttaaaaggctagctgtgtggaggaatgaggaaggaagggaggcgggagtggctggagtttttttttttctctgttgacctaatgaatgcagttcttaaaaaataataaatatttatatgtggtcttaatttttaatgagtctcataaactggctggtatagaaaagtgtatgaaaagccatatatattaaactatagttattataaatacatgcatatgtacactagaatgttttatgaggaagggaacttactagtcttgttcactctttgttttcccagtgtctagaacagtgcctgacatacaactggtactcagtaaatatttgttgagtgaacaaaatgaatgtaaattgacagcattgcctagtgggggtaccattagactagaattcagaaaacttggagtctggttccatcactgccattaatcaagaatatattgttgctgaaatcacataacttctttgctcctctgttttttataaaaaactgggactagcccagctattcaggagtctgtggtggaaggatgacttgagcccaggagtttgaggctgtagtgggctacgattgtgcctgtgaatagccactgcactccagcctgggcaacatagtgagaccctgtctcttaaaggaataataggggctgggtgcggtggctcacacctgtaatcctagcactttgggaggctgagggggtggatccagaccagcctggccaacatggtgaaaccccatctctctaac

SEQ ID NO: 54125 - DNA, 1030 bp, Homo sapiens
tgagctcaagcaatcctcccatgtcagcctctcaagtagctgggactactggcatgtgccatcacacctggataatttttaaaaattatttgtagacacagggtctccctgtgttgtgtgggctggtctcaaactactgggctcaagctgtcctcctgcctcagcctcacaaagtgctgggatttgaattttcttaaacctaaatcaatattataggcctcaccttaggagaactttccaaaatattgttagtgttgaccaccttagcattacatttgctaacgacagtcatccaggtttactgaaccaggaaaccaactttcaggttaataagacagtttcgtctatgtgccatccttatccttgtctggacatatccatagagcacgcattttaaatctgaaagaatatatgtagtctcccctaccccagctttttttaagtagcaagggctattgaaaaaaatcagaaccctccgcttacgctcgcatacatgtagcttaaaatatatgttgcttattgaaagcattgtttaagttgaactcacgagatatactacatcatgtaatatgtctgcatttgtccatgcattcttttcggaaacctgatcttacttatgtctgcatttaacagataggctaggttaagttatgttaaaacatgttgtactgaggttggattcaccgtgtcacagcctggctttcttccttgattagctttaatcaaactctctgcattccgtgaccttaataaagctatttttcctgacaactgaagactgtcttaacaagcatagttcatctgtgctgaaactaaggctgagttaagatggggtttaggtcctcattaaagtccacagcatggagtgtaagaagaaatgatgaaatggtgctccctgaaacatctcttctttaaatttaattagacaaattatacgcaaactagtagatgccctgggaaggcaatcaacattagggctaataaaaagcttgagtagtataaaaaggctgggggaggtgctgtggagcct

SEQ ID NO: 54126 - DNA, 1061 bp, Homo sapiens
attttcatttgttttttttcacctagtagtgcttaatgataccatgtgaatttttatagtcccagctgcactgaagtgtgtgccctgaaacttcggttggattaagaaaagtagcttggtgtgagggctgaaattggtgaaatgggagaacacagggttgcatctatatatattgcaattaatattgacgagtgggcagaagtccaacattatcctagggggttggctaatgttctttgtacaccaatgcaagtgagtcttttccctccaggtgtgaatagtttaatttagtaggtcgattagtagaagcaaggggtgttttcttgtattccagtttacattatacactcaacattaactagctgtttaaggtacagtgcattgttgagtagttgtggtacaggtatcctgagacgttgctaacccatcttggtatctccagggcctggcatctaatgtagtaggtactcattagcatttgcaacatgaataggagaatgaatgagtggttgttgtggcaaagtctcttaaaaatcctggtccctgcgtacctctgtagccttctcatctccccaccttctagcaataatattctatttgtagcttgttaaatactccacattctttccggcctttggacttttgtacatttcattccctctgactctcacaccaccttccctgtcccctatcccctttgtctggctaattcccgctggttctttatgacttagcaccttctagaagacgttttaggaggcatcatagtgggtattttgttgaaggcctggtttgtttttcatatctctatgataacatatctctttgggtaacaacagagagctgctgactagtggcaccgttgaaagctgcatatctgaagcttcttttcaggagaatgtggatcatttcaggtgcctgcatcatttgcatgtacatcttccaaactctattggtactttccatttagatatgggcagaacatgatgctacagtaactgaaacagaagttaagttagcagcagattctcttccatttatagcatcagtatcagggtaaa

SEQ ID NO: 54127 - DNA, 1033 bp, Homo sapiens
gtgattcaaatcttgtctgtactgctgatgggctgtgtgactttgggcaagtagcttaacttctctgagttcccctgtctctgttttttcatttgtaaaatggagtggaggggacaatattaacttgcaggatggcttgatgatgagaaatgataaatgtcttagtctatattagatcttcagtaaatggtagttgttttgaccactgttactgcaatgagccaaggtggctataagcccttcagtgtttcagtaaggacaagcttacaggtaaccaccaagatcagggcagaacagctgatttaggtctaaacaggttccatcgtgtgtcttcaaaaaggttttcctttttttcctctggagaaaattcagactggtttaagaaggaaactgagagcctcttccctccctatgttctgagtgtttcagagatggccagaaatggatactagttactaagcaagacctttaaaaaatacacgttacaaggcaggttggtatgaaggaaagagcactgacccgtgagttattctcgcggggccaggctctgctccactcagctctgtgttctctgccaagtccctttagatcaatgtgtcgcatgtccccccattgtgagttgagtacattggaccaaaggattatagtttgttttcttcccaggcaagtgcctcctcctgatggggagttagtatgatgtgggtggccccagtaggactgggctggtcttactgttctaagaagtgttagcagaaaaatggctaggcattggagtaaccctgtgatttgacattttggggcatcctttcatggtacgatacacctggccaaaagtctcccagctcagaaattctataactagaaatgctttgaataaatatatactgagaaggtattttggggggaaattttaaaattcttatctgacttggctagagcaactgcttacgacactggacttcttaggggtatcgataatggttgtctttgaatggggagtggatttctcagcttcctgggaacagcaacaaaa

SEQ ID NO: 54128 - DNA, 1050 bp, Homo sapiens
tggtgaaatcccgtcactactaaaaatgcaaaaattagctcggcgttgcgtgcgcctgtagtcccagctactcggaggctgtgacaggagaactgtttgaacccgggaggcggaggttgcagtgagctgagatcatgccattgcgctccagcctgggcgacagagcgagactgtctccaaaataaaaagaattaaaacccttgagaaaactttaaaccctcctggactcatagagctggaggggacctaagaggttatctcctctaagccccattttccagataaggaaagtgtattttccaaggtaaaataagttttcaacagtgaatatccttcataatggctttttaatttgtactgtcactggagtcagccctcatttgccatgttatgattatgttcttcttgtgggacttgtatgtatttattagagaccattgagacgtagcactgggcattacttttgtggcaaaggcaccagggcagtaatcattattaatggatttcattatttgggagagcattttactgactatagagaattcattgcattgatctattgtgccacagttttattataccgggtagtttaaaatgatattctctaaactgttaggctgaaaaattgtccagtgttggcagttatcccatcagtaagacattccttttactaccgaaaatacatagttctgtcgaaagagaccttttgactggtccccagtgccctgactgtgtttaaatccctcactagtgaaataggaggattactactgccatcattgttctaaaacaaacttccttttggaagataacagcagcggtaaatcagatgttgaagaaagtaccagcttaacttcactttgctttaaaagggtttcctctttaattgacaagtgtcatgtataatagggcatggcaactcacatagtaaaccttgtgtggggctgcctgctggggttggagttcttaatgaacatacaagtgaatacactgaggcaaaaaaattaaagctctccaactgtggggtattcattctgttcactgtggcca

SEQ ID NO: 54129 - DNA, 1043 bp, Homo sapiens
gtgtccttaccctttgggctgaaggaggcatcctagtaccagggttccacgggcactatccgtattcttagtttctatcatgatagattatgctgggaacttgttccttttagcccactatctgtcccatggaaaacagtactctgaatcagaccccatggagggtggaacattctgattagccagcaagggcagttaggcccgtagctgtggtgtctgctgccacagcagaatggataagcagttctcagccaccaccccccacaacataatccataaaactctttcaacctttttttttttttttgcatgtctagtgtttgcaaatggaaaatggctgaggaaaaacagagtgaaagtttatataaaatatttataccttaaagatcttttatcttgtgtcattcaagagagaagtgaaaaatgtattgggagtacattatcaagagtacattataaatttaaatctcagattgaataatatcagctgctaatgtgtggagctttggaaatgagtcacttttgaatctcaagaacttaactgtaccaggtcagttacacttaagaaggaagtgccttttgaaaaaagaaaaatcctataccggaataaagacttatactaatgggcattaaagatcaaatacttgacataatattcatgttagaatgtagctacataggaataagttgtaggatctgagacactttatggaatgtttctcaaaaacaatcaaataattttggtcttttctttgtgaagcaatataacctgtggttacgagttatgtgtcttagaaagacttagatttgaattctctgtctgctgcttgttagctgtgccattttggatcagttcttttctttgagactcactttattttaaagcaaagttaatatacctacctaattggttttttttgtaaaggattaaacatcatggtatttgtaaagcattcagcactttgcctagaattttatagttccagtaaatagtagctatttttatcattattgtcaccatgatattgtttttagacctaact

SEQ ID NO: 54130 - DNA, 1024 bp, Homo sapiens
agaaatgtcaaagtaaggaaggagttgtgtgtattttcagtcttgacttcatttactgtaagtgccgaagcaccaagtgggaggtggtttgggaagtatttctgatctaaagaggaaactccataaatcacccatggtaatgtgtctcattagcaacactccaagtagatgaccaacattccgaggagatgttgctcattttcatcctgcatcttggcctttgtgcttacctggccctagcttagattttaaaatttaaacatttttgtttctcactcttgaaaactttggtactcagattcttaaactcctctgttaaatagttttcagattagcctagtatagcgttcaaaactggaaaccactgccagaatcctctaatgtgggggaaaacatggctattatcattgaatgtgcctccaaaacctatcaaagttggcagatgtccatgtgtttggcttggaccaatttataaaacgttcacatgcttatgaaaattgttatctctgctattcagaatagttgagtataaaattgagcagaaaagcataataagagaagaagctctgctatgacttgcagtatttttcttttgatcactgaatactacaagaaggatcttttgtttgcgtgtttgtttcaaacttttccatgtatagaggtgtcttaggtgaagtgacaactaatgacatgtggaagtcactctctctggtgttctgtttcttctataactaccctcccttcctgtctaaagagagagggaatagctcctgaattaggtgaaacaaatagtttttaatgtatggtaaaaataagtcattcttcctctgttggcaaaattcattgtaggtgcctttcagtgtagttctgcaaatgttttttccattagttggagtagaaaagagatgaaggattatcagttgtcaggtatattttgcttctaccaaagatgatacataaatatgaaatatttgcagaacaagctgcaaaaccactaggtcctagaaataaaattctgatggtt

SEQ ID NO: 54131 - DNA, 1062 bp, Homo sapiens
ctctttaagctgacagaatagcagcgttaacacaccctaagctgcttttagtttttcccttttttcctcacattttcctgtgctttgtgtacagtgggggtttgtattttataagaagtctctgatctatgtagtatgccattcgctaacaaaaaccaaaataggattgtttctgtcccacttggttgcctgactaccccctcccttcctccccttttctcctcacccccaacctccaaggcgtgcagtttagccttgcaaggcaagggcccaaatgcctttcataaacttgagccaattccttttgtgttgtgggtttcaccgctctgattttaatatcgcaattaaagacagatttttattttctcaagaactttctcttgcaactggggaaatggaattgacgcagctgctacttttaactaagaaattatatcattaaataagagaaagccgccttgtagagtgatttgctttcctggggacgttgggtctcacgtggaccctaaggccccagaaaccgttcacagtgagagaacccagctacccctggctttctggctttctgtagtagcccctagccaggcatttaatccccacaaaaactgatacagttgttacctccatttcatggagtctaaaactgagacctagtgatgctaacttgcctaagattatctaactagttcataatggtgccaggatttttgtcattcggaccccagagtcctggctcttacggctatgcacacagctctctagtaggatcttggagcaaatgcggtgggccggagtgcagtttttaatccagcagtctttgatttcatgaggtaaaaggttacgtgatgaaaaatggaaaggaagggagaccaaaagaaaaatgtacttggtggtaagagagacactagggcaagctggaatctcgtgaaagattcagactttggatgaacagtcagaataattggattgtgtatgcactctcaaggtttggaggtactggatggcttattgggtaaaaagattagtgttttcccgtcttgaggtctgaaccaaacggaggtc

SEQ ID NO: 54132 - DNA, 1858 bp, Homo sapiens
tggattgctaataaaattttgcaattttacaacaagagcagtgttttttcctgattttttttttggcatgacaatttttatattttaactctccaaatgtatagtaaattttgggtcacataatgtatgaagtctaaataagtaattaaggattttaggactaaaagatgtaactctggtgtactgagatttaaggattatttccttaggccttttctcttagaaattttattagattatattgaggtttttttcagttactaatatttatttgttaagggaattaaattattttttggcatttctgtgtagagggttcctttaaactcttctcattttcaagtgaagatttgatttctttaagtgttacttttatgttcttgatataaagagtgtgatatatatatataataatggtttattggaaaatggagcagtttgttaatatttagaagaccttccagattataaatgactttaccttcttttctaggtttgttaaagttttgcactgtagggttttgtggaattgggagcctaattgatttcattcttatttcaatgcaggtaagtttctcaatctagaatgtaaactacttttacattcaaaattgagttctgtgatctcctgttctatttaaaatgtttagtatacgaggaagcagagaagaatggttgtttccatttttcttcatgtactagatctaaggaatcctggtcatgtttccaactagcatttctcaaactgtgctctaccagttagtagttctcaaagacataagaagttcattaaaaaatatcccgtgctcaaatatgatttgtaaatgtgagttcaattgagttaaagaagtttctttactgaataagttctcaaaatctttttaatatatgttgtctctaagagggattgtggttatttttcaaacccgtttcttttcctcatagtcactgtcaccttgtcaattaccataaaagcattgataggattctgttatacatatgggcattgtggaagcagagacaagattttcttttgcactggacaggcactccatactagtattgtgttgtttgcaaattacagaaactgaaatccagctagcttaagctaaaaagaaaaaaaaaagggcgttctttagaaaatctgagaatgtagaacagatatgtataaacaaatgatatacatgtttagggctctcctgataactcatcttgcttttctccatagccttattttctcctgctgcagtgggactgggggcgggcatagtttgtgaaatgctgtccttaaacatttaaaagtgccaccagatgttttctgttaaattatgtagaactgattgtggttaactcatgaggattcttagagaaagagatgaatttttcacaacaaatgttgacaaacagcatttcaacaagcatttatggagcacctaacgtctttagcaagtgtgtcagttgcatttagagcatcatctgttttgctctgctttctcatatagtatttccactcttcaattctgtctgcttgatgttatcattatgctttaaaagaaagtcacaatctaggagatttggataccatactgtgaggaggaggcagcatatggaccaataagataccagaattaaacaaggaaaatatttggttttaaagttggaattttcctgtctgtactcgtaaacatatgcctaaccaaatatcctgccttctctaactgtgggacaggcaagcaggcatgaagaggctaaggtacttgtgcacatatgcttagaaatgagcttctcactttcagtgaggatccaaggaatttaatatattattgggattctttgagttaagatatccagaattcaa

SEQ ID NO: 54133 - DNA, 1034 bp, Homo sapiens
ctcacttattttttgtgttcgtacagctgtccagccagtaaagtttggagacaaggaattgggtccacctaccatataacgcttgacaagtcatttaattctggtcctccagaatctggtcccatttgcaaatggtctgccttacagagatttggcgaggttgaaagaaaagaatgttcaagaatgtgtcttgtaatctgtaagctgttattctcctgctttttgttcctcccttatgtttaattccggtaaaattatggagttgtgatctttttattgggaagaactcaagtttgtgagtgctcttactcagatagttactttaagaaaaggcatagagaccatatgagctgaactgatgaagtctttcctaaaaacacggtggaggaagaaaaaacaaaaccaaacagggatctttctggaaaggcatagattaaaactttactacagtaagccactctcacacgtgggcatgggccactttatattgggttagttaggattgaaatgtgctgtaaatgcacaatacacacaagattttgaacagatttcatgtaaaaaggaatctaaaatatcttattaatttttattttttgagacacagtttcactctgttgcgaaggctggagccgcctcctgggttcaagtgattctcgtgcctcagtctcccaagtagctgggattacaggcgtgcgccaccacaccctgctaatttttgcatttttagtagagacggggtttcaccatgttgctcaggctggtctctaacttctgacctcgtgatccacccgcctcggcctcccaaagtgctggaattacaagtgtgagccactgatctgaatatgtttattcttaagagggtttagtttaccaaagcacttacactgctatgtgtatactgccttaatgcctttttttttttttttttttttttttttgagacgagtcttgctcttttgcccatgctggagtgcagtggcttgatctccgctcactccaacctctgcctcccaggttcaagccattctcctgcc

SEQ ID NO: 54134 - DNA, 1044 bp, Homo sapiens
tcatacagtatggtttgtgccttttttgggtcaggtttctttttttccacatatcatttttgagatttatccttgttgtgtgtatcagtaatttttcctttttatttctgaatattatataccatttgtttattcatctgttactagacacttgggtttttctagttttggggtttttgtaaataaaaatgctgtaaactttcatgtgcaggcgtttttgtgagcatatattttcatgaatactgagtaagtatttgtgagtggaagtgctgggtcatatagtaagtgtatttttaactttataagaaactaccaattttccgaagtggttgtgatattttacgtttctcttagcaatgtacaataatagttccaggcacttcacagcctcgttgaaacttagtgttgtctgtttttaaattttagttaccttagtgggtgtgtagtggcacctcattgtggttataattttgaatttcactgagtggagccttgataaagaatgttcttgaggttttccttaatttttctacaggattgtagccatatacaattgaaattcatcttttatattgttaaattttttctttaggtgtctttaagagtgattgaagagaataattcaaaatgcctgaaaatcctgctacaggtatactggatatattgttctataattaaattaattatttaaaaatggaatctcaaatgggacttaactattactctacttattcatcttgacccaagataaactgcaggtgctgcaggtacttgatcgcctgaaaatgaaattgcaggagaagggtgacacgtcgcagaatgagaagttatctatgttttatgagacactaaagagtcctctcttcaaccagatactcacacttcagcagtccatcaagcaactgaagggtcaagtaagttacccatcagagttttacattaatatattatattaatatattcaaaccatcaaagaaagatagaggagatagacaaagacaaattatctttaaggactcagttcagcaaagagactgtattggg

SEQ ID NO: 54135 - DNA, 1042 bp, Homo sapiens
acccaggaggctgaggcaggaggatcgcttgagcccagaagacggagactgaagtgagccgagatcacgccactgcactctaccctgggcaacagagcgagaccctgtctccaagaaaaaaaataaaataaaaatgtactttgcattgagagaatttaaggaaattcaatgtaaaaaagtaattcagaatttactatgggaaaaggcatttttctcaggagtttccatccagcttggaattcatctcataatgtgaatgaagtgtgaaaatacctctgattccctgaggttgcagaacactgcacacactctctcttacgttctactgaaataatcaggtgagaggatttccagaaataatttattactgaaatgctgagtttatgtggttcttaggggaagctgcttttatgctaagcaatttcagttctgcagacagagtatgttggctaaatgtacaccattgacttttttttttaacgctccttcattagggccggcaaattgaatatatagatatagaacggccttcaactggaggccttggattcagtgtggtggccctcagaagtcaaaatctcggaaaagttgatatcttcgtgaaggatgtccagccagggagtgtagcagacaggtgaggaagctgtttattttcattttgctaattgtttcctgataattctgaaaactattataaagagagtgaaaaactagtaataaaaacagtaacagtaacagctaacatttttgctttcgtttttgctatgcatttgtcaggccttttgcgaaaatcctataccccatggcagcagttccactatataggtatcatcattccattctgtagatgagaaagctgagattcagagaggttcagtggtcaacctatagtcacagagctgttaatgctggagccatgatgtgattccaagaccatctgactgcaaagctagtgcgctatttccctctcttacaactgaacatggtattttagctatggactgatcagtaagataggaatattgaagttctcattctgcat

SEQ ID NO: 54136 - DNA, 1058 bp, Homo sapiens
aagcccatatcatatagaataggcatgataaatcagaaataactttagttattcccataatcagaatgatatgtaaaatttcactgattattgcccagttacatataaatttatcccttttgatagacatacgtaagtaaaaatgaacttgccatgcaaatgcagcttcaaggcaagttccttggctcttcatttctgatcactattgcttcaccttatgcagcttgtggagccactgatgttcctatcatcatttcagctcctaagagtatttatttagaacagcagttgtcaaagtttggtctgtgggcctctggagggctctgagagccttgcaggtggtctgtgagatccaaacagcttttacaataataccacaatgttattatccctttcaccctgctaacatttgtactgatggtacaaaagcagctgcaggctaaaactgctggtgccttggtgcaaaacaaaggcagtggccacaaaccgttatagtaatgattgcattattttctgccatgtgcttgcaacaaaaaagaaaaaaaatgccgttttacttgaatttttttaagatgcagtaaaatgattaattttagtaaattttgatcatttagtgcatgtctttcgaatattgtcaaaatgggaagtaccacctagcattcttgctatgtactgaagtttgatggcatttagtacatgtcttttgaatattgtcaaaatgggaagtaccacctagcattcttgctatgtactgaagtttgatggttgtcttaaggaaagtcacctgcaagattaatctactttttttttttttttgagatggagtctcgctgtgttgcccaggctggagggcagtggcgtgatcttggctcactgcaagctccacctcccaggttcttgccattctcctgcctcagcctcccgagtagctgggattataggtgcctgccacaatgcccagctaattttttgtatttttagtagagacggggtttcaccgtgttagctatgatggtctcgatctcctgacctcgtgatccgcccgccttagcctccca

SEQ ID NO: 54137 - DNA, 1117 bp, Homo sapiens
gcagtgagctgagatcatgccattgcactccagcctgggcaacagagtgagattctgactcaaaacaaaacaaaacaaaaaactatctatctatctgtctatctatctagaatctcacttctgaacaccccaactgtgaaacacacccaagctattgtggattattgctaaggcctcccaacttgtatctttgcttctattgtttcctcttctgtagtttattttaagcacagaagcttgaattatgttgttaaagtcagtcaggtaatgtcactcctctgtttcaaaactctgctcgatgccttctcttcccaatcatgaaaagaagatgccctatactgtctgactccattaactctcccatctcttagactactcttctttttcctcattttcttgtagccgcactggcatctttctattcctcaaacatgtcactgaggatgttggttgtgaagttcccagttttatgctggaggcttctgttctgacctttccttcttgaggccctggcctttctgtcctcttccttgcacacgtgaccattaacacccaactctaggccattaggcatgagcttataccctcaacaaaggccttttttagaatactgattacttttctcattttgagccattcctttgtgttctacatgaaattcctttactcttgccatttcaaccagttattaacagtattccattttattcagcattttaggtggcttctttgtcagccattttgccagagctgaaagtctgatgaattgttattaaccagtgaagttacagcatttatttctcaaaataattttgtctttttcttgaaggatggaagactccagacaggggaccacatcttgaagattggtggcacaaacgtgcagggaatgaccagtgagcaagttgcacaagttctaaggaactgtgggaattcagtcaggatgctcgttgctagagatccagctggtgacatttcagtcaccccccctgcccctgcagccttacctgttgccctgcctactgtagccagcaagggccctggttctgtgagtatacatatcattctttcatcttaaaccaaagcctgggtgtgacacactgtaagataagaaatt

SEQ ID NO: 54138 - DNA, 1057 bp, Homo sapiens
cgagacggggtcttgctatgttgcccaagctggtctcaaacccctgaactcaaacaatccacccacctcagtctcccaaagtgctgggattacatgtgtgagccactgcacccggtccactttttttttttttggtggcaaaatatatataacatgaaatttaccgttttaaccttttttcctttttttttttttagagtcagagtctcaccctgttgcctgggctggagtgcagtggtgtggtcatagcttactgcagcgtcaaactcctgggctcaagcaatcttcccacctcaacctcccgagtagctaggaccatagctgtgcgccaccatgccctgctagttttagttgttttgcagagacagggtcttgctattttgcccatgctggtcttgaactcctggcctcaagcaattcttctacctcggcctcccaaagtactggaattacagtcattagccaccatgcctggcccattttaaccatttttaagtgtgaaatttggtggtattaagtataaatcactactagtatgtggtaggcactaaagaaatgttggctggatcacagtatagaaagtataggtgatcccagccatcagctgaattctgtatgatttagccaagactaggatcccatgggcctaccaccttgtaaaagaatgtgctataataaggtagtgtgaagattttttgaattcttaaatatagataatctggtgaaagagcttgggataaggaaggaagcacagatttggagtcagaaaagccacttttggtctgaattgccacaggttagcatgtgtcccttggcatgtcacttgactttgttgagaatcagttccttcatcaataaatgcccacttcactatgtgcttgtaaggatctaatgaaataccatccatgtaaattataaagcattatctcattttggggtattggcaatattatcactgtgaagaaggcattttaacaggctatatgggctgggataatggttggatgtggtaaaatagtggggccacacttgtgcaatgttctgtactctggaagtg

SEQ ID NO: 54139 - DNA, 1681 bp, Homo sapiens
agaatacttttttcttttaaacatatgagacacttgcataaaattattttaaaaattattttagtattttctatatatgcttgattgctgtatcagcagagcatgtaactgatgcaaaagtatatttcttttcaatagaagttatttttctaggatggtattaagagtgtgtgggatgtgaaagaatattgtggactgacgttaaattttgacagccaagtattctagacttattagctatactttaagcagtaaattaaacatttttttaacatccttaaatttctgtagtgatattcttataaaatgaaaatgcaaagggaaacagtcttaaagggctgtaaatgatacttagtgtgtttaaggggagctgagtagaggtaggtaagagagtatgacattggagtattgaaaggagaaaccacagtgctgcaaaaaatttggtagatcccttacccagtaagggcgtatgctgcatgcattttgtactttatccatcaatacatgcaaagatttagccttagattttaaaaattttaaggatttctaacatttttatttgcatattatttaatcataaataatatgatgaaagcgaggccccttgtttacagggaaaataaaatgatgtcctattttcattttggtagatggatataaataagagatttttgttttttcatttggggctggctcagttctgacttatccccttgtcttcctaggtcaatggcatgcagctttatggaaaatctcgccgagaagcagtctcctttcttaaagaagtgccacccccttttactttggtttgctgtcggaggttgtttgatgatgaagcttctgtagatgaaccaaggcgcactgaaacctctcttcctgagacagaggtactaaatgaatatagtgcatttcccataggcatgcccattcatcaaagatgccccgaagactgtgctgcaataagaagggaggggaaaccattccactctgctctttttttgcttgactaaggcaacaatgcatagcttttcaaattgttactcttcatttaacatcaaaaaattctttccttccctttccttgacatgttggcaacattgatgcacatggattttgattttagagaatctttgtttttagtaattgcctggattcattacttttggcttctagttcaacgcagtttgtcttatataagtttaaggtgtttgcgagtgttgcatatctaatgtactcccctttttaagagccttaaaattatgaaactcagccgggcgcggtggctcacacctgtaatcccagcactttgggaggccgaggtgggtggaacacctaaggtcgggagttggagaccagcctgaccatcatggagaaaccctgtctcaaagtagaaaaaattagccaggcatggtggcgcatgcctgtaatcccagcaacttgggaggctgaggcaggaaaatcacttgaagccgggaggcggaggttacggtgagctgagatcacgccattgcactccagcttgggcaacaagagcgaaactccatctcaaaaaaaaaaaaaaagaaactctatgataaatttcaaagtgagtctggaaattgccataaaacccttcagaagatcagagaatgaaataacactttatatgctcttggtactccttatttatttatttttttaa

SEQ ID NO: 54140 - DNA, 1041 bp, Homo sapiens
tttgttcattgcttgggctgtaaaagataatttttgagcttcagatagaagtttagagtattttgggggaatgtcaatcagatgaaaacaatagtacaatgctataattagtataaaaacagaaggttttttgaagcagccattcttctgcatagtagattcattgaccctctcatttaacttcctggaattccacatagcaatgactcttcttcctaaaaagacagggagtctagaatagagggactttcaggagtaaaatcaagaaaagtaacaaaggacctgtatactgggcagttgtgctaacctatttcttctaagatcagattttcattatttcaactcagtgatttttattcattttagacttaaatgatgtccaaagacttggattttttttttctcaccttattttctagtaaagcttttcttgaaaacttcctggagccagcagaagtggtttccctgttctgctccagcctatctctgtgttgatatttctttctttgtctctctctgtaattatgaagccaggtattgctacttacgtatcttataagcttctactttgtatgatgttttcatttacttaaattgcatatttttccttttatgcttctaatgggatgacagaactcattgaagtataagaggtcagtgttaatactttgaatgaaataaattcttcacattaataaaaaaaactgtatgaacagtctgaatttttaagcacttgaatttttataagatcttatcctggagtgtgtgtgccccagagcatgccccttttacaaagattaaaaagaaaaactacgcatgccaaagagaattctcagtttgagaagaagctgtgagattcttgatgtgtgcattcttttcagaattgaaagcatagtgttttgaagcatttatcttctttggtatttcaggttgaccacaatatggatgtcaatactgaagaagatgatgatggggaattagcactgtggtcccctgaagtcaagattgttgaactagtaaaagattgtaaaggtttgggat

SEQ ID NO: 54141 - DNA, 1025 bp, Homo sapiens
ccaaaattaactggaattgaatgaacaaatttaatgggaatttgaggcatgagccaccatgcccagcctaggttagccaaaattaactggaattgaatgaacagatttaatgggaatttgttaataatcgattttgataattgggatttaatttagaagatacctttcagatgtggtcttagatattcaggtacatttgcatttctattattgtaggaatctatatatatttgcattcttataatacatatttatatcataatggttgctctgatgctcttaactgacattatctgtaagttttatattttgaatagtgcacatattaagtcagagaaatgtttcagaactcaaaaaaattcagtaaaggatggaaagaaaaactagatagtccttaagaatttaatccctagttaaaaggaaaacccccttctgagctttacgcttaaaaacatctatagtcagttctaaatgtagaattttttgttcttcattgcattcctgtaggtatgtattgtaacttctattgtttcttgaaattttatttttaatttatagaattataggattttccttttcctcttatttacctctcaatcagcagcacacatactgacatttgtttctgtacaaattatgtaaaataattttctgccaacaaaggattagatattctttttgtctttgtgcttcttatagaacataactacttaatttcctaaaggccattttgattcagattaaagggctcatcttatttacttctacagctaaaccttggggaatggggaggggaacacattcaatcctaacttggatgcttttcttaagtcagtcttaagtgtacttacagatgtgtacagcacatttttcaccatttgtcagtggtacctagaactgttatctaccatgacatttagatgacaggtaaacacaactcaaatttggttttgggcaagttaattaatcggttataccatcccttgttgtaattaggtaataaattctaaagttcaagaatattt

SEQ ID NO: 54142 - DNA, 1096 bp, Homo sapiens
aagtaaggctttagtggatatttttgtgatactcttttgttaaaaggtgggaataaatcttgtaataggtaggtgataaattcctagaagtggaattactcatcagaagagcatactgtatcttttaaattttggtacatatttaccaaatagcttgcatttaagtttgtgagactcaaatatatttagaccacttaaaatggatcctttcttatgtagagttatttctttattccgataattctcatggaagatagtgtaagcaggtgtgtaattcatgaatttgctaatggttttctatgatgtggacagattaagtgatagcaatatataactatcaattttgtttcaactttatatatggcggtaattaatttattggcctttgtagctaagtgggcataaagtgtttatattcagactatgatattagtgccccaaactctatttctatttcttccacttaattttatttatttatttcttcttccacaaattttaatcttgttttacttttgtttattagagaatttagcttaaagtggtggggttggggggagggcattaggactttaatttttaccaagagatttgagaatttgagtaaatgctaatatcagtatatagttttcaatagcctgtgcaagcctactgtcttcatgttcatcttagctaatcagtttacagaatgtaggatttagcatttgataggtattgatataattttaacacattaatagtatatagagtggtaacactataaagtcaggtatgtaaccatattatttccagaatctaaaatataaaggataggcatgtactataagttattatacagtttcacattaatgctcaagggatcttataacatggccactgacatctaggttttttttttctcttgccttttttttttttgggagctctttgggtccacgtcacccatataagatattggtactaagcaaaatgcagtcaatctgctactaatggcagtatctgtagtcttgcagatatatcatatgccttactgttgaacaaaccacacagctgcatttaaaggtcactttttgcttaacggaacttaggggaactg

SEQ ID NO: 54143 - DNA, 1070 bp, Homo sapiens
gaaagaagttattcaacaggagaccagaagggttatgagaaaggaatagtcttcaagaagtgatttccatgggactcctgcttaaaccatttaaaatattggggtgcttaaaataggtttttaaagtactaagctttataggataaaagtatgtgcaagcttatgtactttttgttcctcttaagaatatattttgatcttttagcaggttcctttgtccacttctcttccattttgctttttattgctttctgtgctgtgcttactgtgcagctctgggactgtttagttctatgtctgatgtgtggaaaaatctattcttactgcctaatagtgtttaggaagtaataagacacaaggagccaggaaccgtatcagtttaatctatcttgagtggactgaatgtactttgtgggcacttattttgaacatgatggtgctgtggtaattggtatgattagtgtaatactttgctatattataaaatagttaaaaatggagttagatgttagataagatagcttgctcattattcattagaatcaattagttattactttgcattcactataaacacatttatttctctttcccaaaagtaaatgcttagcttattggtcaaatcagaagacagtcttttgaaatgattaattataccctattgttttaaaccagaactgttctcgtgattttaattcagctaatggttcctgacatggcttctgttgctctgaaaatggcaaaggaaaaagaagaggtgttttaagatatatcttatcaaaaaaggagacatgctgtcatatgtattttgttgtttttttttatagtaaataccctttttgagttttgtgaccaaaatgtacatcaatttcattgctgatgcagtgttttgaattaacttctgtctttcgttactttttatagtggttttgtgaatgtttggatagaaactagggacaaatttgagtcaagatactctgtcaaattaagttataggattttagagttgaaagaagggatcataactcatgtatccaactttttcattttatgtttgtgaggaaactgac

SEQ ID NO: 54144 - DNA, 1352 bp, Homo sapiens
atggggcatcttcagaggtagctagtttgtcccctccctgccccccaaatgacaaagaagctgcctttgggttctgtcgtccaggaaaaggggtggtagattggatttagtgtttagcataactagtggtctaaacctgaatacattttagtaagaaagcattcctgtcactagtttgaggtctaaagaaggcctcactttgtgtaaattagtgctcacaatgacttttctggcaataaggaaaatatattcacctttcaagggtagaagtctatttccatttccttctggtgaatcgtcctttagaatgttcctaaattatcaattcagtgggttgcattttgaaaacctcctcacctatttgggttaaaaataatatttttaaattttggtgttatctgaaactgcagagattgttcacaaacaacttggtgcaaccatttatttgcttttggtatattttgctgttgcagttttctctaaggaagtgtagaaattattaatatgaagtaatgttagctgctgggcagttcatgagaggaataagctattatgtagtctcccttctccccccaataaaaaagcctttcatcaaaaactgacatcctaaatgaaggaaataattgtacagcttatttattagtgtgtcaaacttaaaatgtaatggtttcatatttcaggatgaaaagtgtgttgtgattcatggttgccagtgacaaaatagacagctcttttatattaccacgtcgattgcctgctgatatgccactgtactttttggttctcttctgttctcttcctatgcaatagctccctctacttgaaaatactggtgtaattatagtttaacactactttattagtgagttccctgggctcttttttacttttaatcctcttcataaatatgtggtgttatattacatcagagcctgtaagaaaattttgaagagtctcttgactcgggggtagaaaggcagggttagttgcaaaaagcaagataagttacatttgaaggcattcttcaaggaattagctgtgtagcctttgttgatttaaatatggtatatttggttaaaattccatgcagtactttgaaaatgaaccctgatgtttgaaacacagaggcatagaaaactggatcagaaaacttcaaaagaatcatcagccacttcaaacagacatagccgggaacttggcaagttcttactttgctaattccaaagttttgtaattcccacagaaaacctagcagtttttctctactttctctggaaggttttaagagaggctagagtagtagaatctcaggttacaatatgttgccttgtggaacagcatgtgcataatga

SEQ ID NO: 54145 - DNA, 1121 bp, Homo sapiens
acacactaccacacctggctaatttttgtatattttgcggagatgggatttcgtcatgttgtccaggctggtcttgaatcctgggctcaagcaatcctcctgccttggcctcccaaagtgctgggattacaggcatgagccactgcacctggccttttaatttttttaattacaaaaactttttctagcaaggtcttgctatattgcctaggctaatctcaaactcttgagctcaagcagtcctcccacctcagcctcccaagaagctggaattatacagaggtgtacaaccatacttggcttagagtgagattttaatttatttttacctgtttagaagattatcaccagagtgccagacacatgaagtaagtggtcaaataagattcatcagtcaactcaagctgtcctaaggctgcatatttattttcagtgcatggactcatccttcttctttgctcgattcacaggaccctttagatcctacaagatcagtgattgtgatccgctccctggtagcagatggtgtagcagaaagaagtgggggactattacctggagaccgcctggtctcagtcaatgaatactgtttggacaacacctcacttgctgaagctgtggaaatattgaaagctgtgccaccaggcctagtacaccttggcatctgtaagcctttggtggtaagtgttgtattttgttaatataggaagtgataatagtgcaacagttaaaaacatggattttggagacacatatacctggccaagaatttctgttctactgtttactatgtgtgtgaccttgggcaggtttcttaatgtccttgacttacaatatcagaaaaaataatgtctacctcatagggttttgggatttaaaggttatattcattaagtgcatagcatattattacataaatactagctgctaatgttgctagttctactactaccactcttactactattttcatctttatgcttttagcacagacttctaagctctcagcacatttcttatgtgtaaattattattattattattttatagacagagtctctctctgtcatccaggctggagtgcagtggcacgatcttggctcactgcaacctccacttcc

SEQ ID NO: 54146 - DNA, 1019 bp, Homo sapiens
tctatgatgtctattatattttttagtgccgacattttaaaaatttcataaccatatgatgtgttcaaatacatcctctaaccacattaaaaaaaaaatacagggcagtattactgttttcagttttttttttttttttttttttttttgagatggtatcttgctctgttgtccaggctggagggcagtggtgtgatcataactcacttcagcgtcagtctccttggctcaagcaattctttgcctcagtctcccaagtagctggcaccacaggcgcatgccaccatgcctggctaatttttaaatttttttgtagagacgggggctcactatattgcccagcctggtctagaactcttgtactcaagagatcctcctgccttggcctcccaaagtgctgggattacaggcatgagccaccatgcccagccctactgtgttaatttaaaagcttcactacaatgatgtttagctgcaaggagaagacaatagaaaagaatagatttattccaggaatttacttcttggtagtaaagaataagacttaaaataggaaagatctttgatctcttagaaagaagaggacctcattatgcccggcacccagaggttctccagagataggtcatggtctgagcaaatctatatgccaggttttagccaggaacccacacagtttctgcacatttagtttcagtggtatgcactagctgttctgattagtgaaatataaattaatttttaaaatactgtattcattccttcatatttattttcaacacagatgaaaaataagatttgttattttttatattataaaagagtcatactcaaagtagagacatactccccatatctttagtttatagagaatgttttctgaacattcagatagttataatttcttttgagttatttaagcttgaaaatcctgaccttttaagtctttgctttcttaaataatagtttgcagtgtatgtatacttatgtactactttttatgggttaaatatttagtg

SEQ ID NO: 54147 - DNA, 1091 bp, Homo sapiens
gtttggcatgttttatttttcccagcgttcaagaaaatgtcttcattctgtgaaggtaatttgatcatagagtttagttctactttaattgtgtgtatgaaccaaatattgatgtgctgtatcatttggtatgtgaattgaatgaatatttatgcagatataattattcatcatgaagatatctctttttgaaaatgttaaaatgtgtgttgaccatctataaattatagatgaatacattttcagttagaaaatcttggtatgtcacgtgtcttttaaagaataaaatctgtaacttctacaattgaagaaaaagtttaaatcattgtagaattaatacaatggatagtttttacttttacatttattttagaaatgtctttcatttgaattttctgattaataacaaaattaagcttctacaatgtatagaagatacaaataactgactgtctcactagagaaagaatgcactcctttaggtaggtcagcagtcttaaaagcttgctcttaaattcctgtttttctgcattagtgtgtttataccacagagtcacttttatattataacataagcctaaaataatacattgtgtttgttttacagtcctcatgatatgaatgaagttgggtatggtctaaatatttccagactatctttttatgctttttgtcattgaagaaagagcattgtacaagaagcatttaacccttctctcaaattttgcatcttcagaggcaaggaactgctccaccgccaatgaaacttcctcctccttataaagctctgactgatgacagtgatgaaaatgaagaagaagatgcctttaccgaccgtgagtgccttttcactatttagggtagatgcagaacttattaaattatgttttaacgactgttgtaaattatcaaatatatggctgtgagttcttcaaaaatgtgcatgaatgtatgctaaaaaatcaaatctatacctttgaagcttttgtggcgtcatttcctaagcttttcccttggacactgagaaagggaatattgaaggaagctatgctgtacactatttttcctatattcccttctaatcttattgt

SEQ ID NO: 54148 - DNA, 1037 bp, Homo sapiens
tggtgtgctgcacccgttaacttgtcacttacattaggtatgtctcctaatgctatccctccccgctcccaccaccccacgacaggcccccgtgtgtgatgttccccaccctgtgtccaagtgttctcattgttcaattcccacctatgagtgagaacatgcaatgcccaaactgaaattctatacctattaaaaaataacttcctgcttttaaaaaaaagttttataagaactccttttcccccatccctagtacctggcaaccaccattacagtttctgtttctatgaatttgactactttagatgttttgtgtaagtggaatcatattgcattgtgactttttgtgactgccttatttcacatagcataattttctcaaagttcattcatgttgtagtatgtgacagggttttcttccttttgaaggctgcgtagtattccattgtctgtgtagaccactttgtgtttttttctattcatctgatggttgacctttgagttgcttccacctcttgactattgtgaatagtgctgctatgaacatgagtgtgcaaatatttcttcaagactttgctttcaattattttagagatatacccagaagtagaattactggatcatatgatatttctaatttttttaaggtatgtccatactcttccataggggttatataccattttacaatcctaccaacgatgcataaacgttccagttttttcaaatccttgtctacacttattatttgctggttttttggtagtagctacactagtgggagtgaggtgatacctcattgtgattttgatttgcatttttctcgttgatgaagcttcttttcacatgcttattggctatttgtataccatgtttggagaaatgtctgtttatgtcctttgcccgtttttaaatcagattatttgatttatatttggttgttttaggagttctttatatattctagatattatatacccttatcagataaataatttgcaaatatattctcccattctgtgggttgccattttact

SEQ ID NO: 54149 - DNA, 1056 bp, Homo sapiens
tccttttctcaccccattggttgctgtggcaacgactcccagcagcccttagagcaaatgccaggccatgcggggttccccgcagtggagccacatgtctgatactgcgcaacagtttgtgctgactcagccatgcacaggaggagtgctaccatttctctcttaagttttgaattaaaaactaaactggcattgcagtgtcttgattttttaaaaatgaaaaaccaagtcagtttcaaaaaccaaatcatttttccctctccccttgaaattctaggttcagcttttgttgtacttactaaagagaagcaattgtcacagagattacaggaaaccccagagattttggatggagggaggcagcctaggaggctgagaggaagggaaatctattatgcaatcaaaatagaccttttatttaatcccgaagcctgactgtggagacagagatagtgtccatgttagattagtcttgtgaaggctgccttaaatttggtctctgtgaacttttgttgactgtcatcatcaacatgtttttcctggaaagaaatgagtgcactgcatgagagattaatctgtagtttacgaacctagtggcccatgagaagcacctgagcaccttgttacaaagattcctaaaccttaccccagaaaacctggctcagaatctcagctagtgggtcccagtcatggttctgttttataagcaccaagggtgatattttaggtagtaagggggagaaagtattattttttcctcacccattgcaaggttcatggctgagacccttataacaaaaagattaacaagagaaaagcataacaaatttgtttatccaaaattttatacaacacaggagccttcagaaagaaagacccaaagacccagggaaaactgtgtttttatggacagtcctgcagaagtatgactggaggacaaaagggtatgatctagtggtatgaaattgggggaaactcaggaaagcctatttgttgtgattctttttttttttttttggagacggagtctcactctgtcgcccaggttggagtgca

SEQ ID NO: 54150 - DNA, 1038 bp, Homo sapiens
agtttgaattatggttacacctttgagggataaagaataaatatataatgttatatcaacaaagtgctgtatatgacatatatgtgcatccaaaaatacagtgaaatacccttagaagaatagaatgaagttactgagacaagccacatgagcagtttagaaattcaaaggagcaagcgattgctgttggagaagtgggtacagcgagagttagttaatatttaatactagctaggtagacttacataggaaagaactgagtccaaatggcatcagcaaattcatgatttactgagtacctcctgtatgtcatatgccataaaaggtcatacagttaagtaagaagttctccagcaactacaaagacatgcaaataagaaactatacatcaggcaaaacaaacatccatagagggaactcattgatgttgggttattttcaggctcggttccagtgggtagttttcacagttgagagggagcaatttggatggattcagatgcagagaaagcagaacaagaaaacaagtagtgatactgttgtcatagaccaggcaacatgaaaaggacatgaattaggatggaaactgtgggattaaaagaaaaaagaagaataaagcctttagattaaaccattagactcagcggtgttttaaattttttggttgatggctgaatgaattaatagcaaccgaggatgtagcacctggaagtttaagcatttgagatttaacatcacaaagccataaaacattaaatatttacttctgttagtgtgctttggctttgacgtttacattatctcataacaattctattaatattagacattatcccaattttaaaggttgagaaaccagggttttaagttgttttgtatcttatttatatcttatcagtgatagaatccatacctttgctttggtgtctgtgcctttgcttatattcatttccaagccaacatagttgtcttgtactacacattatcatggatttatttttaattggggtataatttatactcagtgcaatagatttt

SEQ ID NO: 54151 - DNA, 2096 bp, Homo sapiens
ggccaagaaagtcattttgaattgacttgataattggttttcagaaaaagtcttaatgttaacaatctctgcaattcaaaagggacaactatttctcaattttgcgtaagattctattcaagttagcttagatttggatgatttggtatgatacatatgttggtttcttaaagaataacatctattataattaatctcattatagagaacacagacaacaaagttaatagtatggcaaatcagacagcttcattcttagttatctgctctttggttaatttattgcattcaaatcactatgtaaagggaattttcatgataatttataaattttgaattctaattttctaatcttacccattttgctagtgaactttttattaatttattatggagtgcacccagcatagttttcttaactaagctcatattcttaccaagtttctcaagagaattctttagtaagtaatttttcatttttttgtatttcagattgacgtattttaagatttttttaacttctgaagtctagcaggcctgtaagaacaaaaatcattctgtaggaattaaaaacagaatccagtcttgacaacatatccacaatgtctgatgtatctactagtgtacaatcaaaatttgctagacttgcaaagaaaaaggaaaatatcacctatatgaaaagagagcagttaacagaaactgataaggacatagctccggtattagatttaaaatgcaaggacgtatcagcaattatgaataagtttaaggtcttaatggaaattcaagacctgatgtttgaggagatgagggaaactcttaaaaatgacctaaaagcagttttagggggaaaagctacaatacctgaggtaaagaattcagagaactccagtagtaggacagagtttcagcaaataatcaatttagcattacaaaaaacagggatggtagggaaaatagaaggagaaaactctaaaataggtgatgataatgaaaatttaacctttaaattagaagtaaatgagctgagtggtaaattagacaacactaacgaatacaatagtaatgatggtaagaaattaccccagggtgaatcacgaagttacgaagtcatgggaagtatggaagaaaccttatgcaatatagatgacagagatggaaatcgcaatgtccatttagaatttacagaaagagagagtaggaaggatggagaggatgaatttgtcaaagaaatgagagaggaaagaaaatttcagaaattgaagaataaagaggaggttttaaaagcctccagagaagaaaaagtgttgatggatgaaggagcagtacttaccctggtagccgacctttcatcagcaacactggatattagtaagcaatggagtaatgtcttcaacattctgagagaaaatgattttgaacctaaatttctgtgtgaagttaaattagcatttaaatgtgatggtgaaataaagacattttcagatctgcaaagccttagaaaatttgccagccaaaaatcttctgtgaaagaattactgaaagatgtactcccacaaaaggaagaaataaatcaaggaggaagaaaatatggaattcaagaaaaaagggtaagcatacaaatgtataaatgtataaagcttatgtataaatgtaatagtaggcatggttattttgaaggataaatcaattttttttttcttgagatggagtttcgctcttgtcggccaggtgggagtgcagtggcacgatctcggctcgctacaacctctgcctcccaggttcaagtgattctcctgccttggcctcccaagtagctgggattacaggcatgcaccaccacgcccagataattttgtattttcagtagagacggggtttctccatgttggtcaggctggtctcaaactcccgacctcaggtgatccacctcggctacccaaagtgctgggattacaggcgtgagccactgggcccagccggttaaatcaaattttaaaaaatgattccttaaaagtaaaagcatgatattaaaagtaatgatttaaagggcactttttttttctgtgaaggttttattatgggcagagggcaag

SEQ ID NO: 54152 - DNA, 2032 bp, Homo sapiens
ctcacatacaataagcagacaattgattaaaataggtaattactgaggatcaatcacatacacagcagtaagtgttcagggatctagaaggaagaaagtagacattatgacctcagaatttgtttcaagattacacaagaaatgacaaatatcttgagatgatcatagggagacttgacttgtttggggacctaggccttcaagaacaattaatatttaagcactttttcagatattttctgtcagaattgaagccatattaaaattagtgaaattgaaattttaattctttaaaagacaaatgatttaaacaaataactcttttttttcttctttgtttaactttcaggataaaaccctaatagactcaaagcatagagctggagaaataaccagtgatggcttgagcttcctatttcttaaagaagtaaaagttgctaagccagaggagatgaaaaacttagagactcaagaggaagagttttccgagctagaggagctggatgaagaggcctcagggatggaggatgatgaagatacctcagggctggaggaggaggaggaagagccctcagggctggaggaggaagaagaagaagaggcttcagggttggaggaggatgaggcctcagggctagaggaggaagaggaacagacttcagaacaggactcaacctttcagggtcatactttggtagatgcaaagcatgaagttgagataaccagtgatggcatggaaactactttcattgactctgtagaggattctgaatcagaggaggaagaagaaggaaagagctctgaaacaggaaaggtaaagactacctccctgactgagaaaaaagcctcacgtagacaaaaagaaattccctttagttatttggttggggactctgggaagaaaaagttggtgaaacaccaggtggtgcacaaaacccaggaggaagaggaaacagctgtgcccacaagtcaaggaactggcacaccctgtctgaccttatgtttggcctctccctcaaagtcactagagatgagtcatgatgagcataaaaagcattcacatacaaatttgagtatttcaacaggagtcaccaaacttaagaaaacagaagaaaagaaacacagaactctgcacacagaagaactaacatccaaagaagcagacttaacagaggaaacagaagaaaacttgagaagtagtgtgattaatagcatcagagagataaaagaggagattggaaatttgaaaagttcccattcaggtgtcttggaaattgaaaattcagtagatgatctgagtagcagaatggacatacttgaagaaagaatagacagtctagaagatcaaattgaagaattctctaaggatacaatgcaaatgaccaaacagataattagtaaagaaaggcaaagagatatagaggagagatctagaagttgcaacattcgtttgataggaattccagaaaaggagagttatgagaatagggcagaggacataattaaagaaataattgatgaaaactttgcagaactaaagaaaggttcaagtcttgagattgtcagtgcttgtcgagtacctagtaaaattgatgaaaagagactgactcctagacacatcttggtgaaattttggaattctagtgataaagagaaaataataagggcttctagagagagaagagaaattacctaccaaggaacaagaatcaggttgacagcagacttatcactggacacactggatgctagaagtaaatggagcaatgtcttcaaagttctgctggaaaaaggctttaatcctagaatcctatatccagccaaaatggcatttgattttaggggtaaaacaaaggtatttcttagtattgaagaatttagagattatgttttgcatatgcccaccttgagagaattactggggaataatataccttagcacgccagggtgactacaaacaatatgctttcctcccccagcatgcatccaaaaatcaacaagtaaaacgaaaatacacttctacccagaagg

SEQ ID NO: 54153 - DNA, 1045 bp, Homo sapiens
atgatttaagcagatgactttatgctttcttaacagccacaattcaaagggaacaaaaacctggagaggggaagagagtcatctccctgcccagggacagcacctcttactgggccacatttaaactacccaaagattgactcatcagcaatttaagctgctgagtccctcagtcacacccagacagcaggcactcatccagtgactctaggtcctgtgaatcttagcttcaccccaaagccatttctaagatcattagagggcactgaccttcttgacattcatatgggaacaggggtgggctactggaaaccagagcctccttttccaaacattatgtggtcaaacaaaggatctgtgttaatgagctccctgctgggttgtcctgggggagaaggaggcagcccttaatctggaacaggtttgtacatcaaaggcccctggccctctaaggagtagccactgctgatgcccgaagaggcctgagatgggaggcccgtgggacaggcaggcaggcatgagctttggaagtccctggttagctaggataatcaggcagtggatctgagagctctcctgggtatctctggaggtctgtcacaggtacgagagagctaagtggctgttttctgatggtggaagagttgtgggatctgttgcatttcagacaactcaagcatgattgttagaagcatggactttaaacgctcatgaggccaggtgcagtggcttctgcctgtaatcccaacactttgggaggccaagtcaggacgattgcttgagcccaggagtttgagaccagtcttggcaacaaagtgagaccccctgtattagtctgttttcacactgctgataaagacatacccgagactgggcaatttacaaaagaaagaggtttaattggacttacagttccacacggctgggaaagtctcaatcatggcggaaggcaaggaggagcaaatcacatcttacatggatagcagcaagcaaagagagagcttttgcaggaaaactcccccttataataaccatcagatctcat

SEQ ID NO: 54154 - DNA, 1080 bp, Homo sapiens
ctgcctcttgggttcaagtgagtctcctgcctcagtctcctgagtagctgggactacaggtgctcaccaccatcctcagctatttttttgtattttttagtagagacgaggtttcactatgttggccaggctgatcttgaacacctgaccttgtgatccacccgcctcagcctcccaaagtgctgggattataggcatgagctaccgtgcctggctggtgatgtgtcttttaaagtgatgggagcagccaggcaccacagcttatagctgtaatcccagcagtttgggaggctgagatgggaggatcccttgaggttaggagtttgagcccagcagtgcccttaagcctcacctgaggcctcttggtgctgagcctgccttcagatcaacacaggaagagtgcttgtcactgtggacacccagcttcaacgagtctcatattactgactctgttagtacttacggtgtccttcatggaagaataacctgaagaaagtttctggtatggattggattctttgatttttttttccagtcacccaggcagaaaatgtttggttcaaagtcagaaagacaggcctccccttcccagcatgccaggaaatgcaggtgggcctgtccaccaccccctaccacgaccccccacctaaatgctttggttattggccccagcccctgacaaaagcaggattaaatgggcaacacactcggctcatcttcagaagcattcagaagccaagtcacatcggcacacaccatggtcactccagatttttgaagctcaccctctcctagggcagttgcccagtttggatttttgagctgctgagatgtgaaagaggaggagagtgaaagtcttgtttatcaacttgaaaatgattatataaatatgtgtatatatgtttgttttatttagatataaaccctcagaagaatttcttaatgcatgccgggcactgagccagcatctgccagaaactgggaccaccacagaccagctcttggtactctaatttttcattgtcatgtaaagatttcccttctgtttaagacgttagctctgccagggtgactttggtc

SEQ ID NO: 54155 - DNA, 1045 bp, Homo sapiens
tccgtgcaggaggtaatgggaccaaaaagaaccttcagtttgttggggttaacggtgggtaagcatcgcttgtgaagctcagactgcctttcttgctacctctcctgctattgtcctttgcactctcttttcctagggggaggcatctggttttcattcctcttcaagggaattaatttcaatggccctttaaaactccatctcgggtttgcatgcgtttggcttcttgccagctgtggtggtctgttggaacctctgcttttaatatgtcttggctttggtcttccccagggccaggactccaggtggcttctgggagttttgggggtatacgggcccttagaggaagacatttaacctgaaccataaaactgaaactagtacaaattctgttaattcgtggaacttcaaatttcatccatttaatttttttctttctttaacttcctgcaagccaaacccaagtgtttggggatgaagaaaaacaactagactattggcttagaacatgaacaaaacctcatatattctatagaattgaatgtttgatttagaatattttctaaatcagtcattcaacaaacatttattaaatgccaacagtgtgctcggtcgtggagattaaaaagtcaaataaataaaggtctctgcctttagctcacagataacagaaataaagatgaaatgctgatgtgctgagataagttttgttaggtgaggaagcacaggatgctgtggaagcccaaaccctgaaggctgcccagagagctcagaatccctgctaatttgagtcacaccagaagggaagacattagacgccaacaaggggaaacatcagaaatgatgaactggggccagtcgctgtggctcatgcctgtaatcccagcgctttgggaggctcaggtggacagatcacctgaggccaggatttcaagatcagcctggccaacatggtgaaaccccatctctactaaaaatacaaaattagttgggtgtggggacatgcacctgcagtcccagctactcaggaggctgaggcaggaga

SEQ ID NO: 54156 - DNA, 1087 bp, Homo sapiens
aggctcacccacccaaggagccaccggcctcctcctcctccccgccagtgggtaaataccatcaatataggggcctgagacagggagccatttctccttcacatgataaggcagagggaacaaggttttcaattatattaacatgtttttaaaaagattttagcagctgggagcagtggctcaggcctgtaatcccagcactttgggaggcggaggtgggaagatctcctgagatcaggagttcaagaccagcctggtcaacatggcgaaaacccatctctactaaaaatacaaaaattagccgggcatggtggcaggagcctgtaatcccagctacttgggaggctgaggcaggagaatcacttgaacccaggaggcggaggttgcagtgagccgagatcataccactgcactccagcctgggtgacagagcaagactccatctcaaaaaaaaaaaaaaagaaaaaaagattttagtacttccaggaacccagtggaataaaaactgatgtgtgtgacagtggaggctcgggacctctactcttgcctttgctctaaggttgggtctgactatgggcccactgcctacagctgtatggatagcacagggcacaaagatgccagccagggagggcaaatgagagttgaaagccagcccacactccatttgccaagccttgcgctgcagcaccacatccacccagagggggctgttctcatttgcattgtgcaaaggcagtgtctggggccaagaatggccctgctgcgtggactccagacctcttcctgggcttttgcattcctgtgttcctctctggttcttgcatagtagaggttttctctggcctggttttggaggagcattatattgatatctggtatagttcactgaatattttctctgcgtgcatgtgtgtgtgtacgtgcatgtgtgtgtgtacaggggcaggagattaagtgctgctcacatatggaaatgggcccttcggctgagcagcacttcctgttgtaacagatcaaaccctcttcactgtcgggtaaagtggaaccacgttttgctttgcagggcagcatgcgagtctgcttc

SEQ ID NO: 54157 - DNA, 1096 bp, Homo sapiens
agagcatccagcatgcctgccacgctgctgcacagcagggcttctgaggagccaggcctgagcctggggccccctgcccctcctgccctccctccccttcagggtgaaggcagtgtctgtgatggcacctttgaacctgcagaaggattggcaggtttccacagctccagcccacgagcatcaactcggattccagagctggtccaggagggagctgagcctccagagggtgtggtgaaggttccaaatcacctccctctcccaggccctcctttctcattccagaatgtgcttgtagttctagaggacaaggaagatgaacacaatgccagagaagcagaggtgttgttcacccctggctcccctacgccaagcccgccacctctgccatcacccatccctgagaatgagctcctcctggaagaaatcgagctcaacatcagcgagattccacccccgccacctgtagaggtggacatgagaagcattggcatcagggtaactgaggaaagcctgggccttgccagggtggatccaggcagcatctccagcctgaaacagcaggtctcggccctggagggagagttgtctggaagaaccgaggaactggcacaggtcagaactgctctccagcagcaggaagaggaaatcaaagctagggagcaaagaattcgagagctggagttcactgtagcccaactggaaggacagtttcaccaagagaacgccaaagacactcagggccagacggacgtgatggtgaacactgaccctgtccatggactcttgaccagggagtcgtgtgataagggcattgaagtcaaccttctaggcagcatggagtctgaaagctgggggcaccgaggagaggagaatggcctcctatgggggccagatggtcataaacaagggaatcagagcccagcagaacgtgtgcttctgccccagctgtcactgccacagggacccgagcaggtccttacctcctctgtacatagcttcctctccactgaactcaggattgaagaagcaggcactgaacaggaaggaggccctcagggaggaaccaggggagcaggaggctttctgtggggca

SEQ ID NO: 54158 - DNA, 1054 bp, Homo sapiens
ggatgttactttgtttagtgctgtgtttccccaatacttattcaaacgctaatgagactcaccacttctgtatcctcctttctttcagaaccttcaacaagttttacagactcattggatgaagagtgcctgagacactgagggtcagcgctccaaagatggagaagacagatggtaggcaagctgctttgtagggcctggtttaagataagcacttgggctgggaaagaattgttgccacaaatcctggaaatagcctaggaaaggcctgcaggagatatccctcaaacaggcagtgctggtaggctcaagcatgtatttcagattttgtgtatctccagccctagcctaggaaagaggcacaatatggtaagcctccatttatacctaagtgattctacaagtcatttaatgtctttgatcctcaatcctcacatgtatcagttagctttgctgtgtaacaaacagcccaacaatttagtcacttaaagatgttaattatttctcaaaagattctgtgtgttagcagggccattattctggtttgggctggcatggatgatcttttctgggttcattcacatgtccatgggcttctgggtgacttggctgggagctggatggcttagaatggccacactcacatatctggggtatcagtaatgacttggccacgtgtctctcgtcatccaggaggttggctagggcttgttcacatggtgacagaagagttcaagcacaacacaaggacagactgactccaatgtgcagataatgttccagtctctgcatatgtcatattgctgttgacccactggccgacacaagtcataaggccatcatccagtgtcagcgtggtagaggagtaccccaagggtcagatattattgtggctatctttgcaaacagttgacaacaccttttctataaacaggtattaatactatttcatagggttggtaaagaactaaattacgtaatgcatggaaagttgttgagtaacaactacctagcataatgaatgtctgcatgttcccctcttcctgtccccagg

SEQ ID NO: 54159 - DNA, 1022 bp, Homo sapiens
aaggtcagggattacctgaccaagtcctttaacagctgcgaaacagacacagctgtgctgaaggcacgagctatcagctccggccctgcagccgaaacctggctttctgggaaggagacgagtcctccctgctgtgggctatgcagcaggaggatgcaagggaaggtaatgtgggcacagcgttcctcccgactgttttctcttcttcgtgaagctccagattcagctgctgcaatgcaggcgaaaatgacacacacttgcaaaaaacgtgggaatggagttaatgagattgtgttaatgtgtcatttattgagcaggactcatctctgtttgccaggtcggcaggaggtgagcccgctggagaactcagttggcagaatctttctcagtgcttctcacctcctctggtgtcccggcttcggccctctcaatgtttagaagcagcggtcagatgcctcctgcttcttggcacagggaatatttgcacttgaaaggctggggtcctgggatggggaaagaggaagctctcatcatcttggcatgatcagtccaaggtacaggtgatttttttttttttcttatggaaagagtgctttgtctttgcaagggatcatgcagggattggcagggttgttgtttggtgaactaccttgctaaatacttgactttgtaaggttgaattctccaagaattctcgtggcaatgaggctgagacttgagccaagctgtcttttcaaggaaatccaaggtgctatttattttggcatgcagcctgctctgggatgaaataccacatttttattattgcagaataaaaagaggtttgaagagaacaaaagtacagaaccaggtttgtttcaagactaagtaagggaaggtctctttatatttggatttgaggttagaaatgagcttgaaaatggcatcataaaaggcgtaagtgtggagaggagagggtgcggataaatgctgcaggagttgggcttacctggggaaacccatgttcctgggcactgagggtg

SEQ ID NO: 54160 - DNA, 1024 bp, Homo sapiens
ctgccaaactcaagtcttagttcctaagcgccctggagtgcaagcctttagggcaaagagggagtattttccaggagagggaggaggaccccctgaggcctgggcaaagtcctatctaccaaatagggccagaggaggatcagatgcagccagtgacccggctgaggcatggggagaaagcatcttgagttaaacacgattcccaaggacctgcttgggtaaatcaagcccaggttgcttagagcctctcaaaatgtgacacaggaaagctacactgggaatggaggcagagtccgttctaatactgccttttcaagcccagccttcccacttcactggaccataatgtgacctggggaaagtgagttttggggaatggctcggggatcagaccagactgattcaatcaacaaatgctctgtgccaggcactggtcaacgtagtgaggtacagaagtgaacaaaactggcaccttctggcctcatggagcttgcattccagtggccaacaccaacaggaattaaatcactcacataaatagagaattctccagtgctgagttctttgaaaggactagataccctgaaaacctgataggtccagtagtcggtcagtctgcagaatgacaggagagagtggaatgagccttctaggcagaagtagccgcgtgtgagagggcctaaggtgagtagcagagtgggttagaggaactgaaagcctctgttggctgagttactaccaggggcccaaatgggcagtcctttagttgtgcatcccattgactggtccagtcagtgccttcctttctgaactgtaataatgagcagttggaagtcccctggctagatcatagtgtggggagaaggagagagatagaccaatagcaccttgctggactcactgccccatgtgtgcaccttggtcagacagcccatgcctgctcgtggtgccaagagcagcgagcggttcattccctaatgtccattcagctcacagtgaaccaaagcctctgcccaacatttag

SEQ ID NO: 54161 - DNA, 1060 bp, Homo sapiens
cttgccgccgccgggacgcgagaaggcaggtgcgggctgggcgtaaataggccaactccgcggcgagggcgcccggcgcgggggtgtgggccgaggacgccgccgccagcctcccccgaccgggcagcctggtcgctgctcgtccttccagctttctttccgttcccgagagcggtgaaggatggggagaaagaaacgtttccacgcaggttgccctgtgtcggtaattgcgaaattttaccgcgcattttctttcacttacactttttcaagaagtgtttagaacgccgcgtgtcttaaaccttggcgaagatgtccttgtagatttttgttgaaaaatcggaatcgagtcgtgtcatcttataaagaatttaaaactattgggactgagtgttcacgctgtcaacagataatggtcgattcgtcgtgctttctgcgaaagttgatttagttacaggagaaatattttggatgtaacagccccccagttacaaggaaagccaggagcaagaaatagcaaggaagatactgcacctggcaaaatgttacattctcggtgtgagctttgctttgaggggctaggaggtttggttttttgattaagctgacgatccgctatttcacctgcctaatcattcttcccttctgtgtagtctggttactctgtcggtttgagatccagtttctgtcatccattaaattggctctcgagaaaaaccttttatcagaatcattaatgcttggcgatccctgagaacttagcgcaggttggtttatcattcagaagacagcgcttcctcagaagcattaggtagacaggagagtaagtgaagttggagacagaatggagagatggatcagctttccagtgcttcctgatttgggtctcagaaatggtttcagtgtgctgagttcagtatgaattcctagatcagtgtcagccatgtgaaatgcttattaaggatgaaatttgagtgagtcttgtgtagttcattttattactctgcattttaaatttgaaactcgttgctgaagttttgggctttaagtaattttatgg

SEQ ID NO: 54162 - DNA, 1050 bp, Homo sapiens
gctgggattacaggcgtgagctatcgcttccggcccttgaaataataagtttttactacttatactattttactgtaggtctactaaataggatattttgtaatgcgacccttaatccatagcaggctgattttaaaaattcagtagcttctgttttttgttctttaagaacagtgtggtatgcttcttcatttaagcaataaatattgagtgcttattggcaggcattaggttttcaaatgttaatttctaatttgtaccattcccttggtaaatttgttttcaaaattgatgattttgttgccaaaactgataaccaaaaactaatgaaactttctctgtgattaacagatataattggtgattacaactttcctctataaattaactcttgacactccttgggatttgaagaaaaaaatgcctggtgtcatacctagtgaaagtaatggactttcaagaggtagcccttcaaagaaaaacagactttccttaaagttttttcagaaaaaggaaactaagagagctttggatttcacagattctcaagaaaatgaagaaaaagcttctgaatatagagcatctgaaatgtatgtatcttacatttctgtactttaaaaattctacagtaaagcagcagtgaacttggttgacaactccagtctgacttgatagtctgtagcggcacaaaaaagtacgcttcagtgtacttcttagtcaaatctagcagtttatagtaggaacagcaaaactggtggttccccgtaggaatcacatcgataatgtttaactcatgttaacactgtgctcagccatttagactaacttggagaaatatttgttgactaaaattgtctttctgagtttaaatttgattatttgtagtgcaaaacatctgtgtaggggtaaaaggttttatatatatatatatatatatttgtttggttcagaagacttgacagttataagacattttaaactctagtcatgtaactagtcatacctgttggaggcatatgattgcaaattataaaaataaactttaagtaa

SEQ ID NO: 54163 - DNA, 1534 bp, Homo sapiens
ttaagggaattgttctgtggcttgttatgtgtaataatgtttttaaatgcttttaaaacttttattctgggcatatagcaatttttgagcctgtatttcttaaaatgtcatctgaacaagattcacatacttttcagattatacaacttttgggaaaagactaaatctacagaagtaatattttcaccttgtttctttaagataactacttatcgttctcccttctatatttcatagtgatcaagttgttcctgcagcacagtcttcacctataaactgtgagaagagagaaaacttgttaccatttgtgggactgaataatctcggcaatacttgctatcttaatagtatacttcaggtaaattgacaattttgctatatcataaagctttagtaggcaaagattgatgtagcatttaatgtttttgagttattggaggactttaatgtccatactgtctttgcctttgattgttaataaaccagaataggctaaaataataagttacatgttattaaacttcctttggggtaagagaaaatgatagactaaataaaggtgggatagcaaaattgagtagaccttaagtggaaggtcaaacctttaatttctttctctgattcctggtgctacagtgtgatatatgtcttatcccttggaagtaacgttggcattgtgttgtgtgtccgttggcgctgtgttgtgtgtccttgtaaccttaaagtcttagcaatatctgcccaggtgcagtgctttgtgctaatgagggaagacactgggctactactgatgaagtggagaacaaattttgacacaaaacttaatctcagaattttagggtaatacatgttaaaagtgctctatagaaagcatgatgttgttttaatgattttacgtgtattgtttgttcagtaaacacttaagacaatctcactttttataggtattatatttttgtcccggttttaaatctggagtaaagcacttatttaatattatttcaaggaagaaagaagctctaaaggatgaagccaatcaaaaagacaaggtaagaaaaataaagaacagaaaataatgtaaaaagcaaaagtaaattaatggaaatttacttgcctggaaatgaagaggactgggggggtggatgacaaagattatttctctgttagcgagctattgtcaggcaattatttttcattctttcaaggtggctaactagataattcccttttacaatgtttgctcctgtaatctgtgtatcaaacttttgttacttgtatactatatattactgtatactataatcacaatatgttatacccatgtacaacttatttacccattgtgttttcaaattgagttaaaatttaaatacagtgtatttaaagaaatctttaacttccataattaaaaaaccattgtaattcacataaatagtaattcataattcctcttaaaattacaaaaaagaccagacgtggtggctcatgcctgtaatcccagcagtttgggaggtcaaggtgggtggtggattgc

SEQ ID NO: 54164 - DNA, 3456 bp, Homo sapiens
atagtacctcatagggttattgtgaagataatgtatacataggagataaaaaacattttgactaaaacctggtgtatggtaagcattatctaagtattagttattaatatatttagaagaggatcaaagtattataatgaaaatagggtacaatttactcttacttttagttacagataagaaattccaaattagtgctgaataaatgtcttgacatttaaaaaatgaaataatttatgattttccttacatgaattaatttctatataggctttatgtactgtatcttcaaaactagaatagatgaaatggaaatttttatttatagggaactcaaccctatgtatgaaggatatctacagcatgatgcacaggaagtattacaatgtattttgggaaacattcaagaaacatgccaactcctaaaaaaagaagaagtaaaaaatgtggcagaattacctactaaggtagaagaaatacctcatccgaaagaggaaatgaatggtattaacagcatagagatggacagtatgaggcattctgaagactttaaagagaaactcccaaaaggaaatgggaaaagaaaaagtgacactgaatttggtaacatgaagaaaaaagttaaattatccaaggaacaccagtcattggaagagaaccagagacaaactagatcaaaaagaaaagctacaagtgatacattagagagtcctcctaaaataattcccaagtatatttctgaaaatgagagtccaagaccctcacaaaagaaatcaagagttaaaataaattggttaaagtctgcaactaagcaacccagcattctttctaaattttgtagtctgggaaaaataacaacaaaccaaggagtcaaaggacaatctaaagaaaatgaatgtgatcctgaagaggacttggggaagtgtgaaagtgataacacaactaatggttgtggacttgaatctccaggaaatactgttacacctgtaaatgttaatgaagttaaacccataaacaaaggttagtataattcttagactttgataggtagaagcattagcagctacagaattagaattttctcttcctagatacatgtacaatataatctctggctaaaattgtttcaagagaaggaaatttaacactgaatgtgaactatggtgttttaagtgctatgcttagattagtgtgtgtgtatatattgtatgcatatatatgtgtgtgtgtgtgtgtgtaatgtcattaaagtaattttaatttatagcttataaagtagggaagttcggccaggtatgttagctcgcacctgcaatcccagtactttgggaggcctaggcgggcagatcacctgcggtcaggagttcaagagcagcctggtcaacatggtgaaaccccgtctctactaaaaatgcaaaaattagccaggcatggtggcgcacgcctgtagtcccagctacttgagaggctgaggcaggagaatcgcctgaacccgggaggtggaggttgcagtgagccaatattatgccactgcactccagcctggggcgacagagcaagactccgtctcaaaaaaaaacaaataataataaagtagggaagttcagtatattttaatgtacatttaagagtacatttccctttatgcagtgtttgacataaactgatgaaggacattgcatttagtgaaattttaaaagtaaagactaagtacagtcatgtgttgcttaacaacagggatatgttctgagaaatgtgctgtttcattgtgtgaatttcacggtgtacttacacaactagatgctagagcgtactacacaactagcctatatggtatagaccagggtatctaatcttttggcttccttgggccacactggaagaagtgtcttgggccacaccacacagaatacactaatgatagctgatgagccaaaaaaaaaaaaatcaaaaaagtctcataatgttttaagaaagtttatgaatttgttacgggctacaggcaagctttgcatggcctattgctcctaggcaacaaacctgtatagcatataactactgaatactgtaggcaactgtagcacaatggtatttgtgtatctaagacgtatctaagcatagatatgtaaacataggtacagtaaaaataatcatagactactgtcacatgcggtccattgttaaataattgaaacgttggtaggtggtgcataactgtaagttacacgatacttgaactagatttttacctagttttgtccagatctacagatatcagggaaaatgtgtaatattgatatagtgaatagttttaccaaaaatgtcatccttattctgggtttattctatggggaggtgtctgtaggaagggagttacaatacaactgacttttttttattttttattttttttatttttttggagacagagttttgctcttgttgcccaggctagagtgcaatggcatgatcttggctcactgcaacctccacctcccgggttcaagcgatcctcctgcctcagcctcccgagtagctgtgattacaggcatgcaccaccacacccggctaattttgtatttttactggagacagggtttctccatgttggtcaggctggtcttgaactccgacctcaggtgatctgcccgcctcagcctcccaaagtcttgggattacaggcttaagccactgtgcccggcctacaactgacttcttttaaagacagtaatttcatagtcagttttatctttacagggaccttaaatttcattaatagggtacctctaataagctaataatgctaataagctgatctatgaaaatggaactgttattcatgatatactttatttaaatggaaaattggttatttggactataatgagaaactaatctgtatagacttacattttcctattttcattttaggtgaagaacaaattggttttgagctagtggagaaattatttcaaggtcagctggtattaaggacgcgttgcttggaatgtgaaagtttaacagaaagaagagaagattttcaagacatcagtgtgccagtacaagaagatgagctttccaaagtagaggagagttctgaaagtaagcaaaattggagtcttgtgtggaccatgatggaatatttataattctttaacaacacaaagtttaatagtagctggtgtaattagggaggggaaaaaagctagcttttagtgtctaatgtaacctttctgcttatctggcttcacttataaatggttagcatttgggaaattgtgacatcttgattttgatgtagagtgtgttagaatggaaaactgaaatgctttaataagtgtacttttgggaacctgagtctttcagagctactgagggttttttttaatttttttgagatggagtcttgctcggttgcccaggctggagtgcagtggcgtgatctcggctcactgc

SEQ ID NO: 54165 - DNA, 1347 bp, Homo sapiens
acactaaaagctagcttttttcccctccctaattacaccagctactattaaactttgtgttgttaaagaattataaatattccatcatggtccacacaagactccaattttgcttactttcagaactctcctctactttggaaagctcatcttcttgtactggcacactgatgtcttgaaaatcttctcttctttctgttaaactttcacattccaagcaacgcgtccttaataccagctgaccttgaaataatttctccactagctcaaaaccaatttgttcttcacctaaaatgaaaataggaaaatgtaagtctatacagattagtttctcattatagtccaaataaccaattttccatttaaataaagtatatcatgaataacagttccattttcatagatcagcttattagcattattagcttattagaggtaccctattaatgaaatttaaggtccctgtaaagataaaactgactatgaaattactgtctttaaaagaagtcagttgtaggccgggcacagtggcttaagcctgtaatcccaagactttgggaggctgaggcgggcagatcacctgaggtcggagttcaagaccagcctgaccaacatggagaaaccctgtctccagtaaaaatacaaaattagccgggtgtggtggtgcatgcctgtaatcacagctactcgggaggctgaggcaggaggatcgcttgaacccgggaggtggaggttgcagtgagccaagatcatgccattgcactctagcctgggcaacaagagcaaaactctgtctccaaaaaaataaaaaaaataaaaaataaaaaaaagtcagttgtattgtaactcccttcctacagacacctccccatagaataaacccagaataaggatgacatttttggtaaaactattcactatatcaatattacacattttccctgatatctgtagatctggacaaaactaggtaaaaatctagttcaagtatcgtgtaacttacagttatgcaccacctaccaacgtttcaattatttaacaatggaccgcatgtgacagtagtctatgattatttttactgtacctatgtttacatatctatgcttagatacgtcttagatacacaaataccattgtgctacagttgcctacagtattcagtagttatatgctatacaggtttgttgcctaggagcaataggccatgcaaagcttgcctgtagcccgtaacaaattcataaactttcttaaaacattatgagacttttttgatttttttttttttggctcatcagctatcattagtgtattctgtgtggtgtggcccaagacacttcttccagtgtg

SEQ ID NO: 54166 - DNA, 2218 bp, Homo sapiens
tgcacaaaattaggaaaataaaggaaaaaatacaattatttcttccacagaaatgcctgaatattagcagttatttatttttttgtttctgcatatattataaatattattcaaagttggggtcttgttttgattctgcttttctgatatatgaacactggatattaagggttcattcagatttttacttggtttcagattggggtataacattttgaatttaaaatagaactgcaggaaaccttttctttttttcctcccaaaggtttgattgttatggtggtggactttccaagatcaacactcctttattgacacctcttaaattgtcactagaagaatggagcacaaagccaactaacgacagctatggattatttgcggttgtgatgcatagtggcattacaattagtagtgggcattacactgcttctgttaaagtcactgaccttaacagtttagaactagataaaggaaattttgtggttgaccaaatgtgtgaaataggtaagccagaaccattgaatgaggaggaagcaaggggtgtggttgagaattataatgatgaagaagtgtcaattagagttggtggaaatacacagccaagtaaagttttgaacaaaaaaaatgtagaagctattggacttcttggaggacaaaagagcaaagcagattatgagctatacaacaaagcctctaatcctgataaggttgctagtacagcgtttgctgaaaatagaaattctgagactagtgatactactgggacccatgaatctgatagaaacaaggaatccagtgaccaaacaggcattaatattagtggatttgagaacaaaatttcatacgtagtgcaaagcttaaaggagtatgaggggaagtggttgctttttgatgattctgaagtcaaagttactgaagagaaggactttctgaattctctttccccttctacatctcctacttctactccttacttgctattttataagaaattatagagtgagtgtattttccttgtgtatatattaaacacacccatacaaacattggtaaagttgattacatcaaagaatctttagcttatcttttgaagctactggatattattggtctctctaggtttttatataaatagtgaaatttgaattactgaaaaccatgttaatttttagaactcattttcctcagtagagactagtgatgcattagcttctgggaacaaacttgtatcggttcttaattaaattatccaaaacggaggcatttaaacacttggatttacaccagtcttttgtgtttgctttttaaaataaagtgctcgtatttgtattctccatattttggagtaattatctacatgatgtttatagttcctgtggtttttcacccaagaagcagaatctcattcagtacatttagttttataagagtcatgaagctaaatccttgggctatgtcagaggcacaaagtctagaatgtgtgtattcacaatggtgtatgtacattttgtgccttgattcacttagaagtgtctcagaaaacctggacagttcgcttctacacaagaattttatatgtatttatgaagatgattctgtaccctagtatatctttttgggcatggactaatttgtatctgtttaactcatattctgcacgatctgtatatagtacatcaaacttagaggtgtgaccttaaatttaactttttttaaaaactgggaggtcaataaaatttaaactgcttaactatgtatatgaatatttgaattttttacttgtatatttttataaatacagctgagttttcttaaagcgaataagtgtgtgtatatatatatgtatatatatgagagaataagcatgcataattacctttattactgaatactttctgacagtgcaggagtttttcaaagaggagaaattgtgcttagtccagccaagctgtcatacttaaaagaggtttataatgaaatctgttgcatctaattgtcctttaaagtagacatgatttaatggaatccaaaactggaaaagttaagatgatgctttgggcacacataaaaacttggttaaaatttcattttaaactagtatactgaagtggtaagtgatgaatgatttcatgacttgttaatggacattcttggtactaagtttttcctagaaatgattctaaatatgtaaatgctattggggtaacactttaat

SEQ ID NO: 54167 - DNA, 1092 bp, Homo sapiens
gtatggtagggttgtgggagaggggaataagtatatgctattaaagagtagtaaattctacacagattacttattattgtcaaccgcttttctgtttttttgttttctctctctctctctttctgacacaggctcctgctctgtcacccaggctggagtgcagtgtacaatcatagtttactacagcctccaactcctagctcaagcaattctcctgtctcagcctcccgagtagctggcactacaggcgcacaacctacacttggctaatttttaaatttttttcgtagagatggggtcttgctttgttttccaggctggtctcaaactcctggcctcaaatgattcttctgcctcagcctcccaaagtgctgagattgcaggtgtaagccactgtgcctagcctattttctcttttcaatggttccttaaggcccttatgtcatactgtggtattggacagtctcaatttgaagatctttacgcagaaagccttgaataccttttagtaaaatctttaaagcagagtcgcagtttattatgatgtctgaagagctttgggtcactaggtatttcagacagaaaaacctgggcaacttccaaaggcccctgcaaaataagaaaataagaagtgtgtttttttgttatctctaaaatcacagagacagaatttactcaaatgatttttcttagctctgagatggctgcatttaagcttaatgcatatatgcctatgcctatattaaaactccacagactatttcagtattttctaatttcattctacattcttatctagtggaattaacttcttatgagtttattcttcaaagaaacagaataggaactcaaggactgactactatgttcattaatgtattttgctttgtatttttcacattctttaatgtatcctggatgtaaaagttgtcaagctactacatctgccaatccgctgattatcagagttgattttgctaaaacaggttccctcagtattccaaaggtattccggacattgtgttaaagaagataatcttttgtaagctacatcatttggagacaaaaccttaaaatcgtgcatgtttctaa

SEQ ID NO: 54168 - DNA, 1044 bp, Homo sapiens
ttagatggccgtgcccatggggaacttcatgaacaattcaaaaggaagaccattctgactacgtctcatgcctttccttatattaaaacaagggtcaatgtcactcataaagaagaggtaagtccattaatgggcaaacagcattagtgaagcaaatacattcaagccatgtaacaacaactcagatgtaccagaagatatgtaccatcccttataccataacatattagaactttacccatttttgagtcctcaattttttacttcttttctaagaccctaattcacccccagctttttctttaaaaggttgattttttttttttcatttaggaatccaagtttggaattttattgttacatgaaagtttacaattgatcttttttttttctaatttcagttgattatacataaagttcattaaatagttttcagtcagtacactgatttaacagatgctcttttactcagatcatcttaacaccaattgaagttgctattgaggacatgcagaaaaagacacaggagttggcatttgcaacacatcaggatcccgcagaccccaaaatgcttcagatggtactccagggatctgtaggcaccacagtgaatcaggttagtgctttttgctagcactgtgtgatttaagctgtaaatacgatttgggataatttcagatcagaaataattgttaagtcagatgaaaaggatctgccttctctactgcctgtatttttctacctatgcgatcttataaattctattaagaaggaattgattcacttaaaataatatttccttaaaaagcttgtacaaaagaatgtgatctttaaaacaaggactcattttcagagctatgtacatatttgcgaacctctactatgttagattctccctgatgttaccttccccagatctcctttacaataagttgtgaggattaaataagtgatatggaatcatttttttaatttgaaaaatatattgacacaagaaattattgttcttttgtcatatgcagattagaagccatccccattagt

SEQ ID NO: 54169 - DNA, 1546 bp, Homo sapiens
atccccagtgataacatagtcatgtgatacttttttttccattcaaagatcacaacatatttctttaaagaacaccactactctagtaaagtatatcttacattttctggaaaggctagagaagatctctactagatccctaaggaaatatagattaccctaacttttgagattgacagatgcaaattgactatatcttaactctcattattggactgaatggacatgaatgtgagccagtattttggtttttatatgttcagaaatactggccatagttctggctcagtggcttctgttggatttttattttcttcaatccacactaaagctgagtgacataaagtaacacatccaagcagttaaaagatagaacaggattagaaacagcaaattataatgagcagggcgatcaactctgaaagagggaaatgaaataaaaattcaagaatagagcatagtgaaaacaagtacttttgggtagtcaagtgggtaaatgtgacactctaaaggagaaagtaaaacaggtcaggcacagtggcccacacctgtaatcccagcactttgggaggccaaggtgggaggatcgctttagttcaggagtttaagaccagcatggtcaacatggcaaaacccatgtctctaccaaaaagaaacaaaaaaaattgctggggcatgtacctgtggtctcagctacttggaaggctgaggtgggaggattgcttgagccgggaaggtagagtttgcagtgcgctgagaccatgctactatgctccagcctgggcaacaaaacgagaccctgtctcaaaaaaaaaaaaaagaaatcagaacattgtaggtataaaacatccatgagcctttacctcagaaaggtaaagttagatatgaagaaagttaaggaaaacatagtaaatgggaagaatcttagtatctctaagaggagatactttctggtagttagtgactccctgatgactggtatagacccataactgagcacctgataatatatcccataccactgattttttttctgccccttatgctacttttgagaagaaaaagaaagatatgaaagcccagcatggtggctgacacctgtaatcccaacattatgggaggccaaggcgcgatcctcgcttgaggcctgaagtttgaaaccagtctgggcaacactgagatctcatctctacccaaaaaaaaaaaaaaaaaaaaaaaaaaaaaaaaaaaaattagctgggcatggtggtgtgtacctgtggtcctagctacttgggagactgaagcaggaagatcacttaggcccaagagtttgaggttacagtgaactatgatcaccactgcactctagcctgggtgacatagtaagaccctgtcttttaaaaagaaagaaaaatatggacagcaaatatttactatgtagatgatattagatgtggtttctttttttcggactgggacataaaatggtcagatatgtccttctgataagaaatggagtacaatatatcttggaagaatgtgttttgtcagtaagccaccaacc

SEQ ID NO: 54170 - DNA, 1679 bp, Homo sapiens
catttaaattatatttattctttttcccccttttcttattcaaatcctgcttagctccttcttgaagccatcctagatcttatgttatcatttttttatcttttaaaactttacttatacatacagggaggcctttatttatacatagggaggcctgtaacatccataactaaattgcaagtacatctctattttatttgtttatttttaaattgcagaccgtttctgtaacggaatccaaagagagcattcttggtggagtgctaaaagtgctactacacagcatggcctgtaaccaaagtgcagtttatctacaacactgttttgctacacagagagccttggtttcaaaggtaggttattttgtacctgcagtgttgtcagactttgttttttttattaacattgtctaagatcatttgacacattcattggttaatatatgtagtaatatattaatgaatatgtgtagttaaaatttaaataataacctaagacccttaattcttctttgcctctctactgctgcctgccttttagaatttttcatttattcgaatcacctttaaccagttctggtttgaaaaacagtaacttggatgtggagaagggcctgaaattaatagccaatcttaaatatggggcttctcttgttttctcttcacttggttctgtttttataaaaaactcaatttataaagaattcaatatataagcaattcaacccactgaaattattttatgatgaatggaaaagaaggtatgtgtttgttcaactgctttaaatgtttacttcttatatttgttttcccttagaaatatgtatattcttaaattttgaaggtagctatttcattttaatcatcctagaggatggaatgcagagatgttgatgaaaataacttacgtattattttgtaataaatatagaattcatatatgttgattactaagtgttttatgcacattctgatagaagcttcacaacaatcccttgtagatatattattaggcctattttgtggatgagaaaacttgtccaaggtcccactactagttagtaagtggaataatgagcattcgaacccagtttgactctgtgtctcacactattaaccattagctaatattgtcctaaccattcttttaatttctgggctatactaacaagtctccagttcaggttatattaacatatctcagaaacttttactgtaaaaattcagtggtggtttgttttgttgttttacagtttcctgaactcttatttgaagaagagacagagcagtgtgctgatttatgcctcaggcttctccgacactgtagcagtagcatcggtacaatacggtcacacgccagtgcctccctttacctactaatgaggcaaaactttgagattgggaatgtaagtattttatcatgaaaattctctgtattcataatgaaatataacttctgctgatagttattaaatcagtttttgggagagcatggagttttttgtatatttttagtctaatcataggctatcttgatatttctcattctgtgtatatcttacaaaaatccaaatctccaattgtgtgcatatcatgtgtacgtatgtatgtatgtatgtatattaatacagacttagaatataaatgtacattgagcagttttaaattttaattgtccct

SEQ ID NO: 54171 - DNA, 1005 bp, Homo sapiens
tgcatgtatagctatagctacatatagataaactgggtttatgcagtatcctctgtataccacagcaatgtttcaggctttttatctataatcattgtgttgggtcctaacagttgccctctgggcagtattctgtagtaacaatgtgatagctgacatttatttagttttttctgtgttaaacattgtcctaagcactttacaaatattaactcatttgatccttctaagaaactcatgacattgaaactgtcagtatcctcatcttgtagatgagaacacttaggcacaaagatgttaaataactgcccataatgacgcagctagtatgtagaagagccaggattcaaatcagttagcaagatctttcagatgttttagtaaatatatctctcacctattccttccattccttttctactaccactactctgccaggttcatatttccacgctattacaatggccacctacttcataactcactctgtattcttcccaccatccattctgtacattgttgtgagaattttcctttaaaagtattttatggctgggcacggtggctcatgcctgtaatcccagcaatttgggaagctgaggtgggtggatcacttcaagtcaggagttcaagaccagcctagtcaacatggcaaaaccctgactctactctattttatttatttatttatttatttatttatttatttttgaggtggagtttcgctcttgttgcccaggctggagtgcagtggcgcaatctcagctcaccacaacctccgcctcccgggttcaagtgattctcctgcctcagcctcccaagtagctgggattacaggcatgcgccaccacgcccagctgattgtgtatttttagtagagacagggtttctccacgttggttaggctggtctcgaactcctgacctcaggtgatccacccacctcagcctcccaaagtgtggggattacaggcgtgagccactgcacccagccaaccctgactct

SEQ ID NO: 54172 - DNA, 1063 bp, Homo sapiens
tccattaggtaggggatttttctttccgaaaaagggaataatttatttttggtaaatgtgaaaagatctgatttgatgaaataacaattacagcattttaaaatttaccttgtttagcttcaaaatgtaactataagtagtcttagtttctttatattcaaatacactaataaggagttaatgtaaaaatattcagatttacttctaagtgaatttgtatagcatttccttttcttcaattcttattttacacattttttacatttttatacatttattttaaaatgagaaatgttttataggaatggaatgcatgcaaatatatgacaaaggtaagaaattgaacaaaatttattcaataccatgacttactgtttgttttaaagatgttagctaatctctgtggccttactgctttttcttctttgtcttcttctttttaaatagactgtttggattgcataagaaagtcatcaatatggtacacaatttactctccagtcacgactcagacccgcggtactctgaccctcagataaaggctcgagtggccatgttgtatctacctctgattggtattatcatggaaactgtacctcagctgtatgattttacaggtacctagtataattaaggcaaatattaaaggcaaagctcaatgtttaaaagtgttagaaaatatctcaaggatgaagatcttattttaggaaaataagaattgtgtgctgatcaaagtaaactataaatattaaactatattgccagaaaacctttgaccgtgtgagagaattccgtataagattgctttaagtagttcttatgatgaatttaaaaataatgattttatagcaattctgtacctacattttaggaaatgtttgtgtgaacatgcagtatacatctgaaaaaatacaagaaaacttgacagatgtttaccacctcagttttgacttgattcatatatataaaattgaaatgaatattcacttgaatatcaggaattgtgtttattgctaacaccaggttaataagttgaagtggtattacttcttcaaaactagaa

SEQ ID NO: 54173 - DNA, 1034 bp, Homo sapiens
gatgaagcataattgaacagagaaagaagtcaaactgcagtggaggcatgacaaagccctgcttaactctcttgtatccagaaaccccaaaggaaaccagatgaaaattgatgggtttttcagtgggtggcacttgacttcaacagctagtaggttctctgtagatgaaaaagtgttattgtagcagttaatatgtatgtcctcttttataaattgagatgaagagattttgtggttttagtatcagagaagcctatattttcctttgtccagtgaaatactcgttctactgtattattcctgaggcaaggaggctactttttttaagctcttaatttctaaagtgaaagttagttaatcttaatacttcttaattttgttttcaatatatttaattcctgaataggattctgtaggtgatatctcatatgcgtgatttaaaaaacaaaatttaaacttcagctagaaagactagaaaacatcaaagagtacccacaacttttcattttatctctgtaaaaaaatcttctggatcagcctatttttccacaaactcttcagtctggctagcatgcccttaatctaatggatgaggctggcctttttctttctttccctgtcctctgccaaagatgtagctacacaaagacagattaatcataaatatggttgctaacacccttaaggaaacatatttgtttatatctaattccttactgaacatctctttcagccaggaaatgctcatagaatttcttctgttatcttgttgcccactttctcagctagctatgtaattttcagattctttcagataacagagacatcactcttttttgaaaggctaagaagagttttatattcttattaggagaagatttcgccatagagaaatgtgaaatctattgttgcactaagaaaccccacatgagtcctgaatatggactgtatcttggagaatgctataatattttgaagtattaagatgttaaaaaaaaaactcagacaacaaaatgatggtaattttccagaga

SEQ ID NO: 54174 - DNA, 1047 bp, Homo sapiens
tatctttgggattgactatttttaggatttagtgaattcaaatttgatcatcaaattttagtaccaaaaaaatgtatcaactcttaattctgtttctgtaactgcttctgttttgtgttttaaatctccagggaaaggaagatgagttagaaaaattgtcactcttagtaagatatgttgatttgcttcccttatgcacagttttgttagtcctttttcatattaatatacactactttgcaaatgctttgtatgcatatccattataaggcagaaatcttctgctatttttttttaaaaagaccttacctgaaaacttgaaaattaatggctcatagcaaagtttaaattttaaaatgtatttcctaaattgtaccagcaaagttcatgcatgtatttgcgtatgtttaaaaatgtacttaagatacaaacaaaatattactgtactataagtttttagtctagtttctgtttgcaggtacaatttaggaggctatcttctacctgtccttttaaaattacattttactgcaagataacatgtaattttttcagctgttccacataccactgtcttacatacataaatagccgtttcgttaatgggtgtcttcagtgcatcattgaatggttcacgtgccttattttgcttattctcattatatcttcgtttgtatttgcattatgatttggtttatgttatcagcagatttgactttgataataactttggatttacttctggatagctttttcacgaggagctggctttgcagtgggttgtttgcagtggcagcgttcgggaatcagctttgcaacaagcctggttcttttttgaattaatggtgagcaaaaactgagcatgttctttaatattttttctcttagtgaacaattttatgctagctcatttgttaccttagaaatctttttctgttgcacatcttaacgcttttccatgtgcctctaagacaaaattacatgtgttacatctctaaataaacactgtggacactcaacacagtttaggtggaattaagagtgagg

SEQ ID NO: 54175 - DNA, 1074 bp, Homo sapiens
tctattatatgcttagggtttagatcgctccaattcctgggttaacactggtggtccaaaagctgccccatggggatccaaccccagtccaagtgcagaatcaacacaggtggtgtttatattagaggtttctttattggctgctgatgtttccctttagaacattactttttagtatatactatgatttcagtggcttgctttttttaatcattaaaaagtgtgtatttttgtttacttagcacattttccaactactatgcatgagtaccaccaattgcaccagtaatgttcttctttcctatttcctatctctgtcttctttcttccttacacaccctatcaatatttcagtgcctgctgcttatgcaattgatggcttttataacagtttcttctttaggggtagcacgtctttaatagcaatttttaaattttttacgtggaggaaaaaacccaacagttttctatttgcttttggtttaaagtgtaactattgtatcattttcatttaacatttactatcttgttattttcttcctaatcaccgaatagaaagactggcaataagttgaaattgaatgtgaacagtatatgatccccgtgctataagactcaataccagaagcaaaaatccattttaatttgtactgtgttgcaaagtatgaaatttgttataccttagctgaattaggttttgcttacttaagactagttgcttgatagctaatactgcatgatatctcaaaatatacttctcatctgtgttggctttggagggaaatcctgttcctaaataaaatttttaattccatttctaatattgtaaatgatttatatttgatttagtatatgacaaacctgaatagtagtttttgataataatgaaaaagtgaaagaaattattctaaactttttcttttctttaatataaagttactgatttcttttttggtctgagaccagttgagaagtatgtttttactttttatatatttttactagatatgtgcatgtatatagatcacacagataaaagtttcattctttgcaacactctgaatattatataat

SEQ ID NO: 54176 - DNA, 1002 bp, Homo sapiens
ttttatcaaatgccagtggaattttgcactgatacgtttctttctcatatatcatctttttttaatttctcaaacactgagagcttactgtgtgctaggcactatgctgaggacttgtggatatgaagtaaaatctttgtaatataacacaagtgttgatgtcacatcaaatacagtatgggccttgctcaaggatcttatctatatgtaagggaagaaatcaatagtgttactgggatttggcaaaaaaaacctcacacttacatacacgtgggcacacatttggttaatctgttccatgtttgttggaaattggtaaacataaagttattatattaaatataagtgatgagtttgcttaaatgtgggctgtttgatataactcttagctttataacacctgaattatggaatttacttgctttgccaaataactggccacaagttttctttaaatagttagctttgactagtgtaattacaactgttcagaacatcagtattgtgtatataaatataattcatagcacaaagagatttttttattctcatattagcgattatcatatattgtagttttaaaggaaattattaaacagtaagttaagtaaatttaagagtacagcaaagttcttattctttttgtggaaattcatgagagaaaagaggacagttataattttgcaaaaatcaaatgctcatgttttgttatttttgtaacatgagtagtgactgtaaaaattgaatatggtaggaagaactttacacttttatacaaaaaagacataattttgggcttggacataattttggagactaatgagaactttattttaacttctatgaaaaacataagccttttggtttgcttttattcgaaatattgtaatgggattctgagaaggcagatattttattttaaacaaatctgattgcataatcttactagtattttgatattgtctaatttactttgatagaaagcattttaagaaaaatatg

SEQ ID NO: 54177 - DNA, 1408 bp, Homo sapiens
ttgttagtgtcaccagcacccttcatgttgctaaatccagtggttaattttcagaactcggcttacttttacctaccagcagcttttcacacagttaaatttttttttcctctgtgatttattcatttatttggcttccagggtactacattctgttagtttccctcttggtttactgattataccttttcagtctttgtggattcttccttttctgatctctttatctggatgtgtttcaggcctctgtccttatttctcttctcttgtcttctctctacactctaccttggtcagcttatcaggttccatggctttaaataccacgtaaatgttatgctaatgattcccaaaattatatttccagtacagatctctctctggagttctaaacttaactgctttttctaaatagttttgttcagatttggatatatatgaaaggtagagacacttctttccatctccattgctaccatcttggtctgagcaaccatcatctctcccagaactaatgtactagttttaaagatggtttccctacttctaccctgtgctctgttcacaacatagcaaccagaatgttgctttaaagacttaagacatggctgggcgtggtggctcacgcccataatcccagcagtttgggaggctgaggcaggtggatcacctgaggttgggagttcgagaccagcctgaccaacatggagaaaccccgtctctactaaaaatagaaaaattagctgggtgtggtggtgcatgcctgtaatcctagctactcaggaggctgaggcaggagaatcacttgaacccaggaggcggaggttgtggtgagccaagatcgcgccattgcactccagcctgggcaacagagctagactctgtctcaaaaaaaaaaaaaaagacttaagacacacacaaaaattaagtcattatgtcattcctctgagcacaatcttctaatggcttattctctcagtcctttaagtctttactctgaaggccgccttctcagtgaggttgactctgattatcttatttaaatgtataaccagtggctgtgtcctcagccttctaatcctgttattctgttttttgtctttttttttttgtctgacatttactaccttttaatgtagcatatgaattaattattcttatgttgatttttttttagtgtttatctccctttaacagagtgtaagcttcattgtggcagggaatatttgttccaaggcacctgtaatgtctaacttattcaaggtgctcagtagatatttatccaatgaagaaatgttagtatgagttaacaccgcaggactagatcacttgtttaagaacagaattatgcttttgtttgccctcttactattgggattaattatgtatttaaaggtctgcagagatt

SEQ ID NO: 54178 - DNA, 1059 bp, Homo sapiens
tctcctgtttttcttgtagtacctcaacttagtttatctactcctttgcaatctctaatcttgatcctccaacctttttactgtgtctcacccccttaatgttctctcttcttccttagccagcttaatgtctgtgggcaatcattataattattcccatcaggctgggtatggtggctcatgcctgtaatcccagcacttcaggaggctgaggcgggcagatcacctgaggtcaggagttcaaaaccagcctggccaacatggtgaaacctcgcctctactaaaaatacaaaaattagccaggcacggcggcagatgcctgtaatcccagctactctggaggctgagataggtgaatcgcttgaacctgggaggcggaggttgcagggagccgagatctcaccattgcactccagcctgtgagacaagagtgaaactctatttcagaaaaaaaaaaaaaaaattactcccattataatcaaacctcagttcccttatctttcccaaaccttgaaaccatagttaaacccaattgactgcctgtgccatgtcagcatctgtgcagctaaacatgtcttgagaaataccatggtgattgatctcatttgaaataaacctcaagagagcccttaatgctattgggcaattatactgtatttctgtatctccatcactttcctgttctcccaggaaatgatttaattccttctttcattacctcaaacctcctaacacctctcccctcattccttttctcattttatctcccatttcattgagacaactgaaaccatcagaagaagactttgataaacttttaccatgctatctagctacctattaccatctactatctactgcctaatactcttctgtattaaaaatgaatagatgagctatttatttttctaaattaatttctttcactcaagctctcatctggtctcacctgctcaagatctacactccaccagtttttccatatctcttccacatcatcagtttctccctaaatactgaatcattcccattcacatataggcatgctattgtttttct

SEQ ID NO: 54179 - DNA, 1105 bp, Homo sapiens
agcaattcatgatctttgtggaattttctaaagtggcagagattttttttcagatcctttcctgactaattttctttaattatgtgctatttcatatacaactctaggtcctgggggtttgggaggatcagtgcattatgccacaatggctagatctgcggtgagacctgcaagccttaatttaaatcgttctcgaagccttagtaatagcaatccagatatatctgggactcccacgtcaccagatgatgaagttcgatcaatcatcgggagtaaggtaaactgaagacatgcatctgtaaatttggtttttgttttgtgaacaaacgagaaatatccagttgttgtaatgtattctgaattttgagatgtatgtaagttaggaattaggaaggaattgtacatttctgttctatcagtaaacactgttttatttttctgttaaatatgcttgctcttacaaactactccactaaaaattctaaaatttgtctggaatcactagttgcatataacttattgttgtcagtctgatactccatcatgtgaaaaatggctagattgatttcatatagaattaaaataaatctgtgactgatatgtagaagagagatgtcatcattgattcaagtcatgagatcctcttctccaaaaaatatccagaagagtgattaaacaattttccatttttgtaaactagaaagagtgatactcagagttatttataagggatactgcagagtaacctgagtactatggcagctgcgaaaagagaacgcttcccccaccccccacacacatttatttccatgtttaagaaaagaactcaggttttttattcctgttttcattattgattatattttattgtaatacaggtagtacgtagcattatttatatactgtatatttatatactgcataggtcttcagtagaataagtttgatttttggattttcagaaactttcctaaagaaaagaagctatagacagcatttccttaaggttcttttaaaatgtctcttaatttttgtaagatttacattaagactcatttagcataattctatttatttcttttaggtttgatagattataaactca

SEQ ID NO: 54180 - DNA, 1056 bp, Homo sapiens
cagaccagcctggtcaacatagcaagaccccatctcttaaaaaaaaaaaaaaaagaaaagaaaaagaaaaacatgagaactttcatgctttatacatttcttctgtgaggtagaaggcaagatttgctaaggaggaattaaggaggaccttagttttgagaaggattcttgtaacttggagtagctactgtaagaaaaaggaaaaggattaaccagaaacacaggtaggatcgcttaacttcgctcaggtttctgtctctggtctctttcccctctagttcagtatatatagattaatcttcctaaatgaccattttatctgattattctacttttgggaaaacttaattggcctcattatctcttcataatttcctgtcttggttaaataaattatagaatctaagatcctattgctcaaagtggctgttcagtttacccatttatgcagtgtgcaatttatcacaattctccaatttttgtaaaattattgttacatactgacttgagtgaccgagtaggtattgcttagcctgggatttaaaatgctgtagtcttacctcaacctgtttttctagccccctctttttttttttttccttctaatcattttacagattcactcattccaatcaagttgcttattcactattttcttattatactgttattattttcaataatctcttttattattgatatttttaatttttttaaacaaaagtaatatatgcccttatatgctatttagatttttggagtaatctttaaaatgaaaaattgcttcttaaggtattacacacgatgtattttcttttttcttatgtactttgtattgttttactaaataacatatccgttgagcattgttttcttttttgactaatcaaacccatataattttcatcttaaattagtaaaatgagttctcattttgttcagaaaagtatttttggctcagctaatgcaacgtgtaattaaaagtcaatatcaaatagtaatcatctttatacacttactgtgtagtcactatacttaaagtatgcaaagatgaca

SEQ ID NO: 54181 - DNA, 1085 bp, Homo sapiens
acactgataggcactgttcagggcatggttcctgactttaacatctcacagactagttaagaaaacaggcaaacaggtaaatcatgttgtattttacaggatgtataatctacctactctacattttcattcatctgctatcctccgcttaatgtagctcttctttccttcattttcttagtctctgttttctctttttattttctataattctggaaggaaaggtgttcttcattcccatcgtttttcaaggtttactccttatttttttaccaacagctttcacccaaatcctgcagggaagttgaacttgaaagaaatttcagctaaccagatataatttttatgtttgactagtgacacaaaggagaggagtattcaattatttgagtttttttaggggagatttataagtagaaataattcctgggttgagtatttaaagatgaataggagtctgacaggtaaatattattccaaggagattaaacagcatgaaacagcatgtacatagtacacagacataatgaactcagaatgaatttgggggaggaattttaagtaattagttataaattagaggattgattagaggtaatatggagagtgggagatgaagttgggtcttccacactttaggaaattgggactttttctgtagggaataaatagcctttgaagaatctggtcttaattagagaagtaacatgaccaagtttgactagaaaaagatggctatgctatgtagagatgacttaaaagtgggaaaacctacaggcagggagacaaattaggagtcttgcagaatttcatacaaaaaatgatgagttcctgttaaaacatgggtgacaatgggatggagaagagagaatggattgtgagatcacagagtgtacagttacagaaattatagaagaaggttttaaggaaaaaaaggttagcattgttctttgttatagattatataagtaaaataatagtaataacagtaattgcaaacacttgcatagcatttactgtgtaccaggaataatgctatgtgctttatttatatttgagagccaagattcaaactggttccagag

SEQ ID NO: 54182 - DNA, 1066 bp, Homo sapiens
tgagggaagtttttttttaatcttcatctttaaaaccaccacaaaagtaatgcaatgtttagccaaaggtgggcaattaaacctacttattgaatgaataactctcttagatatttaattttcaacaaaagtcttcacattacatgatttttaggacagaagtgaactaaaacactgaataccaagaaatatattgataaggaagatagtaatttctaaaaattatctcattttattgctaggtctttatttttgttctcagcattagtggaattaaaatgactatgccatctgacattgttggtaaactcaactttctcataattcagtggtgatttggtgggattggtaataagatgcctagtgtcttattttttttcactgaagtcatcaagttctcagatggctaacattagctatctttcttgtttattatcaaaagccttgttctacttaatattcctgtgttcaagtctatacctgttaatgtttttgaggcttatttgagatagaaggatatttgacctattaacatctaaggaagaaaacctgattggtgggacagacctcgctttaaagatagttggagcaatatggtttggttgcatttttgttgaatgtaattctgagagatactcactgaatatggaaggttgggatgctaaggttttatccctttttgttatgaatagcagccgtgcttttctataaaagtgccctcttgggattattctcaatgaatattgagaagaaagtgtcattggtttggtcaaacaagatatttgatgtattcttaagagtctggaagcgcttctaaactgaggcaaatgcagtttgtgggcgtttcctgattttactggttttttttgtttgttttagtggtcaattctagtccatatttaggatttaggtaactttttttatttcttcaacagtgagatggttgatataagacagtctatagagcaaaacttgatcttttttttttttttttttttttcggtctcactctgtcacctaggccagagtgcagtggcaggatcatagctcactgcagccttgaact

SEQ ID NO: 54183 - DNA, 1030 bp, Homo sapiens
taccaaagacaggctttatgaaattatttccttctatattatatcctactgtagtaggatactaacactttttgcaaaatttgtgcaatttctcacaaataacactgacagagtagaggtaatggtcacgtagtcttggtttctagtatattgtctcttggtataaatatctgtataattcttatagtaatttgaacagcattattgattataattaaagtaatttgcctaattataaactgcagaagcatttcaacgtgggaaaatgcattgaaagtagtaattttataaaggattttctgcctgccttttaatacttcctgtctgagtacacactgctaaaagcagaatctgatctttgcttgaacttgtgcctatttaaatagaaccctgatcaaatataaccagtaatgtaaaaactaaaaaattttatgccaaggaaaataaacttgtaagcaaatgtagggcctaatttaaggattcctagttcctaggaaccaatataaaaatttcttagctacagagaattttaggacatttaagagcctaaattgtttaaattccaagcaaagcaaagtcctttatcctacacgaggttgtgtaatcttatggagatatgtctttcaaataaaatacaaggtattttggctcttttttacatagtatctctaattttttcctttttaactacaatagtttgttttttaattaatgttgtataggaagatcctattgtatgttttatactgagaacatatctcagttagaaccactcacctatcaagtgctcaattgtctcattagaccgtctttttggacagtgtagatccagaggttaagtgagctttgaaggaataattttatctatcttactgttttgtgtgttcactattaacatgttaagttttatacatatatattttttagttgaacagccgtatctttggacatgtaaagattttttctttatttatttttgagacggagttttgctctttgttgcccaggctggagtgcagcgtcgtgatct

SEQ ID NO: 54184 - DNA, 1419 bp, Homo sapiens
atacagtatatattttaacaaataaggtatagtgatacctcatgttaaagtcaatgtgacttagtagtcatctccatttgtttaaagacagcgaacttattttaatacagtatttaattctgcttcattaggtttcataaataaatcatatcaaacatttactccaaattattttgtagcaaaatgaagcatcagtttaaaaatttgtattacagatttttacacatactctgtgctgacgatttttagttttgaaattaatactacaacatttaagaactgtacaattaccagtcctctgtatttagtcaagtttagagttttaacaagagtactagttttttaaactgggaaagttgtgatattagctcatatgatgccttttaaaataaaagtctctaaattttttatttagaaaagttatttaataagttcacctattgattataatctagattgtgaccatctaaaattgattcccacatcacaaaatttaaaacaaatagtattataagaattttgattgagaaatgtaaacggtattctttaaggttatgtgattgtatgtttaatcttaaatagacagtgactttaagataaaaaaaatctatttctcaagctttctcttaaggatttaataccagattattagaccacattaacttggaatgaggttaatgtttaaattattgccttttaaatttgcctcagttcattcaaagctttctgaatctgttggatggatcaacattttggttgattttatagagtataaccttccattttgagacttccaagataatcctcttctcctctctggcttagattttgctcttggtttgttatatttaccatttaggttgttttctccacactcatcatgccaccaccagcctcctaaaggagatagatatgcaatttaatgggtacagactcgtatgtagttactgttactgtatttccccgtaagtttatcttcctttcttataaatattacagtgttttagatgcatgtatcccagttttaaataatctgtataagtcccaattttaaataatctgtataaataatctatacactaccaaaaaatagaaaatctgaggaagattagaggtaaaatacctgattgaactagaatgaacactttcattatagttaagaggttttcgtctagagagaaaacgcttatttgggattcggatttttaaaagttgtcattgcagataatagctaataatgtgggaagatactttgaagatatgaaaataaagtattggtatcagaaaaagatacctgaataaccctctggacagttgaagtgtccttttgctttgtgatcccaagtagaaaacaccaaatctttgttttccgggattgcattggggacattgccagtaatcgcaactagatgtagcgta

SEQ ID NO: 54185 - DNA, 1054 bp, Homo sapiens
gtgtacttggtttcagtaaaattcatactggttcaaaataaactcttgatatagaaatttttcagtaattcactaaaatcaggtaaactgactatctttgatgcttttggagcttttagtactatttttcagaatttttattattatgatttgccatattctgtgtattttctcactaagtgccatttgaggtgtatggacagtaattctgtgtggtttcagatgaacaagctgccatttactagaatatttgtggaagaattgagatatctgcaccttaaaatacggcacaatctagccaatcagaaatgtgtggggagacattctagacaaatggaatacattaggaaggcatagaggagatgtttaaaagtagatcgttttgatgagagcagaaggtttgtgttgtgggaaaaaatggctgaagaggtaatttggggccaggtgatagagacttttgaaaacctggaaggattttggattttgttccaaaggcctatactcttctaattggagtatacattcttgtgagggcacaactatatgggacgtgcaagttcacaggataaacatgacacatcttctaggaacatcactttttaaatacttggggggaaataaatatttttatatgaagattttttttgagacagagtctcactctgttgcccaggctagaatgcagtgttaggatcatggttcgctgcaggcttgacttcccaggctccagcgattctcctgcctcagcctcccaagtagttgggattacaggcacctgccaccacacccagctaatttttgtattttttgtagaggtggagttttgccgtgttgcacaggctgatcttggactcctgggttcaagcagtactcccgccccggcctcccaaaatacttggattacaggtgtgagccactgcaggcatgaagatagatttataaagtataaaacacaattcatatgcaattttaaagtaaaattctaagatttaagctaagatcccaataagattctgaaagaaatttgtgcatatagtaagttattttatcctgt

SEQ ID NO: 54186 - DNA, 1031 bp, Homo sapiens
catttatttgcatagggttaactgaagaggggcctgatcttttcaaattctctacaggggtagatgaagatacacaaatatatggtagtttctaacaatcagaaaatgaatgacttgtttcttactgcaccatacaagtggggtttacatcaaattcttgctttatcaaggaagtacttaccctatcacagtattttagaaaaagtactagtgtaattgttaacattaagtaaaccaaataaagatctttctcaatggtgaaaaaaatcttttattggatatttgaaatcatctgaaagttaggtaatagattgtatgcaatgttacttgtgttccaaatttttacttgatcaccactgttgtatttgagttgtaatagatcaaggtacattaattgagcaaatgcttatgtgttttactgacatccagtttttaagaggtatgtccacagaacacatggtattcttggcaggattgttagagttagccgcatttccagtaatggccttagttgtaatcacctgttgaatgtttgtatctttgtttttctacttagtatttttgaaagactatatctagcaaacatggtgcgttactaagaatgtaagaatgaatacaatggttcagacctggtaactgtcagggtgagaaacaaaaggattttggtctgttaggaatatgcccatacatctcttaataaattttagtaaatctattttctctgatctaatctgaatatagttttaaacttttattatggaaaattataaaagtaaagggaacaaattaatacacctacacctaaaattaatacacctaaaagtaaagagaacagattaattttttttttaattttattttactttaagttccgggatacaagtgcagaatgtgcagatttgttacataggtatacgtgtgccatggtggtttgctgtacctatcaatctgttatctaggttttaagccccacgtgtattagctatttgtcctaatgctctccctcccttgcacccaaccccctgactgtc

SEQ ID NO: 54187 - DNA, 1142 bp, Homo sapiens
tgttttgccaaatagtttctttaacaaaatatgattataaagttgaccattcccttttaaaaataatctccaaattacataaagaaataataatttttgtgttacttgaaatggtacgactatatgtgtagcttatgaaaaattgggagatgggctctcgtaacctgtattttgtaaccatgtttcatttttaggaattacagtaagttctcacttaaaattgttaataggttcttggaaactaaggttttaagctaaatgacatgtgacgaaaccattttttttccagtcaatgttataacaaaacaatgctgaacaaaatgatattattcaagaacctgctgcacatggtccttaaagtccttctcttaaagtcacagtttccaagaacattatccagtgtcacagtagctatgacattaggtgaggacttactgtatttaaaattgaggaatgatttttccttcctttaacatgggtataataaaagtacctatatcttagaaatctatggggattaaatatgtgtaaagtgcatgtcacaaagtaatgcagtacatattaaatgctcaatagaagttgttattgtttttggctttattagattacatttactcatgcactatacaacttgagagagattggtttgaaaagcatgagggtactaggcatctggggtataattggataagagaattattttaaaagggagattatcagagtcaatattggcctgctttgtattattagaccatcaatgtccatgggaccttaaaaccaaatcattaaaagttgtttattctatttgatgctgttagaaaaacttggccttatggacagcttatatgtttaggaactgatagtttattttaaaaaaaaacaaaaaccttaagcatatctagaaacctagcataggtagaaataattttggaatgacgaaaagggatgtatgacaacctcagcagctgacagctaatatacaaatatcatcaataatttacagaaagttccataaatatttgctaactgaatggttatgctggatcatggtgatgataatcttttagctcatttggattctttttgccttctcaggaatgtttcaggataagacataatttgtgataatacataccagtggt

SEQ ID NO: 54188 - DNA, 1034 bp, Homo sapiens
atttctcccgcacctgaaaatccccattattgcctaactccggagctgcttcaagtgaagctttaccctgacagtagagttagacctaccagagaaatcttagagtttcccgcaagggatgtttatgttccaaacactacttacaggtaagagattttaatttggagaattctgatagaagatactgtatattctaaaatattaaagtataactagaataaactctccaaaaatcttaagtagttttgttacttaactctatctcttaccgcacaattttattaatagttttcacgtattaaggctttctgtgtgtcaggtataatgttaattaccttacatgctttatcttttttagtcttatttaatcctcattatttgaggtggattttacttttattttagaggtgagtaaaccaagggttagagaggttaaacattttgctgagcatcacaccttagtgtgatggtgatgggatttgattcctgggcctttaggttaaaacatttgaactcctaattactatgttttctcaaatgtttttagtagcagaatctagcattacacaagaatcaaatttatgtgcctgcattatgttctaataaatcaacaatatttgttgagtatatcctatctagagaatacttgacatgacgttgtcagatataacttttcagactgaacattacataactctgggggtgccatttgcatgtactccttatgaatgatataccctttatttgtgaatgccgagaccagaacttgacatgtctgttgggatattcagtagggcagctcaggtataagattctaaaacagaaatttggatttcatcctagacttccccatcctagtatatttttaccaccatttaccaagttcctgaggacaaaatttttggaattattatgatttctctcctttcctacccctcacatttattcagccaacaagttacataggctctacttccaaaatatatcctgatctgtacttcttactacttccaccttttaaaaattctagtctg

SEQ ID NO: 54189 - DNA, 1045 bp, Homo sapiens
ggctggtctcgaactcctgacctcatgatccaccctcctcggcttcccagctgggattacaggtgtgagccaccatgtccagcctgtatcctatttccaaattgttaatagtgtaacttttcttaaacattggttgtttatgaattttctttatgagaatgagtatgtggcctacatgtcttccccacacaagtatttctggcctaaactaccatattcataatatgtgaaatagaactttcaggccctaggagtgcattttgtgctaaaatgaggtcagtgttatttttagaggtgaatgtatggatccaagacattctctatcaaagatattttactctttgcaaacctgttcccttcacttttaaccatgagtcaaatctgtatttttccaatgccagtcatgattcttaatgataatgaaaattagcttagtagatgacacccaggttaaaaaagaaaagaaaacacgagtagaatagaaaaaatagtgcactgcatgtagtaaggttaaatattgctttagggagtcgttccccccctcccccttttgtatgagtgtacacatgtgtatatgtatatactagattttgatgtaaaatggattctgtgtcatgaatcaagatcagaaaattttgaaagtctttgttgtaagtgactaggtgactagaaccatataagaatggggagaaaatttgtattagcgtaacaaactggagtagtacatgttttggagtggattaagggaaaatgctagtaattccttcaaaattccattttctgagatgttattctgagtaagaagaggaaatcctggcttactgatatctcataacttgagagggcaagaattgagggtagacctcaattgaatggaccttgaatagacagatagcaatctacttgaagtccccttcactgttacatatcagtagtattcatgggcatctgctctgagaaactcacaggaaaaaaagccagtgataaatgtctcaaatggtattggtctttttattatggacagtagtaaaagagagtctagaga

SEQ ID NO: 54190 - DNA, 1046 bp, Homo sapiens
tctggttttggtatcagggtaatactggcctcatagaatgagttgtgaagtgttccttccatttttttggaagggtttttgaaggattggtattctttgaaagtttggaagaattcaccagtgaacctgtcatggcctggtcttttctttgtggtaagttttttcattactaactcgatctctttacttgttttaggtctattcacattttctttcatcttgagtcagttttaatataaatactttgaatctttctagaaatttgtccatttcatcaaagttatctagttggtatctaatctaagtgttggcctacagttgttcatagtattgctgtatattcctttattccttttactctgtaaagtctgtaaatgatatctcttctttcattcctgattttagtaatttgagtctttttttttttggttcatcattttagctaaagatttgtcgggtttatctttttgaacaaacagtttttggtttaattgatttttctgtatggtttttatagtttctattttccttatttccactctgcagttgcctcttgtagccttctgctggtttcggattttttttctcttcttttgtagtttgtagtttgttgaagtctgaggttatattactgatttgagatagttctttttaaaatagacattaatagctgtaaatcctcccccgagcactgctttagcaatgctttggtatgttgttcttgcattttcatacatcttaaatacttcctaatttctattattccttctttttccattagctattttttaaatgggctattatacttacatacatttgtgaattccccaaattttcttctgttattgatttatagtttaattcttctgttgttggagaacatttttatatgattttaatctctttgaatgtattgtatgttgttttatggcttagtatatagactgttttagagaatattttctaagtgcttgacaagaatgtatattctgctcttgcttagtgtactttagtgtagtgtaaatgtccattaggtctagtttgtt

SEQ ID NO: 54191 - DNA, 1050 bp, Homo sapiens
taactcatggttgttatatgttagggactatttcaaatgtgctcagctacttccatcttttatagagtaacaaaatttaacaaattataactagaatattttgtagttaccagttgctgactagaccatggttatacttcctaaaacaatacttggaatacataatacatgtttggtacttactctcttctccccagaataacataatcacaaatagaaatttcaaagacctgctctgtacgtacatttgtagaatgtgttgagtttgttcactggttaagatattgcactaatacttcatctctgtaaggtacagatttttttctcatctctgctgagaattgagacttctcatccttttcctttatgtagtatgaaatagcctttaactgatttctttcaagtataatcatataatgtataaagttctgttttgcagaataaagaaaaactggagaaactgaagagtcaagcagatcagttttgccaaagacttgggaaatatcgcatgccttttgcttggactgcaatccatttaatgaatattgttagcagtgctgggagtttggaaagagattctacagaagtagaaatcagtactggaggtaagagtgtttcatacaaaacatttctaaatgtttacttttttcttttttttttgagatggagtttcgctctatggcctaggctggagggcagtggcacgatcttggctcactgcaacctttgccaccggggttcaagcaattctcctgcctcagcctcctgagtagctgagattacagatgtgcgccaccacgcctggctaatttttgtatttttagtagagatggggtttcaccattttggccaaactggtctcgaactcctgacctcaagtgatctgcctgcctcggcctcccaaaatgctgggattatagatgtgagccaccatgcccggcctcttttttcttatataagcttgtttcatttgtagactctgcaatgtaatattgcataaaaaggattttcttttttctttttttttgcctttttctcatttaacaccat

SEQ ID NO: 54192 - DNA, 1047 bp, Homo sapiens
tttacatatttttttcatcttgatattctttaacacaatattggacatacacagtaggtgctacctaatttttcttgaactctttattagaattctccagtgaaacagaactaataggaattatatatatatcttagatctgttttgattattgtagtttataaatacattttcatatcaggaagtatgagactttcaactttcttcttttttccctaaatttgttttgattattcagggtctcttgaatttccctatgaattctaggatgggtttttctatttctgcaaaaaaaaaaaaaaaaaacattgagattttgataaggattgcattaagcttatagattgctttgggtagttttgacatcttaatgatatcaaatcttttcagtccatgaacacaggatttcttttcatttatttgtgcctaatttaacttctctcagcaatgttttatagtcttcagtgtatatagatcctttactttcttggttaagtttatttgtaagtatcttactctttttgatggtattataaatgaaatttttttttaaatttcctttttcgattcctcattgctagtatatagattttgtatcctgtaactttgttgaattcatttattagttctaacagttttttgtgtggcatctttaaagttttctacataaaagatcatagcatttgcgagataattttacttcttcctttccaattcagatgctttacgtatttttcttgtttagttctcaggcttgggcttccattactatgcctaataggtgaggctaatgtgggcattcttgtcttgttcatgatgttagaggaaaagctttcagtctttaaccattgagtatgatgttaactgtgggcttttcatatatggcctttattatggtagtttctttgcattactactttgttgagcgtttctgccatgaaagagtactgaattttgtctaatgtttgttctacagcaattgagatgtcatatatttttttctgtcattctgttaatgtgttatattgattttcgtatattgaacca

SEQ ID NO: 54193 - DNA, 1049 bp, Homo sapiens
aaatccttgtaaatgtccctttattaaagtctcaccctaatgtaaatatgttgtgtattttctacaaggtcctcgattctcttttaataccatgcaatgtggagcagggttattacaatgtcagcactattgacttttttgtctagatggttctttgttgtcagggactgtcctgtacagcgtaggatgttcagtcatatctctgacttctaactgctaagtgacagtaatactcctgtagtttcgataaccaaaaatgtatgtaggtattgccaaatgttcccttgggggcaaaattgtccttcattgagaacctctactctagagttttagttaacctcacattatatattatttcattcaacaaatatttactagatgtttactgtatgtaagtcattgttcttagaaatgagttagacatctcaattaagtatacaattttgccgtattcatataatgggaattactatgccagcattaaaaaagatggtaagaataatatttataacgtgaaaatttgtccacaaaatgttaagttaaaaaagcagactacaaattatgtatactgtgacactgtttaaaaaaatttgtttggcaagtgcatttatgcataaagtctagatggattaggcattaaactgttaattatgattctttggatgctcctgttttcctctgaatattcatgtgttttctaagatttttgcattgaatatattatttataatctgaaaaagaaaacattaggcttttatttttaaaacttatttaaaaatgaacatatctacatatataagtgaccatgttagaaagtgattagtgcctcagaatggacataatatgtcattaggcttttaggtagtttgagtttatttgtagctggataaattaattaggattaactagagaagataaggttgatttagactctgaacgatatgcatagaagagtgtatttcaagaagaagttttaatataggcaaaggcacaggtgtagaaaactgccaagtattgtgataatttagttttggaatcaatttctctcc

SEQ ID NO: 54194 - DNA, 1038 bp, Homo sapiens
ggaaactcatactctactccttagctgggttaaaggaacattgaatataaattttctttaacctaaattgctagaatagattcttattacataaagaaataatgcagaaaacacttggcttattacataatgatgcccaaaaagtgaaaaaattcctaagtttgatagttgatatttatttaactttttttctttaatagatatcataaattgggaacaggatttaatcccaatacattagataaacagaaagaaaggcaaaaaggtttgccaaaacaagtttttgaatctgatgaagctccagatggcaacagctaccaggatgatcaagtaatacttttattcttaaataactataagaagttatttaaaaatagttgtcaatttattaattaatatatttatatttaatgttttgcatgacaggatgaccttaaaagacgttcaatgtcaatagatgataccccaaggggtagctgggcctgtagtatctttgacttgaaaaattcacttcctgatgctttgcttcccaatttacttgatcgaactccaaatgaagaaatagaccgtcagaatgatgaccaaaggaaatcaaaccgtcacaaagaactttttgctttgcatccatcaccagatgaggtatagatgtttgcatataaagaagcaaatgattattaaaattgatcttttgggattatgattgatatatagtattacaaaatgtagaggataaagcaactgaaacagctgtaatttttataaatgaatacattttatactagtgaatttactattcttaatgagtaagttataatcaaatgacttctgtctgtggataaataggtcattcttctctatgttctattgtgaagactaaaagtgttagattagtaaagtaagttctgaaaaagataaagagttggaatatgataagcatattcattttggtgttgcttttcaatttgtaggaagaaccaatagaacggcttagtgttcctgatatacccaaagaacattttggtcaaagacttcttgtaa

SEQ ID NO: 54195 - DNA, 1035 bp, Homo sapiens
acaaaagaaatttattctctcacagtgctagaggccaaaagtctgaaatcagtatcactggactaaaataaggttttggcagggctgtgctttcttcagatttctcctggagtatcagttctttgtctcttccaaattctgatggctttggcattccttgacttgtgatcacatcatctctatcttcaaggccaggatattcaaatctctctctttttcatctttatacaaattttttctctctgtgtatagcctaatctccctctgtctcctcatgaggatatatgtgattgcatttagaaaccacctggataatccagcataatactcccgttttaagatccttaattacatctgcaaagactgttttattttttatttttttccatataaggtgacatgtacagggcccatgtgttaggatgtggagaatttttggagggacattttttagcctaccccagtctgattatatgtttttactaggataatcaacaaaaacaagaaataaagtaagagcactgtttagaaacgtagcaacttacttttttttttaatatccaaagatataaaaaagcaaaaataatccttccagtgagtactttgtaaactataaagtagaataaaactgttaattcttactagtgtttttatgtgagagttctgggcaaagtatcagcaaggacattaaagagagtatgacccaaaacatcaaggagtacaagaagggtaacactttgtgttttctttagtgcatctggttgaatatctgtgaaaattttagaaagaactagattaaaagcttttatttaaaaaaatgttatttgccttaagttttaaaattattacattcacctcttgttttctacccatctcttatcccaactttttacaaaggtgccccttaccgaagcagtagatccagtggatttggaagattacctcattactcatcctttggctgtggattctgggcctttacgggatttgattgaatttcctccagatgatattgaagttgtttatagtcctcgg

SEQ ID NO: 54196 - DNA, 1372 bp, Homo sapiens
cacaacaatgttgctttacatcaatgccattgctttgtatggccaactttttcatttttaccacaatctggtggatgcacaatgccatctcattgtaagttttaattttcattttattactaatgaggttgagctctgttttgtatgtttattgatgatttgaatttcttcttatgtaaattgcttatttaaatattttgctgttatccccctcctccattgttttttccctttgggttttttaggaattgattttgtgtgagtactttacatacagtctgtgtattagttgtttattgattatatgtgtagcaaataccttttcccaccctgtggcttgtttttcatagttttaatggaatcttatgaaagctgtatgttctcagttttaatgcagtttaacttaccagtcttttttaatggttattggtttatgggtcgtaagaaatattttattaccctgagatattaagatattcatccatattatcatgaatttgtagttaccccctttttatttaggtttatattccaccttgtcttgatatgtgtatggtgtgaaattttaatttttttctaaatggattgtcctttccccattaatctgccctgccgcctctattgtagattaaaaaaattaattttaatatttgtgggtacatagtatgcatatgtatttatggggtacataagatattttgatacaggcatcaatgtgtaagaatcacatcagggtaaatggggtatctatcatgtcaagcatttatcttgtgtaacaatccaattcttttagttatttttaaaatgtacattgaaattatctgttgtagatgatatatccttatttgtgggtctttttctgggatctctgttttgttccattggtctggttatacagtattttttttacaaattataaataatcttaggtataatcagtcttggcatttggtagagtaactccttccacctttaaaaaaaaatcttgactgctcttagccctttgaatttccacgtaaattttagaatctaccaaagacaaaacaaaactccctgaacccaaaactcatagaatttgattgggattgcattgaatctatatgttaattcaggggagaaatgacatccttataatattgagtttccaatccatgatccatagtgtatttctccatttatttaggtcttctttatgttgtacaatgaaattttataatttgctctgtcaggttcttgcatatcttttgttagatttattcctgggtatataacaattttgtatccagctataccttgctaaactcttgtttattctgaatgtacttgtgaattcctttatattttctgtgtagacaaccatatgatctggaaa

SEQ ID NO: 54197 - DNA, 1027 bp, Homo sapiens
aataaaaattaaatgacagaggactctaatatttgtagaatttctttgtggagtatacttatgtatgagacagtagacatttttgttttaataaaatcatatttgtgtgaattatgatgtcccaagaaaagaagcattcatattaaattacctttttttgttttggggcagttgtagttctgtggctctgagtctttttagtttgctgacatttctttaaaaattttgggccggatgcagtggctcaggcctgtaatcccagcagtttgggaggccgaggcaggaggatcgcttgaggccaggagttcaagaccagcctgggcaacatagcgagtcccccccaccccatctctgcaaaaaaattagccaggtgtggtgttgcacctgtcgtcctagctgctttcgaggcagaggcttttttttttctttctttccagcgttctagcactttttttttcctgaaggggcaaaatagcaagtgtttaagagcatgggctctactctcagaccccgacatgggttcaaatcctgattggtattttctagcttgggactttggccaagttgttgggccaaatttccgtttcctcgtctggcaaatgagaataataataggacccagctcatagtgttgttgtgaacattaagtggcataatttgtgtaatgtgcgtaggatagtacagggcctatactacctgtcatcaaacacttgtagtaattagtttctcccagggagttatgatgacaggaaattttttttttttgtaaaataattaggtcttacttctgatgatgatgtcattaaaaaatgttattactggccgggcgcggtggctcacgcctgtaatcccagcactttgggaggccgaggcgggtggatcatgaggtcaggagatcgagaccatcctggctaacaaggtgaaaccccgtctctactaaaaaaaaaaaatacaaaaaattagccgggcgcggtggcgggcgcctgtagtcccagctactcgggaggctgaggcaggagaatggcgt

SEQ ID NO: 54198 - DNA, 1072 bp, Homo sapiens
cccacatctaagggcttttgaggttggaggtgtagaataaattcttacatatgatgactatattcatatatgagaaccttcagcggtcaactcagcatcactgcttattgagtttatatttcttgtgatttctttggcttaccttttcgttttgtattggttatttacccacatggggctcactgctaccctatagttacagaagaatacctcgtcttacatctttttatatccgaattacttaggagttttcttatgttttcctgctcggaccatatgtccccggtgggtttttggcaatgattttgtgtcagttgatggcagaaagagacaagggaatgatcttcttgcttgcttgtgacttgtaattagattatgagccattgagaatacccagagggagtggaaaggctttgaaaggtaaagtctatgtattttctgagtttcaaattgataaagcttcttctttgaacaggaagagtttctatttagtccaataatctgaggctatattgaattaccagttcattcgctataaaatttttagaaccacatgtcaaaaagtggcccatctaaagaattgtataatttagcaaaaagtcattaaaagccatttaattaatgctctttttctttaaaataggattcaagtatttggaaaaatgtatttatggtgattggttatgaagtatttctagatgttttgatggttctggtgaacagcatcgtattctgttcactaatgttttataaaaaggcagaaattttctggctttctggggaaccacgtaactcaaatgagtttgcagctcgttttctattccaattattgcactaaagaggttcttatactaagattatcattcttttttaagctatcaagtatgatctatacatgtcagtaaaatataaatattaatactggtacaatgttaaattgggattattcctaattaatgcacaaaatgctgaaatggtttcagccatgcttaagatttggggcgaaatatatttcagaataaatttactcatataattttttattgaaaaaaatgatacggtagccattact

SEQ ID NO: 54199 - DNA, 1077 bp, Homo sapiens
tggctagccagttatcctagtggtatttttaacttactaagacatttctggtgatgccagagatgagatagctggctgtccattgcggggtggaggataaatttgggtaaaaatatttctgaaaatcgcttttatataaaatttaatacatattcattatgtttttctcagtttacaattctgatgtaattgataaacagagtgcttccatgacttctgataatgcagatgacaaagctgttattattctagttcctgttagacttggtggagaaagaaccaacaccgactacttagaatttgtgaaggtatgaaataagtgctgaacttttttagggcaatactagctaatatgaaaaatatagaaggtttgcaatttttttctgttaaatgagtagtgatgattttgtagttgtacgttgtacgttgtaaagtttgacattagagattttaaattttggtattataagaccaatgtgagttgaagagcacagtgttctataacaaaatgaaaagccttttaatctttgtagctaatcagggagacacagatgcagcaataatcataacctgtaatatagttacagtttcattattcttatttgtaattttaagtatatatctttattcataaaactagcattaaactacatcacattaattattgaaaaaactctctattactgctatgttatctcataatatgtttcctgtgacaccatgatgtcaataagagatgagattatttctatagctagaaataatgaagatatgaagatagtatttggaggaattccaactttgtttttttcatcttaaccagttaaaaatcggttctttcttggagcacattgtttggtttcttgcttcaaaagaacctgtgtagttatggtatcttgttttgggcaccaagacattcacatatgataaaataccttggaaatagtttctgattaaggcagaagtttttagtttattttcatagtttcaataaaattcttcattttttagtagtctctttttgcagcaatagttggaattcttctttaaatggagtgttatgggatatagtaatgt

SEQ ID NO: 54200 - DNA, 1188 bp, Homo sapiens
ccacttgcctcttgactaaatctgtattaattttttttggcagggtattttaagcctggaatattgtgtgggtattattggtggcaaacctaaacagtcatattactttgctggatttcaaggttagtgatttagtaaaatatatttcttcattgttttcttttaaaagtcagaaagttaatatgagatcatctggaaacaggatgattaacagagcaaaacgagtaccttatacattcatcagtcctactatagccactcatttgtcatttggtccacaacataattagattctgtaaaatatatgtttaatttctgttactgcataaacaaggcataatttattggttgcgctaaacttcagaaaacatcactgccacattctggcagttgctgtttacatatttactttttaccagttttagtggtgcaagtagatgataaaatgacaagcaatatgttcttcctgtcaagataaagaagtgcaatacatttttcatatgcaaactgtagaatataattgtgtgtttgtgaaagcaattttatcaccaaaaattaaatgacagtctcatcactttataaaaattctgcttatacaagcatatttgattatgcaaaagttaatctatcctgtgcaaacctatgtttcagtcaatgaatatcagtctggcaagctgttactcccagatttttttcagctgttctacatagaaattggattgtaagcagtgtaataataaggtgttttttgaattacttgtcttctgttttgtccttgtagatgacagtttgatttacatggatcctcattactgccaatcttttgtagatgtcagcataaaggatttccctcttgaggtactgtggataaaaagctgatactgttttcttaccatatgaagtaaactaattatttagagatgtgctaggtagctatgcttttacggtattataactactggttaataatcaatattttactgatctatagaaccataattaacacagtggtcaaaggttaagtactttgttgctgaattttaatttatgatatactttcttcttcatttatctttgtctctaacttgttagaaaccctggccatactaaaataaatgatcaagtctccaagtaattttgtatagagacagctaaacagtactgaagaatttaaaatgtaaggcctgt

SEQ ID NO: 54201 - DNA, 1071 bp, Homo sapiens
tgatagctctttatttgtaccagtagttaggctatcattttatggtatgtaagaccaatactcgtcatttttgggaatttttttttttttttttgagactaggtttcactcttgttgcccaggctggagtgcaatggcgcgatctcggctcactgcaacccctgcctcccagattcaagcaattatcttgcctcagcctcctgagtagctgggattacaagcatgtgccaccatgcctggctaattttgtaattttagtagagacggggtttctccatgttggtcaggctggtctcgaactcctgacctcagaattcttcactggaacttatatataatagtaacttattactgctttatttccagttaattttattcaggaaagtggacatagtaagttgaaattttatttttacaatgtaaaaatggaatgataaaaaataaaacgtttcatataagctagatttagtttacttgacctgccatatgaaagaggaaatttagcaggaatgtggcaggaaaatgaatgaggaaaggaacaaatgagatatgtgggaaccattccatattcttcatttctcacagttgttctcttttcattctcctttttcaacatggaaggccaggtgaacataacaaaatatatatttttcatttttcctcctattactggaaattagtatatgcatttgtatattttagtttgacagttctttgtctctacaaagtatcatgtatatgctaaagtatacaaatacaggtgatattgtgatatttattgatgttgatgaacattttccattaaaaagtcccatttccctgtttccattcatgtattttctatctggatgaaaataaatatgtttaaaacagtaaagcagtttactcctggaatagaaacaaaccagattattattaccaaattaaaaaaaaaagcaaaattaaaaaatgtgtgctgatattttctaattaaagacacttatggcttttacattggaaaaatacttagaaattattattcttgagcatcagaataatatgcattaaggcaaagagaaattatgttgaaat

SEQ ID NO: 54202 - DNA, 1009 bp, Homo sapiens
ttatatatattatatattgcaatgtaataatataaataaagtacacaataaatgtaatgcacttcaatcatcctgaatccatccccacccccccagtccgtggagaaattgtcttccatgaaatcagtcccttgttcctgaaaggttggggactgctggttattcaggttgcagcttggtcttttctgacaacacatcttaaagaaaccttccagtccttccttagcacatgagccggttttatttttattgtggttctcatctctgaatggtgtacaaacaccattggttatctgttcaatactcatccctctttcttttttgctaaagaatcctgattttgtttgcagtgacagtacccaccaaatactcgcttttctagcctcctatttctttagaaatagtttggtgtaagtgaaatataagtgggtgtgtgctggaagtttctgggaaggcttttgctctcctgctgtaatgggatgtagatgcagtgctgtcctcttacatctacctgccccttccttgaatttaaactaaacacttggggtttcaacagtcctatttgattcagagagaaaggccaagagaattgtagaagctgttcatctgacatcaattaatcaaagtagcaatgtcaggctggtgaaaacagttcgtattatttgacattgttgttattgttttctattatttctttctttgtcacttgcaacaaaatcattcctaattaatgtaaatgttgttgccattgatagtaggaggaagaaatggaaattttatgatcaatttaagttgatgttgcagtcatgcctccactgactactgttggaggtggtagtggttacaccagaacaaaactacctatgcttagatcctgactgtgtcagttactagttgtgtgaccttatacgagtcacctaacccctcaatatttcagttctcccatctgcaaaaacatggatgataagcctagcagagaaattgttgagacagatagtaggtaatatta

SEQ ID NO: 54203 - DNA, 2021 bp, Homo sapiens
tcctcacaaaattctaggtattgcttttttttgtatgtaatgtaactttagaagataatatgtaaaatgtggattattactatgtgtgagaaggtcatttttcatgttgactagattattgtagaaatagtttatttaaaatattttttaaaagggaatctttgaaaagaccaaagttattttttaaaaataacttcatattattgcttttgatcttcttaacagttctctgaggtagaaaaattggatttcttttgctctgtttttgtacacttgatcttagccaaaaagccgagcagtgattaccctgttttatagatgttattcaggtagagtgatgtgtccaaggtcacatcaaggttagttacaaaacagagattagaatggaccttctgactcagtttactgcctagattaccaaacagtcttctacaatattttatcatagtcagtgataccattttgtttcattgtctattactacctaaagaagataaattacaacctaactctctagtatttcttcagactaatgtgaccagaaaacttactttggggaagtgggaggtgagagtgagcatatactttgatgatttaatcccaatgaaggagcatgcatttacctataaataaacaatacaatgctaatcattttttgtcttttagccagaacaggcaaaggagtagcactgggtgaatgtaaatgaaagaagctaacaggagaggttcagggctaaaacagtagatttgtcgtgtggtcttagtgtgcactattgcatccaataaggaattcttctatactttctgttacagatgctgaaattttcttctaaggagaaatatcccttatttacttttgtaaatggtcattccagagactatgattttacatctactacaaccaatgaagaagaccttttttcagaggatgaaaagaaacaattaaaaagatttagcacggaagagtttgtcttgctttaaagattagcacatttgtgcttgataagaagaattccattgaaaggggaaaaatgaagagaaacaagtatatctgaaatgtttattttcacaaatatcttaattttatatgttctttaaaaaagaacatttgaaaatataacagttaaagatatttttctaaaagagaaatgatttaatgaatcttgctttctaataaataaattgagtgattctggttgcattcctatttccctaagatctactagtgataattctaccttaactgtaagccttttagtcttcaaagtcttccacctgagcccattgttctcatggaggttttgtgatattaaccctcccccaaagactgggatcaccaaatagtttcaaaattctcagtttgtactgaagaccagaagatcagagaaggaaactttaatgctgtctagcctcctgctattaatgcaatcaaagaatacttttgcatatgtcttgataattaaatagtatttgttaactgtgatatgcatacacttatataagcagaattatgagttaaagtaatacttagcaatatgattttataatggctcctcattatgcttgctgttgaaccttttatgaggagtgaatataaagtattggttttccctcacaaatttaaagattatgttattaatactattataactgcatcaatcaagtcagataaaggcaactataaaatagtagtagtgtttgtttcctatctcaagggcgaaattttatgggaactcaatttattatgcagtttttaagtttaaaataccaagaaagatgtcactagattctcttctatgtgatttttgttttttatataaagcagtgtagtggtgtttagaagctgaggccacctgtaaggcaaatctgccttaagtgtattatgtgttacttaaaggcaaatttgtgatctaaaagtacaagagtgatttttgagctaggattataaaatacataataaagatgtgagaagataaaatgcttttgttttggttttaatgttgggattattttaatccttt

SEQ ID NO: 54204 - DNA, 1034 bp, Homo sapiens
aggtaagtatctgaactaataagaaacaacacaaagactgagagccagggtccagggtcctgctttctaaacagaagtgggtttggggcaggggccatccccacggggcacagttgaggtgcatgtggctggttttggttgtactggctagggagcactgctagtaggtagtaaggggtgatgctaaacattctgcaggtgactgagggctgtgatggccaggctgaaacgtataattaggtggatgcctagaagagaaacaggaagaagaatgctatgaagggggaaaaaaagggtgtagacatcagaagagcagggttttggttttaacactttaaaatatgaaaatttaaaattggaatgtgattcctcaagccctattcttagattctgttttacctagatataattctatacattctatgcatatacttagtgaatttatgcatatactcagtgaatttagatggggcagagagagtaggtcatttaatgctggggttcttaacctgatgaacccatgaatagaatttaggggttcatgagcttgggttggaaaaacatttacatctttatttttaccaacatctacctgaaatatagtatttcctttcaataagaatacagacaacaaaatatagcagtgttagcagtagctagaacattactactaatagaaattatagatattttttatattacagctaatatagataccttgaagtatttacactgctttgaaattttggtaggttttgctactaggatttttaaatgtgttgatagagaagcaaatacattactatagttacaaatttttaaaaatgtataattggccgggcgcggtggctcgtgcctgtaatcctagcactttgggaggccgagacgggcggatcacgaggtcaggagatcgagaccatcttggctaacacggtgaaaccccgtttctactaaaaatacaaaaaattagccgggcgtgttggcgggcgcctgtagtcccagctacttgggaggctgaggcaggagaatggcat

SEQ ID NO: 54205 - DNA, 1100 bp, Homo sapiens
taacgtctgaattcacatttctatctgttcctagtcatcatttatcatagacgatgacattgaggcaagccttggatatgacctggaatgaagggagaattgaataatacaagttgtgtggctcactatttggaagaagtcttgtgctttgaaaaaaatgtattctgtgtccacaagacagactttttctgtaaacctgactggtccatgttaaggaatgcatttgtacccctggtgtcagtcactgtgatctaaccatttgagctaattagactagtcacatgttgttaaatattcatccagaaaatctccacaaaaatggaattttaaagtcaatcaatgcccttttttctgtcttggaagattagatcaaggagcatgaacagaaatagagctccagcaaaatcataggttaaaaggaatattctagggtcttctttgccacagagtcagcttcccataaaaggtctctctcctgttttcccatattccaaggcaaaatgtgctctagatctatacttccggggttcaaataccacgtctgccactctcttgctgtgtgaccttgtgcaagttatttaatctgcctgtgcttcaatttttatttctggggaattatagtaatacctatcatataggtattgttaggggtcttgaacgagtcaatattgttggtgtcaacctactactcttgtgtccatgttgttatatgcaatgatcaattcatagttttctttttatttgcctcattagcactattcaagacagttatcattcttctttcttgaaacactcttctcttggcttgcaggatgccctgctgtcctggtttttctcctctttcaatgttccttctcaatttctcctcatctctccaatctgtcaatgttggagtgccctagagcttagtccttagtcttttctcttttgttttatactccttgttgatgtcctccaggttcatgactttaaatatcatctatatggctgctacttccaaactgataactccaccttggatctctccccttaactaactgcttgacatctccagttggccatctggtaggcatctcagatttaacacaatcaaagctaaa

SEQ ID NO: 54206 - DNA, 1053 bp, Homo sapiens
tcaagcatatctcctgcctcagcctctcaagtagcggggactacaggtgtgtgccaccacacccagtttacatttccatatggtataataaatgctataatggaaccatgtacaaaggtacagaggtagcataggagggaatgattaactctgagagatgggtaggttggggaggaagtgaaaaggtttcataaaaggttatgcccaagcaaacctattataaatggaaacatataaataggagtttttccagtacataacgtgggttctggagagggtgaaggcatttcagacagagggaacagaatatgcaaaggcacaaagttgcataatagcatactgtgtatagaaaattacagataatttggtattattgaagcacaaagtgtgtgtgtgtgtgtgtgtaaggggttggtggtatgtatgggaagtcactgaacatgaggctgcagggctttccatgcagcattaagagctgttactattttatgtagtggggagctatttaagaaaaggagcatgggtctgtaatattagcactttctgaaaactactctgcctgctctatagaggatgtattgatgaagataagagtggagggatgggagtctacttgggaggctattgaaagagtccttgggtaagatgatgatgatggtagaaccctctacctttgaacaagctctattagaaaattttactttataccaagtcaaaactggcattctctcatttgttctgttatatcccatagaccatacaaatgtgattctttttcaagaagtcttactcaggaattagaaatgacttttgtgtctccccaagtttcctcatttcttgctgtcctttgtgagacatagttccggaccccttaccaccatggtcctgatccttggacatgcatggaatatcagtgttactcttaggatacagccccaacaatctattataacactgtgcacatggtctggccacaaaaatccaatgatcctaatatgtcttttcatcattgcaacctgaggtgtttagttttttttttagcagccaaatcat

SEQ ID NO: 54207 - DNA, 1106 bp, Homo sapiens
actcaagtgatccacctgcctcggccccccaaagtgctgggattacaggcgtgagcaactgtgcccagccaggtaacattacctttaattctgtgtttgtgtctctataatgaaagttgcatttagatttttttaagtaataaaatcctattttcagaggtatataactccattacaaagatccccattggcccccatagtctttgcctatgggcacaaaccaacaaacctcagtctaaccactgggtgaaatgagaatggaaaaggaaaacagttgcttctagttattgctacctttttttaaggcatcttgaaccaaacagtagcccgagggggtgaataacctgaatataaaatagtactattgagttttgtgtgtggaattattgatttcttgatattttgagtttggaaacttccttcctttcactcttctgttagagcaaaattcaagcctctgctcccagttctgtcttcacttacctttatttccttttctcatttgaacgcacttgttgtctgggattggaaattccttggacaacagcctggggtgacatcagaagtgaaagaaagagccaaggtctcttccgtgtgaggataaagacctggcttctcaccgaggataaattttggattgagtatgatactaaggctgaagaatattattccaactttcctaatgactccctctgtccttccaggactgggattcccagatgccacatctttttttggaaaaggactttgctttcctcaggtgtgaagaatctgggccttccctcctgcatttagagaaaggctttgctgaggcacccaaatcacctgaagctccaagcaggaacttcacaaccaggaagttcccagagaacttcactgggttcctgagtcagcctgggcagttctgaaacaagcttacataggacctcaagggacatcttgcagtagagaaccatgaggtttgatttcattttcccctgggcttggcctatgctcttccttctggactcccgtctccacaaactccatctttttctgactgactcgtactgcttctcacaactcttctcaagcttcgtcttttcttggaagcccttcttgcttcc

SEQ ID NO: 54208 - DNA, 1026 bp, Homo sapiens
cttagagtatgcttactaagattagtgtgtttgatcctctcaacaaccctatgaagaaggtagcattactgtcaaccctattttccagctaagaaaactaaggcacagagaagatcacacagctaataactagtagaactggctttgtacccaggcagtctgtctacaaagctcatatgcttagccaacatgtgggaggatatcaaggtcttgtgggacatgaagcttatataattctaggagctctctttgagaaaaaagaatacaacactacaaacacaaaactaggtacagggccttggaaggggcccatgaaagagttacattttataagattcacagtaaatctgcctttagcttcatggtaaacccatctgtgcctctatgcaataccctaagcatgagctctgttgttataataaagactgccctaacccaaatacctagaaggtggttgagtgaagacagcatgaaaataagcattatcattttccaaatgtgcaactgtagataggactttctggtgctccacgccaagtcagtgagcattcataaagcaccagctatatgctgagcattatgctaatatgctaacctgcagaaaatacaaaagcctataatcccagcaccttggcaggccgaggccggtggatcacctgacgtcaggagctcgagaccagcccgactaatatggtgaaacctcatctccactaaaaatagaagaaaaaaaaaaaaattagccaagcgtgctggcgtgcacctgtagttccggctactcaggaggctgagacaggagaatcgcttgaacccaggaggcagaggttgcagtgagccaagatcgcaccactgcactccagcctgggtgacagagcgagactccatttcaaaaaaaaaaaaaaatgtatacatatctgtagatatactctcaatgagctagtttatgtgtccagcactatataaatgcaaaatgagactgatacaacagtagctgcccttgagaaattgaaataacaaataagcacttaa

SEQ ID NO: 54209 - DNA, 1207 bp, Homo sapiens
cattactgttctgttgctcctaaaacacctctttttttaaaaagcaataactaaaagcattttttaaaagtcaaaatcacaataaactgttaggctcagatcacgtctatagtaatgtaagttatttcccttctcttaagacgtttacctttttccccccatttagcctgttttttttacagttcaatacatatttttccaagctccacttgccaaacaaaagagtttagcctcagtgttactcctctgacaaatatccttatggtcttgcacatgtgagagccattgataaacaaattaaaattctgtcccagctcagagctcagctggcccattttatcttgcagtatgggtttgtaaaggtctgggtgtctgtcatcctcccctaaccttgtctttgtcaaagggatacaaaagcctgcccgctcggggcccttacgatactgattagtgtgagtgacaaagtggtgctgcaagtccactcagcctttcataataaatctatcaaagagtaatagaattccatcaatcctgcatcatccccgagggtcgctgggctgggatggaaagtgtgttccgttgggattgtacaactgttattattcaattacactcttttcttcctagttaaagaccatgatatcattatcacttaatgaatacatataattggatctggactctatgtttggctgatgaataccactcactattcattcagtctcagctcatcttctgaccatttattatagacttttggctgaaaaccatgatgacaaagggaatttgaaattagctgcgattttattcaatgctcagttagacacaaagacaaaataaaattttgatggctaaatgagttgagaatgaattaataagttttgcctaactcaacagtctgtgatttactcatacttaatacacacacaacatccacaatctctgtcacacacatatatacacacagagttagcaacaaaactgtttaaaatgttcaataacttctaaaaatgagttttatttttgaaaatcctgaagtgttttaatgtaatgaagggaagatttactattttaatctcattaaaaaaatgtattagctgtgaaagtgtcaacacacatacacttacactcacacacacatgaaaatcttcagttcaaccctagccaccaaagacaattttatgattaaataatatttaaatttgac

SEQ ID NO: 54210 - DNA, 1031 bp, Homo sapiens
gctaggaaaggtaggggaaaggagacgattgggagaaacttgttaaaagatacaaaattatacctagatgagaggaaaaagttatagtgttctataccactgtaggatgactatggctgacaataatatatattttcaaatagctaaaagagacgatattgaatgttcccaacacaaagaaatgataaacatttgagaatatggatatgctaattacccttatctgatcactctacattgtatgtatcaaaacatcactatataccccataaatatgtacaatcatcatgtgtcagttaaaaaaaatcaaaagagatcatgtaagctataaaggaccccatagttgagtagactcaacactcaagctggtatttttgaacacctactgtatgctaggcactaggctaagtatcgtgcttaaaaagagaggttagtaagtccctctgtgacagtcaccacagaaatccctagaagtttatgctttttccacttcatccctatcccacttctctgtttgtgatcattaattatgattacttatatgctgtcttgtactttgaaatataggaatactgggaactacacagcgcagaaagaagtggccacagcaggataaagtagaacttagactctgaacaagagatttggcaaaagtctaaacatagaggaaagctgtgcgatggggtatctgagactattcccaggctaaatgactgagggcaaaaacggttgagggcaaaaatggttgaggaggggtgccactggatgtctggggtcaaaaataagtattgtggccgggtgcggtggctcacgcctgtaatcccagcactttgggaggccaaggtgggtggatcacctgaggtcaggagttcaagaccagcctcaacacggagaaaccccgtctctactaaaaatacaaaattagctgggcatggtggtgcatgcctgtaatcccagttactcgggaggctgaggcaggagaattgcttgaacctgggaggcggaggttgcggtgagccgatatcgcacca

SEQ ID NO: 54211 - DNA, 1074 bp, Homo sapiens
gatgcaatggcgagggtgccataaacaaagacaagccctaccaacagccagacagctggtaacaaaggctgggctgtaaaaaggtctttctggctgcccttttacacagaagtaggaaaatcacacatttcttctgggtgtgagagtgatctggctacaacatctgtcaccccattgattgccaggctggcttcattagttctggctggctaggctggggtctccttcatcctaaccttcccatgtacatcttttcttcagctgcatgctgtcaagaataatatagttcttagcagggaataaccccacttgactcaagaaccccctaaataatctcttagttctgacatattgttcaccctaaagaattatctctaatgtcaatggcacccagagtggctgaagcctcacaggaaaagaggttctatctctggaattaaggattcaacaaggggggtccaaagactttcaggcgttcgttgaagattaaaaagtccaaaatattaagaggaacatggtccaaaccactgctatgaggacgtagtgggatgtcacaaacgtttgtccttccttttcgtgtttgttgaggaggcagtgcagctttgtgggctttaaaatcattactgtctgccccagggcctcttgtcttcatatttttgtgacttagttaccatctatgcactgctgattccctgtccagaactcattctagtactcctgaccctcctatcaatctgcctacaagactcttctactttagtattccatagacgaaaaatatttatttgacatctactatgtaccaagtagcgtcccaatctgaacttataatcttcattctccacaaaagaaaactggatgaaatcttgagcctacaccaaggttttctttttatttatttatttatttatttatttatttatttatttatttttattatactctaagttttagggtacatgtgcacattgtgcaggttagttacatatgtatacatgtgccatgctggtgcgctgcacccactaacgtgtcatctagcattaggtatatctcccaatgctatccctccccctt

SEQ ID NO: 54212 - DNA, 1034 bp, Homo sapiens
agagtgctgtcttgacaatatctgccgtctcctttctcattaaaaccaaaccccaaacctactatcaaacaaaacggtgatacaaaaatcacatcctacatattttgtgtcctgcccctctcctcagcattcatttttagtttggcaatcttttataactttggtgaacaaaagcaaaaactcaagaaagaagaaaagactttattttgtgttttaccctgtttcactggcatagactttgatccctttctataaataaaaatctatttcaaaatcagactttaaatcttgatgtatttactgtaaattttacaagttggaacctcctactatcttgatttatatgattttaaaatggagttcttaccatttcccttgggaagaatttttggtttgaatagttcttactggcaggttgcttcctttatgtttagcccaaattttcattttcaaagaccattttagataagcaccatgatagctctaagccaatggatctgtgtgccacataatagagtgtgacaatccactcagttgtgaaagacactgaagataaagcaataaagcagcatttgtgttatcacattggctttacaaatctacttaagcactgacccaacagtgttattcattattgggaattatggatgtttataattgtccaaaaatacattgggctaagttataccatatattatagatttaaatttaaattcaagatcccgggctgagagagatgcagatttgtaacactccttggaggtttgggggtccgtgaaccaatgaatacattatattgtcacattaaagaactctttttatccataaagatgtaacttttttttatgatccatataaacaaaattattcttatatgtatgattatatacatatatatggttgaaacatctgtatgtatgtatatatatgagaataattccagctggcatctgaaattgacagtaaaaataacaatgattatattcttctgaactgtgtataaattactggtgtaagctccttaagggcaggct

SEQ ID NO: 54213 - DNA, 1069 bp, Homo sapiens
aagataaatcatgcctttgtctacggttgtggttttatatttacctgtaggtgaatgtgttctaaatagaattgactgtgtcattatctacatatgtgttgtttttcttttctcagaaatattcccttgtgagagtaaatctttactatatctttagatgtattgagtcccatttaatagggagatccaccttttgatgtatattcccaactaaaggactagggaataaggaacttaaaataccacgtttccttcacattccttcccactacccctcccctcgaattctctatccttctacttggtttactgggttcattgttgtaggtactgtactcagctgaatcttgatatctttttttttccccttaggatacttctacatagacataatcaagttttgactatttggaaaccaagcatcattaaaattctctcaaactcctaattgcgaagaatcgataacatttcaagaagtgataacatttctctgaacaagaaaagaagtgattgaccacgttttaaaagtactctggcactggtgctgtgttttcttcccctccctaaatttgaagaactatggagaaatggtacttgatgacagtagtggttttaataggactaacagtacgatggacagtgtctcttaattcttattcaggtaatacatttttactggttaaaaaaaaaacgaaattttcctttgaataggtgtttgtttggggaaaagtttaccattttctgaccagtacagagaagaatttcaggcctttttgatatggttgagaaaatacatttaaatgtccagttctaatagaaagaatatggataacagctaaatagaagcatgcgctttgtgatgtgagaaagcaaaaatgtgttctaacaggtaagatgacaaattgagaaatgattctgtattaaacattgaagaggaaaatgagctagcacttcaagggaggggtggagtctgtttagggtagagaagcatattactggattaaagggaagcgatcagtgaacaagaataaaattgggaatgagagagggggaattgatggagtgtggt

SEQ ID NO: 54214 - DNA, 1408 bp, Homo sapiens
tattaaagggacaacacgctattttcttcatcttgaacatcctcatctcttgcatgctggtgccacatatgtattgccttgcattttgtaggcctgtctttgaaatttgatagtcctgaaagttaattcatatacttagttaggtgggctatgatgctgaactagaacgttgatgataaaactctgaatgtctatatgtcctctgtacataaactatggaagcaccatcataggctaaaaacatttcttccctgttccctcatccactgtttctctcactaaagatcactatgattgtaactatagataaaaataaaagagagctttggcagtagctgatggctgaatttgcagatctgaaaaggggaccaaagggagaagcctacaatgataggacttgttttcaactctggaaatttcgcatgtgtccttttgattcacctttgaataccgtgcatctagtatagggcatggcacattgtagaccctcaataaaaatctgtggaaggaatgagtatttaggtgttcactttttctttttttttttgagatggagtctcactctgtcgcccaggctggagtgcagtggcgtgatctcagctcactgcaacctctgctgcctgggttcaagcgattctcctgcctcagcctcccaagtatctgggattgcaggtgcctgtcaccatgcccggctaatttttgtagtttttagtagagacagggtttcaccatcttggccaggctggttttgaactcctaacctcgtgatccacccaccttgacctcccaaagtgctgggattacaggcttgagccaccatgtgcggcctaggtgttcgttttcgtatggtctcatttccatagctttctctttgtattatgaaggaggaggtcagctctacccttcattgttatatgatacagtatatattgaaccgtctgtttctgaaaactcagagaacttcatagacatttttgttaattattattgctctctatcataattgagcagtggtgattaaccttaattttgtatacaaatctacctgaagtataaaatagcagtagcttagtggtaaagagtgtaggtgctagagtcagactgtctgagttcagatcccagctctactatttattagctgtgtgacctttggcaaatcatttaactttctcaaccacagttttattacttatagaatgaaaatagtagactacatatttcactgggttattgtgaggactgaataaaatgatacatgtaaagcacttaggccagtccctagcatgtaacgaactctcaataaatgttagctctggttatagcatcatagaaattcatgcctgtgtcatttttattgaacatatcctgataactgttgatgacattatttattgacttactagatggt

SEQ ID NO: 54215 - DNA, 2407 bp, Homo sapiens
gaggagggtggatcacttgaggtcaggagttcaagaccagcctggccaacatggtgaaaccccgtctctactaaaaatacaaaaattagctgggcctggtggtgggtgcctgtaatccaagctactcaggaggctgaggcaggagaatcgcttaaaaaaaaaaaaaacccaggaggcggaagttgcagtgagccgagattgcgccactgcactccagtctaggtgacggagcaagattccgtctcaaaaagaaataagcttatgaacaatggttatttatgggttatatagtttggcttgcactgttgtattcttatgattgagaaaataaatggaatagaagaagaagctgcctagttgtaaaggacatgattaagaaattattttaacttaacttttagttctcgagtcatgatagttgtatatatttccttcacattctggctaaccagaggagcctatcaatttgtggacattagacctacttttcttcctaaaattcagagagccttgcacgtaacgaggctctcgttacatgttggttgaattggttacaaacaatcctattctttttgttgcatattttttgttgtatgagtgttagtcattgatgaagtctactaatagtaggatgacagtaaatcccagtttgcctaggagagtcctggtttgtgtctattgacatggcttaattattaatagcttaataattagtaaattacattattaagcttagataagtgaggtgcaatgttaaattataagtctacttcttgaatattgattaacggaatggtgctttcttctttttttctttttcaggtattttaacagcagtgataacaatttacagtattggggattggattacccacctcttacagcttatcatagtctcctatgtgcatatgtgtaagtttttctttcttaatgtaactctaaatttttatgcccttggcagatttagtaagaagcagtgtgatggggctttcttgactagaggagagattgcttgtagctgctattgtattttttttttttttttttttttttgagatgaagtctcactccatcgcccaggctggagtgcagtggtacaatctcggcttactgcaacctccaccttccaggctcaagtgattctcttgcctcagcctcctgagtagctgggagtacaggtgcccgccaccatgcctggctaatgtttgtatttttagtagagacggggtttcaccatgttggccaagctggtctcaaactcctgaccttaagtgatctgcccacctcagcctcccaaagtgctgggattacaggcatgagccacctcacccagccactgctattgtattgtgtattacaaatgggttttaagaaataactattggctgggagtggtggctcacgcctgtaatcccagcactgtgggaggccgaggcgggcggatcacgaggtcaggagatttagaccatcctggctaacatggtgaaaccccatctctactaaaaatacaaaaattagtcaggcgtggtggcacatgcctgtagtcccagctacttgggaggctgaggcaggagaatcgcttgaacccaggaggtggaggttgcagtgagccgagatcacgccactgcattccatcctgggcaacagagtgagactccatctcaaaaaaaaaaaaaaaaaaaaaaaaaagaactatcaaagtttgaacatttctataatttttttggaggacatctagcaagaaatgtgaaaaacctagttttgttttgaagtagagatgttatccatatgtgtagactactaagaaatatatctaatatgtgttgtgtataagaaagttttttttctggaacagctcaaagtaaatgaaaaatatagatccagatggttaccaactaatctgtcaagttagaaactagaataattgtagtgtttcatttgtgattgaagatcaaaatgggaattcctcctccttttaaagaaattgaatagttatagaagataaggaacttctgttttggtaaagacccagttctactctgtagtggtattccatcttagatttgaagtatgtcagcaaaaatttgaggaacctcttcacaatatctcgtgaactcatcttgtttaatttctacttacagccctgtgtcacttcacgatggggatacattctgagaaatgtgtggttaggtgatttcatcattatgcaaacatcatagagggtactttagtaggcaaaatggtatagcctactatatctaggcgtatagcatagcctattgttcctaggctacaaacctgtacagcatgtcactgtactgaatactgtaggcagttgtaacacaatggtatttgtatatttaaacatatcaacacatagctagcgtaaaaatatggtagtacaatc

SEQ ID NO: 54216 - DNA, 1021 bp, Homo sapiens
ctgtgcctagctctaaggacacattttttaaccattatgtacttttctcatttgcaaaatgtggataatagaaaccctgactttgtaagcttagtttgataattaaatgaattaatatttgtaaagcacttaagacagttcctgggagacactaagcattatataggcatttgttgctattattaccatttttataatttatttttgtggttctgaaattttacagtgatttgtttagacataggtgtttttcacaattgttttggatatccaaaccgtatatgggtccatacgttttgaagactcatgttcttctgttctgctaaattctgttatattatttctttgatgattttctcacttttttctttcttgagcctattagtcagatgtttgatcttttgcatccctttctcttttgttttatgggttgggttatcttgagtttatccccaacacttctatcgaatttcatttgtattgttaggtatatttttaatttctaattagaatttactactttttgtttttttggtaaagttcactactgttccctgagtgattttaattctttcatggtcatttagtttccctttcatttcgattctttttctgtcataggttttctataaatgtttattttatcctagtgtatctatttttatttaagaataaggcaagaacacctgcatatgacttctatatatcattggtccactctaggataagtggggagcaagctggccaccacgcattgagatgcttaaatgtcagaatgtggaggggtttgcattatagtgctaacctctacactggatagtttagttcatttcttcagaaaaatatgccctcttttgttgccttggggtaaatgtttggctgccagataatctttgcatgggagtggggtaagatttgacttctacctctagggattttcagttaatctcttgttttcttctgcacatactactcaaagactgtaacctacttggtgtttccaaagttctctagggtcttg

SEQ ID NO: 54217 - DNA, 1430 bp, Homo sapiens
agtttctaattaagtacatatattactttatactattaatatatataatagaggaagtgtagcgatctcagtaaatttttttttaacttgctgttggaacattgttttattctctagattttggtatgttataataatattgtgaagtaatctaacagaaacaaagctatgttttaaatctttagagctcttttaaaccaaaacaaatcagttgctgcttagcagtagatttaatgtatttgatgctgttatacataatttcatgtttgtttatcacttcagtactttgaatttctattgggaaatagctttcattgtatatgttattttaaaatcacataagagatatgctatgagcttgcatttcctagagcatatctcttgtgtgatttgctttttaaaagctctatctttttaaaagattattgagataatttccttgacacaggaacatatataattctgtgagtcttggctttgctttgtggggtgttcttggaatatcttgtgactgcgacctcctagggtcactggcattttgcttagctataaattataaacagatggaactttaccacgccttgccatttttttgctttttacttggcaagtgttttaaaaaaggcctcaaaggaaaggggtgagtgacttttaaacactagaatccaaaaatttacttcagataatttttttggcatacttacttgcagtaagatgatctttcactttgccttttggtgatttcttataaatattttggctgtagggtatgtgggaagagagagattaagtcatgttctgtattttatttttaattttcctaactagagaaatatttcaattcatgtatatttactggtagtgtggattgggtagttagaactttgctgtaggattttatcactttagagcttactacattatatacttattagaaatacatccccatttgatatttttcttcatgaatgcactctcttattcctataggaatggcatctaacataaatgttaattacgatggtgataacagtccttttgttgaagtgcacgtcttagctgttgtgaattttttacctctgatttgagcacactcccatcttaagcctatattggtaacatagatttggcattactatacatgtgcatgtattatgttcagtgagactcaggttgattttgcagaattactgacctttccctatcttactgcctacctttgtttttgttttaggtttgtgttgctagttaagctagcttgtattgttgtggcttccttcgttctctgctggctgccattctttacagaaagggaacaaaccctgcaggttctaagaagactcttcccggttgatcgtggattatttgaggcatgtttaaacactttcctctcctttctgttactgtaccttacctgtgacctttagggg

SEQ ID NO: 54218 - DNA, 1798 bp, Homo sapiens
ttgcttcaggaagatctcataatttcttatgagatatataaccttcatccatagtaatttttaatgagaatctttcatttcatttcatttaatgctagtttaatcactcttgttaaacttttattatgtgaataatttgatcatttagatttggtaattaaattaaaccatttttctgaaacaaaaaggccttttaataaagttagacagaaacaacatatttatagataatttgctagcatttcttttaaaaataattttaaaagcatattttcctaagttttgaatatataaatttctatagaatatctttcagtagacttataggaagatggaaccagcattttgaaagcgactaagatgggagtttggtgttgtgaaggaacagaaatgtgtgactgtatgtcaacaggatgatggtagtgatgatctaaataatcactattgttataaccaccacttagcaggtgccagacacttccatgtaattttatttgatctttacagtagctttgtggtagctattgtctccactttacagattagaaaactgaggtcaaagattcctataactagtatgtagcagaactgtgacttgaacttggaaaattgttttcctaacctcttctttatataaactctaacacttacataaagaaaagtttaactctctatgtaagctgcctaattatttgccttaccttccatttcagaaatggcatttatcatgataattataaaaatgagtatcagacatgtttgatggtgttgccagtctcttccattcacttcttgccttcaaaatctgaaaagcattttctttgatccagcagaggaaagtgggatgatatagttgtcagtgatagttacttttttgatgttaagtctgcacagctgtaagtcaagcagctgtgtagagaacggatttcaccaccaggagagctgtagttacaaacttaattttgaaagtgatcctagcacaactgctaatgtctttagactttgatttattagcaattagctcttgtcattgctagtagctagcaggttactctgttactctaagtaaattcagttgtgtgataaaaatgggtcaaatgtaatatgtattctataaattgtagaaaaaacatttcttagaaaaatttccaaagatgaaggactttagtattcagggatagtgcactgctctttgaaaactattaagtatttgggaatgtctggattatggtgggccaatgcttttgatcaactgccctgcacaaaaatgaaaaatgcttgagacagtgtatgcgtatatgtttattcctggaggatttaatctatttagttataattgtgactaaaagtttcacatctcaaaaagtttattagagattatgggctgtacttcatgggttttaatatttctttcaattataccagaatgtaaagctaacaaatctcttttaaggataaagtagccaatatttggtgcagcttcaatgtctttctgaagattaaggatattttgccacgtcacatccaattaataatgaggtaagagaaacaaagtttgtatgtagtattttataagttactctttaaaagcattatggtattatttcatttatttggcatcattagggaatgaggtgtttttcttttcttttttttttttttgagacagagtctggctctgtcacccaggttggagtgcagtggcttgagctcggctcactgcagtctctgtctcctgggttcaagtgattctcctgcctcagcctctggagtagctgggattacaggcgcccgccac

SEQ ID NO: 54219 - DNA, 2018 bp, Homo sapiens
ggcttttatttgattaagttaggcgcctcaggacaagatcccttttgattaatttaaaatcagctgagtaggggtttcacatctgcaaaattctttcacagcagattagtgttcaaataactgggagatgagatgggtgtggcctctctgtcttccaaatcttatgagaatttcccttgtagcccaccctaacaaaggcatacaggaagggaattctagggacattagttcagcctagccaagttgatgagtcaaaatctacaactgggaaaaatcagttattgtattaggttatatacttgttttcagggctttcaggggctatttcccatagtactaaatggttccaggccactttgcttgttgagtctgtctgctttttctagttctttttcctcccacccattagccatcattaggagaagctctagtagcttcctgctccctttccaccttgttctttatgatttaccatgggcttgaaaatcagataatcaatgtttgtgaaatgagggctagagagactcttttgtgagtaaagtttatgaatgtttgtgttacagatatagcattatctcttatacttcattatgttttcttattttgagtgtttgataattgaccttcaactatgtatctttgtatattttctatacatgatattaaatactaaaataacagaagcaatatttagttttatcatgtttggtctatattatgtaatcgtgtataaaagtatatatatatatcaatgtgtagattttgtttaaatgttatttcatctttaaatttaataaataaaaatatagtttgaaataaacttaagttgataaataatatgatccttatatttaaaaaatatttccttatttaagctagatttatacctctacaaagaagacaaatatttgatttgtattaattttttagcttttgttctacgtttttgagcctgcttcctgcatgcataaaattaatacttcagccctcttccaaaggattcaaatttacactggtaagtttttcattactttagatacttaattcttgccacaactgatcttttaaaaattattttcatggtctgcacaggatttattgggttgggaaacaagacattcatttatttggcagacatttattggatgtttcccatacttagcttctgtgttagacactaagctaagcaatcaatactctttcagttaattcaactatttaatttgtttcgtattagttaatgagggactacaaagtagaaaacagtggcaatgaacttaagtagcttaaatagttatgctataaaacagatggtattaagttctatcaggtacaaatgaagtcctatgatggtgtgggaaagggagatattatctcggggggagattttagaatgctgtttagggcaagtgggatttgagcccaaatttgaaagtggggcaaggttagaacagcaggttatatagcagaagagaagttcaaaacagaaggaagaagttgaaggtccagaggtgggaaaggacacaggatattctgggaatagctattaaacaatataacttgtgtgagttttgtgtgtatgtgttgagagtaggagaggatatagtgaaagataagggtaaaaattgaccaaattattgaagaccttgaaaatcttggttgaaaaggtttggagtttgatttgtgtgcaagagaaactaaaaaatatttttgagaaggagagggggcagatctctgttttaggaggatgacttgtgtcagtttgaagatggactaggtgcattttctacagtttagggtttttctgagtagctttacaaagtcttcttggttgtgtttctatggcatttaaaattttgttcctgtgtgccatggtctataaaatgacatttaaaaaataaccttttaaactatcaagaacatttagtttctgaaaacagtaagtcctactggacttatgtgaggcaacatttagaaattagggttccaagtctgggactgccatgtaagtacgttgg

SEQ ID NO: 54220 - DNA, 1421 bp, Homo sapiens
ataattttttttaaactctaaatagcacattattaatttataaaacattaatatattttattgaagtgcatgttttaaaacaccaaaatagatttgttttgccggttttagattctgaccttcttgtctttcatggttttaaatttaagttgtctgagattccaggggaggatgaatgtatgattgttgtgtctgaggtatttactagttctgtttattaataactgagttatgatgaacttagatggttaaataaagctttataatcattgttttttgaaaaaatatgtcaattttttaatttgattaaaatatgcatactagtgttgtttgtattttacttctaaatagagctttaataaactttcaactttcatttgaaatgatttttatttagattctataattaacttgatatgctatttcacaagttgttatatctcatttcccccccttttttcttaaaggttagctgtgcgctatcattctttttattttctttccaagtacatgaaaaatccattctcttggtgtcactgtaagtagaaacatttgaaatatgtgtttatttgtttataatataactttataatttacatacaaatatacatttgaatgcaaaacaaaactacacaaatgttatatctttgcataaaatgatttcatagtcaggtttttttccagaatttttgattttctttataaagtgtattttaaactgaaaaattttggtagaatgttattgacataatagtaatttcttcctgttccttcacttatattttctacatgctaataaaaaatatatccttcaaagaggttttcatcagattggagcctgtttgtcatctttgctttttcatttcattcatttccacatctattcggtagccttcttctttccatttacttccatggggtcttttgtatgttgccttctttctctttttttgccacaagcttagtttaggccctattggcaatctgtaaccagactactttgttttagaagcattaaatttttttcctgatgttcatagaaagcagtggatgacagctgggagtatgatatcctaatattaaaatagtattcacatagaaccctttggaatactgaaatcctcctctaggtcaatcccaacccactactgctctacccctcaccctatgttcactaggatcctgtggaagatacatgtacagaatgaccaatgacaaatggcaggcagtattgcttttattaggtggagctttggactaaaaccttcgtgcagagctgggctggcctgtgtggaaggcttcttggctctaaataaaacagtctcatatcattgtagactgggaagactgcttaatgccatcctctgaggcccaaacctgagttagagcttaccactattgtatgaggctaggctgaccct

SEQ ID NO: 54221 - DNA, 1412 bp, Homo sapiens
atgttggccaggatggtcttgaactcctgacctcgtgatccgcctgtctcagcctcccaaagtgctgcgattacaggtgtgagccactgcgcccggcctagtaatttcttttagtagttttcagtttataatcccagggtttaaatctcatatattagttgacataggaaaaagtcatccttctgggaaagggggagaatgcccaaatctttatagagcactttttaaaataaagagattcaaaataatgataacaattattcaacaaccaccatcattaggaaagtttattgtattttaaaaaagtaaacactagatgatacctgcaaagagttctttcaactatttaagaatacagggtattattattatttccatttccacttaagaaaatagattaatcatttgctcaaggtcacacagtaaataaagggcaaacatggggaccaggactcagggcttcacactagcaatgctccttctttgagcattgccacaattgaatcccaaaggtactggagcaggagttgtggtaaggaggttacagggcttagagctatgaccctaaacaactttttttttttttttttttttttggagatggagtctcgccctgtcatctcactctgttgcccaggctggagtgcagtggtgtgatctcagctcactgcaacctcctcctcccgggttcaagcagttctcctgcttcagcctcccaagtagctgggattacaggcacgcaccaccaagcccagctaattttttttgtatttttagtagcgatggggtttcaccatgttggccaggctggtctcgaactcctgacctcaagtgatctaccagccttggcctaccaaagtactgggattacaggcctgagccactgtgcctggcccctaaacaattctttgataaagccagtggttctgtttattggcattgtgcttcctgttcctatactatttccctttttatgtagctcttcctactaatttcttcctccttttaattttattattatcaatttgttttcctttatcctcttgtctctcttgtcctctccagtggcatgatgatgttgtctgccatatctttagttttaacttagcggagtaatatgtaacatgaaagaacataaaagagatgtttgaaaacaatactgggaattcatatttaccaagtactacgaaatatgtgacaaagccttctcagatttgtttatctgatccttttcttaagctacttgtttgtatgatagagaaaaaaagttccattaacggcatactggaagcagcagttttccaattattatgaggagttgacacctctgtgcctgtgtctaggctaatttagtctggactgttaacaaaatgaatcagtagtccatatgaagaccttcctggctgttttta

SEQ ID NO: 54222 - DNA, 2046 bp, Homo sapiens
tttaaccctgactagcattaatatttgtcccagatacctttgttcagtgccttggtggtaggaagtataagaagacaggggtcctcaggttttggctacacatgggaatcacttggagagctttaaaaagtactgaggcctgatttaattggtctggggtgtgatgtgggcattgagattttaaaaactcctcatatgattctaataggaagtcaaagttgagatacaccagaataaattagaccctcaaccctcacctttaattctgctcatttaatagctacaagtcaatgtttccagcacatttaaatttcaccttttatactactcagtaatcctttttttccttgcagtttcttatctcagtcatcactatggtgcttctgacgttgatgactgtcacactggatcctcctcagaaactaccggacttgttttctgtattggtgtgttttgtatcttgcttgaacttcctgttcttcttggtatactttaacattattattatgtgggattccaaaagtggaagaaatcagaagaaaatcagctagctgtattcctaaacaaattgtttcctaaacaaatgtgaaaatgtgaacagtgctgaaaggttttgtgaactttttgctatgtataaatgaaattaccattttgagaaccatggaaccacaggaaaggaaatggtgaaaagtcattgttgtctacacaaaataaatgtatatggagaccaaagaccaatggaggcttgtctaagtactgcttggccaaaacatgtggttttattattcacagctattcaagtggggaaaaaagagaaacatgtccttaatcccattgtttactcaggaaatgcactttttaaatgtctttaaaaaactgagaaatatttcttgatatttgctttgtctaaacctacttccttcatcagaccatatagtgagcttcatgggagaattgagccccttctttttaatggaaatcactaattttggtattcaaacttacattttagaatgcaagtagtgtgtatttcactgtttagaagtcatatcttagggaattaaatttgtgataatctttttaattactgagaaggcaatttaaactgcttgaagtttgaatatgccttattacacatgcaaatttgattgttttaacaaggcaaataaaccataatcttatttatttccaagaatgcatattttaatacaattaaaaatgaattttcctgaatttaaatgtaagctttaacttaactttaagtggtttgagtgaagtcttctaaattacacataatcactggttctaaacttccagaaccattctgtttaattaaacattatattatatatatattattattgacatggttcagggttaccactgccagagcattgattcatgttaacttcatcctattaatactgtatcaccctgtattagcagaagccaatatttattatagtattcaactggtaaaaataatacatgatatccatgttgcagtttctcatataaagatatgttttctttagcctctgtaataaagataatcattttcccatcaacattttttaaggaatatatttcttctttcataagatagccattaaactatattaagtggtggtatattttaatatagtgcaaatcaaaccacatacaaaaaaaaactggttctagacacggacagtcacaggctgatataagaaggtatgtgtttctaagtctggtaaaggaagtgggtttagacaaagcaaaaatctagaaaggtttctttctcaaagcaaatgtgcataaagactcaaagggcaggtcaacgcagaatagcagccttgaatcactgccgaatcagcaagaacattgctgtccatggtcaccatctgtaatcactgtgcccaaatgtcagcatcttggctggctggtgtagctttatttttaaaaatattttttgtaatagtacacttgtgtttaacatagaatgttgacttagataaatgatgaggaagttataaataattggagtagcataactttattatttgg

SEQ ID NO: 54223 - DNA, 1036 bp, Homo sapiens
aaaagcaaaatatcaaaaatatccagtgatgaattatcacagaagtaggcaaggtccaaagcatttctcttagctaaactcagggctatagggatgttttcatataaatacatataggttatgcaaaaatattaaagatagattcctcactttcttcattaatatacctgtcaaaaaataagcccttcaaagttatgttcaagtacgttttagatggaggaggtatttctgagaaatgcagttttctcagctgccaaaaaacttaggtttgcttcttaaaatgaagagaatagggtgtatgttcatgtatcatatatgaggcatacagaagtcattttcccttgaggacttagtgggggcgaaaaatccccaatgtagcattctgtccaaatgataaaccacaacaaattgagtgaaacatttacaaaagtcagggcagccaaaggaacctctctgttcaacagagagaaagagatggataggatataactaaataatggttaaagtaacgcaatggtttcaagtctcaattggtctctcttctgttatgttcattggaagatcagggcaagtatatcccctgcaactccccctcccctcatataaacattagttgtgtgtgtggatctttctgctttgtccttcatgtggcctccaagggtgataaagtgagagtcatctgatctacaatgaaaagaactgggaaatgattctcagcagacccagctgttctaaaaggcaaaagcttagtatatcaagaggtcaaacatacagtaactggtttaatagcattaagcacatacctatataacttgaattatatatgaaaccaatctacttcttaactctgtattacctgactaacatagattactttataaaatgttttggcttataacctaaggttagttttcaatgctataataatccttttttagtatatttttggtaacatcctattataagcactgtatcagaataaatttcttaaacagtatgaagaacataattaatgaaggtaatttatataatttat

SEQ ID NO: 54224 - DNA, 2009 bp, Homo sapiens
gccaacatagtgaaaccccgtctctactaaaaatacaaaaattagctgggtgtggtggcacacacctgtagtcccagctactcaggagactgaggcaggagaatcacttgaacacgggaggcagaggttgcagtcagccgagaccatgccactccactccagcctgggggagagtgagactccgtctcaaaagaaaaaagcaaatgagaggttgccagcagcatctaactaaactaggtaccaaactagattgttattaggtgttaaaatcacttcttaagtcatgtatgacgtgcatgttaactaattcttgataatataattatcttttatatctcacaggcattaagaagaaatgcactcaccatgagcaccaacttctgcatctgcctgatcatatttaaaggaacagagaaatatttgtaattaatctgcccagtaaataccagctcgtagcagttggcaggtgcatgtctagataaaatttcttgcagctaatttaaactttctacacgcaccagtagataatctcaatgtaaataatacatttcttcttggctctttaatgtaagccaacatggagaggaagatcttgacttatattctgtaccacatacacttctgtggacttttagcatttgtgggtagacttaataaagcatgtataaaagtggcacctttggtagaactctgtgtttttctgaaattcagattaaatgtaatgatgagtggaattaagtaccagttttcccatttaaagccccagctgcttattaatttatagattctgtagaaatttttttaaagatttatctagtctattgtgtagcctctatctcaggagtgagtttttattttcctatgcttatagagaaaaaaacattttcaaggttttaaaattttacaccatttataaaatattagagtgtattttttcagtacaaatgtttaaaatatgaagttttttttgaactaaactacaaagagtactgaatttaaagaaaagacctttattaaggggcaatatgtgatccattccaaattattttgaaatattaaatttcagttattctgtggtgttttctgtcatcatcatgtttttgttgtcactcccaaaataaaggggaggagggaatcacagagtatgttatcttgatagtgaaacctctgcttttcttgaccatttctgtaaggaaaactgctactcctttggtacttgccctaagttttaacaaaattagtagaaaatattaccatgtcatttgaatatatcatgaaaaatgaaaactacatgaaaatctgaaacaaaatataacaagttaaggttgaaaattttccactgcgtgcaatggcacaagcctttaatcccagctactactctggaggctgaaacaggaggattgcttgagcccaggagtttaagaccagactgggcaacacagcaagacacctatctcagaaaaaaagaaaataattcactttccacttagagaaattttagattcacctttttaaaatgaaaggtttttaaaaactgttactataaattatataaattaccttcattaattatgttcttcatactgtttaagaaatttattctgatacagtgcttataataggatgttaccaaaaatatactaaaaaaggattattatagcattgaaaactaaccttaggttataagccaaaacattttataaagtaatctatgttagtcaggtaatacagagttaagaagtagattggtttcatatataattcaagttatataggtatgtgcttaatgctattaaaccagttactgtatgtttgacctcttgatatactaagcttttgccttttagaacagctgggtctgctgagaatcatttcccagttcttttcattgtagatcagatgactctcactttatcacccttggaggccacatgaaggacaaagcagaaagatccacacacacaactaatgtttatatgaggggagggggagttgcaggggatatactt

SEQ ID NO: 54225 - DNA, 1046 bp, Homo sapiens
ccccaagtcagggcacagatctatttatttcataatatagctgaactatatagttttggtagtagtccagattaaaagatgtggaaactgagtgccatttaaaatactttagggacaaagagaagagtttttcaaagaagcctcattgtttggcatctcctccatctgtcctctgtttgcttttagtagctgttttccctcgacatgctgctcctccagctccaaatatttgcgtgtttcagtcttttctgccccacaaatatttttgttgtaaattatttcttcctactcctaatcaaagcttttgtttcctcagtgaactgatctcaactagatattaacaggaaagcattcttttttgtttaacttatttaatgttttttaacataggaaatatatgtacacaggaaaaagttcaaattatacaaaaggatatacagtgaaagcaagtagcaagtaaaaatttaaaaattacagataatcttgtatttgacagcaggtgcctgctaaaccaaattaatttctggtgcagttatataaaatgtaaataggcagcaaaggaggaaatgttgttggacaaaagtgataccagataatcaagcctgttgtttttctccctgaatcaggtccacttaaacttaatagtgtctttccttctttcttcttgtaaacccatcaatttatttagagcttagacttttaaaacaatagctcccatggcagtgggcttcaaggagcaagggaagagcaagaatcattgttatgagtcacataggaatttgcctatgtttacttaatttattaatttctctccatatttgtttctaaagatctctgttatttaagtatatcactccatgaattggtgttataattagtgagtttaagtaagagctgagacattttacaacatataaaaataataggccgggtgcccattattatctactaaaaatacaaaaattagctgggcatggtggcaggcgcctgtggtcccagctacacaggaggctgaggcaggagaatcacttgaacctgggatgggg

SEQ ID NO: 54226 - DNA, 1040 bp, Homo sapiens
tttgctcctcttaaaaacctgatgaagactgtcatctgactttcgtattttgagagaatagatgtgtgctcttcctttgttcagtgattcttctcttgtgtatatctttgttcttttggctattatcacatatttgaacaattatatatatacatatgtatatatctaaaattagaaattaactgccaaaggcttattcttgtttaatatataatacgtccatatacaactatagtattcgtcttttacttccacatataaaacttttaatatcttgatcttttcatatatgttataaattttcttctatgtataaaatcttgattctcctccctgtatttgaaagacatggtgacatttgtgttttagtgactcacattgacaaacacatttttaaattattttccaatagaatggcgatcagtccacgaagcgatgcaactttctccagtcagaaatcaacaccttcagagagtcctcgaacaaagaaatttccactaactgaagaggaaatattttatatgaattgtagagctgcctacttaactgtcttcaaaagcagcttggaaaacattatttctaaagatcaactttacttaggtaaatttttaaaatttttaaatctttcacctttttgttgaaagttaataaataggtccgaaagactgaaattagaattaccttgttgaatcatcccagtttcttagtgaagcttgagcaatggaactacagtaagctattatgtcatatcatatagttacatattctaggaactacaaaataaaactttcaatgtttatacaaactagatgggtaattgaaagcttctatcaattactacttgcttaagatacttttaattctcattttggtgctttaagatttatcataataaaattaaaacgcttttggcctcttaagtcactagcctgaatttgacccatactgaggaaagtgtaaaggatgtgtaaaaatgggtggaatgtctgaaaaagtgaagtactgagagataagtgaacttttaaaagagaattgagttg

SEQ ID NO: 54227 - DNA, 1047 bp, Homo sapiens
ttgatatgaaaaaatgcttttaaatgtttttatatgttgcccatggggttgttctgatcttttctaatagtatatttactcagaggccaaatatgtgaagccaatacataaatgtggctatttattttatgaggactacaaaatacatctgctacacaaaacagaaataatgctatttaagggcttactacagtatcatatttaatctttatataggctcaatgacacacaaacatttccctgatagaatgttatataaaagtcttttttgtaggcttccttacagacaagaataggcaagaaacaaataaaattggctgaagttaatgttttgactaaactcttcttcagaactgactacaaagttaagttcaagataaagcattgtctaaaacagtagctgtttccactttgttttgggtaaaattactctcttatgagattgcatgtgtaaaaaaattagtatatagcaaaattataatagagtttgcatgagtttctatttacctctttataggcttctgtttatctgtaatatgttgtatttacaaaggattttttatttgtatttatactttcacaattattttcttatagatgagttttgtgcccatgaaaaaactttccatttgtcatccacagtggcagtgcaaggttatgtgtggagataaggaaggatcatgggataatatatattaggaagcagcaagatctggtttttcactcctgagtctacatctagccaatttcaaaggttatgcttttcaaaggatggatttggtaaacatttcatttttgtttgtttgtttgtttgttttgagacggagtcttgctctgtcgccaggctggagtgcagtggtgcgatcttgctcactgcaacctccgcctcccgggttcaagtgattctcctgcctcagcctctcaagtagctgggactacaggcgtgtgccaccatgcccagctaatttttgtatttttcgtaaagacagggtttcatcatgttggccaggatggtctcgatctcttgacctcatgatccgcctgcct

SEQ ID NO: 54228 - DNA, 1033 bp, Homo sapiens
atcctcatagaacccttcttcagccaggcgcggtggttcacgcctgtaatcccagcactttgggaggctgaggcgggcggatcacgaggtcaggagatcaagaccatcctggctaaaatttttagtagagaaaccccatctctactaaaaatacaaaaaaaaaaaaaaattagccaggtgtggtggcgggcgcctatagtcccagctactcgggaggctgaggcaggagaatggcgtgaacccaggaggcggtgcttgcagtgagccgagatcacgccactgcactccagcctgggtgacagagtgagactccgtctcaaaaaaaaaaaaaaaacccttcttcagcgtagttgccttagtgacaagaaataactagctatttttataattttaggtctactttatcagatatatttgaagtaattgatttagatggaaatggtcttcttagccttgaagaatataatttttttgaattgagaacaagtggtgagaaatgtgatgaagatgcttgggctgtctgcagaggtaagcacttttcttttccttaacagatgtataaaaatatatatatagcaccttttcatctctaagaaatgagaagtcaaacttctgcatgaaatattattatagcatttaggacagtttgaaagtagtattgtttgtagatcataaaaacttaaacatttatttttcttaaaccgatagttggtataatactcaagttaaaagaaagtgtgaattacttaatcataattttagttttgattctctactcttcggggtttagaagacaaaaaacttgtccttgcgcttgataccactgggcctgaagtggtcaagaaccacaaactgtgaccaggagagggcagcaaaaagccaaaaagctagagttttactcacaaattaaggtttccaggaagttgcttatattatacatgttaaacattcttcagtgcttttcgtatttgagttgaatttaaaaagtccatttatggaaatattgaagccaaaaatgccaagatggacaaag

SEQ ID NO: 54229 - DNA, 1027 bp, Homo sapiens
tctcagtgcacctagaccctaaaacaatgcctgatacaaagttgataataaatatatttgtttatatattgtcaatgaaggagtaaaaagatgttttagacatattagttggaaggtagtattaaaatgaatggaagttgaaaaaactagagataacaacaaaagaaatagacactattgctatcataagtcaaggatgaaataatgtgaccctagtgtccataataccctgggaatgaagattaaaaggtaagtaagtttaagtcacatttaaaagaaaaagtttatataaatggtgacagattggaaagaaaatcaatgagaaaaagtaacaaagttgaaagaagtagccaatttgtatgaatttgtagtgcactatatgatgttaaaacagaatttcagggtttattctgaggcttatatttgtctgtaattattaaagaaaggaatagcagcttatgaaatctttttttaatagtcagatgagaaagtgattattcacatcagcaatgagctaagtaaaaactgcataaacaacagaggactcaacatatttgcagtagaagtgggacccaaatctacaatggtaatgtattattttctaattaaagccttttgttttatgtctttgaaaaaaatttgctattaatgctatgagtaaaatgtaaatataaaatggagtggaaaattattttaagtatgatatttgtatcagtatcattctatactcagagacaggagactttggttctaatccagttctgtcactgtttggttgagtgactatgggaagttcatttatttctatgttccagtctctctaaatgtaaaattaagataatatcactaggccgggcacggtggctcacgcctgtaatcccagcactttgggaggccgaggtgggtggatcacctgaggtcaggagttcaagaccagcctagccaacatggtgaaaccccatctctacaaaaatacaaaaattagccggacatggtggcagacgcctgtaattccagctactcggga

SEQ ID NO: 54230 - DNA, 1106 bp, Homo sapiens
taggtaggttaaataatttacaaaaactataatggcagcactaagagtccaatatagatctgccaatcccaagaacttgaacagctcctgagaatgaagaatgaacagcccttgatcttgaagatctgttttccaggctccaaaatctaaactgggctctatctacatctgccttcctgggccaaacatttataagcatcagtgagagaagattgcctggatttgtttactttgtggtcctgaattttcagacaagcgcaaattcccatgaaagaagaacagacaatagctgtatcccagtagatcatttccctgttaccacctgtgctgaatttgcatttcattcattcattcatttattcagtcagtcattcaacagatcctgttgaataccatgttcagagaaatgtgtggactaaaaggatgatgcagacccaagagttgtccttaaggagcttacagcagagtgggaattttaggtgcccagatggaaatttgtccatttgggagtagtgtggggtgggaaggaaagaattagttaagactaaaaaaaaaagttcttaaaacttcatcaccctttagccattgccctattgctcttctctcagccaacctttgtaaaagctttctgcattcactatttctcattctcacctccggtttactcgccatttcactgcttctgccccctccactactccagtagaattgctcttgccaaagttactagggacttgccagttgctaaattcatggaatacactctggtctaatcttatttggcctttctgctgcatttggcagtgctgattttgtactcttgtaaagttcttcctcccttggccttgcttactctcctgattctactcacactttttggaagttccttcatgggctgcacattgactatcccctaggtttctttcttctttctttctttcttttttcttcttcttttttttttttttttttttttgagacggagtcttactctgtcgcctaggctggagtgcagtggcgcaatcagctcactgcaacctctgcctcccaggttcaagcaattcgcctgccttagcctcctgagtagctgggatgacaggcatgca

SEQ ID NO: 54231 - DNA, 1016 bp, Homo sapiens
ttcatcactctgcctgcagttatcctgggaagcaattataagctttcagcctcaaccatgcagactaactggctctacttccttcactattgcagtttctagttctgttcgtaattgttgcacaagactttgtgctattgcaactacttggaatgccagttccaggcagagtgccctctgttgtagacaccttgtgctttgggaagttgtctgtgattaggggagtaattttctatttgaggttggtctcaggaagggaaaccactcctgactcctgcctgaaaactcgcctccttgctcagaaacactaattacaggggtcgtttgatgctctcacttaaatattttagtcactcacacatttattgactatctgtatgtgcccaaccccattccaggtactgaggttaaaaatgagtgagatgcagtctctccataccacagagcaaaggaggaagcttgtttgtgtatatggagcatggcccatgcagggttacttaatgctagaaaccaaacactctgaggcaaagaaaaggtgtagggggttggggggcagggtagaggaatagtctacccagactgcctgtcactcagaccagccactctgctgcaaaaggagttggcttatcttttttttttttttttttttttaagcacttagcagtttcctagggctgctatctgctgtaacaaactgtgtggcttaaaacaatggatatttattctcttgcacttctggcagcttagaagtctgaaatcgaggtgacagcaggaccatgctccctctgaaggctctaggggagactctttccttgcctcttcctagcttctggtggtggctagcaatccctggtgcagtgtaacttcaatctctacctctgtcttcacgtggcattcttccctatgtatctcttctgtctctgtctccaaatttccctctcctaaatcctgtcattgaatttagggccaccctaatccagtatgctctcattgtaacttgattacatctgcaaaga

SEQ ID NO: 54232 - DNA, 1022 bp, Homo sapiens
ctgataaaattttccaaatcagcaagacaattgaagaatatgcagtttgccctgacctgaaagtagaccttggtgttctgggaaagcagcagtttgacttggaaaataagttcaaacccttcacaggcatgtttactttcctcctctttctgcccactcctatttccaagttgagcgattttcctttcaacgttttagtagagggtcttcagctttggaaagatttccgtgagtgctctgtaagctttgcaagtgttagttaattaacaagtctggaattaggtttgggagaccagagacctgggctccctgggccctgccagggatcagctgcatgacatcgagtaagtcatttccagcactctaggcctcagttttcatgccttgactagaagacctgcaggattacattcatagttaacttttattgacctcttgctacatgccaaggtctttacacgtgttaatccattttattctcacagtagatctgtcagggcagcactgtcagcattcactattatagatgaggaaacaaaggctgagagagattaagtaacaggctcaaggtcacagtcagtgaatggcaaaacgaagatttcaactcaggtttgaatgattcgcaagactacactttccattttagttttcctcattcagtaaaatcaatcagactattttggggggaccaaattgcaactccctacataggcagctgtggctaacattttgttgttgaattattgtaataattgacagaataaatatttataaaagtattcagattaataaaatgaggatgagatgattggcaatgaacttgcattttgactttgccctaacatgttttctttcttctggattgcaactttatggaatgcattttattagtcatttagttcctggctaaaggatggattgcatttttttgtttgaacctactcagggagagctgacaattgcatcctaacaaagataaagtgacactttggtcatctcgaagacattcttgaggttcagaa

SEQ ID NO: 54233 - DNA, 1111 bp, Homo sapiens
tttgatggagatggggtgggtataagtgcatttaagtgaactctggtgcaggccaggcctgatcctgcagatggggaaaaaagtgggctgcttctgccagacccagggaataactgttaaggatccctcattctgacccgaggtcagaactaaattattagaagcccctcttgaacaggaataggagtcattgaaatgaaacccacacatttaatttcagacatccatacttgctaacaatggcacgatgattaggttctgattatgatagaatgactggtatttcctgagctgggtgagttctagatgcctgtcttaaggtgggtttctgctctcaaccagcagctggctacttatttaatctctggacaagattttggtcttataatacacccattcattcattcacatgagctgaatattgaagctgtaatttcattgcctatatgaagatgatattgagagaattaacattttaatcattctctaccattaaaatgtttagaaataagctgttttatttacaagggtgactatgtaccagacaaggaagagatgtgtcttaggtttatatccctggtatctcactgatggtaggcactgtatacatttacttagttgaaaatatatttttgttgttgctagtgttaccattagctagaatccactgtttcctgaaaaatgatttttcccttatcaaaatgttgggaaattaaaggggttccagcagacattattctgtagtacatctttgtgatgagtgcattctgggagtgttttttggccaccctcccagttactgtggtacacagactgtggtacacagtttacccagtagacctaccaaactatgtaaacagccaatatttcttctctcattgcattttcccctcccctgggaaaaagatgattggttccagagtctgaaaaaagtctaggaggttaaagttagctggcctctggagggagaacagaggactcagctcaaaaggaggttgtgcttggactttaattgaaaacagttttaactttttggcatggaggtgccttcggcccaatggtactgtataaactcattgaaaataaaacccagtgttaaaaatgcagtatg

SEQ ID NO: 54234 - DNA, 1035 bp, Homo sapiens
tagtcaaaatctcagcagcctcaggcaggtctcaggctgggagcaggcccagcattcaccccagagaagcccagggagcttggaggagaagtgcctgagtcacgtgctcctttcaagagagttctccagagataacattgcttttcattttacctcctcaggatgtggtgactaaatgttagatagcatctttcaaaagcctttgaaacatcttagagctttattctgtagaaatgccaagatgggtgttttctgcttattcagaagctcataacccttccctgaaatcctccaaacccttcctttcatccctggcctgttccatccccagtgactgacaggcctgtattttttttgccagcttcttctgaagttagatagttttgcgggagggccaaacaaatgatgaagaaagtgctgactgataggccttggtgtgatctgcagtcagcccgtgggcctcaacttcgtgacttcttccaggtatgattacgaggaggtggaagctgagggcgcaaacaaaatgatgaaggacttggaggccctgatgtttgatcgctcctttgtggggaagcagttctcagcaaatgacaaagtttacactgtggagaaggccgataactttgaatacagcgacccagtggatggaagcatttcaagaaatcaggtagaaacagaccggtgtgtaagtgagagagagacctcagagcttcatctctgacatctcaagggaaaaattaaaaagttcctgttggctatttttcttttgctgctgtgtttttctagggtagctgttcttacctggttttctgctgtcccacgtgactctcacatgcactcgttgggacagtggtttatgcccttgttctgtgcactgtccagtaccctcattctgggattcttaacctggactccagagggatttttgcactctctggaatgatatgcaagatgatgtgtccattgtacatgcagaaaggagccccagaatctaagaaagagggagaactgtgggaacttagatgtcaactcctc

SEQ ID NO: 54235 - DNA, 1073 bp, Homo sapiens
ggcccaattctgaaatttcactttttctctccctcttgacattcagctattctctcagagaagcagtttcctgttcagcgatgtgccccaggcctacacagtggccaggcttccagtggctgggctctgcctcatagggagtgaaagcagaggccaagctcactgtggttctggggagtgtcatctccttggcccttcaaggccaggcttgaggacagggtccctctgcctcctctgccatgctgctttcttcaacgtttcttgttgactcattagaagctggccttgcttataagaattctccagaaaacatattaccatgagtaagaggtgccccccttgtgtttctgcgttctgaacccccccagcagagggggttggatatgagtataacagccttcatgcaggactcactgcatggcctgtgggctttggcgggggcaccccatggccttctggccttcccacttgccccttctgatccattctccacaccaccagctaagtactctttcaaatgttgaagtgcagaggcctttgtgtagcctccaggtccgtgtgactcacctgcctgtcacttcccgctcctctccccctactcacagccttacattccaagcttcagtcttggggaaccatggcacctccctcctgcccccaggccttggaagctgctcttctttccacctgaatcacctttaccctccatcccaccctccactacattctccacctttcccctccattccaccatccgccatattctcccaactcctacttgttcctcaggtctcaatttaaacatcgtttcctccaagaagtgctttctgagcctccagtgtctggtttgggagctttttctggtgttcctatcacctctatttcccccttcgaggcgcttatcccattctatgttcataacctgtttactttccatttcttctactgccctgggaactcctacatggcagagactgcctttttcaccagtgtttacccaggatctaggcctgtgtctggcacatagcaaaagccccattaaatattttcagaatgagtgaatgaaatctact

SEQ ID NO: 54236 - DNA, 1038 bp, Homo sapiens
tagggcaaagatggaaaaaagagaaaaaagctctcaacaaggggattgagtgaaacaagcatggctggcccagagagaagggaatttggagggacccaggaaggggagcaggtgacacaggcttgtcaaggggttctggagtgaacaactttggtctgaatgggaaactgtacttggtttccagccagaatgagcttggcgctcccaagctctgaggtttgggtaactagtctagttgggattagcaatataacaggttggaatgtaatggcagctttatgtgtccagctgtgctagctgaattctacagcaaggttcagtgcctgcatttgacctgtttccaaggggttggaatccccagatgtgtcataatgtgttaaaatcagttttgtgctttaaactgctgagagtgttgtatttcaggtacctcatcataaaagaaggttacagaagttagggctgcacctgtaaggacagaggtaacatagaagaaatctatattattgcttttggtggtggtggcagctgaattaactaagctccaaagcaatggacaagccatcttccgagagattggacatatggcatctcctgatccttaaaattgtagattattttagccctacctcttcagcaaagcaaaatcctcatgtagagggactgtgtgtgatttaaggcaaaatgtctttccctttcccccagccgggggtgatgtggtgggaagtatgttggatttggactcaggagggggattacctaaacagcaactgtagtgcatagtgggtttcggtgtcatctagacctggacttgaagccagactctgccatttcccagctggatagctggcatgccttagttagcaagtttgtaaagtcatcactttacaaagtagataatgatacctacttttcagagtttttgtgaagataagcatcttcaaagtactagtgataaaggaatagtatttgcagagctcttgtcgtctggtaccatctctcatcattttattagtgcttatcagcccacaggccttcaga

SEQ ID NO: 54237 - DNA, 1101 bp, Homo sapiens
gtctggttcctaggtgccgggctacctgcctttaatttcgcttctctttccttttctgagtataaaacaatataaaacaatatgagagggtctgtctctcttctctcaccatactctttagtaatgagctcaaatctgttattattgtcttatttgttgttttataaatccctttccattttgtgaatgtttgatcttttctctggggtcaagacttctggtagaactcacgtttactttctcctcttggactcaagattcctaaggtagcccagccagtggctcaggaaatcagcttaagcggagatatgtttcatgtatttatttaaaaagatacaaaacatttctcccatcatttttctattttgttagccaggagaagaaaacctttaaatttattttttctggtctgtccattgttgatttctcatctaccccctccctatgcaaagctcaacttctttaggaacctgaagcttaccttataactgcacccaagcccagggctttaggaacctacctggcctttctcaaaatcttatagattctgtggtttggctgctgggagccagagggaggtggcttgctactgtgtttgctatcattttgtaaaccttccgttgccatttaaataggtatttgtctgtacttttagaatagaagtgtcttgaaggcaataagactgtgagcttttctggtgaaaacactgagagcccaagtccactagtcccaactttattagagatgcctgaaaatcctccctggctggctagggggagccgaaccaaggtgggatgggcaaagggtgtggtcaaattgtctccttcagttttggaaatatttaatttccaatatagattcagtatacatggtaggctgttttgcttctctgatgcctgggataatctgcctgatatttagtgaggggtcagctttgccctatagcaccctttctcttctgtatcttgagcataggcccccagttagacttttggaaagtttctgaaagtgtcacttgctctgaaattagtatcaggtttggctggtggtttgatggtgaacatctaccccatttcaaatatttctgaaaattttacacag

SEQ ID NO: 54238 - DNA, 1049 bp, Homo sapiens
atttctcagctttctcacagttaagtgaagccatgtgactaaatactagccaattaaatgaaattggaggtaatttttgtcgcttgtaggcttgacccataaaaaactccccaggcagaatcggtatgatccttcttcggtggcttgacaaccttagaagtcatgtgttgaaagtgtcacaacgtggaaagagcctgagactctcccttaatcactgtgtggtggaagccacacttgtttaggttttatgtgaaccaaaaacaagtgtccattgttaaggctgagattttgaggttttttttttttgtttttttttttgttacagctgctaatgttaccttaactaacatgaggttgtaaatcagtgtgtggtgagatcaatttagtgggttaggaccagcatttttagatagaataaaataggaaacctggtttgtgtctgaccacttcatgcagacctggggctccatccagtaaattaaaccccttcccaaataatttatggcacacatagggtgcctctagcactgtagagaatctagaagaatgaagggtggcctttacccttggggagtttaccttttaggggcagtaaaataggcactttatacagccagtgagtacagagttggcaattatatatgcagaatccctagaagggtgggtctttcgggaggaagtgtgatatgatgtgagccttgaaggaaggattgagagggtgcgggattgaaggatgggagatgggaagaggagttggacatttcactgctggaaaagggctggagttccacagcagcctgcagctgctctgggggtctccatggactcgctgagactatcctgagttcttaaaccaggccttcactgtggaatgaagctgatctccaggggatgggagagtgaagaaaagaaagacagcgttgaatgaagcctgttgtgtttttagcatatgaagggtggaggaggagagagaaggaagcagtttcactgggagcctgaagacttgtctttcttcccaaagggtgtcccagggagttaaaaatgttgtg

SEQ ID NO: 54239 - DNA, 1028 bp, Homo sapiens
tacatctattatgtgtcaataaaaaaagttaaccaaatgatcgatgaacacctactatgtgccaggcacagtgctgggtgctggcaatgcagtggtgaatgagacagggacctgggtgcttgctctagggaatgcccttaggagaagctcagggtatgtttttttatttggaatgcttgctgattcccctcccaggacctccagaaagaagtggtggttgcttcagcggtcacttggtgatgactggcaggtatatacctgtgtagctggcacatctggtgcctgtgatcagagccgagccatccagtctgagctttgtttttcccagtgcagcagtggtttcctgcagtaagctccatcttggttgtgctgccctccccgctggggttgggataacagcctcctggggactgtggctaatctcaggagaagcagagaccccagggaaagactcctgtctccgttgtgtgcacctaggattagatagaactgccgctaatgcagttaggtaaaggcaagggccctggttgctggggaaccaggaagcacagggtgagcttcccatctgctctcagtgaaggacgtcctcactgtcaccgcttcctagggccaaaggggcctctgacaaagctaatgtgaccaaagtcaaaatatgggctccgagagtcagccaaacccattcaactaactgtgatcttaggcaaacctcaaagcttcggtttccccatctgtaaaaattggggtactaatcatatctacctcattaccttttggtgagggcaaaaatcagacaatgctgacggtcactggcatgtcctgagtgtgcatggtgagtcgtccatcaacaagagctcagatgaccatgttccaggtgaggaacccgaggcccaccctggccttgatcagaaataaccaccctgaattcctcagtgcctgagtctggcatcgaaactggcttccccggcctccagcactaggccacgaaggaaccagcttctttctctcactggtggtggcctgctgtgccc

SEQ ID NO: 54240 - DNA, 1137 bp, Homo sapiens
ctttttgtttctgggtggtggactataattttgtattaaggaaagaatgcctgcccttatatatccaggactggattttttttttctttttcttttcttttcttttctttttcttttttttttttttttgagtactcatgaaaggaaaccataagaatgtttgggtctaataatatacttgcttgtgtatgaagataaaaccaataataacattaataccacccttcagtggtgaaatgctttaacctttcaaaacaactccttttatgaacttactctatcagttggcaaggtgatttcagggctatctcctgtggtgatgatggatctgtgggagcttttctaattgtgtgggtgaatttgagagaccccatcccagtggttcttgttcaggggtgagtatggaatcatgtggggaaccgccatgaattacacatacccaggtcctgcccaggacctactgacacagtcctggggtgggggacctgcccacttggaaaacttcctgggacttcctcagctggaccctctggggattggggaaatgcattgcagtcacctgcctggggtagtaggggctgccacatctgtgactaggacccaaggagagtgatgatgacccttcttggaatcatgcagaacacacagtgacagtcccttttggaagctggccacaggctgcactttattcattattttaacagcaaccaaacatttgctgtgtgcccactggtggccgctagacagtcttcccaccctttagctcatgtagtcatttaaaccagttccatcactagagaaatgtgttactagccccttgaaggagagtgggccttcaactggattcaggagttgtggtctgaggagagtgattgatatggtttggctctgtgtccccacccaaatctcatgtagtagctcccataactcccacgtgttgtgggagagacccagtgggagataattgaatcataggagcaggtctttcccatgctgttctcatgacagtgagtaagtctcatgaaacgtgatggttttaaaaatgggagtttccctgcacaagctctttctctctttgcctgctgccatccatgtaagatgtgacttgctcctctttgccttctgccataattgtga

SEQ ID NO: 54241 - DNA, 1031 bp, Homo sapiens
gcagggaaatttaaactgggtgaaactgaactggtttccaattgcttgtgttctccatttccagccaagttccaggttttcctagagtacagccaggagcatctgcacctagagaacacagaataaaattgtggaaaccaaacttgtaaatgtttttctcattagcttcaggctcccagccaccaataaactgtaggctttaaaaaatcctgtattattttgcaagttaagagaatgtgcatattccccttatttatatgttcaggattttcttaaaatgttacacatcaagcatttatctgctaagccaccccaaaaggtaacagcattctagtttttgtacaaaagagaaaaaaaattccacttaataaacttgcagtaacttgagcctgttggtggtcttggaggaaacccaaatccaggtttggttgatactgtgtaatgtgaatgcaattagtagcggtttttctaaagtagaaagagatgtagaaaaataatgcatagcaaatttaggtcagagctgggaagcttataaatccttatttttgttttcattactttaagtaatagggcttttgtctttattatgtaatttccctagcaataatatgttttaaaacatttttctgttaatttcatacatttgatcagaaagccacagttcataaacccctgtgatgtggcagctgtcactgtttatatatagaggatgacttcttgttcatccctgggaggccaacacaaaaattactgatgggggcaactttcactacctgttttttcatttagtagaaggtttgcaaagcagttttcagttgatcaacatcctcctgataggctaaggagtgaactgacctttacatgcatggtttatttcagagcatgttatttgattccagcatatttaaacctaagcaactagattgtaaggtctgtaaaaacagaatttgtctttctggttttttactctattcccctggcacatagtaggtgttcaggaaatattagctactattctcctctccaagatg

SEQ ID NO: 54242 - DNA, 1035 bp, Homo sapiens
ctgattccaatgaatttttttttattcactgaggctttatgtcatataaaaatatgtgacgtattactgctctgctgcccatctatttaaggcattcttcagtagacttgtcagggcttatctaaatcttagcaccacttacgtgtggctgattgcttggcaggaggaggttcctgcattttcttcctcctgtgtattagtgaattgaaatcaagggaaaaactgcttggctttctgcttccttccatggtaggtagacttttctacatattttccaacagttctttttgacagccaagtctggaaacagggcaggatggaggttttacaaataggtgacagttgtttgtctcatgaatttcttctatttcctttccctagtggagttaactgcctccttcctacaacaatccgaacgtacttccatcacagagtatctagcagtgtgagcaatagccatttctctcttttacctcttctggattctaaacccatcataggtagagatagaacatgtctgtgcttagatagtatctggcacatacagattgctcacttaatggtgaatgaatgaataaagaagaaaaagtgatgaaagaagaaaaactacagtcgtctcttggtatctgtggcacattcgttccaggaccctgatggatgccaaaatccttggatgctcaagtctctgatataaaatggcatagtgtttgcatctaacctacatacattctcctgtatactttaaattatctctaggttacttataatacctaatataatataaatgctatgtaaatagttgttacactgtattttaaaatttgtattatttattattattatttatttacttatttttccaaatatttttgatctgtggttgattgaatccatgggtgtggaacctggggatatggagggctgactatatatactaatgaacactactttggattatatgaaaatacccatttatgaaatggacagttcaaatgtttcctctttgactgttcttaacctgacctcccaacttga

SEQ ID NO: 54243 - DNA, 1044 bp, Homo sapiens
tcgtggcgtggggaatcatgaggttttccaatctggaaatatctttttggatatttctttccccagtgctgggtagttgccacacatgtatgcactgatcagcactctgctgaatacttgagggggattctctgtggctctttctgcagctctcttttctctgatacttggccttgcaaactctagttgccttggtctccctggactgttagctcaattcactcaactcaggcagttcactgagctctgcctgagttctccctttcctccagacaccttgagctggaaattctctcaggcagtaagctggaggactcgtaggattcgtttcatttgccttccttcttccagggatcactgccctttactgactgttataccagtcttgacaattatcctgttactccaacttggccagaaatggaagtgatacattttattctttctgtctgaaataatcctccatccccaatgtttaaaaactgccatccttgactccatgtgactgtgttaggagccctttctctggtctctcatcatacctgtgcttacagtaatttagtgcggcactcctctccctgcgttgttcttgcatttttttttaccctctcttttctcgttagattttgtttccttgaggacagggaatgtctttaatctcgggatttctaacacctaacatagactcaggtgtgtaacagttgctcaataagtacttgttgaatgaatgaattaataaataaataggattcaattttcaaagtatctgttgttgaacaactttcagaagtttttttttttttttacagaaatgagattagatatgcatcttcatatatgcaattgaaatctctcttaaatttctagataatcagttgttgttgatggcttggacatggtttttacctatttattttttgtagcctctccttagaaggtgttaataaaagccacctagttgatgcttgaaacaacatgtggaggtaaagggaccaagaatagaatagccatattctataaacaaacaaaatgaagactaacttt

SEQ ID NO: 54244 - DNA, 1095 bp, Homo sapiens
gtaggatataagtaggataagatgtaatttgtcaggttgctatgaggaataaatgaagtaataaatgttagttgcctatcacagtttcaggcacatgggaaccctctccccattcccccaaacttaattgaaaagatagccatcagcctctgaagttgaattgtgctgagtggttactaacattaaagacatatggagttattgtatctgtatctttcacttatcagcttttccttgaaggtttaatgtgtgttcctttgcttttaggccccatgtttattttcctgaaatggtgtcttcttgacttaaagtacaatctttgcttttttattcttttttcactgctcttgcctggtgatcctgttgtttaaagacatctccatccttccctatcctttccctttcaaatctatggcccagactgggggtggctttaactaacaacagcactttgcattagttaagtagagtggaatttctcattctacctctcagctattgatgaaacctttccctgatgcacaaattaagactgggtgtattttgcatattttcctagaatgacacagtgattctgtggctaaaccaagattagaccctaccactttaaaaaatctgactttttgcttaaagtgtaaactgtgttgcttctaaaactactagttgaatttaactttcaagtgtactttgtatttaaatctgatgatagtgttgtttttccttttgtcttgtttagatgagggtattttcttcacttccctgacccctagtgcctcagtgacctaggcagcaagttttttgatgctgtccagaatgctaattaagatatttattctctttggccctattgtttatgatacttgtaattatgtctattagatggtaatctctgttatctcccactatactaagtgtactactcggcacataaagaaatgtgtgagtatgtgaatgtatactcacatgtttgaataaatgtgaataaatcaatatatttatatagttactgatttaaatgtgttccgtcttgggatgtgagatgggataattgaataagaaattagcctgtgtgtgttaaggtagtcaaagttttta

SEQ ID NO: 54245 - DNA, 1049 bp, Homo sapiens
tgcttatccctactggagactgatgggtttacaccaacatggaagctggttggaatggaaaccatccagaaaatgattagggagcttgaagctctctgaaactgggcataatgtgtattaagtcattatagttttaatgaaacttgtcttagctggggtctcttaaccacttgttttctagttgtaaatattgagtccctaatttacactaatgagatgctgttgagatttaacgccaatcttatactgcatttgtcaaagtgtaagagctaacctgaaatgtagctttgcaaaatattctattaaataaacttggtggagaagtagcaacaaacaaactgcatgctttcagcagaaactgtcaacatacacatctctgaagaaattcatattttatgccagggtggtctacagtagttcccattagtaaacggttaaatatcacccttccctggtaaatctgaatacttttgtgtctgttgtgaaatgctgtacacatcctcttttgatgatctgcctgggaattctccactgtgagaattgtctcttaaaaatgggaagcagcaaggcatagtagaaagaatataggcactggtgacacatatatttaggcctgagcccagctcccagttggtggccaggtaagttctttaacctccttttgcttattttttttttctccctgcaacatggggttggtagtacttatagggcagtgctatccaaacacttagtagaggtgataatgtaagtagtgaacgtagctcctgacatatagttggtgttccctaaaggatagattgaaagatatacacaccaccaagttgaattcctctcagatttgtccaaggccacccagcctttcttggccttttcttccatcattggttagtgtgtgttcttgaaggcagtctgattttatccttggcttaaaaagtggggaaatatttaggaagcctagcctaatgcaagagaactcatctatcttactgtaggatcaaatacaaatggtttttggattgtccattatttatctctcacttctcttc

SEQ ID NO: 54246 - DNA, 1060 bp, Homo sapiens
aatcagcaaaaaatttattttgtccttgacattttatgccaaaaatcagcccagagaatgtgttttatagcctgggctgaattcccctaaaggtagagttttcctatgagcagtgttcattgaattggctttttttttttttttttgcactagataactatattaatttattagataatctttttattgtttcagcaagatagaggaaacttacacagagacagcagagcataatgggtaagcatctgggttcttttggaagacgagatattggtttccattggccttgctacttcctgtctttctgaccttgagtaaattactcttccagagcctgtttctttgttcaattggggatcataatagtgccgccgtcatcatgctgtcatgattaatgcacctaaagcatttagcacagctgtcagcacttattgagtattgactaattattagcgatgcacagtgatctataacttaaagcttcgtctcagaatatgccttcttatgatctgatagtaataggaatcagcagaaaataaggtggttcaactatccgggaaaactaccaaatatccgcttagcagaggcaaaataaatgtagcttaaatgcagctgaaaatgctgaaagctgcttttgtttctcatgttatagaaatgcagttatttttattaaaagtgatgggaaatccatctgtaatctcctgtctttcttttatctgtttgtaaaaatagctcagtaaacccataaatgccaagaccctgttcagtgtgagaaacattgttgggcaggatgggaaagttcaaagaaatatcagatgcaatccctgctttggtggaatatttggtgtaacttggaaaattaaatggaaaaaaaattaaacaacaaaacagcacccagctgccaaataagtgaggaaggaaagacctcaggctgaagcactggtgatgggaggagggatttatttgagctggtttttcaaaggatgggtaaggaaagaatagcaggaaggcgtctcataggtatggtttaatggtaagagcaaagtcagtgtagtggcaa

SEQ ID NO: 54247 - DNA, 1046 bp, Homo sapiens
tatactagcttcttacctggtcttctgcttgtactcccacttgacagagcatctagagtgattttattaaaatataaaccagatcattcattcgcttttgtaaaactcttcagcggtttccaattgcactttgaatcaatctgtaccccttaccctgcaaactgccacctgctgtggtccctgcccacttacccacctccactggatgcccctcgatacccagctcactgtgcctcggtcatgacggccttctttttcttccttggatgcaccaaaaccagggggcctgaggacctttgcatgtgctgtttgtcccctttgcctggaatgctattctccaagatctttgcatagctggaaattttgtagctctaaacacggggttcttccatttcataagactataaagctagcaacctctggtatctggttaacagttcactttgtgcaggttattccagatgcagatagcatgggtttaggttttcatttagagaaccacctgacctctccgtagaaactcaccacattctctcccccagtgactttctaacacattacagtgttttaattttcttcatgtactcagcactacttgaagttttctcatgtatttgttgacagtttatctccacccactagaaggtaactctggccagggttacagcactagttctaaccagtgtctgctgtataagaggcactcagcaaatattgattgattgaatgaatacattttttattatatattaaaaataagtagaaatgaatttttaaaaataagagggaagtctttcaatgtctatattcaagccgaggtttgggatccagtggccatggacaggcctgatgggaaggggtgggtggaagaatcactcgtcttcagagcattgcggtatggtgagagaccatctcatacagcctactgcctcccgatactttcattcactcgttcagttatttgaaaagagctcactgtgtgctgctctatgtgctgaactctgggctcatagcaactaaccatgaaagacctggctctgccttta

SEQ ID NO: 54248 - DNA, 1042 bp, Homo sapiens
gtgctgctggatttgttttgccagtattttattgaggatttttgcatcaatgttcatcaaggatattggtctaaaattctctttttttgttgtgtctctgcctggctttggtatcagaatgatgctggcctcataaaatgagttagagaggattccctctttttcttaaaaaaaaaaaaaaaatagagtagcctctctgaactagcagcagtcctggggggatgttgatatcctcattttagacgaggaacctgtggctcatggaaataaggtgaattgttcatattcacaccactagtaattggtgggttaggcccatgtatccatgactcaaagccccatcccttttcagacaactagaggtgtacccactccattgcaatcatgaggaatttaagtttcaggacattccatcttgcttcttttgtttcctcaacgactaggcctgttctggatttttaggagttaaaatttggttgatgctcttttcaatcctaacaaaatatctcactatccatagtcctttgcgatccactgacaagtgagaaaccaaaatgtaaggggttccctttttttttttttttttgccagccagcctaatgatttggcatgctggcaactgcgtggttttgaaccgtgaggctgctctgagtacctgcatccttgtcctcatggaagtcaccaaaaccgtttgtcaaatggccaattccatcttatacagggagtcggggaaatgctcatgaaattgatcttgaagcacttggcaatcgcaagctccataagaatcctgggtaggagtaattaacttattttggaggacggatttacttaggaaagctccaactgcaatgagggtgggcccttttcttgttgctcctggcatgtgctcttctccaagtaacatttgcagcagtctgggtggtttgtctgcttagagccatccagaaaagttggtgggaaaagccaagaggccattggcactcagagactggggttggcaccagtcacagtgagaagcattacttttattagcaacttagtc

SEQ ID NO: 54249 - DNA, 1092 bp, Homo sapiens
cttaaataaatacttttggagaacacattctacattctattttaatgaaaaaatttccaggcatatcaaaaacaatgttattcacaaaaaacaatgtaagttaaacgaaatacaaatgggcttctacagtatatttcaaagtatgtgctttggatttggattctgattttacagttcgccagctgtgttacctcgaatagggaacattatacctctctgaaacatgcaaaattagggatgaaaacacctaccatggaggggtgttacaaagattagaaagaatgtccttggaggatctagtacttaatgttggctccatttctccttctctttcctgcacgttttgagttaatgcattcagctttctttcctaaacctgtcaccacagacaagcctgctacaaggatccctgaagtttagagagattgacttccccaagtactttctcagttaccaaggataattcattcaacgggtttctacactcattttcttgtgaaggaagaaacatgagtgggaagggaggaagttaggagttggacctgagtatcctgtatacaggagtgtctgaaagtgcactgttgtgatccatccatcttttaggaagagttggatgatgattttctggctctgtagtgactcatgagccacacagggaaggcaggtttttattcattcagtcatttgagcaacagctacatgccagaccgagaagtgttaagagtgtcagaccactctaaagaaccaggggtcctcaagtaaaaaggctaattccatggtttgggcagggaaggtacaaattaagcctggagcactttgttgtaccagaaagtatacaaacatgatcagtgatgtcaagaagacagagagaaaccagcttgaaggtcttctgctggccaaatctgggacactttgagtgatggaatagataaggacagcaatggattataaggcattgaataaaatatgaagccacaagtctattcggtgacaggtaggtaagtacgtagatagatagatagacagatagatagacagacagatagatagatagatagatagatagatagatagatagatagataatgtgaa

SEQ ID NO: 54250 - DNA, 1051 bp, Homo sapiens
tgaaatagggtcatttctgacctttctgacactacatctagtggatcttatttaggggatttgattcagcccaagccaggattcatcagagctgtttgctcggtgacctttcacgatgagcatttgatgtgcttgcagggttcaggaccgagtatctggaatgtttgtaattgcctgtgcataaggatggcagcttcctttgtgcacgtggggaacaggtttctgctaggagattgttgtttagcattaattaagccccgccatatgttaagcattgggtattttataaagaccctatgtcctggagtggtacatcaggacacattcaaaacctctgcagtctggctcaatctacctttctagccttagttatctttattcccctttatgcatttccagccaaatttcgatttcttcttatacatcctgtgcttttctgcctctctgctctcaccttttcacctggattgccttctcttctttgccaatactcattctcccccttttgcaaggcaacaaattacttctccctcaagaccaagcataaaatttacattatccagtcttgtctaatccctccagctggaagtggcctttccctctttgaaactcccatagctctctttcttctctgttcttctcttcacattttctatatgatgttatggtgatttatatacttatctcacccttaagcttagaagttccttgtaggagggtttctatcttacttttttttttttttggtctccatcacaaaatctagcacaaactcttatttgtaggaaattctcaataaatgtgtgtggaatgatgagtcacatcttacctggtgagaagccatagccatacatatttgtgtgcaaatacattcagcaaacttactgagtttctactttagttcaggcatgattcaaggttctgagattacagtggtaaagggagctcaaaagtcattgtcataaatggtcttttatgattagctctctattgtctactgacatagtttggttgtgtccccacccaaatctcatcttgaattgtagttccc

SEQ ID NO: 54251 - DNA, 1018 bp, Homo sapiens
ctcagttagcctagtaactagttaatgattggacagaaatttccttaaaccagtaagtctcctaccctttgccaagaggtttaaggaaacctctgtccagtcattaactgatcactaggttaactgaggaggtccaaattcatcctgcctcctctagtgactgctggggtgctagttttcacggttaccacagaacttgagagaggaaaatgagaacggcaaattaaaatgccataaaattccattcttaacaagcgttagttttttttttcctatatatccactccctcacctatcttatgacatatgagaaatcctaacatgggacttggtgtataattagcattgaatgaatttaagttttctttctttctttcttttcttttatcttctgtggtctcctgcagaatcagtctataaaaagggcatggtaaaaaaaaatctatctcatagcattgttgaaaagattaaatgacataataagatgatgcatatatagtagctagcactgtacctgatgcatattaggagcttgataatattactaacagtatcatcatcaatgctatctgagcaaagaggctgttccttctttccagccagagttcttctgttggataatatttccagctgtgaaccccaaccagagaccttgaagcctttatttccttttctctcattggcctttggctgaagtctcctttctgcagagaacaaagtgaccagcttttgatgaactattttcctcttttatccatttccaagtgttagccatagtgaagaagtgtagctgggtgctagcccaactcaagaagtgataatgtaatatccaacccaagataaactcaaggataactttcaacacggctactcaagcagttcaggggggaggcatcttgtagagaggagaccaggaagtcacttggcagctgggccagcacacagagggccattgctccagtaaagcagctaacctccatctcttcatcaaaccatcctagactcagcactctgcaga

SEQ ID NO: 54252 - DNA, 1034 bp, Homo sapiens
tctccctgcctgctcttctctctctccctctttctcttccacaaacactgcccccagtaaatctcttgcactttgaattccatcttggtatctgctttccagaggaccagaaccaacacaagtgatggttacatatccaaaagaaattattgtggaaggaaaatagtacagttcttgaaagcaatcaggattgagggataactgaatctcaagagtctccctaatagcataattagagggaggagtggaggacaaggtttgaatcttatgttacagtcataattgggaaagagtacagttagtcttgtaattgggaagagaattcaggatggtggggggaagttattgaaaaagtagaaggaaactctgggaagtgtaggatcatagaacatgaaatagagagagagcgttttaggaacaggtgataatcagcgcagatgtcatcaaagaaaatctgagtagggactgaggtcttgtatttagagactgacagtgtggctggctggccatcaagtgattatttcagggaaagaatgagaataggtgccaagtttacaggaatgaagaagaaacatagtgggaaatagctagaggtaatgacagtagacctcacattgaaaatgtttgtccatgaatgagaggagggaaattgagctaattagagtaataatttccaagattgagtgtgtgtgttttaggaacacctaaccatttccagaagagggctttaaaggtgctagagagagagagaaaaaaaaaaaaaaaacaaccattgtagaattaaaatgctgaaagcagtgggaagagaaaagctactgaggccagagggaggggttagattttaaacagaagagagaaacctcttttctggaacgtggcaacaagaagatggcagaaatgacagagatataaggggtgagagtgaagaacctcacgcttagaatgtgttcctggtacaaaagtaacaagaccaacctctaagaataagagaatgagatggggaaaatgtgtaaagagagtggagatgatcagga

SEQ ID NO: 54253 - DNA, 1036 bp, Homo sapiens
atgtgtttcaccttcagaatgctattttattttctcagctaatgattattattttagcaagatttgacaataatagtaaaataatcgaaccagtatttttttttttgagacatggtctcactctgtgtctcaggctggagtgtagtggcataatcatggctcactgcagactcaacttcccaggctcagatgatcctcccacctcagcctccccagtagctgggactacaggcacatgccacaatgcccagctaatttttcgtatttttggtagagtcagggatttgccatgttgcccaagctggccttgaactcctgggctcaagtgatacacccacctcagcctcccaaattgctggctttataagggtgagccaccgcgccaggcctcaaagcagtacattaagaactgttcgtgtaaataagctctgttgagggacattaactggggaataaagtggctggaaaggacacattgaactcctttttcatcttctctgaaaatgttaataataactgagacacatctctgtgtctatatctatacttttcataagtgaggaaagaatatgtgaaaatttggccaaaacttaaagtttttgaatgcaggaaaaggtttgttattcacagtggaacaggggaaatgtaagaagatgatacggtttggttgtttccctacccaaatctcatcctgaattgtagctcccgtaattctcacgtgttgtggcagagacctggtgggagataattgaatcgtcggggcagtttcccccatactgttctcgtcataatgaataagtctcatgaaatctgatggttttatgaggttctcattcccttttgcctgccaccatgtaagacacttggttctcattccctcttgcctgcctccatgtaagatgtgcctttcatcttccaccatgattatgagacctccctagccacttggaactgtgagtccattaaacctctttttctttataaattacccagtcttgggtgtgtctttattagcagcatgagaacagattaatac

SEQ ID NO: 54254 - DNA, 1027 bp, Homo sapiens
ttaccaaaatgcattgcaattttcccaaacctgagtcttcaaataacaaacatgaacttataggtactgtgaactagaagaattggttatatccagatttctgggagataaattaaaacatatttttgtggcataaataagctgattcagaagttacatttcttaactttaggtagaggagaatatttgtatccttttgttgctatgcaactgtttaatgatgaagcttcaaaccacaattttgtatatcatatgacaatcaattgttttccaagaatatttattattttaagtacacaatttcagtgaatcttgagtttttctaggagtcccttaaagggaaattagcattccatgagccagtaaaatacctactctggtaaaacattattatggttaaaaagtaaattcaagttagttttttataaagaactataacatttattttaaacattttataataactgaaaacattaaagtgagcaaatgaaatttcaaaaccacttgtaataatgtattttataatcgcactgtgatactatataacacagtctcttttgtattaaaatagtatttttttcacaagctgaaaaatatcttttcctttgttgacaatgttttgtaagatgactttattttcagatctttttctccttttttgcacaaaactatgcttatggtttgtgtcacagaagtgaaaatatatctttgcatttttatatctggtctgtttttcttgtttcctttgtttttaacttgatatagattttcttcaaatatataatggcaattttcagatatctcaccttaccatatctttccttattttcactgcatgcatttaatcactgtattacttaatgtttgatttgttattatgggcatttcaaataggcaagcattgaattgtaatgacaaaaaggctattttatattaaggatatatgcatttgtatttcacacaccagagatgatattaaacactgattattttatgctgctgtttattaaaaatgtttactataaaa

SEQ ID NO: 54255 - DNA, 2663 bp, Homo sapiens
ctccccctttgtgtccccatcccagagcagccagccccgtctggctcggacgattttccgaagtccccaccccacccccttgaccgcgtcctcgcgtcctcgcgtcctccctaccgaggcgcaccaatgggcgccgggagggaaggcgccgcagagtacgcagctgccccggggacacctaggtcccggcggagagcggccctccgagtgggctccgcgctcctttcccctcccgggagcatggggggaggggctggcctggtagattctgggtagactcccgactctaatcctgctgggggactctttttgttgctttccgcatatcctgctgtagtttgcgtgctgtctgctgtatgatttttgtttcgtgtgtgcctttttgggtcgaagaaaaagggagcaaagtgaataaggttcccatttctccagattgtttatcatgtccgtcctcctcgggagaggaaggagggctgacagaaaaactgcccgcagctagtaaggaatcctgatgatgttactcacgaccaacagtagtaaaaattgctgaacaccaaccacctggagattctgccccgctgttattttaatccacttggccataaaggcccactagattaggagaggttgagatgacattcccagcttgaaacctttgctataacattcttagataaaataacaccattctcttacacattctaacaatcatggggatgaatgtggtcttcgaaagattgaagtttccaagaatgcgttcttggaataggtttctgatttccatcctactgtgaccactccttccacctcccaccgggagaggtgtttaagtcacttttgggatttaggtttcttacttctttcttcttcgtcgcgtcgtcctcctcgtcttctccttctcttctttcttccttcttcttcctcctcctcctccttctcgttcttctcctcctctttcttttctttttccttcttccttcctcttctttccacttccccacaccaatctcctcccaagaggttacaattttcttgaggaaagttccacagaccttctctactgtggggaaagaccaccggaattttttaaagggtgacatgaggactgaggagtggatggattttgaaaggtaattttgcatttatttgcagacacccagccctgaagtgcaatggagttgggttttcttgatttgcataataatagataagcttttaagatgcatcattcaactatgccgatctttcaggttcagattcagttgcaattttttccatatgcattttctgatttctgattattgctgagttcttaggagtgaagtgacttttagaaaagatagaaaactaggattaaaaaaacagtggtgaatatttccattcagagcacaattgtatttttgcattgaggcacctcttttaataaaggaaacttaatatattggagttgtggactctgcttgtaggatttgtaggcacttgccaccttcactccatccctagggctggacaagaaatcttaggattcccccctatcccgcccccccacgccttttccttgtaagctaaggacttgctttttctaagatgctgacagccattttactgtttctcacccagtccttgacaaaaggtgaaattggatcccaacacattgtcattcaggtagggatcctaagcaaatgtagttttaaaaggctgccctgttgaaaaagacacttcgaaaaaaagctctgatcggtggggggtttgtgcccaaatggtcctttatctcctcccaactggcctctttctaacacctttgcaacctcattgtggaaacggacctcctgtggacagggttttgtctggcaaaatgtgaagtggcttctctccttttttgaaaggagacacacatactgtatttaaattctgcttcttgagctgtacattgatctgccacttgcttctaactgggaaaattgcagaaagtgtctctttttaatttagttagactggtcggaaaaaaaaaagtcgaatgcaggttagatttttggccttagaacaaagattttgagccccacattctcatctgtaaacctttgggatttgttcagtgggtctgaaattatgtgggtttagttacctaaagtgtaggttatatagccctccctgcagcatgatggattttatagaggtggagctaatctgtttttcagaggtaagcctcacataggctttaaggtgtgacttcctacgaagatggtcagggtgggggtggagagggggatagttgtgtctctttggaaaagaatgtcttcccttgcttaagggattgactcctttcatttgaccttggcattttgagcatagtacaggcctttcaggacaccatctcactttatgagaaacattctataggcctctttatatgtaaaaagccaatgttcagacttttatattgcttctgctgctgaaattctcgaaagacgattttaaagtttgagaaattataaagtagccctcaaaccaggcctgttgttttgcagcatttcaagtggcagcacttactgcttataaggagttgcaagggggtaattttacaaaaacaaaaacctaggcttcttttagcactatagtttcccatgacgtagttttcgcacttgctgatagagaagacagtt

SEQ ID NO: 54256 - DNA, 1049 bp, Homo sapiens
ggtttagaatgatttgaatgtgtaattacgcaatatagaatattttcgaaggaaaaatcacctgtatatgcaaataatgtgatttgattctacgccttgtgtaccatataagccttagtggaaaaactgctgtgttgctttcttttgaaaatggatatttagaatagaagaaaactgtccattgacggatgactctgagttgaacttgtcaggaatgagcccaagaaaaagcatgttgaatgacttctgataaactgtctctgttgtgcttagcacttcctggacttccttctcactaatgcctatctttgctggccttattccttgtgcttattatgtttttcctgccaatagtacttgagtctggaagggcttgggggagggagaggagatggttttacacttagtaacatgttgctgctatttctggttgctgcttgaggagttccttccttgagcttaagtggatgagcaggcaggaaccttgcagaactctggaattttggtattagatggagtgggatttattttagatatgcttggaccttggagtaagaatttattgaaagtcaaaatatgaagggacaacagggacaagaattttgactcagccagttagttattaactgtgtaacttctgtcatgttattaaatcactctgaactttagtgtctttgtatttcatgtagctaatgggagtaaatatattttaaaggataaccaagtgtctagctcagggcctaaggtaggagcagtcaataaacagaaatgtaaatatgagagcagttcatttagtgccagggcacagaaccgggaaggtggtaaacatgtagctcctaagcctgaatgaaactgaaatctaatttgtagacctgcagatttcaatatggtcaatcctctgcccccaggtttttaagatatggttcacggacctttggatgtggtgcaaagccatgcttggggctttctgaagaaaatgctagacctggctagtcatagttatttctttagttttaaactacaaagatttaaaaacatatacaaaagta

SEQ ID NO: 54257 - DNA, 1102 bp, Homo sapiens
aacacactatgtgggccaaaccaaacatgtctgcaggctggatagggccaaaggccaccaatttgcagtgtctgggttagaattattcagcgggttacaaaaagaaaatgcagtgcttgtgtgcaggttatggggaagccaatttctttgtgatacaaaggagaactttctgatagaagagttctagaatggattgctttgagatatgagcttgtcatcataatgacttcaacacagatgaatgtttacttggtgccaggcactatgttaggtttgagatacctacccatcagttaatttctgatgtaatgaatgttatgagaggaggttcaggatgcttggagaaagtgtcagggatgttaacctatttaagggcacagagggattctggcaggcctccctaagaaagtggaatgaattaggagttggttagtgaaagagtggacctcccagaaggctcctttttgaggaaaagcatagcacctttgatgagtggaaagatggcattatggttttggagtttagagaactagtgggaagaaagggcataaatagaggtgggagaaataggcagaggtcaagctgggggctgtttcttggatccttcatgtcagtaaagacttgttctgcgggcagcagaacactcaactcacactggcaagaaaggaagctaccaccctatgcggttgaagtgtctggggtagatctttgggcaggactggattggggctcaaagcatgtggccagtatgctgtttttctccctttgcttgcctacttcttaaataggttctcccctctatttcaatatggctggcagtagcttatcagtgtttgagttgggaactagctgctgcttgtgcccaagttccttgtatttggaggtggtgtgctctgaggagaagaaacaaaaatctggagaaagcttagaacctagaaaactcagccaaagtgacttcagactcagacacttcagcagtcaccagttgccaaggcctgctacatttctggattctgcctccccaagtccagttggagcctgcaaggtggactccctgcttctgctccaaagacaggctggctgcccagtgtggtccctcctg

SEQ ID NO: 54258 - DNA, 1052 bp, Homo sapiens
ttcttagacttactagaatgttgttagattttttttttaagtgcaaaggtaagtggtcaataactatcattgcgaaccagtaccatccaaacaatttttatttttttatttttttttttactgaaaaggtaagttatttaaaaatactttagaggaggaatgactttgttttgtgtttgtttatgtaaaagccacagaagaaaattccacctgtaattttcaggtaaagttctattttgaaattggattttatgacctacatctctctccctagtcattaaggggatatgaagttgtttctttctctctctctccctttttttttttttgggtgaaaattgcagtaggattactactttggaggaatcattcatttaatttgatgatggaacaaactaaatgtcatttaaatgtttctttaccttgccctctttttttctgagttcaaaggtagctttctctacttcagatttgcacagtcaaatgatttcagagttaattacagtttgaaaagttccaacacctaaacaccagagtggggaatgtaaaaagtagcttatggtccatatttctctggatatagtatgctttattgtaattgtagagtggaagccaggggagtaaattcttatcttgtacatgataatgtcttggttctcttccaaccataacagttattataaagatgcagtcaaagcccaagacggcagcatttttttttcttgcttccccttggattttcattttattttatttttgcatggagtatttttaaagatattcaaggccctggtggaaggacggtgaaaattggcaaaccagtgaaaatgaatctgaatttttaattaggctttgagttgtttcttcaaagtgtggacacatcattagggatgtaagtcttgttgcattagcagagactgacattttacttcaaacgcagagagtgcagctgtcctgtgcagataaaagtcgccaagtatggaatagcaaggtggattggtagataattagctgtcccacattactgcagtgtggaagaagcctgccagtca

SEQ ID NO: 54259 - DNA, 1546 bp, Homo sapiens
tggctctctctaaagcctatatttctcatgacagcccaaagacaggatgtgctgaaatgggttggtttccataactttgcttggtggtgcctgaacaagagttgcccttggccactgcaggagacagccagtgctttttgccgctttttctgctccctttctaggggactgttagtcacagagttgttgctgctgttgttgctgccctgagtggttttgggggaaaacctggagaacatagattgggtttgtttgtttgttttctgttgcagtcttggctatttgatccagaattggcttcactgaaccatttatgaaaaggggaaatttgccacttctgtagtcttcaggggggttagcctgtgtgctaattatgaaccaaacacatttgttaggagtgttttaaacttgagatagtataatttcagatgaccataaaagaggcaaatacattatttgcacatattcagataacaaatgtaggcaagagttacaagcagtaaaacatcctggagattacttattagagcatgagctcttgcaggaaagaacacagacttactcatctgcgtagtcctggtatggttacccctgtctgtgtcacatcatgaggactcaaaaaatgtctagaccacagacattgcccagcagcccttaaatggtagactttgtaactttttagtagttactgttacaaatttagcttttactactgtgtttaatgtgtccatttcattactttagaattaccaggaaatgtctagggtctttatctgctactaaagattaagaatgtttcaggtgagtagaagtatctgctacagtatcaagcacattaggactctaagtagactctaagtattagttggttctaatgtttaatatattcacctagagaaagttgggctacatttaggaatgtaaaacatacaaaaatgattgtgtacttgcaaactatatacttgaagctgctttatcctagaggttagacttcattagttaattcatttcacaaatctttattgaacacagactatgtgccaggtattatgcttggatttgagtttatgttgtcacaaagagacttggttcctactcttatgaaatatgcagcctgctaggggaaatagacattaaacaaataatcttataaatatacattgtaaattttgagtaatgttttgaaggaaacatggggcctttagaaagagtaccaagggcaggctgggctgggtgtggtggctcactttggtaatcccagcactttgggaggccgaggtggcaggaccccttgaggccaggagttcaagaccagtgtaggcaacatggtgagaccctgtctctaccaaaaaaaaaaaaaaaaaaaaaagtgccaaggagatcttttagaaatgcaagtcagatgtcatacctctgcttaaaactccctaaaggttctcatctgactcagtaaaatcctgaattactggtggccttcacagctgtatgtgatctggcccctgccacctttgtgaccttatcttttaccttcccccccccccttgca

SEQ ID NO: 54260 - DNA, 1096 bp, Homo sapiens
acacacacacgtattcagatgtgttttttatcttccggatgtggactaagttctgctactacaaattgattttctttcgagtgacattgttctcaaaggaaatttgcttttattatttaaataataatgacatccaggattagaaataataaagtgtaatccagggtgtatagaaatcttcaagagagctgtgagttttgcagttcttgttttcagctaaaaacaaagcattatttaggatttttgggtcaatgtggcctgtgtagaatcttgggtttagttagtcaatctgcaagaaactgtagattgaacttctgttatgcacaagcacagctttgggagctgggagcacactgatggatagaacagagtccctgcctttaaggagcttacattcttataagagggagataaatatttaaacatgtaaatgctaagtacatgtaatgttggaccctgaccagttctgtgaaggacataaagtaggttaacatggagttcaaagaaggcttcttgggggtgctgatatttgagtggaggcatgaatgatgattggtagcagcctaggaggacctggagtaaggaataaagcatacagagacctgtggagggaaggagatcagtgtgtgtgaagggctgaaagaaggcactgaagaaaggtgggaataaaggaagatgagcgaggataggatcactgtggagaacaagtttggattttgttctggctgaaatgggaagccactggagggttttaggcacaagagcaagggagttggcttttgcttagaaggatccctctggctggttccatttttttctcttactctcttggctctgtcaccccctggctgtcagtttatcctcaggctggttttgcctgtagtaaaatgagtacattcagtagaagagggcacctttctccccccaggctttgaaggatgccttgggctcactctgattggaccttagtggaatacaagagaatgggattacattagtttatgccaatcaggacctactcctagagcccaaagctcctagagctgggttgattctactcacattttatgacctacacaatccagtgatttggata

SEQ ID NO: 54261 - DNA, 2021 bp, Homo sapiens
aggatagaaaagtcaaccaaatacagccctgctttcctggagtgaacattctactgggggattagttagtaagcaagctgggaacagcaggggatgagggtcagctctgggaaatcatgggagattgttcataagcaatggtggagatttttgcttgatggatgcccatgggtcatgttccctggaggattgtgtttcagggattaactctttttaagctagtctgtcccaagctgtatttcttatttatggcatttttagacagcccacgagtggcctgtaaacaattactatgcttcattcttcctctgtgtgttttctataaaccttcaacttggttttttatttccgtcttataactgagctgccagttgccctgagactttttccattttccaatctcccaggaatgcttacctttgtgggctttgtggatgtgattttgaagaaggagtgagtcctccaaactaaaagccatttttaagtagtgcagagaccttccccaaaggaggcgagagatatggatgattccaggaatccccagtttacaaagagtctggatttcaaagctcgtttcagagtctgttgtctggaacaacattcacatagaggggttataaaagcagaccccgctctcaggccaactcacaaaagcctgtttaggagaaatgggattttaatccaagctcttttgctatccttctgaacctcaggtttcttactgtaaaaatcagggctgtttccaccgtcgttgtagagttaaatgagatgaggtttgtaagaatatctagcacaatgcctgatgccagaggtctcaggaagtgtttgctttttcttcatgtgaggatacataatgctaagtcttcagaattttatactctactcctcacttctagatttgagcagccaggaagagtcctgggtgtgtggggatgatagatgaggaggatgaatctcctgttattaaggatgaggaaaaggggaagtgttataatattattagttcctatttattgagcatttactatgcactgcataccatgctaagcacaagttaagtactggctattattacctaacttatacataccccagtggaccaagctggatgacagaatgtccattcctaattgccttagccaaagggagttgtacaaagttacctaattcccttggccagaggtacaaatagctccatctcagcccctgcccactttcaatgtcgcccctgtccaccgatcaggaataactatttggggatatttttgtctgtcactaagcattttcagcaaaaaggaagatatttttcaaattcccaaagggcagaagcagccctctctctggtactgcaggtctgactgggcatggtttcctcttgaaatgtctccttgtgatgttataacttaaaagatggagggctgtttgatccaagcctaggatttgttggctacagggttttcgttaatagaaaacattcatgcacctctaggggggagaaattaaagcacatacttcttcctgtttgaccttcgaacccttgccatttacatcaaacactcactgggagagaaagctaatttaataaactgtgatagcttcttctctaacaagcctcactttaaacttggcattttctcctcaagctgatgagtttctgtcttctcagaagatgtgtgtacccttcagacatctgaggggagagaatgtactttgtgggtggtgcaatgccttgctaatgtcatgttctcccttcagtgagtttcaaaaatagcttgccttttaagaacaattacaaaggagtcgtgcaaaggcagagtgacttggcttcagcaagcctcaatttcttgatctgtaaaatagggattttaccctacctcaaaggttgtagtgaagaccaaaagcaagaatttatataaaagtactttgtatcatgctttttcagttataaccttttattctcagggaagtcagcaaatgctggtgggaacatagatgcagagcaacattttctctctccaaac

SEQ ID NO: 54262 - DNA, 1068 bp, Homo sapiens
tcacacattttattggaaaattacttgttacattttgtgcttcctatttctaaagatttgggagactgtggaaagtgcatattaccacatagggaactattatgcctctcttcttacaacttagaggaaggaatatttttgcaagagttatggcccatagctggacaatataacaatgcaagtggaggaaaggaattgtgcagataccaaacggctcaacccaggggttgtggcagcctcattggacagttttgtctataccttcttttccccagggaattaccaagaagagtggaggccccctgccactaattttaaatcctccctcctccctgccacacacaccttttctcctccctgcagtggatttacacacattttgtggggctgatttagcgagctcgtggttctcataatctccttatagaagtgtatgcacattaaggggacctatttaatagacacggctgcctctgtgaaagaatgctttgtggaagggagcctttgtgtatttctccatctcagcagttcctggggcgcttcccaagtctctctgtcaccgaatggcagagctgggaaggacctgctccagaataatgggagggagcggtgggacaagggagggaggaggcggccagcgttggaatgtggagaccagggtattggcacttcagagctgagcatcttaacattttctcttcttacccccagctggggactttgcatttgcaatgagggccccacttctctgagccctagtgaaagtggatcactttaagcccacaacaatggtggcttcttatcctcttagttaatgctttagataacttttcttttagaccaggtaggggcttgtaaagtgggactgtggctctggccttgcctggtaagacacatgaaattttctcatcttttctaactatcttccctcccctgttttctcttaatttgaaagaaatctctgcattggtaaatgtggacaaatcaagctgtgttagtgacatatctccagcagttgtcacggacgagatttatttatataggatagcaattctcgagctccccaac

SEQ ID NO: 54263 - DNA, 1110 bp, Homo sapiens
atcccaaagctttgggatggttctaacgacaaagaatttacatttctctttctttagtctgatttggaagctccaatctagaatttaaccatgtagtagctgcttttatttgctacctgttacctaccagtgaaaccacaaggctagtggaattctttattgcttaaattgacaggatatggttgcttaaattgctaggaaaggggggaaaatctcctaagaaccacgttttattggtaagtagaacttaaaatagtgctcactttttttagtgttttttatgtgccaggcattatgctaagggttagagttctatttctaatgcagatagctactagtttcagaaagagaaatgacttatctaagatgtgaaagccacgaagtggtagatgtggggttgaaacccatgtcagcttctgcttgagcacttaggattattacattaattgattcagcatttagtgagccccataatatttgctgttggcataaatcttgtttctttgtgtagtggtctctttgtgtggggggctctggagaatatgggcatgggttatgagaggaactggtattagttacagttcggtcaacaggaaatactttacagatccagtggttgaaaacacatttgtttagatcattcctctgttccaagtaagcatgtattggaaaccaacctcccctcccctgcttagggagaatggaatgtatgaatatatatagaattaatttgaaaactggaaatgaatgaaaatgcaaagtattattgtcatcattattagaggaagaaaaagagaaaaggaaagaaaacctgaggatagaatgctaaattccagccttaggtaagtttattacagtatacagtgtctatgctatattctggaattcttttctcatgtattaggaaaagctctcctatataatcttaatttatttctttttgaccttctctgttgaaataaatggctaccatctcttcttatgtacttgaaaaactaagttctcccttatcttccaagtgtgaatgaccacacaaaagggtatgtccccaatgtacttggtctgtctgcctggattgaagttggcagataaactttgccctcagttctt

SEQ ID NO: 54264 - DNA, 1068 bp, Homo sapiens
tttcttcaaaaaaatgccgaggaattagcccattggctactgattattagctttgcagtaaaaaaagagtgagaaagagacatagtctgtaattttatagtgcctccaacactaaaatgaaggcagagcttttttctttctgccaaggatgctacagggctttgatttgcagtggtcatcctttgattatccagtcactcggctaacattttttcagtccctactctgtgcttccatcgtgccttgggaggctttagggtagataaagaaaaggacacaggccttgcatctgcttattgtgcttgtgggctgggggaaataaagacagtccttcctagttttgaaatttcactttcaattaattatagccagcaatggttggcaaggaaagtagggaaagatggaagagccccttaaccagaaagaattaggagatttcaaggcctgttgaaattaatgtgatggttatgagaactgcagctatttggagtcatatagttcaggaaaaaaaataccccagagagagccaggaatcagcaggcattaaaccctggcttgttctcctggtaaatgagtcagcctctggcgggaatataatcaaaataacaacaggacacatcagcatatcaaaaaggggcagagggagtttatcaggggccaagagtgagcacagactagatcccaagccctttgacaggcatttgggcattcctcctttctccagaaaacctttccagagtcttccaacagtggggcaatatacccttaaacaaaactgtggcacgctgggtgtggtggctcatgcctgtaatcccagcactttgggaggccaaggtgggcagaacacctgaggtcaggagttcaagaccagcctggccaacatggtgaaaccctgtctctactgaaaataccaaaaattagctgggcgtggtggtgcgtgcctgtaatcccagctactcaggaggttgagtcaggagaattgcttgaacccaggaggcggaggttgcagtgagctgagatcgtgccactgtactccagtctgggtgacagagcaagactctgttccta

SEQ ID NO: 54265 - DNA, 1023 bp, Homo sapiens
acttgggaggctgaggcaggagaattgcttgaatccatgaggcagaggtcgcagtgagccaggattgcaccattgcactccagctgggtgacagagtgagattctgtctcaaaaaaaaaaaaaaggagagacagagagaaaattaacctattttaacctattgctatgcagatagtaacagtttattataattattatataattaagctacttcttgcaaatgtgaagattctctattccctcctcctgcattttaatacagaagaaattaagaggaaagtgcaatgaacttactaccattatattttctaggaaataagtgaaaagaaaaatagttatagccagaataataaagtggttttgatacactgactatttcttgcctctcttggagttcacaacctctccctctaccagctctatctttattttatgtatcatttctctcgggataaaaccaacttcactcatcatgaccagaggccttccagtcagattggcagctgtattcttggatttattttagtctaggttcccctctttgaactgatttatgcctttttgtgttgatgccttcagcagttaatttcatagtttaactactttttctataagaaaatactatctgaacagtttctagaaattacatcttcttctggcaaaaactgcttctggtgaaattacttctacttctggtgtttttgtgcacaaaaatacccaaccatagtaagtgtaatacaaacaccttgaaatactacctatcagtacctttctctctgcaaggtgtagaaggatggctattccactttcttccaaggctgatgaaaaagaaatggaagtgacttccacttgaaaatcatcagctccatctcactttgaataaaacacagttgatcttttaggggcttacgtgtagatttgagcctggcctagatgcctctttgctggcacctattaaataaacagagtaattaaatgataggtaaaaggtctagaactcaggtgtcattactgaaaagtgtt

SEQ ID NO: 54266 - DNA, 1053 bp, Homo sapiens
tccctctctctgtgtgtgtatgtgtatgtgcatgcatctatgtgtgtgtgtgtgcatgtgtgttgttttcagataataggtacagcataaaatctttttagattataatttttgtttctattgcacattctcttatggtgggggaatttcaggttaaaaaggaaaataccaactctgtctaattaatgtcaaaatttaggtgaagtaggtgaggagaggttgaaaatttgtggtaagtagaagagtatgaataaagttaactgcaattaaaaccacttaacctgtagttacatttcccaaacccaagtggcagccttaaaactgaccactgaattatggaaactgaacggaaaaaggctttgtttcattgcatcgaagtatttttcttttcccattttgggtgcattgatctccctgtattccctggggttgctggaaaaacttggtcaaaaaggataattactttttttatttagttgcatgctcttcaaaaggcaacagcaagtattcattaatttccatctgatagagccgaacttttttttgtggttaaacaattgaaacaggaaatgacccaagatacagtttccatgacaccctgtcacttggatccagttttccagaagatgaaagaccaaagccggcttttgatagtgagtaactaattggactggctgatagtgggagttttttaatgtgaaaaataaaggagaaaaaactggaacagctgtgttttggtacagttgtctaatccccagataaaacactccaaggacattgaaattgaataatgcctttagttaaggggaaaaatctaaaatctgtcaaagcactggtttactttagagaaaatacagaatatatttacatggaaaacccaaaacaaaacaaaacaaaactccaaaaatttacagagccaagatactaagtcatgccttttaggaatcatctttgttcatacaaagtatgatttcatatttttaagatgaattcttacatgtgaataaagagagtacttgctagactactttttcggtcaacattttcaaatgc

SEQ ID NO: 54267 - DNA, 1027 bp, Homo sapiens
cctgggcaatgttctcaactacctaaccactaagtttctgcctcttgttgtgtttctagtgtctttctaataactctttcttttttctgattaagttcatttctgtcttttattttgttgttctggtggtcattattcagttttgcacaatttttaaattgccaaaaccagaaattgccagagagattgggtcactgggacaaagattcagatacatgcagacaatgccaagtgctcctgtaaatctcttgcaagattgtggtatgatttaaataagatgttgcatattggagtgctgtgggtccttgaaagttcaatgcatgtataattgttattcctggaggttgtaatgaggggaatatctatgggattaatatggctgtgggtacattggaatttagagtgtcaaaggccactggatttggtaatggttctggtccttgtagtggagaatccattttccttttgctgatatctatgtggcaggtaaaacgccttttagatcatagatattttggactgtgcttatttttagtgtacctaagatctctacaggtataggacattaaagcagatggagtacggtatgtagtaggtttgcaaatgaaggagactaatcgtacttctgctgtagagcaggcactgtactttaatctgtttttttccttatttgatgttacttcctcttattttatagatgaggaaatcctcacgagaggaagtcttagtaccttgtcaagtatcaattaactgttataagggtgattgaacattcacatccagggcttttatatttcaaatccctggttctttccattatagcatgctaggatcatgagaaaataaagaagtggaagaaagaccagagaaaggagtaggaattgcctaggaaaataaacaaccatcaggttccagagagaggttattagaaatctagagttcagacaaagaatcataaaattgcaagattagaatggaccttagagaagtagagctcaccaccctctccagctcatctctctctcca

SEQ ID NO: 54268 - DNA, 1027 bp, Homo sapiens
tggaggcctcattgagaaaatgataattgagcaagaactcaaggggagacaaaggagtatgccatgtggattctctgggcagagcttggcccagtgggatgaagagcaaggaggctgatggggcaggaagacagtaagagcatcactagggctttaaaggccattgtaagggtaaggggaacctgtggggaatcttgagctgaggaatgacgtgattgactttagattaaaattgtgatcattatcaccatgagcttctcctcaggaggagggacctggacagtgtagcacctttacccgattactcttctttctcctattagcttaaccttttacacttgaaaagtatattccaccaccccagggtagctgccctgcctactctatgtcattgattgaacttggcagtcctgtggctgtaatggttgtattccttgggaaacaaaggaaatgattagatcttaagagggaaagaaagtagaatcctgtggtagcacagcttgtgatcctctttgaacatgacttgatctcttccaggcttcccttactgaaccaggaaacctttgtagaggatcctgggaggtgttggtttggtttagtgttttctaaatgtttgtatctccttacggtgagagggatccattatggagcagggggaagagcttaagtgtagtaatttgtcagctcatgacctgtgcttaacttctttcctctaagataatagcagcggacatactctcagcacacatggggatggaaaacatttctgtgctacttctccagtgaaaatcaatgacttttttttttttcactttaagttccgggatacatgtgcagaatgtacaggttcattacataggtatacatgtgccatggtggtttgctgcacctatcaacccatcatctagattttaagccctggctttcaacattcaagatggtcttccattatctcatttatgtcctattattctcaatcaagttaattggaaatctgtttttttagtgcatgtacaggaatatggca

SEQ ID NO: 54269 - DNA, 1027 bp, Homo sapiens
attaccacctgttgtaagctgatctaagccagttcggttatacacaactcctaggtgcttttttctggtgaattttgatagctgccagattatttgaggtgagaggttttgctactatcccacaaccttgccacctacttatagctagtgcaagtctgagacattctgctgcacatacagacgttgattaacagccgtatatcagccagtaggcacaaaatatttctgcaacattactctctatgcttgataaagtcccagctgtcttcttttagttgttctgctcaccactttgcatgaaagctgtacttgtagacattacaacattccagaggagagttctgttatctttaatagtcagcatcaagcaactggaagtcctccaactgtgccggactcatgtccacttaggggacaagcctatcaaggctacactcttattcatacaagggtagaggtatttctagaatattttggccaattctcataatttgaatatatgtttaagtttaccagggatggcccatttctcacatttatattgctagcaaagaagccattcgtctcacacacccacacaaatccacctctgacattcactttgctaattggcaaagggcctggtgttaatgaacatggatggtggaaatatttgcagtgtgtctttctggagtatgggcttcatgcttagaacacgacctgcctacccctagagtgcattcctgaatataatgccaaccacatttgagttgtagtttaaactaattaactcacatgcaatatctcattacctatactgaattattgttaagttaattaggcatcctaacattgcctttggaaccccactgtggaaaccactgttactaatgtcacgctgtaggagtagactttgaaatgatttgtaaggattcttttgcttaaaaagcactgattaacttccacatactcggaaccatgtcttgtcactgggtgggaaaacatattagttaccatttactgagcacgtagcatgtgtgcagtcctt

SEQ ID NO: 54270 - DNA, 1018 bp, Homo sapiens
tgatcatgccactgcactccatccacctgggtgataagaaaacaaaaacagaatgaggtgggagttgagtcagtaaatatctaaacaggtatttttgttccccccatacctccaactatcatagaacaactatcattaatagaatgttattatagtcttaaaggattaactatagtaaaatagaataatagtagactatcatagaacaactatcattaatagaatgttattatagtcttaaaggattaactatagtaaaatagaataatagtagataactatcataatggtgtgtgaagtacatttataatatttttagtgcgctctatatgaattcatcttctcgtttatgagataaatgagttatgtaaagcacttagtgcctgacagatagtaagcactatataagcattagctattatcattatttatagcaacattaaaacaaaataaggaagtttgttgacctgggtcatgtgtacctgggcgtacagtttgatttgcacaaggtcgtctattgtgtcactgatgcatttttttttaattcccaaagtaagcctcttcctttgccatggttttcagtaactaagcatttccctttgttatacaaactggaatagccctggtttctcgcaagtcactgtgccattcaagacatagtttttatagtgagcatcaaacataagcctctgaatttattttctcctcagaaagctcttgaggtggtgtagagtctagttgtaactttggatgtatgtgcttttgtgagtttgacaactctgaaaaatgtttgtctttctctgttatatattcaattttaagatttgtgggggaagaaaggaaaaatatatattttagatatatattatttacaggcaagccctgttactattttgatcaacttctaggtgttacgtaagttttctctattaaactctattaaagatgatctttgcataggggattacagataaatttaggagtaagacaggctttgtattcagacttgaccatgtac

SEQ ID NO: 54271 - DNA, 1045 bp, Homo sapiens
tttttatttttttgctcctctagcagatacataacttagattctcattttttagtttgttatatgttaatctcttgtgattactcagtaacggtacagtttggtaaagtcataagtctgcagagacattttaaatagaggcaatgtatggaggagtaggtaccatctaggcagggaccagtggaagaatgtgtgtgcttgtgtgctgtagtttggcctaatgtcttggcacagctgtcatatttcctggcatgtaagaactggatcttctcttaagtccacacatatttggcaagccctattatgttactctcctgacggggtacttgagtaacgaaggtgatagataatattgggtaggtactgactgaacagggacatgagagaatatggaaagaatcccttttaaagatctttattgcattagatgttagtgtccgtaaacaattacagcattcagggagcgcaggatttaaatgagaaacacaacttggtcagattatactagtcggataaaatggcatggactccagaaatctataattaaatgtatttttgaaaatgaaaaatatagtgtaacacctggtttattttgctacagaggtgcctgggtattgcttacataagtgtgattgactttggctgatacttgggtttctctctgtaaaattactgcattttaattaaattttttttctactagattctatttgttgtaaacaaattattcacatacacactcatgtagaaaatgacttatttagaaaatctcatgttcattttcttttcattgcagcggatattcaactcctttgtttacactgagaaaatctcaaatggagaaagtgaagtacagcaggtaagaggcaatgagtacttgacactccctgtctttgtcttgcttttagatgtggcttcgtcactctttccaagcaatctccacttgaggtttcctgttctttctctctgtataatttcacgtgcatctcatgcataatggtgacaaccttacacttcagattcttagaggcggttaaaaacttata

SEQ ID NO: 54272 - DNA, 1024 bp, Homo sapiens
tcatggttgaattaggtgataggattgggattttagccaaagtggtctaactctaaaacccatgttcttaaccatgttctaaaaacatatgctgtgttgtttttcatactttttctgctgcaaattcatctgtacgttttcaatttttaaaatgaaggtggtttattttctcttgagagtcttacatcagctgatataagataaataatatgtctaaacaatgtaagtactatgatgaaaacttagctgctaaatgaggaaaagcaagtttaaatgctcagttgtcaggggtaaaacaatggtggagggtgccttctgtgctgttagcgacgagcttttagctctcataaatcacaaggatataactggagccttaggaggaagcgcgttatattactaatggatcatcctgcaggaacataaacaagacataaaaataagtgaagtccttgatgactcttttgtctttcttcccaattcatcattattccattattaacataaccttaagacagttggttataatttgtatcctcatggaatttctgttgggctattggggttttgttttgttttgttttgttttaaagtaagtacctcctaaataagaacttttagctaattgagtgagtgaaaaactgcagctgttggaccagtttgtgggatgaaagcgtaacattgttacgctttctccctttctgtcacacgggagaagctgataacaacttggcattcttagtgtagaactgtggttggtaagcttctgttagtatggtttccctggaggatatagcaacccttagatacctctcagaactcccggatctctcttcccatatgaagcctggacaatagtcaggatgcttggagtactgttcagctaggaaaaaacgagatgggcacagagagaggaagccacctgatagctccccatctccccaccccccatttgggatttggagccatcttgtttctattttaaggaaaacatacatgtaacctctgttctgtattcttatatata

SEQ ID NO: 54273 - DNA, 1046 bp, Homo sapiens
gcaaggtttattctttagtggtaaggctagagttgaaggaaataaggatcaactattaaattcttaccatggcacaaaggtttttgaatgtcaaatgttaaacttttctaggttcaataggaattttgctatgaatcttcagtcccctaggatatatttcctgtctgtgcctgtcagcttcattgttacgtattttaaataaagctttccctaacattcaaaactccttccggcccttccttttaggaagcagacataaataaagtacccactatgcctttgcatttttgttttcttttacctttttctaactatgtgcccaccccacccccaatcttctgaagtataaagctaaggtaaaaagagcttttaaaaaagggctctggggaagtatgcaaatgacagaaatgtctatgggaaaattaagggaaaagaaattcagcaagaaagaaattcattgatgttgtgatgaaacgttgtcactggagataatgacaaattagaatccgttcccatggggaccgcacgctacctactgatcatttgacccgtggctggatgttggctagcctaagaattgacccaaaagatgacaagatggttttagtcctgttgtctcatccgtattcaggaaccccttaggggatgaaggggaaaggataaagaaggataaaagatgaaagctgagctgtggaaagaaaaatgtttttaattacactgaggaggattgtgggtccacctgtagctttctgttgagaatgtctttgttttcttctgtctgcagggatcatggcaggatacagacccagaatctgtctggctttttggaagggtctacattggcccttcggtcctcttcagtttattggatacattcaggattaacctctctgtgggctgtctttactctgaggttctgttatgcttgctgagcagcctgggtttggttggcgtgctaacagagattccttttagagggaagaaaaaaaaaaaaagacgcgatagtggagcacaagatgaggtttccatagtgtgtcaccatcaca

SEQ ID NO: 54274 - DNA, 1034 bp, Homo sapiens
tccatgagaccttaactgtacccctagaaaaatacacaccaagtaagcagattagtaggagagaatgttcctccttcagaggtgggacctctgcactgaatgctgaagatgcagtattctctcctgaccaggagtagttgacagagccaagaactgcttggggtggatattggaaaaccaaagcagttctgaaggtaaagctgaacaatcagagaatgtacagataagcaatacaatgaacctccttcaacaaattttaaagatacctgacaacagagagatcttttgcaacaggaagtggcctgtgaggactcccttcaattatactgtgtctacttggctttgaatggagcccactttccagtgaaatgtgtgaaggaattttgggagtgaaccctgagctgatacttttctagactttggttgaacacaagcactttgtaaaattacaggaactcctcagttttttaatgaagatttaaaaatggaaagagttagtagtatgttgttgcagtgaacaagggtacaaattctcagctagccacctttgttccaacccctcagaaagtgctttatctgcatattctaacagctggggtgcctgctgaacacattttcagttcacgccttccttttgtttttttggagatagagtctcactctgtcacccaggctggagtgtgatggcaccgtctcggctcacttcagcctccatctaccaggctcaagcgcttctcacgcctcagtctcccaagaagctgggactacaggggcgtgccaccacgcccggctaatttttgtatttttagtagagatggggtttcaccattttggccaggctggtctcaagcttctgacctcaggtgatccacccaccttggcctcccaaagtgctggaattacaggcttgagccacacttgagcgactgcacccagctgacactttcctatattccaatccttccaaaaatgtctctattttgaatcttaacaacttcatgttggagttaggtgaggaaaggaagatctcctag

SEQ ID NO: 54275 - DNA, 1086 bp, Homo sapiens
ggaatggtttatggaagaaacatttcagctgggtatttaagcaggaagaggatttgaatatatggagatatggaggaagagctttccaggagaggaagctcaatatgaagaaaccccaagcgtagaaatgaccaggagcactgaagagggacttgcatatggagcaaatgatggaagaggcagctaagaagttggatcaatattagatcataaggatcctcaaatgctagactggagaatttaaactttgttcagtagggtttaggctccataagtgaagtaaagaacaatgtctatctttctcttgcttctgtatctatggtctaatacatagtagacactcaataaatattggttgcttgaatgagggaattaatttatgagttcttgagaaagggagtaaaatgatgagacctgaactttaagggaattccacttcttaatcatgtaacaactagaagtaactagaacctgatttcatttatgtaagcaaagagcaagaggaggcctggacttggatgttggctcctacttcttgagttttggaagagggaggaatcataggtggccaaagttgattttgggtaactgagagtgatggtaccaggtgctaaggcatatttgttctttatgtactctctcatctttcttagttactttagttcagggaccctgtcagatacaactgtattcaataccttgcttaaataggtcctcgataaatatttgccaaaggagttagtttgtggtagcaaaactgactttgtttttagtgtttgagtctcagtcactatgatgctgtcagaattaacaagctacttaccttctgggcagaaattgaacaatattattaaatacttttttgcctattcatgatagtcattgttttaatctgaacagtgttattacaagctctgatgtgaaacatgtttgatattgatttagttatctcagttatcagttatgcttaacagttttgttatatgcatgatgaatttaaaaaatatacattcccaaatgctgacatacatgtatatcattttcgactcaacttgtctgtaccatcttcaaggcagttaatgtata

SEQ ID NO: 54276 - DNA, 1036 bp, Homo sapiens
gggaggctgaagtaagagaatcgcttgaactcgggaggcagaggttgcagtgagctgagatcgtgccattgcactccagcctgggcagcaagagcaaaactttgtctaaaaaaaaaaaaaaaagaaagaaaggttatggcaggacttactggagagccaggtttggaatttaggttttctgattccaaatgctgttttcttttaatggtactctgaccagtagtaaaattagaatggctcatctgccaagtgaaatgctaaactatgtgttccttcttagaattctacttgaggtaactagatgaccctccaaagttgctaaattggctgacctgcagcaatttgtgccatttccctgtgtgtgcttgtgtgtgtgcattaggtagatgtctttatctttaggagtcttgatgagtacccttatagcagaaagcgcctgcatttggatctgctgagaatctagcttcctgcgtttttcgtgtgaccttcattgaaggaagaatgggaaacctgcctcactgcttacgctattgaatttcaccagctgccttttatggattttaaatagagatggttttgtgatttttctttctttttaaaatctgatctctgtagaaaactgcctagcagactataccagctttaagaaatagaacctgtcttagctgaaaagcaacctttttgtgcatttttattgtgaaaaataccaaagcaatttcaaagaaggcccagatttaaaaatctatctataatctctttctggggacttgacttatctggtacgatgatgtagatatctgtctttacactctagctttattaacttgttaacattgggatagtattccttttgtagaatcagccataagtattctgcatcttatatttttctgtttctttaacagaacagggagatgtatggacaggactcttccctcctcggtgcatgtgtgctggtagatggaaccagttaatctccaaggtcatctgctaactcttagttgttagtgcctctcttttgtgtctgtgtcatacc

SEQ ID NO: 54277 - DNA, 1078 bp, Homo sapiens
gtgctatagtgttggaatgattataatgaaccagaatgatcttttgtggtgagactaaatgtatcatgcactatatgagttctgatttatttttaaaacattcttgctcccattggctccccttttaatagtttctgtagcctgtttattgttacagatgttacttttaaatgaggtcattgagctttcctttacttccaaaggcaatgtttgcctttttattaaggggttggcagggctgtctggagaacagtgctaatgtgagatcaaggttaaagcttcagaccccaggagactaggtggagaaaaagcctcttccatgtttacacacactcatgtcagccagatgtctcacaaagggcaagtttcctggcagagaggcgagaagacaggcattgtggtcacagactgccttgactctcatggccccttcttgcccactgtgaaacctcaggcatgtcaaaaacaagctccctgagcctgtttcctcagctgtcacttggagataataatttttattcctaggacttttgtgaggataaaacgtgttatagccccttggtatgcatgagggacctggggagggcaagggatgtaatagctaaaagtctaaggctttggaaatgctttaagtcctatgtgtagtatattttgcatatctttgttagaggaccgctgaccaaatctagcttgccagtgatttttgtaaataaacttgtattggcacacagcccattcattcatttacaaatgtctatgtctgccctctcaaagacagatttgggtcattatgacaaagaccttatggtctgcaaagccagaaatatttactatctggcccattacagaagttggtcgatcactgtaccagactgaaggaaagtttctatacagagatctggtcatttaaagcagtgagggataggggatgagtgggaattctaaagtgttcctgcagaaagtcaaatactgaatgttgtcacttataagtgggagctaaataatgtgtgcatttggacagaaagagtggaatgatagacactggggacttggaaaggtgagagggtgggaggcggag

SEQ ID NO: 54278 - DNA, 1042 bp, Homo sapiens
accatcacccccacaatatcctgcaaatctttgcagctcccatttcataatgtaattcctgatgctacatatggtataaaaacataataccgtaattagtccacccacttttatttgaggccgagggatttagtgagaaacacagagtcagaagagctatgttcaagacatgatcttaccacctactagctgtggatattcatttgtgtaggaactatttacactcactgtgcatgcatttttctaggctatacgggggacaaggccaaccaagttcttcattgcatggaccttaaaatgtaactgggggtggggagggagaagagaagaattaactggtattaaacaaatgatatttcagatggtgatagatgctatgaagaaaataaaatgtgtcagtgttataaagggccatttaatttctttgagcttcagtttcttcaatgcaatctgaagataagaacacatatcatgtattattttgtgcaacttaaatatcctgtgtgaaagctctttgtctacagtagaggtgaagatccatcatcattgttagagtcatatctcagcccttatagtcatataaacagatccttatttgatcacatgggtgtttaaagcttaatgtattttctggtcaaatacacctcatgcattccttcctttttaccttagctcggaatcttccccccactgaatttctttttgttccatttccatctgtataagtctgcttgtatatcaattattacaatagggcttgttttgtgctcgtctttgtatatcttgccaaatgtaaagcagtgaccagcacatagtaagtgtgtaataaatagctgagtcagaatggagcagaacaaaagatcctaagagctcagaaaagaggaaattctgattgcgggagagggtaagaaagacttcatggaggtcgtgggacaggattgcacacaacaaggtggttggcacttgggctgagggaatggcagacgcaggtcagtggtagggatgctgtgtagatgaagggaggcagtatagcatgatgtaa

SEQ ID NO: 54279 - DNA, 1056 bp, Homo sapiens
aggtacactgggcaataccaagcagaggttgtgcatattttatatgaggattttaactactagaagttttaagctgtgcagaaagcattgggttaaagaacactaacatcctgcttttttctgaaaaaaaaaaaaaaaaaaaaaagagagaaaagcaggatgttagtgatgctgaaaaagccaacctctgaaagggtttgctcctgaaaaacttctcttgtctgctttgatctttaaaggcataaattacccatccctgttctacagacacaccttgttgtcttaagtattattttcaatgcaccaatatggtttctccttccatgtggatttctccatccttgtgccatccctgggagaacacagagaccaacatgcccatgcactgtagtgttcacagctgtgttaagttgaggccctttacctaaaccaagactgaccccagagagcttcttctccctccagacccatctacgtctctacagtccggccgcagtcaaagcacatagtagtgattctggaccacggggcttcagtcacagacactcagcttcagattgccaaggacgctgctcaggtcatcctcagcgccatcgatgaacatgacaaggtgaccatgacccttgtgacccctatggcatcaggttctccttgaatgccttttttaaagtactttattgttttgtgatatacagatcctccttgacttacaatggggttacatcctgataaatccatcataagttgaaaatgcatttaatacacctgagctacatcacagcttgggctagcctaccttaaacagtcggaacacctaggttagccctcagttatggaaaatcatctaacacaaagcctattttataacataataaagtgttggctatctcgtagaatttattgaatacagtacactgcagaatactatatcagcggttctcctttatgattgcatggctgactgggagctgcggctcgctgccattgtccagcaccatgagaaagtatcaggagcctgggaaaagatccaaaattgaaagtacagcttcactgcct

SEQ ID NO: 54280 - DNA, 1067 bp, Homo sapiens
aatctctgggacacctcagagagaggtgtgggtacagctaatgataatctattgcctgtggacattttctgcttcatcattttgactttgccaactccagaggttttgctcactaacctagtggcttaaaacacacacacctcactctcttaccctcacccctcacctccaggttgaaaaacaggatagttcattcttgctatgacttttctctgcataaaatagtttgtgtgtgtgtttaatgttatgtatgaacataatactaccacttcatgttggaacaaaaaccaaactctaggggtttccccactttaccaatccttatggatccttttcaaatttgatagatggatggctccagggatttattttgaaactctcagaatctgttctgtaggccttcttactccttggcctcttctgttacataaataaataaatctttagacggtaggataacaagtttggtggttttttttttttttctttcctgcagatttctgtgttaactgtggcagataccgtccggacttgctcactagaccagtgctataagaccttcttgtctccagccaccagtgagacaaaaaggaaaatgtccacctttgttagcagcgtgaagtcttcagacagtcctacccagcacgcagtgggattccaaaaggcatttcagctgattcgaagtacaaacaataacacaaagttccaagcaagtgagtgcgttctctcagaggacttagaggcatagtagataaagatggcaataggaatatattgtaaattgatcacacaatgatgtttagagagattttatttatttatttatgtatgtatttatttatttatttatttaccttgagacagagtcttgctctgtccaagctggaatgcagtggtgtgatcatggctcactccagccttgacttcctgggctccagcaatctttctacttcagcctcccaagtagttgggaccacaggcttatgccaccacgcccagctaatttttatatttttggtaaagaaagggtttcactggctgagacctgtctgatctcaaactcttga

SEQ ID NO: 54281 - DNA, 1043 bp, Homo sapiens
aaaatgttggcaaaataaaaggctaagttgaggaccagctttgttgcatttgccaaaaaatagcctggcaaagtagcgtccattccaagttgacagcacaatcttatacattgttttttcttcaaataaaaaacagattggatcttttccaactgtgatacattattttggcagatggtaacctgtagaggaatgggtctttgtgctcattggttgaaaattaatgactgagtgatttgagacaagttagtctctggaaagaattagagttggggagcaaggatggagagtaagggatgtttttaatgcagagctgacataatgcttttacgcaattgaaaatctcacattatcctttcaaaactgatgagcttctttggtattcgaaatcaggaggtggccattgactcaacagcttcttccttgcctttaattaagtgcttaattttatcttttgcctgaaatatttaattctgtttgccaacacagcctccctctgggcagccagattatcgcagtccctgtgaactcatccctgtcttggcacataaacaagctgagagaaactggaaaggaagcctacaatgttagctatgcctggaagatggtgagtgagaggaagttgtgtttgcttgaagagctacagggtacagtgctcttcttcatgttggaattctcagccagggggtggcacttgggtctgataatttgtctcgtaatgtgactaatcagtttttaaagtgattgggaaagaagacattccacaggtgttgtataattatttttccttttttgtttataaaactgataattgttcatgatgaattcatcaaaccatataaaaggatgtaaagtagaaagtaaactatgcccagcctggacaacataacaaaatcccatctctataaaaaaatgtaaaaattagccagacgtggtgacacatgcttgtattcccagctactcaggaggctgaggtgggaggattgcttaagcctgagaggttgaagctgcagtgagccatgctagcaccaaaactatctact

SEQ ID NO: 54282 - DNA, 1018 bp, Homo sapiens
ccagccaaatgttgactcctttgtagggtatggtatctgtctgaatctgtcagcttctcccatcatataagatttcatatgcaaacaagtaaacacttacttagaacacatccctcagtgttctcattaacagaccatgtgtgaagcacactcctactgatgtctaaatagagtgacttgtcatgcctcccatatattctaatgggttgagaaaaagtaaacaaagactgtttcttttgaggggaagcagtcaccttggtctttgattacaatgaaatgggccagaactgggctgttaaagatgttgttatagtgcagggaatcaaaacccaggtgtgccttagtcattaggtgacccaactgactcctctcacctggcagcttatcatcaagagccatttgcttttctgtctagacatattctttttgttcaagagggcaagggtaggggcagatgtttatgcttgtgtatgtacgtttacatgtttttgttgggattcaaatgggtggaagaattttgatttggtttgtttacaaatatttatcgtgttggtccaagtgaatcacaatggaaatatgatggactttcaagttacaaaaacccaggttcaggccgggcacagtggctcatgcctgtaatcccagcacattgggaggccaaggcaggcggatcatgaggtcagaagttcaagaccagactgaccaacatggtgaaaccccgtctgtactaaaaatacaaaaattagctgggcatggaggcgcatgcctgtaatcccagctactcaggaggctgaggcaagagaatcgcttgaacccgggaggcgaaggttgcagtgagccgagatcgtaccactgcactccagcctgggcgacagagcaagactgcatctcaaaaaaaaaaaaaaagaaaaagaaaaaaagaaaaacccaggttcagccaaatgcagtggcacatgcctataatcccaactactctggaggctgaggcacaagactcacttgaacccgggaggcggag

SEQ ID NO: 54283 - DNA, 1855 bp, Homo sapiens
gcctgcaagatgctcttcaccagtgtgtcaacagcaggtgcagtcagaggctggaaagtgggtaagcagaatctagtaaagaattgaggttttccagctaatatttattattcctactcttcgtgttttaaaaaggtatgtcagtttttcagatctgaaactgatttccataagcctttacccaccagattaaatgttgtctcgttcccacttattacccgtatttagcgtgtgtaccatatgttagtagcctcatctgtgaatgggagtttttcttgaaataaaagacttgtgaggggccatggcatgaagcagcagggcaagggaggaggaacccctgaggtccagaagcagaacccagtggtcaaggctctaggtgtgatattttgaagctcatttattttcctttcttaggaaacacatctgcttcatgatagttttgagaactaaaaactacatgttccccgctctctccccactcctcaggtgggattaggagtttgggactagacattatggaaatagtggctgtggtagactaagtaaaggggagttggtttttagcttattgtagctgtagcttgccattttattaaacagtgtttagagggatagcttactctgctttgcgtgtgtattttagcaaaggaattgtggcatcaaactgattaatttgggatgttatacagtagccccaagtcaattaagtttgggaaatgctgacactgcatatattctcttgagacagtcacaatgcatgtaatacactaaaggctctgagaaattggcagtgaggaaacctgtggtgactggccaagtatttccaaacttattggacttttttttttatttttttaaatgaccccacacttgggggatgttaagccagagtctaacaaacattggggtcatttctgtttggtcttgtaagatgattttgaatagccccatgatgtgtggatgtcattatttaattcacagagagcagttttatttctctcctttccaagttgttaagaggcataaaacagttatttccctggcagtctattgctattctcattttataaggaaaggaaactaaagctcaagaaattcacagcactagtaagtaatggagatcctgagaactgtctgatgcccacacttaagtgctgtcccctgccccacactgctttatagaagactaagtattgtttttctggcagggactgttttggggtgctggattgtgaatggtgcatggtggacagtgatggaaagactcacctggacaaaccctactgtgccccccagaaagaatgcttcggggggattgtgggagccaaaagtccctacgttgatgacatgggagcaataggtatgtttgttagatgccccaacaatttgattcttgaatatacaatttcctgcctatatgctaggacatcttaaaataatcctcttcccaacttccctgattcctttgctggtagtctttagttacaaaaccaaggcagataattaccttcagaactggctaaatattctatgcagagagagtgagtggccatctgtgctgccaaattttacaagcctggaattcattcccataaagcttgttctgataaatataaggactggtttctgcatggccaaactctggagtctgtttggatatgcacgccagctgtcagaagcacagggccgtgtacggagtgaccactgtatgtctagtgcctgctaaaaccttcactcacaacttttgcaaggtagaagtcttatagctacaaatcagtatttggggccttggagtcaacagaagccagagctacccagtgcatctgggacagcttaggatgaagcacaaggacac

SEQ ID NO: 54284 - DNA, 1030 bp, Homo sapiens
gatgaggtgatcacattaaacatgattaaaagcgcccctgtgggtcctgtggctggagggatcatgggatgcatcatggtcttggtcctggcggtgtatgcctaccgccaccagattcatcgccggagccatcagcatatgtctcctcttgctgcccaaggtgagctcaaaatgaaccccacaggggaggcagcagccaggctagaaggacagtggcgggttgtgtaagcctctaaggaactgtcagaacagtgctatactttcagcttctgtggagtcattttggaagttcccaaagcctgctttcttcttcagtgcctaaaccctacaagctctattttgatccccggaaaaatccctggatcctctccttaccagcattagcccccagtggcctgcctctgcaataagccagtcaggggagctgggatgctgagtgggaaattttgtttgttagatgtgctgcccttgcaattccaaaaagacaggcaaatcaaagataccccagatcactaatggcaagaatataatctgttcgattgcagctgccattatgtagtgtgaataaacacacatttgaataatcacatctcttaaaacaggataagtcggccaatcgcggtggctcatgcctgtaatcccagcactttgggaggccgaggtgggtggatcatttgaggtcaggagttcaagaccagcctggccaacatggtgaaaccccgcctctactaaaaatacaaaaactagccggtgcggtggcacctacccgtggtctgagctacttgggaggctgaggcaggagaatcgcttgaacccaggagatggaagctacagtgagccaagatcgcgccattgcattccattctgggcgaaagagtgagactccatctgaaaaaaaaaaaagtcatcgaagccaagtacaaaatgattcacctataatcatggcctcaataccacgtgcagtatctatactctgtttaagtgcagtatctgtactctgtttgcagggaacaaaactgtttaatggcca

SEQ ID NO: 54285 - DNA, 1637 bp, Homo sapiens
atttgggataagggttcttgtttattttttttttctcctctgtactttctcagctgtctgaagtggttatgtatttattgtgtcattgttttttaagggaaaaaaagagttatcactaaatctctttaaaaataaattactttagcatctgctgacagtctgccagtgtttgcacctatgtattgcaaagacaggaatacctcccagtgccctagaaattgtaggtgaaatcttctgtctgcgtcttgaagctctcagctgtgtgtttgttttgttctttttctaggttacagcaccatgagcccacaggaggacagtgaaaatcctccatgcaacaatgaccccttgtcagccggggtcgatgtgggaaaccatgatgaggacttagacctggataccccccctcagactgctgccctactaagtcacaagttccaccactaccggtcacaccaccctacacttcatcatagccaccacttacaggcggccgtcacggtacacactgtcgatgcagaatgctaacaatctcctcacctccacgccaagatgagatctgggagctacagaatgttctggaaagaaaaagaaccggcttaaaacccacagcaagagacctcccttgtgtttgtgctttgtgcagagttgtttgagtcatttcctgcctgtcgacatggttaaaaacgagagaaacaacaacacagtcacatttgtgaagatgtgaggctggttctgaaatggaggggaaataagcctgatgaacagacctgccataacactaatggaaggtaacagaaggcgaacctccaaacacagagacggaacctgcaagtgaagctgagccagaggaatgttccaaagagccagaagcattcagctctccttaactggaagagagaaaaatctgctcacccagagactggaatgtggcacatgcagatacaaatgtgtgcattgaagatttcgctttgtttcttagcggtacctggataccacagttgctgtatggaactcatgttatgctctaaacgatgcatctcagaatttctaagtaaaggattatttttctactatttattgaactttcaaacattctcaaactttggggaaaaggaaaggaaacacaggagaagttttcagcagttgccccgagctgttttgtgtgtaatgaagtggttctttgattaaggagctctatttcttatttaactgatatcccactgccccactccacaaaataggaaaatgaagaaatctttctctctgacttgtttacatcatttcacggaaacacatctttgtttgtaatgcagtattctttctctgtgtttgacagagatggggaggggcagaggaatttaagaggttttaaaagaaatgttatgtttcttatgacttgtttccactcctcgtacaatgctattcttaggtttctacgaaacctaatgttagaaccgcatcctttcagctaagggagggttggatttattttccttgttttagagactacaaatttttaaatatcccattttgactgagaatattgacatataagggaagaagttttctaaattgtgaaagtctggttcttaattaaagaattttttttttaatatcacggttaaaagctgctgcca

SEQ ID NO: 54286 - DNA, 1038 bp, Homo sapiens
cggcgaggggggcgcgggcctgggcagcgcggcggggctggggccggggccggggctgcgcgggcagggcccctcagccgaagcgcacgagggcgccccggacccgatgcccgccgcgctgcaccctgaggaggtcgccgcgcgactgcagcggatgcagcgggagctgagcaaccgcaggaaaatcctggtgaaaaacctgccccaggacagcaactgccaggtactgggacggtgataggggcgacgcgtcccgaggggcggcggggcggcgctccgtgtccaggctgggatcgggggcgcctcagagcggtcctggggagtgggtcggcgccgagtggtgagagcggcccctcggtttgactgagttcttggggtttctagcctgcagacgccctgccagggaggggggcagattgggaaactgaggctctgagtggcgaagcggcttctccaaggtcacgggaatcaggggctgctgcctccaagttcggcccggtctttccttcccctacggccgtagaggagtaggaggtgaaggagagtggaggtgagttgtggagcacacattttgcgggggggagcgggggtagagggggccgaagcttcgggagcaccttggcaggggcgagggctccaacgtatagtccccggtgctcgggagtgccatagggggcaggggcacgagagagctgggagtgagtttcgctgttgttgcagaagcacttgcccaagtttctatgaaacaactctgtcttctcagtttgctaaggccccagaatagagttattgctgcgctccttggagccttgcagccgcctcctgctacgccaagtacagtactggagggtttgttctcagtgacttggatgaggtttaaagatagctactctgtgtatttaatccagattaactgttgcttttaagattagaaactctgcatctatttaactttttttttcccctgatttcaaaagctgcatgctcattgtaggagagctaggaaagacagagaagcacaaaggggacacagaaatt

SEQ ID NO: 54287 - DNA, 1048 bp, Homo sapiens
gaagcggactacccacctaccttgttctaaaatgctatatttccattgagacgtctgacccccggcacactctcaggattgatttgttaataaattttgcaatgtaccactctgttagcttttttggcagggaactctctccattcacttataattattcaatcagtcaactgtttatggcttaagagtctgttgaaagctgtaaaccctccaagaaagtgctaatattcataagcacacaaaatttgcatattatttcaagggggtatggatctcttatagcttatccctgatttcattaggggattgtagaccctaggttgaaaagtgctgttgcaggtcaacaaaattttagtcatgtctttgggactttacctgagtagggaccatttgggcagatccaaagctgttgcttcagtagagttttcatcagaaacttctgtaggccacgtttatgcatgagggtttgggtagtgatcctttatctgggcaagaatataaatcaggctcaataattttctttttaaacaaatcaaccatgcgacttcatgtttgatgcaaaagcttattgctctctagtcactcagcagcccacaactgacattttaggttctgtgcctggcccagagtggatgctcaacaaagtaaatttttaaagaggttttcaagaagttacaatgtaatatttcctccttaacatttattaaaagtcaaacattgatacaaagaatgtttttctttaaaacaaatcaagaatattatccattctgtttaatgtcttcacaataagtatcctgatttcttagtaagaaaataagtttctcttttgttagattttaggggtgcaactcattgtgagcccctaaacttgtcttctaggtatttggagcttaattttatgtttatttactactgttatctttaggtttgtaaacttatttcccacttccctatgttaaggcattttctttgtgtgtttgagacttactgtttaacttttatttccatatgaatgccaaaaatagcattagattcattgaaatttgtt

SEQ ID NO: 54288 - DNA, 1017 bp, Homo sapiens
tgctccataggcagaacagtggcatgggccactggttgcccatttttatggttatttctttattatcttgattatgtgctaaacaagaggtggattattcatgaattttccaggaaaatggtgggcaattcccagaactgagggttcctgccctttttagaccatatagggtaactttcacacgttgccgtggcatttgtaaactgtcatggtactggtgggagtgtagcaatgaggacggccagagatcactcttgtcaccatcttggttttggtaggttttagccggcttctttattgcaccttgttttattagcaagggctttataacctgtatcttgtgctgacctcctgtctcatcctatgacttagaatgcctaaattactgggaatgcagctcagcaggtctcagccttattttacctaacttctattcaagatggaggcactctggttcaaacatctctgacaccccccacctgctcccttttgtaagttttccattctaaaaacatcccttttgaaatgtactctggtatttagactcttagacgcgattatgagtattgttaccatttattctttttatgtctgtgtacagttttgcagtttcttttgattttattatgtaaatatttttgtgtacatatattgtcttctcaattggattttatgtaagcttttcaaggacaaggattgtatcttgtcccctactcctaccctctgccaaaatccctgaaataccaaaaaaacactgaataaataacatgggttcaatgagtattgtgcttattaaaggtggatgtgttttgttgcactaaattctagagaaaattaagcctaggtttggagttttacaattatggcagaaggcttttgaattttaaagcaaattccagggttgaatctcagggaaaggtacctatcacttttgaccaatgacaaggtcactatatcattgaactttcagtggatttgttaatagtttaaagaaatattcatttacccttttcgaag

SEQ ID NO: 54289 - DNA, 1063 bp, Homo sapiens
cttacactagaagttagatatctttgatagggcgtatcagaagaattacctttctcccagtatcacatgggctacagtgaaacccgttttcttttttttttttaaggtttaaatttttaattgtgataaaaacataaaattactattaaatatttaagtgtatagtttagtaatgttcagtatatttacattattttgcaacagatctctagattttcattttacaaaagtaaaatctgataattaataaactgcacttttccccctcttctcctcagctcctgaagagaacatcatttgactttctgtttttataactgggactaacttttatatctcacattggtgtaatcataccatgtctgtctctttttgaatgtcttattttactcaacgtaatgtttgcaggctttgtctttattgtaagatgagtgacacccactttcatttcctgttctaatattttcctgtgctgctcagtgaagttttttgctgatttcataggtctcagttggttctcactgtgaatggtgttagcaccattgggaagccctttgaataaaagaatgtaataaatttcctatctggcttctgacagtgaagatggtatagaaagacagaaacccaggctgttgctttgctgcatgccaagacatgaaagaatagataactacatggcaagaagaattggggaaggtgggtgagaagagcaggagcatcccagatcccagagtgagcagtctgcttccctcccccagtctttggaaaatctcacttgtagaatggactgatgacttctaagaggaggaaagctgctaaaaagagttctttatacctgaagtaaggtctgatggtgttagtggctggggtccaacattcagaaagatcacctaccagcgaaggggccctaatgaagaaggcagctggagagaataaccaagaggctggagactgggaggaagggtttttggggcagaggctccacctaagaggtgagcaagctgtttggtgcagcagcccttctctagggctgaacccctcgtcaccatcaactcagctttga

SEQ ID NO: 54290 - DNA, 1354 bp, Homo sapiens
caggtttatcaacttatgaggaaatgctgggaattccaaccatccaatcggacaagctttcagaaccttattgaaggatttgaagcacttttaaaataagaagcatgaataacatttaaattccacagattatcaagtccttctcctgcaacaaatgcccaagtcattttttaaaaatttctaatgaaagaagtttgtgttctgtccaaaaagtcactgaactcatacttcagtacatatacatgtataaggcacactgtagtgcttaatatgtgtaaggacttcctctttaaatttggtaccagtaacttagtgacacataatgacaaccaaaatatttgaaagcacttaagcactcctccttgtggaaagaatataccaccatttcatctggctagttcaccatcacaactgcattaccaaaaggggatttttgaaaacgaggagttgaccaaaataatatctgaagatgattgcttttccctgctgccagctgatctgaaatgttttgctggcacattaatcatagataaagaaagattgatggacttagccctcaaatttcagtatctatacagtactagaccatgcattcttaaaatattagataccaggtagtatatattgtttctgtacaaaaatgactgtattctctcaccagtaggacttaaactttgtttctccagtggcttagctcctgttcctttgggtgatcactagcacccatttttgagaaagctggttctacatggggggatagctgtggaatagataatttgctgcatgttaattctcaagaactaagcctgtgccagtgctttcctaagcagtatacctttaatcagaactcattcccagaacctggatgctattacacatgcttttaagaaacgtcaatgtatatccttttataactctaccactttggggcaagctattccagcactggttttgaatgctgtatgcaaccagtctgaataccacatacgctgcactgttcttagagggtttccatacttaccaccgatctacaagggttgatccctgtttttaccatcaatcatcaccctgtggtgcaacacttgaaagacccggctagaggcactatggacttcaggatccactagacagttttcagtttgcttggaggtagctgggtaatcaaaaatgtttagtcattgattcaatgtgaacgattacggtctttatgaccaagagtctgaaaatctttttgttatgctgtttagtattcgtttgatattgttacttttcacctgttgagcccaaattcaggattggttcagtggcagcaatgaagttgccatttaaatttgttcatagcctacatcaccaa

SEQ ID NO: 54291 - DNA, 1034 bp, Homo sapiens
taacaatggtgtacctacctcacaggcataagcactcactgagataacagtcagagtgctctgtaaaccacaggcaaatgactgttttcaaaaattatcgggctgggcgcggtggctcacgcttgtaatcccagcactttgggaggccgaggcgggcggatcacgaggtcaggagatcgagaccatcctggctaacacggtgaaaccccgtctctactaaaaatacaaaaaaattagccgggcgtgatggcgggcgcctgtagtcccagctactcgggaggctgaggcaggagaatggcgtgaacccgggaggcggagcttgcagtgagccgagattgcgccactgcagtccagcctgggccacagagcgagactccgtctcaaaaaaaaaaaaaaaaaaaaaaaaattatcatcagctgtcaatttcactaccatgagtagatgctggcttgcaaataagatacaattattagtaaatattacttgccactttgatttagacaactagaaaatgaaataccctggctagtattggatcagaacaggaagtgggtggaggtagagtaggaatcagtttcataaggcataagtgcaagtgacgtggagagacagtgctggaaccagcccctggatggaggggcctgggtggcctcctcaggagccctgcagctgctgagggatttgacatatgacttggaagccttgagagtgtgtgggaaccaccagctagcatgtcagacgcccaggtaaggccacggagtgcctgttttgcactggcctttatgaccctagacagtcaccaaatctttaaaccggaccccagccttgcataacataccgtcttctgtgcagattcctttgtacttcacaatgttctcatgatagaggttccttaagatctcgatttcctttttcagatcagctatgtggttacctccactctcaggcttcagagatttaacagccacctgctcccctgtattgtccccttcggggtcatacctgcagagctcaaccttcccaaagtggccct

SEQ ID NO: 54292 - DNA, 1119 bp, Homo sapiens
ggaccagggttggaaatagaatgcgggaaggagcagcttggctaaacttgacctttttactctgcaggaggataaagacctggtccatggaaatgtgtgtactaaaaacctcctcctggcccgtgagggcatcgacagtgagtgtggcccattcatcaagctcagtgaccccggcatccccattacggtgctgtctaggcaaggtgtgtctcccctctcttccctctggccccaccccgagtcaggggcaagtcagcagagagaagggctgggctggggttggtctccttttagagagtcattttttttttgtattttagtagagacggggtttcaccatgttggccaggatggtcttgatctcctgccttctcttaagtccttgaacgagcccccgttcgtcctcctgccctgggtgatggcccccaccctgggatgttttgctgatcctaaggccagggcttcagaagcctggcttcacacgaccctcctggggagcttggaggcagggacccatctgctggctgtgacccagactgatgtatcagaagtgctggtggtggcttggagggctgcacgcctgcaggccccccgcacagggcctatgtggccatgggccatgtttgggcacactgcttgaagtagttccttcattggctcactgttctggctgcagtgacagtaattgaatccctaggagatcccagaaactgctccatcagtgtgtctgttgtcttccagaatgcattgaacgaatcccatggattgctcctgagtgtgttgaggactccaagaacctgagtgtggctgctgacaagtggagctttggaaccacgctctgggaaatctgctacaatggcgagatccccttgaaagacaagacgctgattgaggtgagcaggtgtttcccggggcgtgaggcaagtgagggctttcaggtgctcgtgggcttcccaggagttgtcggaagcctggcactgtgggaagagatgggcatgggtttgaatctcttcacgggcctactgggtgtgtgacctcacaaatgtaactgaacttccgtgagcctcagtttcatcatctataaaatggggataatcagtaactacttgtagggttgtt

SEQ ID NO: 54293 - DNA, 1023 bp, Homo sapiens
tttgcttttctttcccagtttctattcacctgcatctccttatgatggtcatcttcagtgctaactccatctaacgtcctctgggaatagatctccctttcccatttggcaacatgtggattcatggacttagatttgtttctaaactattttctcctaacctgtacatgaaaaggagatgtacttttctactgtcttttagctacaagcgatatattccagaaacattgaataagtccatcagacagaggaaccttctcaccaggatgcggataaataatgttttcaaggatttcctaaaggaatttaacaacaagaccatttgtgacagcagcgtgtccacgcatgacctgaaggtgaaatacttggctaccttggaaactttgacaaaacattacggtgctgaaatatttgagacttccatgttactgatttcatcagaaaatgagatgaattggtttcattcgaatgacggtggaaacgttctctactacgaagtgatggtgactgggaatcttggaatccagtggaggcataaaccaaatgtaagtggctgttggcagtcgatcaaagagaacattcccgtgtcacatagcgtatgctgtttatccttctggagtcatctgtctgcatgtccatcactcccataggctgagtttatttaggagaccatgtatcattcatattttatttcatccctgtagcacaaggtctaaataagtatttattgagttatgtagagaaatataacaacatgtataatacgtagtagtataataataatagcagatagttcctgagtgtttaccatgtgccaagtacttttctaagtattttataagtattaactcatttatttctaaaaataaaaaaacctttgagggaagtattgctattatctccattttacggatgaatacaaagaggcacagagaagttaagaaatttgcccaaggtcataactaataagcatttgtgccaagaattgaacttaggcctctggctccgtgaaattgactaatt

SEQ ID NO: 54294 - DNA, 1020 bp, Homo sapiens
tttccctagagctacaccagaatggagggagagccccatcaactctgtacacccagctcctagacaaggccatctaagcatgtttgtggaattcatgcatgatcagacctcagcccagtgtcaccttcccttgctctggcgcagtccaggcctagtacacagtgtttgtcagcgtcacttctatggcgaagggacttcgtatgtctgtactgttccccagtgcctggcatagtgctcagtcaatgttttgttaaatgaatgagcgggggagaacatctcctgagccccttcacacccaactctgtttaaaagagctctgatgctagagaaactgccaatctgattcgtctcgttgctgtgctgcgtttctaggcggcccctccctgtgtagtagccttcttgtcaagatcaaaaacgggtgggctctcatggtttctcccccttgctcctagggacagtatgatttggtgaaatgcctggctcctattcgagaccccaagaccgagcaggatggacatgatattgagaacgagtgtctagggatggctgtcctggccatctcacactatgccatgatgaagaagatgcagttgccagaactgcccaaggacatcaggtaaagcttcccactggctgaagaattgattgtgaggatggtggtgtttctacatgttcttacacatttcagcttaattactgccagggtttggctgacctttgctctctatgaaacccagatcttccttagaatgtttactacatacacgtagcctaattataattgtgtcttgattttggatgttggctgctaatctcagaaatttgtgcttgggtgaaatttctgagctgaggatgccaataaaattagtggcccccaggccttctccgtcccctccttgcccatggtggacactgtcgtctatcactgcattttttccttttgttttggacccatcttaaaaatccttctcagtacagttctgtaagcagctactaccatcccaagcctgaactctgaac

SEQ ID NO: 54295 - DNA, 1029 bp, Homo sapiens
taagatacaccatcagttgaatagcagcaatctgggaagtaggaaacactgccacgtaagctgtatatcttgattgcgtgatgaaactaagttgcaggaatgttaaaatgtcaatcaaattggtcttggattcgaggtagaatgggcttagcagtgtggctgatggtaagcgtgcagggagctgtggtcagcatggagttccagtcagcaggtgtttccctattctggaagcatagtgagaagtcagaggagctgtctttgtgatcttcgggaagtcactttagctccctgagtcatagaggaggtgctgatgggacacttctcacgcagcgctagtaagaaggaaagagatggtgaggggctacaaggggcagggttgtctgcctgcttctcagggcacttcagcctccggcactgaccactgttggtgagccaggacgccctgcccacatctgggtcccctttgccacaattggcattcattttcctgccttccaggttctatttcaccaattggcatggaaccaacgacaatgagcagtcagtgtggcgtcattctccaaagaagcagaaaaatggctacgagaaaaaaaagattccagatgcaacccctctccttgatgccagctcactggagtatctgtttgctcaggtaggaagtttgggcccaggagaagctggagtttgtgggatgggagaggcattgtagagctcagaccccctgctgcagctgaacttggtggtgctagagtgctttaaggcctgttctgggtaagttcttgccacacctggacttgccccaagtgaggagaaaaaaggcagcatttcagctttccaagaggctggttatccagcttgtgggctttggggcttcctttctttcctattcctttccttttccccacctcctaccattttatttttcatccgtattaatagccttatgtgcagaggtcagagggaagctctgcttgttagaagatgtaattcaacagggctgaagaaggcacttctcagcagccgtagtaa

SEQ ID NO: 54296 - DNA, 1060 bp, Homo sapiens
tggcagtcattctccccccaacctgcctatgtttcaggttcataaaattttaatcatgggcgtagaagtgagtgacttcataatctccctggtctttcccatcattctcttattgacggaggcaactggtggagtggagaggcaggggagcactgttgggccagctttgtgaagccatatatcttcttgctagttggttactaaataaaaaatatttgtgataatcatacagagtacttaagaagtatatttattattaatggtaatagattttaatcactgacaaaaatcactttggttattatttattctaatatgcattttgcatactactgccaggaatttgtttgcatgtctgatgtataatcacgagcgtgttagaattgtttaagtgctttctgtaggaaacagatggaagatttccccaactcccagagtgtttccgattagcaaagtgcacatcaggcaggatctgtgaacctctcagataggggtttttttgaagctggatttgataaggctctgtgacggatacctgtaatgagaaatatcatcagagttttatttttaaatgatctaaatttggtttgccaggagctacagtgcatatttctggggagtcatagttcttgatgattatgatcaaaacagcctgaccgaacctggtcggaagtctgtttgccctaagaggatatgagtgacccagattctttgtggatgagagagttccttatctttgcatatattgggtttagaaacagatggccaaatgtatccgccttgattttctgatgtgtttttttacttttcctcaggtatctctcctctttgtcacaacctctttgccctgtatgacgagaacaccaagctctggtatgctccaaatcgcaccatcaccgttgatgacaagatgtccctccggctccactaccggatgaggtatgggaagtactgacctggtacctgcctggctccctctgcactgagggacagtggtcagcctggagccctgagtcacttaccaagaagtattgtagtcatttttgtaatttgtaacttt

SEQ ID NO: 54297 - DNA, 1064 bp, Homo sapiens
ggcttcctgttcacatgttgctaggactttcctctcacactgtggcagtggtgccagggcagagcattagtagtgggcaggaacacagggaaggctggggccatgcagtgattttttaaatgacagtcctttcagtctacagaaggaagagtgttggagtaagatcagtctcctgggtggttgttagactatgaaaagtactaaaaaaccagagaagacagtggtgttgctgatggggacagtttagagcagttcttccccactgtggaacgagcagggtccttagaatcagtagtcacgtgtttgactcctggcactctcgctgattagcgtaaaacctctcatgctttttatgagaattaagtgcgagtgcctaactccaggctcaagatattgaaatgcttagtagatattgttttttttttccttgactggaactgtatatttcatcaagctgtaatcagtttaacaaattatggtcaaaatatgagtgcttactgcatgctaaactctgttgggcattttacatgcattgactgacttaactcttaatagcccagtgagataaatgctatttttatctccccacttacaccaagaacattgaaggttagggatattaactaacttgcctaagattacaatagctagtcggtggagacgccagaattcaaacccaggttgcaatgactccagcccgtgctcttaactgctttgctgtgtcatctgagctttatgaaatggggttttgatttgtatctaggcttttgctcagaatccctatttagactttgctcttcgaagcagattcatagcccactttagtcctgtgccataaagactattttatattgcgtcaatacctttttgtacacttacacatctatagcctcttgcaaaaagggcattgtaggtacttgatgaagagtttttgaaagttgtttgtttttaaaaagagacaacatcttgccatattgcccaggctggactcaaactcctggggcttaagcagttctcctgcctcaacttctcactgaaagatatttttaatccttgtaccaacc

SEQ ID NO: 54298 - DNA, 1019 bp, Homo sapiens
agatacttctattattctgaggaaacaaactcaacagaggttaagaaactggcctaaggtctcagacagtgggtgttagagctgggatctggacccaggttagggtgactccaagagcaggcttttaactgcttctataaggaactttggagggcatccaatactttttcattatgcagggtttgagctcagagaggttaagaggcttgctcaacaccaggcaggtcctagtggatctgggctggaacatgggcctctttctgactggtgggaagaagctctcgcacaagctctgttcctcttgcaccctcccctcctttccttgctgtctgcctttttcctgcaagattcttcctgtctgcatactctttcctgcacaattgtgcttgtgattttccttcttcctggcctttatttttattttttttaaagaacagctgtacctttcctctctctttttcagtcttctccatttctgaaaactgagagcagattcctctctccttaatcccctctcagcccaaagcatggcccttgtgtcctctgtttttgactcccatggttctcagtgtctgtctctcagcatgccctcacagcctcttccctggggttcccgtgtatatgttagtcttgccagctgtcagtagattgtaagatttttggcatgctcagatgtatttgtgttacttctttggattcccctgaagtcccacaccttgcccaaggcagagtggtaaatggaaaggggagtgaggctacagctgagaaatgtgtttgagacctatctcacctctcactggccagttgactgtgggaacgccttagccgagtcttcccatctgaaggggctgtgaaactcgaatgtggtttagatgtgaaagccctttttaagccataaagtgctatataaatgcaaggttttattgtgatggcacaagtgcttcagaagtatttttgggataaatgattaaaaagcacatattgtgcctgggtgagttggttcatgcctgtaaccttaa

SEQ ID NO: 54299 - DNA, 1055 bp, Homo sapiens
ctgcttgaaggtaaaattgcaaaaatggctcattctcccctacttttatgaacactgttttagtctaatcttattatattgaaatcttagattttatcccatgcttgtgtttatccaattttatagggtgtgtgtgtgtgtatatatgtgtgtggggaatgtgaatatatgtgaatgaatgccttttctagagaatctggtatattaagtcatctacccaagaagaaaagtcttctgagattgatgctgtcagataaatctatagaatttgagaaatgaaagagagcatagagaacatctgatccggacttttccaaatgtatattccattaaaaaagaagtgccttggtctgatgatttttttgggagttggagactcactgcatttattaactatgaaaggcttaagagctcttgctgttaaaaatattatttaactatgtttaaccagtgtttctccaattttttcactatggaccctcattttccttctctctctttttagaaggatatgtacatagaacagttactatcattgcacagaagtacaagattccagaaaacataatttgggaatgctaatttaattcttaccttcaaattgaatgcgatacttcatttctgttggtttgtgttcccatatgtagtatgagcaggttgaatgaattaatcaattactgtgtcactcctgactgtgacattttctggttctgattcgttaaatcaatatttaaaaattatatctgtttctatattaaagaaccttgtcttttttgttccttactagaaccatagtgtctaatacagtgcctgacacatagtagtgtctcagtaaatgttactgaacaaatatatacctgttagattcagagcactgaactagctatgtcttgaggctgcagagagaatgatcttgtttttgctctcaaggaacttgtagtcaagtcattaactttcctaagagcatggaatgtgccatggagaggtcccaaattagagcttgattgtgataatctataggacaaagatagattggacattatttctgaccctgt

SEQ ID NO: 54300 - DNA, 1039 bp, Homo sapiens
tggaattaaattttatgagagttttgaatttaagcctgtcatgaatctgtgttgttgttgtctaggatccttgcctatatttagatcatttgaaatgaaataacagaaaattgtgaaatcaggaacaaagtcctgttagaaatgtaaaataatcaaaatatgaacctagctatgcttggatttaaaactgaaaggtagatattttctcctgacatttgaaaatgttttcaacttttattgctcttactggaaaggagaaagaacttagctaggtgcatatcatggatacttgactgggtccaggtcattacttagatgatttaatggaagggcattgggttaggagtcagtagacctgcgtggagtctcagctcagatacttctctttgcaaaacctgagttagttacttcagtcatctttttggcatgtatttacatatctgtaaaacggagacaatgttattggcctctatccggcatgatattgttgggggtgtaatgaggacatgtatgtgataggaatgtaaagctgtgatgaacacagagagtgaccatatgtctctgtttgcctggggcagccccagtttacacctgttgttgggtataattattgatagcacactctttaactctcaggtatcccagtttggctgataaattatatggtcaccctgtattcataacacccatctattgtttactattaatctttcgaagtaggaaggttttctggcctcattcctgtggccccaaatccctcaccaaataagtatttcttagatgctttctggtagttttcttcaattttatgtgaatttcatctctccaactacattggtcagtagataataattgtttttttttttcactcctgaataattttcttgtttatcatggtattagcattttaaacattctaattgcccattttggttggtgcatcttaagaaagtaaatttgaagtgcaggcagaggacagaggaaccccagcgggaaatggctttgtggaagtacactaaaaatgaagagtacagtttgt

SEQ ID NO: 54301 - DNA, 1002 bp, Homo sapiens
cctggcccccagcactcagcatgtgtgcagatgccgtctttctgcgtgcccagaggttcccatgcttcacctgacatctctagttacaggaccctttgtcttatcctttccagaaactaaacctctagatatgtgtttccttataataaaatagtcactagccacatggtagccacttaaatttaaattaacatttaataaaattaagaaatcggtttctcagttacagtagccatcttttaaatgcctggtagccacatgtgactggctgccgtactggacacagcacagatacaaaacgtttccattattgtggaccattttactggacagtgctggtctagacttttgctggggcagaggagtggccaacgggattctttttctcaaacacctttctctggccctctttcttcaccccagttactggtgcttccttccagttcctgtgactttggagacttctgtggtatacgttaatttggttatcagcttttgccattgtcagcttgggattcagtatttgtggattatcgaagtcaattttttttttacatatccaactactttccagtttccaaagttgtagttttctcctcttcttttccccttacatatttgtgaatttggtcttaaacagaaaagccatgctgtatttattatactactttatatattttaaaaatatgtactatattttagtggagtttcagaagggagtgaaattgggtatttctgttcaatctgccattttagctgggaatcctgcctcatttaccttcacaatcctataaggtatatatgtggttattctcattttatagtgaagagaggcaggtaaaataattgactcaaggtcacatagctagtaagtgggatttgaagttggatcagacttaaaaaatcagagagctttttttattaaatagtgttgtgccttatcttgtattgaggaaagacccacccatcacacgttccccaagttgcaatactatagttata

SEQ ID NO: 54302 - DNA, 1039 bp, Homo sapiens
tagcaagcacttgtttagttcctgctatgtccagacactgtgctgagtgccttcacatacattaactcttctaatgctgaccaaaatactacggagcatgtgttacgatcattgttttacagatgaagaaattgaggcacagatgggataaataacttacccaggatttcccagctggcacgtggtagagctgggattcaaacacacgtgttctggttccagactgtgcttatatctgctatgctgtagtgccagtgaaggctgggtcatgccagacctcagtttcgtcatcagtaaaatggaactaatatgtggattaaacaaaatgtgtatagaatggcagccacatcaagtcataagcattcatcaggtggactgtatatctagtggtggtggtggttgtggtcagcattgtaggaaaatacaggggtgcattaggaagtaaccctctagggaagggccgtgtatactgataatcgttaatgtaaggaggacaggggtaagggccctgaggaaagtgtgtgcatgaacagtgctgcgatggctctgaagtgggtcagtttgttccacctgggcagtgtggagccacttgggggtggggggaggggatcctgctgttgagtctggaaaaatgggcaggagtcacatatactggagcaggtaggaggagcatttcctctgcaccatcaggtgagcaaagatctagtgtgtactcagagttggaaagtggggtctggagacaatagcactggccgtaggagagaggcaggaactggagtgaagataggttagagccagcactcactggggcttgatgccattgcgaagctttcagtttatgcatcagggaatgtgtggtcctggggtccacagcttggtttaaagatctaatttgggtatcttctcagctttctgtgactctggctgagcagcagagaggaattttgttttggcttttatttgatatgctatctgtcatctacctaaaggagcctgcccacctcctgggttcatacagaggagaggtaccactatagtg

SEQ ID NO: 54303 - DNA, 1048 bp, Homo sapiens
ttgtaattttagtagagacagggtttcgccatgttggccaggctggtctcaatctcctgaactcgtgatccccccacctcggccccccaacgttctgggattacaggcgtgagcaaccacacctggcccagatttcttatttataaagtgccatgatgtctacctcacagtgttggtatgagcgttaaatgagatgtaaagaacctgatcagaggatccagttatatggtaagtagtctaaagtgtaggtattattattgttaaagatattgtgggcactttgttgattgaatatccccccccctccttttttagagccaaaatccatttaaaaaatacatttaggtttcttgcagttttttgctgttatgaacaacacttccattaataggattaatagctgtatagctagatctctgtgtgtgtacattatgtattcttaggatacatttctgagagtcacatgggttcctattttttggctctttttattcccttaccagagtgcctcccgatagtttgtaattttgtaacaatttaccattaaagaacagagttttgataggcagagatgggagagtaggagagagggagtagcctgtacacaaaaggattgcctcctttaccccaaaggttgaggcctctgaatgctggtctgagctcctagggatgatgcccctggagcgtagtaattgcctaggatacaaccactcagccttgtgccaccatggtaggacacccaccatgctgggtgtcctactgccatggttggggagggctgaatgttttcaccctgttgctgggggaggtggggacttggatgagtgacacccggcgtggacagctaccacctgcccatggtagatgaaaccttactttcgatgggaatggccctcccttcttatgggagttgtagtctgcatggagtgcggttgaacaaggatgagcaggtaatccaggtgtacttagaatttgcttcctctgaatattagaacgtgaagaggactttgagggaatccagcatggtggttttgactctttgaaaatc

SEQ ID NO: 54304 - DNA, 1074 bp, Homo sapiens
ctggccggatggctagcactgaacttgtgtggatgtttgttcaaactaatcagcctacgattggtttgttcctaagaatgataaaactttgttctagttttttaaattgtaataataattctgtaagcatttaagaagaatgctttctttaatgttgacttttttttttttttgagacagagtcttgctctgtctcccgggctggagtgcagtggcatgatctcggctcactgcaacctctgcctccgggttgaagtgattctgctgcctcagcctccagagtagctgggactacaggcgcccgccaccacgccaggctaatttttgtatctttagtagagacggggtttcaccatgttggccaggatggtctcgatctcctgaccttgtgatccgcccgccttggcccgccaaagtgctgggattgcaggtgtaagccactgcgcccggcctaatgttgacattttttactcctacacgaagctgttatgtttttacttattcttttctagtctttatcgataatgtataaatatgtactgtattatgtaattttaattgctggatacatatacctgtcttcttaaacttttttattctattttaatagagtctttgtaataatcatttttgaatgtagtatttagttgtgttaatttattttatttttcttaagtaatctatgatagaataagctatttctgtttttacagaatattgtagggaacctttaaaaacacacaattagcatttttctgctgctaattgctttattaggatgaatgcatagatttactgtgtcaaaggttataaccaattttatgacctttagtatgtaattctggaaaattaaacagaaacttaagtcacaaatggccttaaacattggcaggaagctgctgatttcctgactgttgtacaggcaacccactggcaagtaacatgtcaaatacggaccattataattccttatcataaaggcagatacagttttcttcaaaggacatgaaaataatttatttgcttttgatgccttttctcactgggaaatgatattctgtaagtgcacaatgt

SEQ ID NO: 54305 - DNA, 1018 bp, Homo sapiens
atgttgaaatgactgggtttcagggaccggaaactaattcctgtgagtattctttcctctgaggtgcaccagccttcttggcagtttaaggcgacaggaaagcataaaacattaagctcatttccgtgatacctccacttctgagggtttatgatccatgattctttgtagttggcagtgggcacacattcttccttggtgctctgcggataaactgcccagtcccgaggcaagacctgctttagaagcaaaaggataatttcttttaagtctactctggccagaagatagagctggcgtttgttgggatatttttaatctgcagtaactgaatttatttaacagtactattcacactagcattttatacattcttttattcatttagcaaatacttgttgagctcttgcagtgaatctcagagagtgaatagacagacaacaaaacaggtacaaatctgtcctcgtgtggaatttacagtctagtggaagaccctgagggcatgttcagttttacagttgcagactatatgcatgtaaaagagtaaatctttgtgattgtagaatgtttcctagaacccttcatggcactcctttgaagtttgaggactaggaagtagcttccccttgttatctttctttttttaatgttacagattaattcattctttgtatgcacagacatctctttggtacctattaagtgcctggcagaaggataagacatagtttatatggaaataaacttggtatacatggctgtaacacattgtgggtgatgctgtagtagcagtcagaattaagagctccaggaccctgaagagagctaattcctgcgtggagcccttgtcaaatgcttttttgaagaggcttcatttgagttgggccttcaggagtgagtaggagttcctttgttttagggtgggaaggaagtctaggcagagatacagtgtgagcaaggacataaaagtgggcatgtacgtggtgtcagtggcagacttggaagtggccactagatt

SEQ ID NO: 54306 - DNA, 1055 bp, Homo sapiens
ttcggccccaggaaggaggctgagggtcttagcttttttccttccttgcggtctcagcgagggaaagtttctgggatttggagctgggtgttgggcgtccgcgaactcgggaaacgccccctcccctcttaggttctgttaggaaccaggcctcaggtagccagcgagaagtgggaaaggagaccctgggcgagaggaccagggaaggggaacagtgggagagaactacccggggaattgcgaatcccactggaaagggactgattaaccgaaactggggctggtctctggctccctcactccaactccatccgcgcatcgtcggcgaccgggagcatcggaggactaatagacactcctccaaagtcactccccagggtccctgggatgtgggctccttggatgtgtgtttaccacggaacttctagataaaagatgcgatgtttgccaggtgtttgtgcacacgttttttggagggtttgcactccatgatttcctgtgtgttcctggggaaggggaccccgtccttcctgccactcttcttactacgtggctgtgagctgccttctgcccctggttgagtacatcgctatacatgtcattgacacttttccccccaagtcatagggtttttctctcactggcaggaatttacagtggtataaaattgtcattacttctttcagggagtaaaacatgggtagttaagtgatgagaataatgcagagagagatgtaaatcagggcgtgtttggttttggctatttttttattttttgaagaaaagatttgagttaaatatgggtataggcacagtagattttgtttaagatgagcaattcgtattgattgaatctttgttcttccctttccaaaaccccattatgtgttgtttcttgattttgcttttggtgactctgatgttttccaagaccaggggattattttcattgaaggatcaatgtgttcttttgtactttgtggtgaagattaatggagaccaccagggttccagacatttctggtacaatatgctttgtaatgtggagaaaatgt

SEQ ID NO: 54307 - DNA, 2079 bp, Homo sapiens
ctaataactacaaatatgtcaggattatttatttgtctccatacttacccaaccttcagtgtttcagggtaagtattcagttttccaaagctgacagaattgtggtcaagaaatattagttgataatcttatcctttttcgtggaacagctatctaaaattttactctaaaataatcacagtatctttgttcacgtagcagatgtttataattcgggtaaaaatgtgcaactatttccaagaaccttaggttatgggatccaactgtgattttttttttttctttaatcttcgttgccctctcgtgtttcaactctgtattacagttggctaagacctagatgatgacctccttaatttttagatatttttgcattttaggcaatgttgtttttaatttgtgtgtaggtggattgtttcattggatgttgcttttctgaagataaggtcattttcatagtacgtaaagttaatagttgagttagattcactgtacttttattttctgacttctgctgatctaaagaattgattcatctacctgacttatttgaagtacagtgctaatatctaatatgcatataatgagtctttgaaattgagcaaatgcctaatgaaaacataattatttttcaaatatctgtcaagttccactcatattgaaataacttgaaaccttatgacatggaaaaaacccaagtgaatcatggttttaataagttgatattctgatgcctgaattccaatttcagaatcttttgtactttttattaaaaggaagaatcatccctaaaatgacttcagagtacgtctcaaaggtacagataatttaaaagcaagtgatgtgtatatgttattattactttttaaaaaggtattctgaaggttgtcagtatcaccataggtatagaattgacataaactatagtgaaaaatatcaatgttactaatttgagtacattcttagcactcagagcaagaggaatgaaagtcatttttgctaatgtgcatttttcttcttaattataaagccccactagcttctgcttcatgatctcagttactgagaaaactaaaacaaaaagtaaatgtttttagaaatccttttgtttgtgtaaactgaatatccagttgatggagttggacagctagggtagggtagagaaaacaaagcactgtgttcactcatttgacatggttctggacatgggttcgccataacttagcaatatatgatctctggcaaatcacctaagttttttttttttttttctgcctataaaatggggtaataatatctaatctatttccagaatccttttttgatgaattaatgaataattcattgccagccccatagcgtcttgtgaaaaccaaatgagaaaacatatagagcagttttgaatgtttggcagatatgaagtattattgtcatgtttggttatgagcactttgaagacaggaatcatgtcttagttatctttatttcctgaacatctagaagagggctttagaacgtagtagttcctcggtatatatatgaaaaatcaatgattgaggtcagggaggcacagtcagtgaatccatgcatggaagagataagctgtgaaatatgctggaagcttactgcatatttgatgtattagagtgaaaacctaatcatgcagttgttcatcctcattaatatggataagtcatgtgttcatctttcattctaatttaattcaactgggccttttaatatttcagcctcaccacttgctgggctctgatccttctttttcttctgcctcctcacgtctccaaccagaaggtgatcttttagtccttcacttcatggggagccttcagagagagtaatgcagccaccagaaaggatgccgttgaccgacacagtgactgacaggctgccctggctcagttatcacagtgctgatgctgtctattctaaaggtacagtactgtgataactgaaggatggcagccatcttaccttccatcagaggagcctcaccgtacccaggaagaaagaaggtgaaagaggaatgtgaaacaggtggctgggacccagaaaccctct

SEQ ID NO: 54308 - DNA, 2069 bp, Homo sapiens
gttccatgtgatgattggggaccccaagtattacattattactgttatattagggagattagtgtaaaagtccagggttctagaacggctagcaggggtgtcatgggaaaattgggatacccacatacccggctattgctgcttttgtaaaaggatcctgaacatagcaaaaggtaccggaaaacaatgtgtggcaaagtaacaattgtgacacctggtggcattttagtgattctactcatctgtcactcacttccatttattttttctttgcttcatctactttctgtccccctccccaccaaatcacggctccactcgtggcatttgggcccacaaggctgctgactcctttcctccaaaaaaagtacaatgctaacgtgaatagaggtagtgctgtctttgggttttgttttgtctaatgagattcagaaattgcactggaaggaacttaggagctattcggtgctatccctttattttatagatgacaaactgccaaacacctcacctaagaccatatagacagagactggaattaaacatactcttgttgataactgtttagaggctccctgagaaatggagaggttcatcaattaatcaatcaatcaagtatctgttgagctagcattttgtggaaatgaccactaagtgttgtgaagggacatgagtaaaacagtttctgacttttttagaaagagtcctgttgacttgaggaaataagatataaacagcaccaaattaaattgcagtatacaacacagcacttaatgagtgcagtgccactgtggcatgtgttactagttagtagaaatgtgttcattttacagatgtaggaatagaagcttcgagaagggtggaacctgcagggaagtggagtgtaattgtgttcctggaacagcccaaggctgtagaattggaggtcattgcaagtctttggtattggctcctttagctgtccattaagggaatttgaaaatctgagacccagcattttcaaatggcagtgctgtagtaataaggcaatcatagattaattggagaccatcagggtttttagagatgtttagccaggggtggatcattccgaagttagctggcatataaaactgacttgtgagcaaaccataaaatctaaaatccggggggtgagagtggtgaaatgtgatgtagagcaaaatcagaaagtaaattaactgtggagtatacagttggactaaaaatatttgtgctgagtacatgtttgaaggggagaggcccatataatgtaatatatgggccagtcatgtatttataaatttttagtctcctggagcctttttggactaaactcttggtcaacatgaggaagaaagctcagtcttctctttgttaccgtgtccatagggtttttttttcgtccacatggaccttataaagttacatagcatgagattaattagggccagtgctcaaagtcagtaaaatgatgacacctcttctctaatcactctcagttaatgcttctctttgagaattggggctaactttgtatagggcggtggtccttgacattttcttgcctttctgcctatttctttttccataaaagagaaaaaaattctgtaacctgccacctcatcaatctttggcacaaattagtttttaaaaactcagtatagcaaagttttgcaataaaatgcaagtatacattctgtgtacttgtgacaaagcagtattggacatttgagcaacttttgctgacagtttataacatctcagtgtggtcaaatttggccattttatatagtatcactgaattagatgataattttcaaattggaaaacaaatcacactagttaaaagaccagtggatttaaatacactaaactatagtttaaaagtattttcaaatattctgcttggccaacaacttacggtgccttcagttatttaatatataatcagatattcaaaggtttaaaacaatattttcatcttagtttataaatatgagggatgtagcatgttttttgtgcttttatttgtactccacattgattgatcgcttgagaaaaggtctttg

SEQ ID NO: 54309 - DNA, 1730 bp, Homo sapiens
caagggtctcctgtcctgaatattccaacagcgtttccctctaaaagcctcctagctttataatccctttattctgcttaccagtcgaccctcccctcctctttgccccttgttctgtgatagatatttggggagaggggtggagaaagaggttgtcaccctctgttccttacagtgaggcatttttctttttctcagtcttttcatttattagatgtttagcatgtaaaatatgtaaatctgtttgcaggcttatttgaacttgttttcttgctggctaaggaatagctgatattctataaagggaaggaggggggaaaagatcaaaagtaacactctgagttttccccatttgagcatccccagagttgccagagaagaccctcctataaaaaccaacagtctcccttccatgacatcaccacctaagcccttccaactttagcttcagaacaggaagaaggctcaaaatagaactaccttaggaatccagctccttgaaaagatcaacttttaaatcagctgcaggaggaacacaatgaactttgacatggggagtgagaagggagagaagactgtatagtgttcataattggttcctttgagggagggttgggggatacttaccgtgtatttcagaaaagctttcctctagagttgggtacctagaccactgaatgataaataggatggttcaagattcatttattgaattattcataagtttttgtacgtcaacaataacaagcacgtttcagaatatgaattaaagaggggcctctctgcagaatctgctctagatagagaaggttgtttcaggaagctaggagggcacttgaagacagagaacctgaggatgcagtgacagctgctgtgagtatgtaagttgagaggctcataaacaataattgtgataaacaataattgtaacttttgtaggtgactgataccctggacaaagaagtaaggatgtcaggattttccacctctaccttggaaattaacttcttgtctttgaatctcactcagtgtctccattcagtccctgaattgagatatgctttcctctctgagctaaaatactcagtcttttggaagggctacctaataaacgataatcactgaagtgttgacaacttaaagattggaagtggagcagaaaatacttggtataatttgagcacttggtgggtgctgtaagatgactttctggttgatggggtaacatcttttactctggttcgggtttaaaagaatccaggtgacagagacaggatacctgccctaatatggtagccactagccacgtggctattaaccacctgaaatatggctagggtgaggaagagctcaattttaaattttatttaattttagactttgataacttgatttagttattggaaagcttatttatatttggaaacatacttgagcttacgcatctacttttgaaactaagtgttttgaaatccaaacgcaaattaagtattttgatgaaaatttagaattgggatatgtaagtgcaaagtaatcttcagatttcaaagaatgcaaaaaaagtagaatagcccattaattttatgttgattccatgttcagatgataatattttagatatattgggttaaatgaatatgctattaattccacctgtttattagtgtggctactagagaattaaaaattacatgtgtagcttgcattatatacttcattggacagctcag

SEQ ID NO: 54310 - DNA, 1046 bp, Homo sapiens
agtctgtgtaatgcactctgatattttctattttatttcattttttaaaaaattggtcgacccatcaaattaattttataactcatgaatggattgttacttgcattttcccagacactgatatgcactgtctaatgagattccctatattaaccaactgattgggacaattgttaaatgtaattgttaaatgtttacctcatttggtgctagatccataggaatcaccctgcccactaaaggagtgaggccacctcactgaggtaagtcacagttgttctcactgataagatcagaaagcacagtactgcagccagactttcaaagctacctgaggttaatatacataattcctggctgggccatttttaaaaagggatagctgcaaaattaccacaactacatttatcttagaatagagggatattgtttgggggcaactctttcttagactgtttaaatcattcctggttaggttaaagagacttttaggtttctgaggtttcacgtcaatttcagaggtaagcaaacataaaataaaagctctctcactgctatgattttgttttactctccttttccctaaatggtgagcagattagtctaatattcagatttcactctaatagcctgctttgacaatctgggaaacactagattccaaagaaaataaggaaatatatatacatatatgtatatataattatggtccaaacggagtggaaagaatacaacacatgtaaggaattcttttgttacaggtactcagtctagtcctcttctgcccatttccttcccctaacacgtcttccctaacttacagctgcctcattctttttttccttctgatagagttttgctggttttgttgatcttggaaagatcagtttcagctcagtggtgcacaaaagctggattggagagaatttaagagagaataataggagaagaggaattagagacagctagtatagacaactggctacaagggttacagagaaataagaaggtaaccaataagggaagtgctgtcaagaggagatttt

SEQ ID NO: 54311 - DNA, 1014 bp, Homo sapiens
tcactgcaacctctgcctcctgggttcaagcgattcttgtgcctcagcctcccgagtagctgggactacaggctcctgccaccatgacctgctaaattttttttttgcatttttagtggagacggggtttcaccatgttcgccaggctggtcttgaactcctgacctcaggtgatccacctgcctaggcctcccaaagtgctgggattacaggtgtgagccactgcacccggcccaaactagattttttttaaaaaagcatgagtagataatagaggcttttggattactctgtgtattttaccccctccacttgatgtttaagctctcaggttggcctttaagacatagtacaaaaggtcttgtttgtacagcttcatgtagttgaatttaaatggctgatgttatattttaacagtctcacctctaagttctgagagtttttgtactagttaaacaacagatccaggagcaagcatcccttacttagccagacagataatactgaaataatgcagagtcattcttgtttatcatctaacttccaagaagctagaaatcaactattttctgatcttcagcaccttctgtctgggcagcagtaacctgtaaccctggcattttataattcttgtgacttggtcataaccaacatttgcagggggcgaagcaactgccaggccctggactgactaatgaatgcaaattatctctaattcccacacagatctccagagcagtttttgttatatcatttgctttacaaataaataaatggcctcagaaaggttgagtaactaacttggtcaggtacagtggctcacgcctgtaacccagcactttgggaggccaaggcggatggatcacttgagcccaggagttagagaccagcctgggcaacatggcaagaccctgtctctacaaaaaataaacagagttagccagagtggtggcgcatgcctgtaatcccagctacttgggagactgaggtgggaggattgcctgagtccaggag

SEQ ID NO: 54312 - DNA, 1032 bp, Homo sapiens
atggtggcatgcacctgtgttcccagctacttaggaggctgaggtgttttcttcatagttacccatagcaagtgtcagagagtgatttaaaactgtatttttggtatgaaggaaaagaaagtcaagctttgaacaaataccaattgaaaggtggatactggatgtctgaaatgagtcacttaagtgccaaaatgccttaaatttaagagtttcttccatgatttctgcctctaaaggactttgacatctatttttttaaccaaggttttttattttttaaagcttattttcttactggaagagattcagcagagtgatattagggataacttatagaatgaagtctttcttcactgtattttttcccccaaagtagttatttctacttcagtgccaaaatattcttacaagtggggagataaagaacttgcagcttgaagaattataaagctctacagttcatctttgaccaggccccttgagatgcgtgtatgtgtgtgcgcaggtgcgcacacacgtgtgcactgccattattagtgatgttttggcgaagggatgataccagggtgagcaaggcttctcctagttctgtcccatacatgcagtctgatacttcagggtagagtggtcttacaagggaattgagctcatttacaggaatcttactctcagcattttctgtagaacaatgaaaagaacattgagtaattatctctttctggtgacttagccaggcatcttgggaatttgctgttttgtgaacattcgttcagctctgtcttgtatatctagtttgccttcactttatagacagtcacaacaaaaagaggatacagatgtgtgggtgtgtgggtgctagaaacaataacaattttgtatctcccacccagcctaagaaacagagtgttatcagtaccccatagctcctttttccatctctctcctccagcactatcctgcatcttgtaatgattctcttgctttaccatatacttttgtatatgcatgtagccatcaacattatattgtata

SEQ ID NO: 54313 - DNA, 1038 bp, Homo sapiens
gggcctcagtcttctgacagggtgttttattgtagtttgctgttgtcatgaggtcttcattcagatgcggatatattaaggtcattttgctttgtctgaggatctttctgggttttcatggtagagattgagatatgtgggacaagtttgatcttgtatcaggttagaggacatgttgcttgccctgcttcagagaagagccaaagctggcaggaatagctgcaaaagtatgctgcacttagatctttcaattagtaaattagagtaagatgcctctggaagtcttccacagagttattttaaacttggggtcgtactgcttgtgttgaattaactcaaggttctctctcaaggggcacatgaaggtcttcctccactgcttctgcttagttcaggccttcatcttgtgcttggattattatcgcagcctcctttgcttccaccatgccacatccaaatgtcacatttccaagggcctgcgacccatgtaggcacgtaaggccccgtgcgtagtttagtgctctgctgttgtcatcttgaaattcttcattttccaacaagaggaacaccttcaatttgtactagtccctacgatttcagtagctggtcttggctctaggaatagcatttctaaaactatctatttaaaattcctcaaagttcacgctccatatcctgcccatctagcaccatctcttagtggtgggcttttctttgactgtcagtgcttgaagaagttcttccaggtataccaaagggccccacatctctgcaacatttgctgttgctgtttccttcttctcatttcccctacccaacctggttcacttctattcatgttttgaaatgctgaagaaataaggttgggctgtgaaaccgaatatgaccatctttttttttttttttttgagatggagtcttgctctgtcacctaggctggcgtgatcttggctcactgtaacctccgcctcttgggctcaagctcttctgcctcagcctccccagtagctgggattacagataggcacatgccaccac

SEQ ID NO: 54314 - DNA, 1048 bp, Homo sapiens
gagagcatggacccgggtgctgccagactgcctgacttgaatccccgctctgccactttctggcagcctgtgtgaccctgggcctctggttgctcatgaaacacaaattagcaaagaggggcaaagtgagcaaatatatgtaaagtgcttaaaagagtgcttgccttatataagtgctgtatgagtgtttgtcattattttgtgactagtgtacaggtcctgaagttttttgggtgggggtgactatttgaagtgttcacttcaaaaatagctctaaaagtatttagccaggcagaataaaagtcagtttcagttatggaatgttttctctatcttttcagtgcttgcttttgccatgacttcctctcagggttgaataactgaagttctttgacatcataggcctgttttagtgaagtacgtcatcctcccaagtgatttggttagtatttttctccttgaaaacccatctggtcactttttcagttgcgatttttctttaaagctctggaataaatccatttggcaaggtgtggagtgcgagggatgcctggttcctatgttcagctttagactccttatgttacacaggcacatgctctgcggaggacgtgcctgttgagcgtgctaaaggtgattgaatgtggaaaggtcgaaaaaggcattctgatgacagatgactcatcatcttggtccatatggctgtagagaggcatcctgcaaatggtgggtggaaatgagtagagtggatccaagccaagggaaccccaagtggggatgtggggaggggagggagggtgagtgttctgtggtttggtcagctttgctcttgctaaaaaaaaagttcagcactaccttcccttcactgtgctttccagttgggtaagaaatattcttgttttgttttgttttgttagagatggagtctctctctgtcacccaggctggagtgcagtggcatatcttggttcactgcaacctctgcctcctgggttcaagcgattctccttcctcagcctcctgagtagctgggattacaggtgcacac

SEQ ID NO: 54315 - DNA, 1033 bp, Homo sapiens
gttcttgccagaataaatgccattatctgtatgtttcagggagttccccaatttgatcatttttgtgtgtgtgtggtgtgtgtgtgagagagagagatactgcagtaaaacatttctaaaggatgaaagctcttgtatggcatagatatgaattccttcctctggtaataattaggttattcccagaagcacagtgtcattctttaaataaaagctttcctgtttaaagcttttcaaaggagcagaccaccttgaagattccccctagggttgatatgtgtctaattcattttataaaaattattcttgtcttcattttaaagctttggctatatagtcagaaatgtcctaaataacaaactattttgtatttaatttagggaagactaaagggaagaaaaatgaaaactcagtctttatgtaagctccaaggatattagggcttaaagggcttttctagttttatgagaatttgtactactgatttttatatattcctgtttttgagatgaacagatctctggggaaattgttgagttacaatggcatttcactgtgatccctctcaagctcagatcagttctataacccaatgacaacctgtctctttggtttactgtcctgtgaaatgtcagctcaagtttcccagaagtcgtgtgtttatgatgagtcagagtgcttttcctcggtgggacagttgctggccctcttaattttggtgtatgtgcttccaagtatctaaacctccagtctgatctgtatatgctatcctaactgttaattgtattattgattatgttgattatcttgcttgaaggttcatacttttcaatttgatagaaataaagtttttttctgcttatagctagcgaattcatttgtttgtatagctttttatacttgataatataaagtttcacaaatactttcattgatgcgtctctgcaaccactacattaccaacaatgttgtctccaatttgcagaaaagcaagatcttgaaccaagaattattatccccagtcctgttttct

SEQ ID NO: 54316 - DNA, 1046 bp, Homo sapiens
atggaatgtagtagattgtattaaatttaatgacatccgtccagtcccctcctttttttttttttttttttttggagacagggtcttgctttgtcacccaggctggagtgcagtgatgcaatcatggctcactgtgcaccctcaacctcctgggttcatgtgatcctcctgcctcagcctcgttagtagctgagactacaggtgcatgccacaatgggctaatttttttttttctgatttttttttttgtagagacagggtctcactaagttgcccaggctggtctcaaactcctgggctcaagcagtccttccaccttggcctcccaaagtgcttggattacaggagtgagccactgtgcctggccactttcccttcttttgggaggattttacaacttggccccattggcttcatgcttggacatatggtttgctttgaccagtgaaatgtgggcagaaatgacgtgtgccacttctgagcagaagttttaggagctagggcatggtcaccattcttttcctttgcagtgagactggcgacctcacagagctctttcaacctggatcctaaagtgaagacgtggaccagagatgtagccaatccatcatagatgagtagtgtgcattaaaaataaacctttgctttataagccactgagatttggatagagtttattttcacagcataacttagcccaagctgactgataaaaccgggcctaagactaatatatcttgttatccagttataactttaattcttttattatgcatttttactctctcgggatgcaaagatgaatcagacccagtttttgcccgagacttcttcacaatgtactggaggagatggccatattattagattgctctatacatgactgttggagttgatcactgcgctataaaggaaacaacagaagtagtaactctcttggctggccaagtagagcccatggaagagctaatatttgagctgagtgttgcatgcaaaagggaacccaagcagatgaaatggtaggcacaagaaagtctgagcatgca

SEQ ID NO: 54317 - DNA, 1120 bp, Homo sapiens
tttttcctgatgccctccctcccctgccctcaccaccacgggccccattgtgtgttggttccctccctgtgtccttgtgttctcattgttcagctcccacttataagtgagaacaactggtgtttggttttctgttcctgcattagttttataatttttaaaaccagatctttagtgcctatacaaccatctccgcttctgcgttcctgacctagcgtttactcacagcttcccagggctcattgccatcccacacctctcttttcttagataggatcttggctgctcactacattcctctactatctatcttccccttcccccataagccctggggataaagccattataatatctaatgttacatgatacttgacatcttatagaatagttcaactacaggattttgtttagatcttgacaatactcctggaaggagagagggcagatgttatgtatttcccccattttatatataagggaaggtgaaacaagcggcactaagtgatatgctggaggtcatgtgactggtgagtgtcagactcaggcctgcctacctatacaacatgctttctgccacatctccctccacacatgaaaaaacatgtttcaatagctatactcatggaagagggaagtaaaacgaataaatattatgcaataaatctatatctcaattttatttgattttttaaagttaacctgaatttcttatgatgatgttaacatcactttgggcatctagaatcatacactttgacatcacacaggctatgatttaaatctgccactaataaatggcacattaataaactgtgtgatatcagacagcatccttagtctttcaaaaatggagttatatattatctgaaaaatgaggatgacaattcctatgtcatgtaactgtgatgattaaatgcatttctggtacatagaggttcacaaagggctggttatttttaaattaatattaggtttactattgtatgtattaatattaataaaacaaaacctaatatggttgaaaatctagactattcttagaaaatagtctagaaaacctagaaaagtctagaaattattagcaaaccataatattaatatggctgaaaatctggac

SEQ ID NO: 54318 - DNA, 1058 bp, Homo sapiens
tgggaagacacaggttggaactagagtcagtttccatcagtagatagtattttgcagaacaatttacttggagaagaaagaggacagaatttctgtcacgtcgatcagtggtttattctctcactgccattgtctagccatatgtccctaaaaataagccacattgaatggatgtaatgatccctacccagcctattcctaaggatattagagagatcaaatgagaccataaaaatgaaagggctgtgtaaatacaaggtttgttagccaggctctgggaagtaaccaacactttgtcagagtgggaaaacctcactgacccacaatctttgggtctgtggctctggcccttctcctaccacctgttctgcatacaggtgcatgattgtagagagctgtgcttctccaaggttggtctccagaccagcagcatgagagcagcagcatcagcatcactcaggaccttgttagaaatgcaaattctaggcccccatctcagagctaccagatcacaaactgaggggtgggaggatggggagggataggaggctggaacctggaaatgtgttttaataaactctgcagtaattctgacacatgctaaaggttgagaaccactgacttagtaggatgagcaagggttttacagccagcaaatgtgggtttaaatctcaactctcctacttgccaacttgtgacatgtaaattactagaccgtcttgggtttccaacctctcaccactaaaaggaagaccgagtgtggtgtagcaggtgaagccactctccttccttcccatttcctttacaggactgtgtgagaaataaatgacatgacgattctggactctgctgtgtttagctgtgtgtctcctttggcaagtctccttgcctctctgcctcatttttctcatctgacaaaacaaatggcaagagttaatgtgtgcattgcttttgtcacactatgtgccagccactgtcttaaagagtatgtgattttattttattcttacaataaacctgttttacagctttcattttacacataagaaaaactgaag

SEQ ID NO: 54319 - DNA, 1078 bp, Homo sapiens
aacctctgcctcccaggttcaagcgattctcctgcctcagcctcccgagtagctgggattacaggcccatgccaccacgcccggttaatttttgtatttttagtagagatggggtttcaccatcttggccaggctggtctcgaactcctgacctcaggtgatccacccgcctcggcctcccaaagtgctggagttacaggtatgagccaccgtgcctggccggtatttagaatttttgttttactttgtactgggaagagccttgggttgggagtcaagattggtaggctctggcttgttcagttataactcatttgtgacctaggacaggactctatttctttgggtctcagtttctttatcgctaaaatggagagctattagactagattcctgtttttcagattgtgagtggtgagaaagcaacttagtgagtcttaggcaacattttagatcgatgaaatagaacagaaactgtcagaaatcattgcacatagcagaggtaactactgtttcctgaaacttctgttatagatatttatctttatgcatgtgggtataagccgtattctgacatcacatcggtttttttttttcctgtgagtttcagtcaaagaagtttgaggaacactgaaataaatcatagctcagtaatggttttcaaggagtctgtgaaatgcagctttatatgcatatatatacagacagagagagagagaaagagagagtcaatagttttcctcagatttttaaaggattctaagactccaaataggttatgaattactgtatttctaaggtcccccaggccttttccaagcctagttctttgagagcaaagtatccctttagggctgctgggagatgggtatgtgttgacagagaccagataagtgtatggtgtgaggtggtgtgtgtgtgtgtgtgtgtgtgtgtaggtgtgaccatagcaaccagaccgtgagagccattcctgggtcccaaattaccagttggtgtcctgaatatgagacataaaaacactaaaaattagagtctctgtgttgaaaaggaccacaacaaaactattaaaatatta

SEQ ID NO: 54320 - DNA, 1051 bp, Homo sapiens
acttgtgttttagacaccagtacaacacacctgaatcataaaatctatatacaagtgcaagtagctacctacttaattatgttttctaatatagtcgtctgagcatttgcatattgaaatacatgttgctttattgtaaataacttatttcacttctcttttacattacagttgaaacgtatatgtatatatatatacatatgcatagtttaattttgtgttaggttatttcatctttaaatttcattttgagatactaaacaagaaaatacaaaatatttttatatgttactcagagtttaaaaatgacttgatttttacccctgaatgttttaaaataatttgaaccaacattaaaacttttggagactataggttcaataaggtatttatggcttctttaataaagattagagcagtctgcaacaatgagattgagctgagtataaattaccctctttaaagggcagatatactgggttataagggttataaatctctaaaagtgatgttactggtcgttgattatttttatgctattgttactgccacttacatttttattttttgttttactattattatttttgagatggagtcttgctctgtcactcaggcaggagttcagtggtgcgatcttggctcgctgcaacgtccaccttccaggtttaagcaattctcctgcctcagcctccctagtagctggaattacaggtgcacaccaccacacccagctaatttttgtatttttagtagagtcagggtttcaccatgttggccaggctggtcaccaactcctgacctcaagtgatccgccacctttggcctcccaaagtgctgggattacaggtgtgagccacttggcctggcaaaatttttttaaaacattttatttatattctctcagcaggacaatcttcctagcataactgttgagggcccctccagtctcaggttttgaccttgttttttatttttttttattaacttaaaaaacattattattttttcatttttatttttgacttgacgataactgtatatatttatg

SEQ ID NO: 54321 - DNA, 1581 bp, Homo sapiens
aaaagccaagacattgacatttgcacaatccatagaacttaaggtttcaccagtcacacatgcactagtttatgtgtgtgtgtttatgtttgtagctctatgctatgtactatgtgaatacatgtaaccttaactaatgaccacggtgatcaagatgctcaaatatcaccacacactctcttgcattacccctttatggccacctccatttcccggtccttaacccttggaaatttagtctgttctccatctttataattatgttatttcatgattttttccagaaatgaaaccatgaaggtatccccaagattgccttttttttactcagcataatttccctgagttgcatccaagtcgttggatgtacaacatgcaccaacagtccattcctttttactgctgagtagtattccctaaaatggatatagcataatttgttaaaatatttatccattgaaagacatttgggtggtttccaattcttagctactaggaatagagctgctgtgaacatctgtgtacaagttcctgtgtgaaagtaagtcttcatttctttgggataaatgcccaatagtgcgattgctggattgtatggtaagtccattttcaattttgaaagcactgccaaactattttccagaggggatataccattttaaattccaaccattattgtatgagtgatccagtttctccatatccttgccagcaattggtatagtcactatttttctttttagcatttgtggtgggtgtgtagtgatacattgactttttgccccttctcctaccaaacaaatatgttaagttttgaactcagcttcccaactctcagtggcctggtctgtgatttccataggcctctatacttctgacctcctcctacctccatgaccttgacctgacttctctttcttctctccccagcctgggtcccggggtcccctttttacctcagaatcgctttatctcaatcctgccatcttcccaatgcctggagaaagtcacaaaagtgctctccactgctgccaggcctctgatgttacagctcctgggcagtcctttcctttacctcagtgatgtcaccctcccacttctgacaggctctgctccatacagtgaggtcttctctcagagaggaccttaccacctctcaacaagagtgagactgttcagtctgaagcccctcagcatctcctttctccatctctgcctttctgtttcttgcagaagccaactcctcatgtgtgcttatgttcccagagagcctccagctccccagggtagggatttatcagaggagtctattttcagacttcccttcgtctgttctccttttcctcagagtgtccttaatggaacacccacacctctcctctagtactgagtctgttgaatcaggatctctggaggtttgcagggcggagagtctctgtttttatcagtctcctcaaggcctccagtggggagtcagattcagagacggctgcctcagggaccctctgggcccctcttcttcacactacccctcagtagtgttttccccaaattttggagaaccaaattattttgttctgg

SEQ ID NO: 54322 - DNA, 1050 bp, Homo sapiens
atacacagtagattttgaacacttaggtggaaaaatatataaaatatcttattgattacatgttgaaatggcaatatattgtacccattgagttaaataaagtgttattaaaattaattcacttgtttattttttaaattcacttgtaaaaatttattttggctgctggaaattaaaatattacacatatggctcacattatatttctgctggacaatgttttgcttaaaaaatgttctctgtacaatatagagtacagcataaatgttagttatagccagaaaaaaagtataggaggtttagttgaatatgtaaggattctaagtggtagcatgatgcttattatttttgctacatttataatgtaagcttttatttaggcatctgaagtttttctttttatgtgttatagagaagtagggatggaagtgctaatccaattatgtgaggaaatcataataacttcagtgtattgagctacagtgatgcaggcattgtgttaagtactgtattaggcaggattcctttgattacaagtgacagagatgcaatctgaattaactaaattgaaaaagggggatcttgtaattgtatgaagcatgggagtgcatctgggtctcctgaatttctagaatataaacactgtttttcctatatacctatcttcctctctcaaatttacttctccctcctcagcagcattgttctctcagatcacttgtctccatatgtcagaaagaatggctccttcaacctctgtgtgtcatctttgctctagggaaggatagactcagacttgctctttctggttttaaatggaaaagtcctgtgaaaaagccatggttgacctagcttggttataggtacctatccctgggctatggcagctctaacccaaccacagaagagaatttcccagaaaaagggaccattcttcttggttgataaaagaataaatgtacactatagctactctagctaatttaatatgtacagccaatcagtagggtagtacctcaatgaacaaatgagaaactgagactcagaaaa

SEQ ID NO: 54323 - DNA, 1285 bp, Homo sapiens
cacccaggctggagtgcagtggcatgatctcggctcactgcaacctctgcctcccaggttcaagtgattctcttgcctcagcctcctgagtagctggagctacaggcacgtggcaccatgcccagctaattttttgtttgtttgtttgtttgttttttagtagagacggggtttcaccatgttggccaggctggtctcgaactcccgacctcaggtgatctgcctgcctcagcctcccaaagtgcaatttccataagttgcccaaaccattttccactgaccacacttagtaaggcaggtcagatctaaggaatgacctaaatgtccttcagctttcactttgatcagtggaattgcctctttaggctgcctcagtggccaaagcatgatcagaaagatggaggtttgaatcctaactgattgttgtgtaaccctgggccagttacttaacctctccaagtctgcctcaaaataagaataaaatctttagatttaaggtaggtaaggcacctggcaaatgataaataatcaatggcagttattttgttactattagagcatcaaggaaacacaggtttcatgatattgggttatcttaaagaaaaaaaaaaagccctacctgggaaatttgtcctattttctggaagacccagaaccccatcaaacaccaagaacagatatccccactcctaagaaacattataggaatagttcagattttcttctgttaaatgtcatccatcagctcacccgattttttccagcagacctcctcttctatcttgtgtgttgctttatatgtcgctcttgacagctgctactatttatgcatgcatttctatagcaaaaccttgattaactgggacacagcaaactgtagcacttaaatgactatggttttcccctatggacatcatttggaggagagagggaagtgacaactaaagttttgagaactgaagagaatcatgtaattccacatcttcgattttactgctgagagaaggagaatggatcaaggccaccctgctgattaagagcagagtcaggagaggattctcggtctattttgctttcttctggactgtggcctaaagatgtgtcttttggcatctctcttgggggtatttctccttaaggttttgccactacactgcaggtctcaaactcaaatgcctgcaagggctaactggtaataggaatgagtggaggaggctgagtattctacattgggaagtagtagtgaactatggtcctcagactggagcctatataccctctgtaa

SEQ ID NO: 54324 - DNA, 1074 bp, Homo sapiens
gcaaactccagagatagatattgaaaaatacaaaggcatatgtctcatctataatttctttcagcaatatgtctgcaagttgagcaaaaataactgaaagtgctctttttgaaaataataattttcacttttcaaaaatgatcctgtatttatttatttattttttgagacagggtctcagtctgtcactgaggctggttctaaattctattaatccaatgattatagtccagcatttgtcagggcacatgatgaacactaggtatttactgtccctgtgtgtctgtaatgaattaaaagaaaaagtacagagaaagattatttaagatgttatgggaaaagatttactagacttcacagaattattactttagtcaagtaactaaaataattcaatctgacagatttggaaaattgaaagtataaaaatttgttttaaaatttttattgcagtttttcctgccaccattcagattgtttgatcttgttataaatgagcattaactctgatttgcaattcaggtcacaccatacctcatcaaagaatgcagttgggaaagcaactggccaggaagtttaggtttccccagaaggactggaaggatttagaaaacatttctttggacttcttctggttgatgctcttcctacaagaatctgtgtttgggtgatccttgtacaggaaaatgtctcttagtccaatttattttatgtagaactgtgtagagctagagcttcccggaaactttctgagacccaaatcatctggactgaagtctcttagatgctattgtttgattttgtgtccttaggtgattgatataaggacagcaagagaaaaccatgtaagatgagaagaaagcaaagctggctttgtgtatgggctcaagtacattttacatgcacgtacttttttcctgttttggtgaggaaactctgtcaaatgactcttgacgggcgcctcacttagtccctccaagttttagtagagaaaatgataatttttaaccaagacttacttgatcttgacctaagatgatgagaatgagcaatccttctgaaatcttattattt

SEQ ID NO: 54325 - DNA, 1027 bp, Homo sapiens
atgcctggctaattttttttttttttttctttgtagagatggggttttttgccatgttgcccaggctggtctcaaactcctgggctcaagcgatctgaccacctcggcctccctcccaaagtgctcggattacagacatgaaccaccatgcttggcctgttcccatttataaaagtggaatcataagagctgttcttaccacagagctttagttgaggctgaaaacaatataaaaatacatttgcagtttttctttactttgtatcttgccctttcaatttatcatatgaagaaacttattctcagaggtggtaggagacctatcaaaggtagaatagataatgacagccagacttaggtcttctgactcaaaggtttgagtttttccccattgaactaaacttttgggtagacacaatatcaactgattgttgaaatggaaacatttttatctactttgatttcccccctgtttttagataaaagaggggtacatgttcagaggaatgtaatggctttctaagtcaacagcctctcaagtggtagataccagagcagtctcctagccagatgtgacttccagagctctctgccttccctggctcactttctcttcattcaaattattctctagaaaaggttgtcatttaaaggtcatcctgtcatatctcaaaggcactgcactatcccaatgccgaaaaccccctatttctcttgtgtgcaccccacttttcagggaaagtagaaccacaaaagtagaactttcaatattgagctgctaaagtgttccaatattgggcttaatttaccaagttcataatgacaaactgaaaaagagtagtccaattaaaatctggaaacagatattaatactttttaaagaataagtataatgataggtaaggatttctcttttgattctcactttttaggctttgttctatatatttaaatatatagaaattcacatatataaataaacaaaatattgtatatattaaaaaaaaagaataaggataatgaacaa

SEQ ID NO: 54326 - DNA, 1529 bp, Homo sapiens
gaataagatacgtcaatttaagtttcaaatttcaaatgcttggagactgccagatttcatagatttggaaggggaatccctggaaccaaatctcggaaagttggccaggtagccaatggtggacactttctgtgatggagctttagctactggggcagtgtctttgaactgttctcatcagtgcagagttctttttatttgggcaaaatcagcctttctgttctctagatacaaattatgtctaatccttctttcacatggtagcccttagacaacagatttttgagaacaggtactaattctctcttagtcttaattttcctcttttctaggccaatcaaacctaagttccacatgcttttttctctatataaaatgatttccatataattatcctaagctttgagaataatgttttttttttttattattttgcacaacaggggttttcaccaatttttattataaaaggttaaaaaagaattaaagattacagaaaggaataaaatgagaaaagttaagtattctctcccctccctgatcatttaggtccttgcctcagagataacttctactaaaagtttctggaaggactttcaacgtacaacatgagtgtgtgtaaatatatatgctttacacatatatgtatatgtatgtgtataccattagaattataataaaatacaaattcaaagtttaaccatgttcatatatgtacattgttcaataatgcttaatgacaaaaatagctacaatttaattattataattcagggattatgctaaacactgcatatggtgtcacatttaaccctcataagaatcctataaggtaaatgatagtaacggtcatcttatagttgaataaactaaggcacagagaggttaagttgcgtgaggttacacaggctctacttattctatattgagtaaaatgccatagagaaatgcccatacgattgcaaatgaagaatttagtggtgaatttttttatttgcttctttctctgaggcaaggaaaaataggagtgattgagagaaccaaaatgagttcagttgttttttaatcccatgaaagtacaaatatgttttctttacttaaatataaagaatttaaaaacactggaaatgaaaacagcaaaaacagcattgaataaagctgattaagacttgatacggcactgagagaacaatacaattgatgaagcattatatatttttggaaaaatatattgcaaatgaaaatggatccccactgctcttaggataaaatccaaggtattcttaacaggacatcagaagccctttgtggcacctgtgaaagctggcccaacaaaacttgttgtcgctccactggtagatcccctccccagcctgcacctccatctttatgtttttgcatacactgttctctcaactcaggccaacttatcccatagacccctggacacccacttttccaggttatctcctattcattcttcagggtttagctcagatattccttaatcgcaggctgcatgcaatggt

SEQ ID NO: 54327 - DNA, 1085 bp, Homo sapiens
gtaaaacataacttgaagtatattttattaaaatatgtataggaatatttttaatattttattcaatataataaatataaatattgtatttatacagtattcccactcatgatcctgaacaacttattattcctgaataagttgttcaggatcgtgtagccagattagtggcagaaatagattcaaatccaaaactgtctgttacaaagttcaccttttttgctctgtctgcaagaaggaactgcatctctagggatctgttttaatttcctgattcttccaagacttagaacatcctctagggacctgtatccaagtctagttcttgactgaaccctctagttaggtagctctggactttggaaggcagccattctattgctggacaagaaacattgctgggatgtttattgatgttcagtggaaatctgcccttcactctctcagttctgtatctaggtggcttgtagttctttcccttggtgcaacatacattcttttgaatttataggtccctcatgctgtacctaaaagggatttttctgggtttacctctttattttacagatgaagaaacttgagtccaaagagagaagccctgtttaacttactgcccttgagttacttgaaacctaatcttgcctttctggcttacctttctctttctagctctttcagtctttcctcatgagatgggttttctttactttttattaccctagtcattctccttatggacactctccagctggcctgtgtgcctcctatttttgaagctgacctcaatattccaaattcgggttgattgcatggagttcaacagaggatgtttaattctgcaaacaatgatgagatgccactatgtaccaggaacatgttgcaatcctctaccatattctgcctttctttttctttgtgcacattgtctacaatatttatgaggctagaggtttggttgcatatgtcacaaaggccatcataacagtggcttaagcagatgaaagtctatttcttttttttttgttttgttttgttttttgagacggagtctttctctgttgcccaggctggagtacagtggccca

SEQ ID NO: 54328 - DNA, 1070 bp, Homo sapiens
actctccctacctcattacctccccaaagctccacctcctaataccatcacattggggttaggatttcagcatatgaattctggggcatacaaacattcagtccacaacagatttatttctacattgaatgaagttgaatctggtgaaggttctttattttatacgaatctaggaacatactttgcatgagatacatatatgccatatcccaacaagcagcatttacctaacctgtgagctcgttacttccagtcctaaaccaagagacttcaactattaattcaacaagtccaaaattactttgaagattatattatttttcaccaaatatatacaaatcaaattgggcttctcagattagaatcaattttattctaaggataagtctttccttgctgcctttgatttaaaaagctgaaacaaattttggttttcaagtgaataatttttaaatgaaaagcacccacagttaagaggatttctcctctctctgtctcttaattgcaaattctgccattttcaatggagaatggctgatttgatcatgttcataatgattttatgcattttctttgacaggatggacgggcggcatcatcaattctggttggtgctatgttcattttctgtaatctctactctactcctggcccagccattcgattgctatatgcaaagcgaccaggaattggactttcaccatcccataggaggtaaagtaagctagatgcaggctaggcacagatgtagtctaattggtatcatgtactgttttaaatctgccttacaaatcctttcataagtttcttttactttatctctgtattagtccattttaatattgctatgaagaactacttgagactgggtaatttataaagaaaaagagtttcaatggattcacagttccacatggctggggaagcctcacaatcatggtggaaggggaaggaggagcaaaggcacatcttacatggtggcggggaagagagcgtgtgcagggaaactgccctttatgaaaccatcagatctcatgagacttattcactatcatgagaacagcatggga

SEQ ID NO: 54329 - DNA, 1121 bp, Homo sapiens
cacaaaagataccctgtacctatagcagtcacttcctattccctctcctccatctcctggtaaccactgatctacattctgcctctatggatttgtctatttgggacattttatttaatggaatcatacaatatgtggccttttgaggcttccttctctcacttagaatgtttttgaagcttattgtgttatagcatgtgtcagtacttcattatcttatatggccaaatattattccattgtaatgtcacaatgtattaatcttagttgataatctcagttaataatcatcagttggtgaacatttgggatattgccattttttgctattaggaataatgtggcaagtaattgtgttttgattcatcacatattggctaagtgagtgctttgtgccagccattgctgaggtttttaggattgacaagagtaagactatgtctctgcctttaagggactcaatttcacaagggaaatccatgcaagtacaaatatgcatgataccatattagagggaggatgaggtgttataatgggagcagtttgttttagccagcagtggcctagaaaggctacagagagaatatgaacttttaagacatgccctaaaggatgagttcattgggttggaacagggcatcctgggtagaaggaatgcaatgagtcgaagtatgcctgtgtgcaagaacatagtatttagcggatgagaaaatggtttgccaaggcagagttcaagtagaggagaggctggaaatgaagctgagcctattctaactggggaggtcatttaatatccatagtaaacacaaattcagatattgaaacagttgaaggtgcatgtctccccaaaatctaatcttttgatcagattcccttttcgctgattgattgtaatgtgcttctctcatgtatttttaggtgaccaacacacagatattccagcttcagtttcacactggattcataccactggacacaacagttttaaagttcaccaagtaagtactggttgggccaaaagtctatttgaatcaaattagctgtgaagtgctgaggctcaatggcaccaggctgtagcataccctggaatcctgtgctgctgaactactgagtgtcactca

SEQ ID NO: 54330 - DNA, 1080 bp, Homo sapiens
catagtgtggtctaggtgaacgcagttgtgggggtggctagagccgggatggagttgctggggccaggataggagtagatgttcaagggctcaggacagtggctgtgggcctattgcactattttaataatggattttgccgtgccagtcacatcagccctgctttccagaatgcttttacatgcagtagcattcaaatttgttgagcaggcattattctcctcttttctctagattaggaaactgaagctcagaaaagtaaagtaacttatctggttatgactgagtcttttttagaaatgagacttagatttaacctaagagtcaacctaagatgacttctgtgccaaacatcataccagttccattgtttttcactgaatttatcttttttaaatccctatttaggcctgagttagatgcatgtgatgtaccagaaaaatatcctcagctatttcaggtgacactggatgtagaactacagccccatgacaaagtaatagacttaactccaccatgggaacattactgcacaaaagatgtcaatcccagcatcctcttctcttctcaccaggaacatcaagatacgctggccttaggaggtatgagtcacctgatggttttgtttttcaggatgaagcctctctgttatttatttcctgtgtctcattgatgctacatggtctttttgtcttgcaggacaggctccaatagatatccctccagacaaccccaggcattacggacaaagtggtttctttgcctctctctgttggcaaggtatttacaagtgtttctttaagtcacatggtttgatgattatgtatttcttctgtaaagatgttggccctagaagcagactacattaaagcagcacttagaggtcattcaatccaggcacacggactcccacctgtaagcccagcactttggaaggccaggataggaaggccaggagttcaagaccagctcaggcaatatagtgagaccctatctcaacaaaaaattttaaaaaattaggtgggagtggtggcaaatgcctgtagtcctagctatgtcagaggctaaggcaggaagact

SEQ ID NO: 54331 - DNA, 1052 bp, Homo sapiens
atagagatagcaaatggttttcaactcaaaaactgattttggttgatttgaatcgactgtatggactgttatgttttggttctattttgttttaacaagcatttagatagccaggcactgttctaagcattttaaatgttaactaattcattttcaaaacaagtccataaggtgagtaatattcctaacaccatccccattttatggatgaggaagttgaggagtagagataataagtaacttgcctagattacatcactaataagtggcagagctggaatgcaaacccagggagttggggtccaaagtctttgttcctagccaccatgctcggctgcctctccaaacaaattgagaaagattaagaggctacaaccagacttggagagaaagagcaaagtgattgactaaaatatcaacagaatatgggcagagaagtggtagcatgcatgaatttcaagtaccaaaccgagatcccagtgccaacactgatatgagttagttataatctggagggataatgagtatcctcatctaaagagaaggtacagtggaaatggaattggatttggcttcatgatccagcctccagttttaaccttgccacatatatgattctggacaggttcattttcttcatctgtagaatggatgcaacagtctcttaccctactcacagggtaagcaagcatgagggttaaggactgaatgcatattaaaaacaccttgaagactccagatgctgtgagataatgatacagcattatgtttaagaatgaaaactgtaatgattttcaaaaattatattgcagaagggaaacaaaaagcagctgattttgaagacctactctctggtcaaggtttcaatgctcacaaagacaaaaaggggcctcggacaatagctgagatgagaaaggaggaaatggccaaggaaatggatcctgagaaattaaaggtgagtgaggcccctgacgcagcttgattatcctatatgacaaagtcatgtgataaagtcatgtgtatggagctatcgccatgagagtaacctattg

SEQ ID NO: 54332 - DNA, 1032 bp, Homo sapiens
ctcagcattctacctggggaaatggaaaacagaggccaccacccatgaaggcataacacccatcacattgtctgagaataggattaatgagcaaaagttatgataatagagttatatgatggtttaatggtttctagatttttcttggaaagatataatttgagcagtggctttatgcagactccaagaacaaaaccaccaggtatttttttttaagtaaaaatttactaaggcctttagcataatactgtaaatgtcttttggtcaagagaactaacaaatataaaggaacttgaaatgtggggagtgataatagtccagtgattaaactacagtccagtgattaccaccaactttctgactaagctaaaaatgaatgaaaatggtggctaaagaaaatagggactctgaagatgtcgaaatctttattcctggttaggaaggtgggccgctacccttctttccctttagaaaactgtgattaattaaataaaaagtcttactactataacaactctaaacctggtttaaatgaaacatctaattttgctgtaaggcttaatgctcttcttttgtttagccaagaaaacattcttagttggaaacaggtggtaaagtagtttggcctgttcacaacttatcaggaccaatatctagtgtggactcagtgttctctaggtttgtgagcagttgtggtaagagaatggaaggcaacactgaataggagttaagggaatggcacgatcacagtgagagagctgcactcacctgcagacccagtcagatggcttgtcagtatctgctctgaggaaccaggtcccacctccccacaaggcaaatctagacccattaaattattacagtgggcttttttgttttaaaagtggttggggatccacaggaacgacattcatacagggacatttgtgaaagcaaagcaagaatgaatgctttcccgatctcagactggctggattcagatcagtgtgttggctggttctcattttaaggggtaagcagtttgctattctg

SEQ ID NO: 54333 - DNA, 1039 bp, Homo sapiens
catatatattaaatatatccacaaagcagatgggcaaaaagattttcatgctaatcttcaaaggttcatgctcaatattgtgaaaagcttttaaaagttgttttgaaaagacaatcattttttgtttttgttttaactttcttgtggcaagctataccggaaaagcggcatgtcaaaaatactttaggttctacatagatctctttctctcttttgttttgtttgtttgtttgttaaagttcattatttattttaccttttactgacaatgtgaaactcgaagaaaatgttctctttttaaatatacagtcataaactgttcaaggtaaccataacaaactaggtgttatttattaacgtattataaaataatgtttgatccagtatgtgcttgtcttatttaaaattggaatgtgagacatgttgctgtgacctgtttttctttctcattcacatttgtagatattgtgtgaactacagtatataatgataacaattaaaaggatattctgtggatgtcacgtattttgaaatgatagaactacattagctttgtatcatgtttggataattcatcaatgttcacagtttaaaacatcattaaacattatgtaattacaatgagaaagaatcttacttaaatttggagattttcccccacatctcttttccggatacattataattctggacccctatttatctcaaaactcttaatatatgcagaccaacaggtctttgcattccttttaaataactggttgtgacaaagcttgttgttgatcagattcactgtttcatcatatttattgtaatatattttttgttttgtaaatatgttacaacaaaatgtgattggtctaaaatatttgtaatgtatattaaaaggttcaaaaatatttgtataaatctaagttatttgggtacttgtaggaatacaatgaggagcttgaatgccaccttctgacatgatttacttttaaggaaagttatgaggagagaatacaaaaagcatgcaccaaaatgtaatctgacagga

SEQ ID NO: 54334 - DNA, 1082 bp, Homo sapiens
ggagaaatgagaggagctagaaaaataaactgacagctagaaaaatactccactgaatcaacaaatagacatttcttgaaacagtaacatgctcaatgtgcaattttgaaaaagtaaactgagcaaggatcatgaaacatgatggtggtgagaatttatacttctcaggtagccaggggaagctaggtttccacagattcctttgtctttcagtccttttgaaaacggagaaaaagcaagagaagagggacggcaccatcaggtagagtggatctcagctagaatgaggggaagtggcccagaatccaacctcctccaaagagctgtgtgacaggcaagtcctatcctttctgcacctctttccttaaatgtaagttgaagcatttggaccagactgtttcaatgatcttctagattgcttttgccaaaacagaactctccattcctgtaagataagtacacaatggctctcagagatctaaaaactggccttggttacctgcaaactttgaggccccaaggcacaaaaataatagctttttttttttatttttttttttaaggttcatgaaagcttcggacacaaaagcttatatggtcttcgtctctataaataaaccagggagtaaagaaaaaccccgctagtttcagtaaagcgttgctattaagcaaagcaaacctatgcaaatatcaagttcttaatgaggagtgtttcctaaggggcctgtcctctggtaccccgcctctcctctgccacagtcatgtgaaggcagacaggcacacactcgcacactagcacgcacttgggagctcagggaacataacactggttagtgagtcggtgtccctctcccatcgattgcaacttttcccctccttccctctcctgcctctccccactttctacatctccgttctcaggaaggctcagggaggatcccccgctgcgtgcactgcgttctgagaggccggggagagactctgggcccgcggtcggggcggagccaaggtcccaacccacattgaacgggcttgaggattacttggagggctcaggatctaggaggagggcccagggcact

SEQ ID NO: 54335 - DNA, 1018 bp, Homo sapiens
ttgcaaggcttcctgtattttggtaggaaaacattccatttctaatctgtcgaatagagtagcatgacttgtttttatattggcttttatatcatccttgaaatttgcacccaaagatatccccagttaacatctgctataaacatgtagatagtatatatacgagtacgcctctgttcactatgaatttatccgagtatgtgagctgttagcagcagacattttatcgttatttctggctgacttttatacttaatatcagtttagtaaacatggtttacttggagagtgtcgactgtgttatatatccatttgaagccaatgccgaaaacagatgaaaagtagtgtctcagtactacacatgatcagaaactaccaaatcatgatcacgtttatgtgtgaatgtgttagaaaattgtgatgtagtgaaaaaaaaggaagtctgaaatggaaacggactaagggaaggaagcattttacagattgttcaacttttattgaggaactactgtatgccagagacttaggatacaaagataaatgagaagttattggtgggtgacagagctggaaataattatattactatgtcagtgtttatgttgggctcagatgcggtgggagaacagatggtgggttggattttgtcctccaaaaagatgtgttcaagctctaattccctggtacctgtgaatgtgatcttatttggaagtagtatctttgcagatataatcaaattaaaatgataactggtttaaggtgggccctaatccaatgactggtgtccttataagaagaggggaatttagacatagagacatacagggagaataccatgggaagacggagacagaaattggagtgatgcagctacaaagtcaggagcaccaaagattgttggcaaccatgctggcaaccactgagtgttaggaagaggcaaggaagggtgcttccctacagccttcagagggagtgtggtggcgctgctgacaccttgatttcagaagtccagcctcca

SEQ ID NO: 54336 - DNA, 1033 bp, Homo sapiens
ttcttgttggcggtcaaggcagagaagtccagactggaggtggaagtacaggcctagttctttaggacctactctgggctggagcatcagttgcggccgggcccttgtggtagtaggagctttgggttgaacataagttttcagcaggagtgcgtggagtgaaaagagagatggggttggatttttggtcaactccaactttaagagattcagaggatgtgattcctgaaaaaagaggaaaaaaaagaccaaaaagaatcaaacagaaagatggttgtgaacgttgagaaactggtatcagaacagaaggaagaggtctgcagtacctagctttgacaggcctcatggaggagggggtactgccgatggtcaggcacagaggagaggagcaaagcctgctgggaaaagatcatctgaatgaaatagtatgtggtatttgctttccatccacacatgggcattttccattaaagagtggaaatgtaaaaagatatgttaaaattgacagtgtttctttgtcccttaacatgtgtatactttcagatgttttttaaaaagcactttggcaccttcctattaaagagtctctctaaatcttctctcaagtaaaaggaagcaatcaaaaatgttcattggcttaattaattagtttaatactaattatgagtattatggacttttttcagaagaaaatttggataagatagtctcctatgcttttgatttctacctttatcaaagaacattgctaaaatgagtagatacctgagtcagtcagcatttatttggctacctccttttgccaagcactttacatagattatctcatttaattcccataagctcaataaggtggcaccattatttccattttacaggtgagaaatcaggttcagaggattagcttctacccaaagtcataagaccagatggtggcagagttaagatttgactcatgtttgtgactcagagctcaagattttgtaacaaccttgatactctgtttctcactcagcagcacaacaagggcaaa

SEQ ID NO: 54337 - DNA, 1033 bp, Homo sapiens; identical to SEQ ID NO: 54336

SEQ ID NO: 54338 - DNA, 1033 bp, Homo sapiens; identical to SEQ ID NO: 54336

SEQ ID NO: 54339 - DNA, 1033 bp, Homo sapiens; identical to SEQ ID NO: 54336

SEQ ID NO: 54340 - DNA, 1033 bp, Homo sapiens; identical to SEQ ID NO: 54336

SEQ ID NO: 54341 - DNA, 1033 bp, Homo sapiens; identical to SEQ ID NO: 54336

SEQ ID NO: 54342 - DNA, 1033 bp, Homo sapiens; identical to SEQ ID NO: 54336

SEQ ID NO: 54343 - DNA, 1048 bp, Homo sapiens
aagttggcccacccctggcctatgtatttattgaattgtatatatttaatatttacattttatatataaacaaggtttcttgtacattaatatttctcttagttggatatcggtggcttactatgaatgaaaacatagagtcagattgtttttcacaaaactgtcactgtattccaggaaaaattaagagttcttggctgtggatatgtaaggtgacatatctattccaaaccccttcccctctctgtgtctcctttctcactgttgaaagaagggctttgaagtagagaatgtctaagggctacttcccacaatattgtttggtgattcttgaaacatactatcatccctctagtttaaaatcaggggtccaaatccactgtttccatcctgagtcctcttgaaggacacattcccttcttgccttttggttgcctagatctgtggctggaatgggaggctttcattagtgtggcttcatcccaactcctgcttgtaggtgctgtctgggcgtatctgtgtgattacagtattgtggtgatatgaattattgtagtgtatatataaaaatgagcagagactttttttttcttaagaaatgaagcataagaaatgtctgatggagaaaaaaagattatttttgaagtactgatagagaaaatactgttggaaaccagatggcaattttttttttataattgcaaaatgttgaaatttgggaggaaaacagttttgttttgtttttgcattacactattaattgtgagctcttataatgaagatcaaagtacatctaagcttttcactagtgagcatatttattttcatgccttccgtacttaaaatttatttattattttattcatttaacaagtataaatggagtacatcattctaggccctggagataaatggcgtttgatcaagactaatctatcagatgggaataagtgttgtgcagaaagttcaaagagggtggtatgttcgagggtgacctggggtacattagaatagatgaccagggaaagttctgcttttagaaaggaat

SEQ ID NO: 54344 - DNA, 1073 bp, Homo sapiens
tcaagcatgcgtgcactcaaaagatctttaccgaactagcttttgcaagacactctactatgttctatagggaaggcagaaatgaccaagttaaaattctgtctttaaagaaattgtggctcagtggtacagaaaacagtaaagtttctagggtatatattatatagtggcttcttaacacaatataagctacctacatagtaattttaaaattatcactacttatctatccctggtagaaatcatcttatgttctaatattcacaattaattaattttttgacctaaacatttaaaatagcaatgattttgaaatagtagtatgtctttcatttaaaatgtaactgttacttttctttttggattttgcctgggtccaactgacagcgtttactggcccttattcgtcctgattttccacgccatctcccccatcccccatttcattgccaaaagagtcacctatgactcagatgcaaccagtagtgcctgtcgggaactggcatatttcttcactactggaattgttgtttctgcctttggatttcctgttattcttgctcgtgtggctgtggtaagttttattttctattgttttgcccaaccgttgctgagtttacttcagaggcctgtgtctgggacctccatttcatgctcattacttaggctttatactcaaggccgtgtgtttttagtttctctgttcctctactttagacctgcctaacagtagttcggccatgccttcagagtgctttctttatttctcttacaacttttagccagacgatatgatttcttactttttctactttaagctattctctggaattgttcttaaattcctgcctcttaaatcttacagtaatccacagatactatgctagcagtacttttctagttgcaagatgaagatatttcaaattcttctcctgcaaatgggatcatggactcaactctcaactcagtataataggtatatgttgagggacaactgtgtagcttccagaaaatgcagtgaataagttgacatcttcacttccaagacaaaaactttctttttgtcttcagag

SEQ ID NO: 54345 - DNA, 1067 bp, Homo sapiens
atatctgaatatataatacaaaagtttgatcatggtgacacaaatgttggacatttttttccttataaaaggctctttttttatatattgtacaatatatttggagattcagagcatagtgactatagtcgaaaactgagattgcacttccaaaattggccacaagtaaataatcttatgaagggattctttatcatgtttcaaacaagtgggttacaagcagactttgagacacttttccacagaaacaatactatgaattggtgattgagttcccaggccaagcctccctcaacaggttcaactctaatatacctaacctgtgatactgaaggtgcctgcctgagttttgggtctctgagacagggtagtgtgagtagtttggaggaaggacagtgcaactttccaccccttttcctaagaacaaggtctttctccttttaatttttccactcattttcacctcctaatgcccttgagatccaggtacactcctgggagttttgttcacctctcccaactgagaaccttcccactgggctccatcctccctcctgaggttcttcatattccagagtcacccacccttctcctcccattagtcagttctctaagtacagctgatgtcatgtggtgctgagaagaaagcagatcacacttcatcacagaaagaatgccttgtgattatcttctccacatctgaaattccttttgacacctgcattgggccgactgccattcccatgactgctgcacctgcgtttttagagaatgcctcataacccactgattctcattcacagagaatgggagaacggaatgaagaaagattccagcagcttatagaaggatagcaatattttgggacagggaaaatcctgtcatacctcatctcttcctcaggaggagttctgagctggtcctgcttttcatagttgtttcttttcttccacttaagaactcatagatttttcttactgtcctaaggaagtccttacctctgaggtatctcctcaatgaatactgttttcaaggctgaaatagttcattatgttaataaccttctt

SEQ ID NO: 54346 - DNA, 1024 bp, Homo sapiens
tcttcatctgatatcctttcttccctcattacagatgtcatatactttccacctaaaattctgacaagtgttgggtctaatgtttcttttcactgcatctataagaaggaaaacaagattgttccctcaaaagagattgtttggtggatgaatttagctgagaaaattcctcaaagccagtatgatgttgtgagtgatcatgttagcaaagttacttttttcaatctgaatgaaaccaaacctcgaggaaagtttacctatgatgcagtgtactgctgcaatgaacatgaatgccatcatcgctatgctgaattatatgtgattggtaagaaaacagaggttttgttcattttgttccacaacttgaattttcattatggaccctccttatattagagtcctgttaaagatgtaagaaaaaatttttttcattgaattttttggagtttttgctttatattaatattttaatatgtttcaaatagatgtcaatatcaatatctcatgtgaaactgatgggtacttaactaaaatgacttgcagatggtcaaccagtacaatccagtcacttgcggaaagcactttgcaattgaggtatcataggtacgtattatttttgctgttttgtttttctgtgggcacagtgagataaaaattttctttagaaatattacaacagtagtcttacagattatttgcttcctgaaagaggaaagtataatataatgaatcaggaaatttttgagggattatataaattggtgattcttgaaaaatattcacacctgagattaaaaaattgtaatttgtttttacttcaaattatcttttctgaaaatcaatcaattctgaaaaatttgtattttaactcttgaatgaaatgcaagaaaatgtagtttatatatattttaatttgacttagttgactagaggagaatgtgaaagattataaaagtttcgtatcatttggctaaagattaatgttttggaaaaaagaggtaaaaacagattataagagataata

SEQ ID NO: 54347 - DNA, 1027 bp, Homo sapiens
agacctacagcactacagtggtcctgggactgttgaattcactcaagtaagatacatacatccttgggctgatgaaaacatctatcagtttctctttcctgttattctgggtcccagatcacaggagaatactgtgtctcagcggacatgctcagaggtcagtcttcaatttcagagtggggcaaaatttatttttctatctcttctgtactgtaccttcaattaaataccaataatctataagcatgtatttaaaatgtcaattttactaaaatttttatacatgtaataatttatctgtttctgtgtctctaaagccatgtaaaattatccatgaaaaaaacgcttctccatttatctttgcatagaactaaggctctcgtaccacatcaagtaatgagttgctatcagccctttacctatttcttgtaagggggtcattagttgagtatgtgagatcctgagacatcttaaaaatacttatgacatggaataactttattgattcctgagtggaaattgattataaagtgtgaaaaatatctatcaagtggggtctggaatctttgtcattgtttagaactgctcacttcatagccacaactggactagagatggaatgtagagatttatttaggataacagtaaaattgggagtctcttgtctcggtctaaatatgaaattctgataatttttaaaaacccataggcatatttttgaacactaaagtacttattttgatgatactgatattcttgaaggtcttcttgccactgaacatccaaatgtgcaggtttcttaatttagtttgttgcccaatatgctgtctttgaatttttttaccgtaccaaaagttgaataaataataaacttatgtattaatcttaagttgttaaaggcaaacatgagatctgtgcaattctcacttaatttctcatccagcattatacttctacttaatacattttataatctttattttttctgtcacactcagctaatttttgtgttttttgtagagacgag

SEQ ID NO: 54348 - DNA, 1048 bp, Homo sapiens
gaatttcaacagtatttgtctgatatatttatgaggatcaaataaagtaatatattagaaatgcttactgccatatatggcactcagtaggaatgcaaaaaatgtaagttacatctctataattcttttaaagagttgccagttaattttctaagagagctagataaccatttttattcagttgaatattatcttcttttcaatcatgttagaataattctctagcttcgttttttaaaacaaaatataaaaattgggagaagttgcaatttgggggttgctgtagttatatataacagtatatttactgttatatactgttgtataacagcatacactgctggaagaggtatgttagttcattggtgctctgttaccttgtctttgactgaaggaagggatcttgtatagctttacttgaatagagtctaatggttgtgtgttgttttagaaaaaaggaaccagctagtgaaataaataaagacatgatcaataataattcaattttattaatattgatagtcttaaatctgttcctcttttaaagatttttttttaaaagcttctggattgtctttttaaaaaaagcttcttaattcattgtcttctcaaatatccagctttgtatttacaataagtgggaaccatgttattttgagtgccatgttgtgctaggtataatattattgtatacaaactgcagttttgtccatttaaaatacttttgttttataatagttgaaaagtagttactcgtagaaaatttattccaggtcaacttttaaagtttgaaggatattgaatataaaaagtatgtaattattttcatccaaaataattgtattacaaagatgttgaattttaaaaacattttaaaccaaagttatcatagtgtcactataaatttataatatttttggctgtaattaattgacctttcttttcaattcaatgaaaatcaaaatgtttccatttttccacaatatttataataagtaatgcattatttaattgttattgactatataactattcaaatcctttaatg

SEQ ID NO: 54349 - DNA, 1111 bp, Homo sapiens
aggagttcgagaccagcctgaccaacatggtgaaactccttctctactaaaaatatataaaaaaaaaaaaaaattagctgggtgttgtgacgcatacctgtaatcccagctacttgggaggctgaggcaggagactcacttgaacctggcaggcagaggttgcagtgagctgagattgtaccattgctctctagcctgggcaacaagagtgaaactctatctcaaaaaaaaaaaaaatgcccatttttcagacaagaaaagtgagtctcagagaagtaacttctctgaaggattaactgggttctcaaaccaattccattcaatatgctacttgagtgcctactttgtggcaagcacaatgccaggcactaagagaacaatatagtatgataaaaattcatttagttgtttttcttccatttcttttaacactgccacttcttcctgaagtgatggataacaaagagttcacttcaagtgccttgaaagtcacacgttgtcaagattagcaagggatgtcagcactatgcacatgtcctgagagctagcagatatttcagtaagccttaacaaagctgaacatgagcctcacttcctttctaatcttatctggttcaggcatgggcattatttcatccctatttgttcagtccataaacatttattgagcatttgctatgtcccgggctttatgttataaattgaggatatagaaaaagaggattagtatttgaacttgggatgcttttagtttagaatgggaaaaaatgaaataattacaatacagtatgacaagtgtaataacagagattttgagataataattaacagtaattttgggtgagttgcagaaggtatatcaagaagatgaagggttaaaatgcactttccagaaggaaatgggtaaaggaagtagtatttcctatgcacatagtatatatcagggcccaggccctgaattgagactatatatttattttaatcctgaatccaagaatcagatgatatatagaatttgttcacagtgacaatgtgaaaaataatccctgagctgaatatgtaaatgatattttggagaaaaggcaaccaggtagaagaaacagcatatatg

SEQ ID NO: 54350 - DNA, 1011 bp, Homo sapiens
aagccaaggtttgtcctacggattttaactattccttagaaatttaccaaaatggaataagaggaggaaggtttcataaaaacagcagtgtagcctgtacttatttggcagaaatgaattctttttgctctccctgtcatcatgtcaaacattgttaatgtgatttgggggagtgaagaattctagagtcaaaacccacagattttagaagatagccttaaaagagaggttgggtatgattttgttatggagctgagtcttgtttgcaaaaggctctcaagctagccctttaaatccaggcctaaataaattgagattgctaacactctcagattaaatcattttcattaattcaaaattgatttaatctttgaataacaaggcaagacagagtgttatttatgcacttttcaattaaaagctcatgtggattatcttcttcagaaaaaatatcttgcctgtagaggtactgtatttctccagctcaacttcatatagctttcttaaaaatgcatctgcacacattctgattagatttcagtgttgcatagagaattggatgctctttcttttcacttcttgccttgcaaaccatggcactaaagtatcttctttgaaggttgtaacgttttttgatgctcatgaatgattctcctggtaatatggtctattgtgccatccaagaatgtcagttcaaagctctgtgataagcttatccaggctgcctaaaccaaaatgagaactgcaacaaagacttgtgctggagctgaattagcactattgctctgggtttgccaaatttatctaatgaacaatgttatcttagcactggtatgaattagtatgaattatactatggatacagttgtctttcaccagatcttttgcaagagaaattggacaggtgttcccactggcttaaatagctaaatgaaattaacatttatttctacccatagctcctacttaaatgtttttaagccttattatcttaatagttcggtgacctta

SEQ ID NO: 54351 - DNA, 1046 bp, Homo sapiens
tgaattcttgcttgacaaacaacaattataatagtaccttgatatttacaagtttaacattcagattttttgtatttgtacaatgcgctttaggatcacaacaaggagtaatttgtaggtaccctgagatgtgactatgaatcatccacttagggatgcagaggtttaggtgagggtcagtcagagaatatacctagctcagtgcccagcatccacatctcaacaggtctgttattttctagagtagtaattataatttagggattcttgtccaatgtcaagggtgaactctatttctgaatcagtgaaatagctttagatttttgtacaaatgattgtgacataaggcttttggaattttcccattccatactcagagcagacattgctaataaatcaagtgctctaatcaaatgcagcctgaatcagaattttctgcaaaaggttaattggatgtgatgcttgaaaatgtgaaaattgctcagtattgctgggctttggaaggtctaaagtaaactgcctattttttttccctttaacttgagcctgacattaaactcggatttctctatcctctcctacacatgtttgggtctcttagacagaacatacaaagcattctccaaacacatcagggaactgggtcacttcatttggtctgcacacctctggcaatgggattgggataaatgtttagggaggagtaggtaacgaaaaggaggaataattatcagatttcatgtggagagaaataggtaagcacaggctagacaaaatttccattaggcaaaataatgtcccaaccagaaactcacctattgttaccaaaaacagtctacttcttggcctaatttatgaattgtgccacacctgaaattaacttttgttagaagtggaaatgcactaatctatagaagacacttacactttgtggatttgtgattcagttttaaatacttaatactttttgaattcttccattgtaacaatcagatgccttatatggtaggcctgtttgcatgtcagtttgcctgctggagcatgag

SEQ ID NO: 54352 - DNA, 1942 bp, Homo sapiens
tgcaattttggagagcggcaacttctaatctagactctgcacaacagctagttttaatttttcatttcatttttccaaatgcaatagatattagaggaaattttaaaagaagaatatttgctagatgagggtttcagggagataaaattcttctctgcaaaggggggaaattctctatctgatagaattttagaagggattgaaacaatagcagggaagaattctggggaatgcaaaagagggagtatatgaacaataaagactgggatagagactgcagtggaagcacgaagctgagaaaagacaaagaggactagtgggtaggttccctccattcaccaaggaggggtggcaaagtattttaccaccagcggcagaatatgcttaggaccgaaacttcttgctcaatttgtttatttgttttggtttttttctttagcaaaaatactttgggccttcttagatgtggaaaacttgcccctgggcagagccaaggaaaatcaaggggaaagaaaaaattgaattgctctacaaaaggaagttggaaaattttaagtatttaggaattgcccaggaggggacacgggaaggaggagcatgagcaaggttctggaacaaggtgatgcacagaggggccaggcaatttggcaggtgaaaggttctctgtgataataatggcctgtgatttttaagaatagaaatgtttaaaatgttatctgccttgctgtaatgtaatcctttgttattccatatttattgttgctgttgttaaaatctattactcacactctcttgcatgtggtatttataagaaattgaagaaaaaaacagggaggcaagagcattgccctgaattattggaaacattagtatgaagtagaaagagaaaaaaaaatcagctacaagaggaaaaccacaacatcaagaatttggtataaatacacaatctgaacaagagatgcctaagagggatacaacccacccagtaaaccttgggataataggggagggtcagtgtgtctcagggccggcacgggaggtacttctactttaatactgcaaagtgttacataaggccagaggatttggagctgtccctctgtctgactcccgggttatttggaggaacatgccatgttgcagcaagaagaaactttcaagacacaaatctagtccagagccttcctttaacagatttggtcaccaagacaagagaagagagtgacttgcccgattccaccaaggtgaaggggaagaaagacaactaccagatctcctgactgtgaccctggctctccatccactcggctcctatctcttcacaagggaagactgtgctttgatgatgttttgggaaagtgctagtgatttagagttctccagcaggctgattggcttagcagctgggaaattctgaatcacatcggatggaatgttttgtttacttcctcccagcagtgctaaaggggagaaagagtttgttcccccacccccctccacccaagtaatttgctggaagcagtaaataatttcccagttcatctgatctcccttctaaccaatgtcttcctgtggtagttgaagagaaagaatatcatttgaaatacttgacttattttcagaagctagcaaagagaaagatgaatgtctcttccttaactcttagaaagctactatcccttactgttaggggcaaattgtaacgcagaggtcctatctagggcagccagtcctgccatgaatagatgtgtgtccagagattgttaaacccagactgtaagcaatcatatagttcaacaggtcagaagccctttcttaaaccaaattaaagtcaacattcaataaacaaaaactgataaaattggagcggcttagattgaagttaggagttgaaaacatcttaatcttccccttaccctgctgtaatagtctctgagacaga

SEQ ID NO: 54353 - DNA, 1035 bp, Homo sapiens
atgataatcgcctgtcaaatgaatgcctgcagagtggatcctttctctgtgcatgtcctcctcatgacctaaagagagagaaatacagaaagaccatttttctaccttgcattgtttttctcctatcctataaatctcagagatttgacttccctaaaatggaaagataatcacagttctaaactcccaggtgacagaaatatgctaatatttcacttgtaaacaccaccaacaaatggactctgtcattaagatttaatgatttttagcatagctgggatttatctttagagaaacactgagacttgattcctttaatgaactttttttcccgacccagcaatacctaatttctacctaattgctttgtgttgatattcagtttagttccttgggttcctccccgaaatatgtccttatggaggttgctcccaggctgtttagctgcaatgcattatgttgtccttaagtcttgaattcaaatgcttgaaaacatgcacttcccttttgtttttttcactcttagggactttgtgtatcatcaacttatgatagtagtttcaagctctctgagtgattttaagttcataattttcaggtaaaatataacccacaagactgaatatgcagcccctacataaaagggtctcctcttcagtgtggtgctaggatattttaaagagcctacaacagagagaataaaaatttgacatgagtcatcaactaatgaaggacaactacaatgcgatatatccataagatgaaatattattcagcaattaaaaggaatgaagtactgatacatatacatattataacagggtaagccttgaaaatattgtgtcaagtgaaaggaccgagtcagaaaagatatattgcattattccacttatagtaaatgtccagaataggcaaatctatcaagagagaaagtagattaatgtttgcctggaggtgggagggttggggggaaatggggagagacttctaattggtgtagggtttcttcgtggagtgattaaaatgttccagaat

SEQ ID NO: 54354 - DNA, 1194 bp, Homo sapiens
ggtctctgttctggacctcctttcccactcagttcatggcatgtgcttacagcctggatccctaggtctccttgattaatctggtcaagtatccaggtctacatcatataaactccttaaaagaatgtttgttgtttatagactgaccctgaacaatttcttttaatttacgtgtgtctcggtttgataagcattctctgcttttaacctaatctaaccctgatgcttaactaattaatttcatccttcccggcttcttattctgaccacaacagggcctggtctcatgtaaatgaaggacaaagaggaaagaggttcatgggactattttaactgatgggtgttaccttcatttatttgtattatagtgacaagtgtatttatcctatttctttcttgtaagcatgattccagggatttgtttttctatgtaaaatggggctttgaacataggaagtgctcaaatggttaataattggaatagatacactaattatcagtttagaagagtgatactaatgcagtcctgtgtgtgtgtgtgtgtgtgtgtgtgtgtgtgtgtgtgtgtgtgttgcatacccaaaaagaagaggaggaggaataggacaatgacagcaggctcaaccataggttacattttgaaatttttcttttttcccttctttttcactttccctttctataggaagtcaggattcaagaccagatgtttaattttagcaccaaggttggtttctatgaatcattgctctattaaaacctattctaaccaaaatatctcaatgttatttagaagttggtgtgactttttaaaaaatttacctcttgcagagatatttatattttaatttttttccatttttagaaatacattcctattactactggtactgggcattattgggggtagaaaatatccaatgtcatgtaataatagttccccagtcttgtctatcaccagagtcacatgggagctcctattcctgagcccatccctggagattctgagtcaggatatctgcaggtatctgcaggaactggaaatttgtaactttaaaaagcttccaaagtggggctaatgagcaatggatgtaggaactggggtgaaaagatcaggtcctattcattaggagtttataagctgctcgggaagatcaaatcatgagaaatgctaactcacaagcttgaattatg

SEQ ID NO: 54355 - DNA, 1072 bp, Homo sapiens
atgtcatatccttgcaaagccgagttttagaggcttactgggatgaaatgcaagcacagtccaaaatgtagaaaaaatgtacagaaaaatgtagaatgagaaatgaagaaggcagtgttctacccagggctcagcaagcaacatacccctcattagtaaataattatggttagttaaaaatacaattcggttgttatttttctttcaatttatgtgtattttttcaaacaactactaagttattaaggacataaatgctcaagttactcgaacctaactacttaatgaatgaaactgttaggtatttctgttttatgaaaatattacttaaacatcaaatgaatttgggaacctctgtcctagggcataggggagcatatttcatcatgttatttcatttactcctcataaaatcccataagataggtataatcagcctaattttatacttgaagaaattgagatttacagagttttagtgacttgcccaaatctacaccactggtaggtgactggggctacaggggctaagtgacatgcctaaaaattcacagcaagtcagaggcagaaataaaacaaacaaaatcctggtgtcctgattctcctcccaggagaatcccttttacaaagctgtactctctctccaaatcctcccacgccttctctcttctgagtctgaatgtacagtatgaaaagatagacttccatgctacacatcttatttaactacgggtgtatttatgctgccttaatagctgccccacttgattttgagtatacgaggaaaatgtacaaaatactatgactgaggatttttgttcagtctgaataaatgctaaaacaatattaaaacaactttaggctcctgtaaccgaggaggctgtgaggtcttacagagaatattaccctctcctcgggtttcctgtggctagatggctgatcctgcatttcagggaattggacacttgggatctattttcaacctgatgaactccaattgaacactaaagagagtctagattttcccttcagccttcacagaaatgatccctgataccatctttgtaaccca

SEQ ID NO: 54356 - DNA, 1067 bp, Homo sapiens
gagtccagaaacagatactgtgtattctaagcctgactcaggctctgattccttccaaggtgttaagcagctcatttagtatctgacgaagagtcatcataatgctcagcatagctgggttgtctctgccaagataatttatcattcactgtttttacacattaatgcaaaaactatatatattgagttcctacagagtgagggacttaagttggggtttgtggatacatttaggcagcctgtaaactcccaggaatgttatacacggattagtagatatgttcttgcctgtattttatgagaggatttatagcttttattagattctcactggagtttgtgaccaaaaagagattaagagtcactgctatatggtgtaagacttatcataccatgttcatgaatatgtttttcctagaatcttaaaagacataccctgatgaaaaagggattggagccatgcactgtttctgtgaactgtactacgttgtaaaaggaattttactacatttgattctcaataacagaattcgagcaggcattccaagttgtttcttaattgctgatgaaacatgcttgagtttatagtactcttctcctaaccataaacttttcctcactctctcatatttcaaaaacgaaacactgtttagttatctcaaatgaaaagtgcctcgaggacaaggaaccaggacttggagttttatcacccacagtgttcaggtagcccagtatccttgcatatgcattatttataaataaaacctgctagacactggggtgtggtctcaggcagacatgaacagcaagctatgtcagatgtggcccaccattggccactagctgaatgacagaggatgcaccatagcggtggagtgggtttggctggaaattgatggctgaaagtatttgaagtgaaaaaccagaagtcatctttgtcactctgtcactaaaataaaaactgacaattcagagatagaaacagtactgcttttccccttgccctctggctggatatattctgtgacaggggattctccgaaaggtctagagtaatgccccacccc

SEQ ID NO: 54357 - DNA, 1154 bp, Homo sapiens
taaatgatattaatttttgcttgggtagcacttgatgtatatatccaaacccattttctcatttaatacaataatcatgtgaagaaggcatagaatgtgaattcttgagagattaaatgattttttttgatattacacagttagtggtaaagctaaaatctgatgtcatgtctgactggcaatgtaacaaaactctgtgaggatttgagttcaggaattacggaggtttaaaaagaagtctctaaattagtttaaatcccaattaagattgtcaacattggtatatttacatattgtagcaactggaaaactctgaagtgctaaaaactcagacttggcttattactgtcaaaactagaaaatttttaagagttaaaaactgttcaggtattcagctgttctggtaaattaaatattctagttagggagagtttgcatttcataactcagatatagatcataatttaaatgctagcttttaaacaagtatacagcatagtacttttaacactaaaacaatactcaatataattttgtcttttggtgttgtagaaaacactctatttgtttagcttatcatagtaagtattatagaaattaattactatttccctgaagttttctggcactaggtaatagacattgctgatagggaaaaaaatcagaggatgtcactttcttgtccttctactttgtctacctctctagtactttcaacgactgcccattccacttagaacttaagtttttttgtgttttgttttgtttctgagtcagagtctcactctgtcgtccacgagggagtgcagtggtgcaatctcaactcactgcagcctctgcttcttgggctcaaggaatactcccacctcagcctcccaagtagttggggttacaggcgcataccactatgcccagctattttttgtatttttagtagaaatggggttttgccatgttggccaggctggtctccaactcatgagctcaagtgatgtgcccacctcagtctcccaaagtgctgggattacaggcgtgagccacctcacccagcctaaaatctaaggtctttaacctgactttctaaaacttgcatgattggctcctggcaacctcatcttcatgtcactcttcacctcaaacaccacgcaataatg

SEQ ID NO: 54358 - DNA, 1107 bp, Homo sapiens
aaaaatctaatttctccacccatttgtcaaattgggtattagttgtttacattgcagttcaagtggcctttatttgttgttgcaaaattagaggtcctgtgtccaagcctcatgcgtcaccatttgatgtgtgttgttctgagatctgctatgcgcagtgacatacccttgctccatgtgctaaatataagaatgttgaatgaaccctcctttaccaacgtgatttgtgtttgtcgtttgctcacaagacatagaaaatcttggcaatatctatttgggtgatgccacatctttgctcaagtgcttgtggccatgtgtcatggttgtactaggggacaaagaaaactttaagaagagagtagtgctgatatccagtaaacttgcaatgatgcgtgctcatggaggcacagatcacatgggtgacaaaaatccaccattaatcctcaaattctatttttaaaatttgataagaaaagccatttgaaaaaaacattatttttaataactaggaactgaatgaactgatttagagctgacttactctgtgttttatcaagggggtagttacaaaaaaattgagtgctaaaatgctaaaagactagttaatgacttggatgagtactctttgaatatgttgtaactaattgtatataatagcagcatggaggtaaaagtgttaccatttaaaatacatatatacacggctatatctcctgtagatttagaggattccattacaataaaggtgctgctaattcttcagtaattgaataaaatttgaacagttcatcgttaatatccctgtgcctcagtatcctacaatcttttgtgaaataagtacatatgcccttttatgcagtgtcacagcagctagatttaccattccattacacaaatgtggctccttaataaactgctctaatatgtctttccagtgctggattttgatagcttttgctaaatgcagataagagttaaatgttctttgtccctttgtttttattcaaatgttttccttctaaattcattttcaaatttattacagaagaaaagcaatggggcaccaaatggattttatgcggaaattgattgggaaagatatgtgag

SEQ ID NO: 54359 - DNA, 1236 bp, Homo sapiens
aatatagatagatatagatatagatagttttgttgttgttgttgtttagacagagtcttgctccgttgctcaggctggagtgcaatggtatgatgtcggctgactgcaacctccacctcacgggttcaagtgagtctcttgcctcagcctcccaagtagctgggattacaggcacgtgccaccatgcctggctacttttggtattttcagtagagacagtgtttcaccacattggccaggctggtctcgaattgctgacctcaggtgattcgtccgccttagcttcccaaagtgctgggattacaggtgtgagccaccgcacccagccatgtacatatattttataaatgacatatgcagcacttcctctccagagccagataagcagaaataacctaaaatccagctggtgccatgatcaaaatgacaatgattttggactttcatgtctccagccaaaagagcagacaattatacatctatactttcttcaggcactaaaaaggaaatagggtctacacaagttaatgatatatcagaatattttatttaaactatggtttttatactacaaaagcatcaatcattacattaatagaaatgaggaaatttcaaataataaattattcataacaatggtttacgttggacttctgatttatgtttcttttgaagtttttaagataaagtcgtgcctcacttattcttttcatttatttgttaatatgtatccatgaactataaccaatttgatctcttttatcatgaattggttttattatacttgaatagtttcgctatatatattgggcggtcaaattaacgaatgaaatgaaatgggaggaatgaatgaatcatataattatatgtatatacaatataaacttatctgaaatttacttctcaagacaaagtgtcagaagcaagacaaatcaagattttaattgctggcaacaatcctattgtacagttagacaaataaacaaaattttagtccagattttgccttagcccttgattttgatatagaaataaaatataatgttggccaggacaaggcagagcaccaaaaaggcagaaggctaatgcaggagttaactcacaggtaaaggataataattctttttcttatcatgttccagcctgctgataagataccaagcttacagggcaaagaatgaacatcacccaggtttgccatctggtcaggttgatttggcatctgtgtaagttaga

SEQ ID NO: 54360 - DNA, 1042 bp, Homo sapiens
tcaggaggctgagatgggaggatcacttgagcccaggagttcaaggttagagtgagctatgattacaccactgcgcttcagcctggggaataaaactagaccctatctctaaaaatatatcatataaatgaaaataaaaagaggaagattcaggatacagccatcctatttttaaggttcaatgattgcagactcttaaaaggcttacagattcaacctgacttttatgtcttgatcccactctatgatgcctgatgccaaaattcccatggcagctcaattccttgttaagctaggaagcaagcagagatgtaatcagagcacgaaaccttcatgtaagtgaccatcaaaactggtttatattttcttcattcacctctattagctttgattctcaaacacaattcaattttgaattggtttctaacccctcatgcaaaaatgtagtcctcaacaaaacctaacttgagtgcatacttgcattttaccatgttatttggagtaataacagccagagagagacagagagagagactctccagctgcagaggataagggtctatgagttccttgaaagctgttgattatgggataagccacttttcaacaagctttgtcagtcagaaattgtgttttcttagactattggacaaaaaaaaatccctgtactttgtaaccattcaatggttatattttaggtaaatttatgctttactccaaaaattcacttactctatttctatttacaagtaagcccagaggaatatcactcccatttctcttatttatcttttccataattaaaaataaactctgatgctattagcccattttaaatcgaaaacatctttgttttttcctatctttgtttttattgtttttttcaacattctgaagaaacctttaagctaagaggtcaggataatagcctaggtgttgatagctgctgccatagcaaaacaacatattaaataaagatggtttaatatatgcggtagcctgaggtggagagatgtagaggaggggaggggtaacctttatc

SEQ ID NO: 54361 - DNA, 1056 bp, Homo sapiens
tctccactttacactaaaggaaggcagcgcagagaggttaagcaacctgccaaggtcctacggtcagtgcagaggatagattcaaaccacatccaactgacttcccagcctgtcctagacaacataatgaattacagcagtacttgcatagtccctgccacaggataggtactgagaagcactaactatttgcattatcataggtatttttaataatcagaacaggaagcaaaaagaaagagaagaaatgttaaattcagtgtccttaggcccaaaacctaattgccctatgttcggtgcctaagcactcatttttctggttctcttaacatattcaccaagtgtttttaggatagtttagtttctttttatgatgctgtaaaaggtttatgtaaagacccttcaaggataggaaccactgcatagaatgcaggcgttttcagttttgaagcatatttataggaggctttaaatcaaccaacttacagcaaaacaaatgttcatggggttaatgtctggattttcaaatgggtacctgaaacagagccagtacatgtactgatactcagaatgtccttacgtgaccacccaggaagcaaatgcagattctgctctgaaagtttttatgtagctatatgtacacacacagacactcctcccacccacactcacaccacactcctatttctattctctgcttgaaaagaataaggagcagcacattcctaagttaattttttagtactgagacaagaggaaaataattttgtaaagctcaacttgaaatcgaaattttaagttctaaagtatggggattttttttaactcaccctgggaaatcttcttttttgtttccagttcttttagatcagcctgagatatggggttcaggccaaccaattaatccaagcatggagtcgccaaagttaacaaggccttttcccactggaagtaagttatgtgtctgctctgtctggaaaaataagtgactcattttagtgtctgtctgcatagtgaaattaggcaactcttaaaaagtctatgtaagcaacatta

SEQ ID NO: 54362 - DNA, 1115 bp, Homo sapiens
actcgtctgtgctcctctaattctagagggttacagcatccatctccatccctctattgttctttcaggtctttgaggggatacaaagctccttatctacctgtaaagataataaagaaccactatgtaaatcctccaaaccacaaacccaaagacattactcgtccgttataaaagaggggtgtgtacttttattttctatgcagctctcttaagccagactctcagtctcctaaaaggacatttaaagaacacccacttccctccaagggtaggccacaatgctgtcctcaaaggaaacatctttatcaggagtagagaggacaggtggctttggtaattcatctgtgtttcatctaacacctttcataaagctctcgaagatatttgttcaattgaatttaccactgatctaattaggaagaaaggaaactttgttttctttctggaatttttgagagttttgttgtgattttaatgtttagcttccatacctttatttgaaattattttaaaatgtcaccagtaaagactcttgattcttcataattaagctggaaaaagcttgactttactggtatttaaagattggatttctacgtagaaaattgaactgggccactgaagtttgtgaataaataaaactctgcagtattatctctttaagtaagtcccagtttatttgctgcttaatcttttattggtggaacatatacaagctggaagaaatataaatttaagattgaaacaatagggtatggcctcatgttttaaagattagcagtgcttctcactacctgcttttcataacattaggcctgattaaactaactttcttgtatttctcgaagcatatttaattgtataccactatgcactcatttttaaaattttattcacagcaaggtgattgtcactgaccaagtatagacagtactgataaccttgtgaatcagaagaggtacctgctattgaaaagcagttggaagttaagaatttgctccaataacttcaatttccttatgtcaaaagttataaatacctgttttggccagaacagtactttactggaatgctggttcttggcaaagtctctcttctcccatgtgggttgt

SEQ ID NO: 54363 - DNA, 1044 bp, Homo sapiens
agtccttgcaacaaaggttttgccctaatcttctagccttccagctctctaatttcctgatactacaccttatttttcccttttatttttagatgacagctaataattgtcctatttataggataccaaataatatttcaatacatgtgtactatgtataataatcaaatcagagtaattagcatatccatcatctcaaatatttatcatttttttgggttgtgaacattcaaaatcctctttttggaaatatacaataaattattgttttccctatttaccatacagtgctatagaatactaacatttagtcctcctatctagttgtaattttgtacctattaaccagcctttgaccccactgagacctctgtcctcacgttcttcctgttctcagtccactaatccaggtggagatattcaagttcttttcattatccagatgagaccccagagaggaaaaatacgtttctgaaaggaccttaatcatttacataataggagctacattttttctttttggagttatattatctctgtgaaaaaaataaacgcttgggcattttaaatgtctgaccttcttaagcaggttattaaatacccctacttagtcattggcaagtcacaattatagtcatagagcattcgactttccttaccctgacatagcaataaagtaagaaatgaactggtcaaatttctcacatgcagccacaaagatactaattcattcatttgagagacactaaaggaaggaaaattggaagatatgaccaattttctggggagcaatggctatgctaaattcacattattcttaagtgggaggtgtttgctaatagcacttaccccactgaaggcccctttcaatcaataacaggaaaattattaagtacccactctgcaaatcacagcattaagtaccaggttggggaaacaatacagaaacattaaaagcagttttacaagactgtcttcattagaaatattaaaaccacgctccttagctattctgagtttttatatatggactgtattgtctat

SEQ ID NO: 54364 - DNA, 1033 bp, Homo sapiens
actggataatttctgagaaactactggtcaaagtaattcaaaagtaaataaacgtattcagttccttaattgccttaactgactaatttagacaaagctggtttcatagaaagggatattaagtttgagttaataaataattcactctttaaagctcccaattatcatcgcaattagttaatattactgagcactcactgagattgatagcaacacagtagctcctcctcgtggatattaatctaccaacaccatagcattcagaactgtatttgtatgaaaaccacactactgttaatagattcataataatctctacaaattgtcaaaaaatggctgtacatatcagacgacaatttgctaagatgcttcgtgtagggtttatatttgttttaagatgctactcaatcatttttcttcccaaatgaacagtgataatacacaaaatgatgccaataccaaggaattctgggtaaacatgccaaatttgatgactcacctaaagaaagtgtctgaacaaaaaccccaggctacatattataacgttgacatgctcaaatatcaggtaagcctatttacatgatcggtatctcttccacatgacatatttgttttctaaagtacctactattgaataaaagtaactaaagtaacacttcttttaacagtatttaaaagctataactcatttttttaaatggaaactttaaaagataacttggggactactgacaaaaatattcatacatattcttattagtttaagcttacaagtaaaatattttatcacaaaattagagaaatgtgccacaaaaaaatgaagttgcaaaacattatactaattaagattataagtttatattgataaacaagatgattataattttgttaagaacattactatactaaaacctcttattttaaatgattcaaggtacacaatctgcttttgtttttctagtaagatagtcctatgaaagaattctaataaaatctaacactaagaaatagttcaataataaaggaatgtttg

SEQ ID NO: 54365 - DNA, 1048 bp, Homo sapiens
tcctgagtagctgggactacaggcgcccaccaccacgcccggctaattttttgtatttttagtagagacggggtttcaccgtgttagccaggatggtctcgatctcctgacctcgtgatccgcccgcctcggcctcccaaagtgctgggattacaggcgtgagccaccgcgcccggcctatgagcaccctttctaacataagttggattctcacatccagaaataaatctcccaatctattctgggcaaaccccaaacctctgcaaattgttgatctatggaaatgtgaagaggcaactagctgatctgaaaaactgaaaattgatttggaaactttatgtatcttttattcgtattgtacctctgaagtatgcagtatctggctcctaggggtagggaaggaggaatagaaaagttacccatataataattacattattgaactaccagataacctgttgacatgctgttttgttttgcaggaaaatacttggcagataactaatgaaatcttatgcaaggatttggaggattcatataatggagaactgatgtatgagaaacagattttaattttggtttgatgaaaacaaaccaatatctgcacttgggatatatcaggtggaaagtcaatgactttcatctgtgatttccctcacacactaccatgatgaccagtcctacagtatttacttctaggtgtaatattgttaatggttttaaaatgtaattattgtatttgtaaattgtactctcattccagtaaggcagttagacacttgagttttagcattttaccattcctgaaatggatgtaatttaaactgtggtatgtaaatttaatagtagtattgttgaatggcacaatgcttacagaggtagattgcattttgtcaatatataaaatttaaatataatattgatagctgtcataaagggggtgccacatattaaagaaacttaagtggaaccagaagaaaaagaaacaaacttacttttcttcaatgcttagtatgttttactctagtgctaaataaaaactctatct

SEQ ID NO: 54366 - DNA, 1029 bp, Homo sapiens
ttccaaactcccttaacctgctctattttttctcttccctgaggcatgtatcaccttttatcataatatataatttgcttgtttagtattttattgtctattctctgtcttgccttactaaagtaacagttccatgagagcagagaccatagtttgtttttgtttttgttttttttccagtattgcatcccaaagacctaaaatagtgcctggcatataatagtcactcagtacatattttgtgatcatcgaatgaataattgttgcattttatcaattcctgagcaagcaagtttcttttgctcacgaacaagttaggttcacaggtccatgcatgtgttaagtccaggttgactaggggctttcctcttatagacataagatgcatttacagcaaatagaaaaatgcttgttcagattttcttaatgtatacctttacctccatgctgacacattccattgtgcatctatttttaaaaaacccaaaagaacagtttcatttgtgttggaaatctgttgtaataggccacactcctccttgatgatctccacagctttgtagaggtattcatggcacctgcactaccagcatcacctctgatgattgcccagcgtgacacagctttgaaccaatgcatttcatccaagagctgcaacaaaagttcatcagctgtgcttaactatcacctcccttgctcttggatgagcattagctcaacaggcttcagacactaactctgatcttctatccacatacttaaaattgttgtactttgtcaatcaccatttctggattaccttcaattactccagagctgcgcttttcacaggttgcatggttcattctttatccttcagcatcacttctactcgaaaaaaatatgttccacaagacagtgtcatttgtcatgttcctgcctctttcatttttgaaaattatcttttctttccattatagcctttctcttactagtaaaatggagcaaataatgtgagtaaaatacctaaaaactacaggcatactttgg

SEQ ID NO: 54367 - DNA, 1134 bp, Homo sapiens
ttttaaaaaaggaattaacatccaatattctgtattacatactgtacaccagattttgatttcagaaaacaatatttgatgtataacttccacttaatttaaatttaataaacttttatttcagagatatttgattagtttacaatctaagagttattcttaagagtttcagtggaattttcttaatttttctaaagatattcctactctcttgatcatattctaagtacatatgagtacatgtacattcttatacaatgtctaaatgggttagaaaattattatacctatagaagcgaaacttggaaattaatagaatcacttaaaccaaaatctttataagacacaattctattgattttaaagcttctgctttccaggctctgttttccagagtttataattacgtagtttttagtagatgaaaataatggattcttgtacctaacattttatcctcttagatctaagagccgaagctatagaactttgttagactatttggcaagcaaaatatatgacagtaaatatcagaattttatggtttgaccagcgcttatcacattcccaattcagtgagaaaaattcatctgggacacaacagggtactcttctctgtttgcccagaatcagctctggattttaagcccagacttcagtggacccagatagaaaatataaagtctctgatctataggccacatcaggatgttattttatgaagagttctagagcaaggttgcggaaatcggggtggagatggggagcagtgactcctccaaatattcattgctaacaggccattctatgcagtttgttttaacaaatcctgggttaaactgaggccacaggacatgatgggctgttctataaagcattctaagtggagaggagacgatagggcatatgaaattcactaaactctctggaaaaaaaatatgtatatattaaaaaccaagactggaatcagtgcaacagtgggaactaccttttacaagtatccattgcttcataaactccatttgtttggaccaatcccttaaacaaaagcaaggcaaattttacatggatttagagcctaggtcaggttattaggattataaattttccactggtatgtcattgtgattatct

SEQ ID NO: 54368 - DNA, 1168 bp, Homo sapiens
acatgtgatgttttgatacaggcatgcaatgagtaataatcacatcatagaatatggggtatccatcccttcaagcatttatcctttgtgttacaaacaatccaattatactcttttagttctcttaaagtgtacaattaaattattattgactatagtcactctgttgtgctataaaatactagatattattcattcattctatttctttgtacccattaaccatccccaccactgccctacccccaactacctttcccagcctctggtaaccatccttgtactctctatcagtctggagatactttggaatcagaatattcagccactatgataggctttttcagaacatgtgttccatgttttctgttacatgtaatatgatcatctctttggtgacaccatcatctacctcattatgcaaaccaaaacttgagctcctctattctaccctatcatctaaatgatacttaaaatttgattgtcccatcccttccagcccaagcctgctattgctaatgtagttcagatctgtcttattttttacttttactactacagccatcttctaacttccttcattctcaaattcctttaattcaccttaactttgactctagttctcaatgtgggcagggaggggagaattttcccgttagggaacatttggcaatgattggagatatttgtggctgttgcagctgtcaggaattgaggtgagggtggggaagggctaccagtatctctgggaagatgccagagatgttgctaaatatccttcaatgtacaggcagccaccaccctcccagtgcacatcagtccccagcagagaattatctggcccaaaatgtcaataatgcttggttgagacaacctagtctagtgtcctgaggtgtcctttgcataaggaattcaagatgatcatatggtctgtaaataaaaacagttttacttctttctttctaacctgcttgcctttatttctctttcttgtacgattgcactggttacaacctccagtacagtgatgagtaaagatgatgaaagcatgcattcctgtattgttcctgatcttagaggaaaagtatttagccttttactattaggtatggtgtcagatgaaggctttttgtagacagaattaatcagattgagggagttccattac

SEQ ID NO: 54369 - DNA, 1209 bp, Homo sapiens
gggaggatcccttgggacagatgcccgccgctctttactcttgttctttcagcttgtagtggctaggtccctggcctggagcctatctgtggtccctgcatgctgtgtaaccttgagcgagtcactatccctctctgggcttcagttttccctatttaaagcttcctccaacgctagaattctgcatttctgcagaagaacttatgtaattacaagattgacttggctattgaggccgcttcaccaagatgacccggagttgactgaaccttcttcacttatgggtggaatgaggcgacctatttattgggtcgcttttattcctttatcattagttacaaattgcatgacttaaggctcattaaatgtttttctaaaattgtcatgggatccttgtcctgattcccgaccatctttttaaaaatgcgaaacagggtggatggtgagcttgtatcatcgtttctgtctccttgctactgaggctctctttcctttgatccagatggtgtggtcgctcgattctcccagtgcctggctgagtttcggacgtggttaagaaccaactggttgaggttcaatgcagacaagacggatgtgatgctggtaggcaggggtacacttggagattaagggagggaaaatccaaactccctcaagtaatataagattatattactcttcttatatgttccagtgtttgagaactgatgggccaaaaatttccagaatttgggtgagataaaaataacatgtcatcaatgtaaaaaccataatcatagtttgtaatattctgataaaatggggccactggataaaactgtaaaaattatgaaaagaaaatccaaaactgttatttgaagaaccaaaagcctatataagtgttttagagtggcattaataacaaaaaatgaaactaacgaaagatgatgctgattgtcactatagatgtggggcttccaaatgtaataggctaagttttttagatgtaggtattttcaaccaaattagtaattatccataaaattttaccaccacatcataaagacatggtgtaggctgttgcttttaaataaaaatttcaggaaatagtttataaactaatctcaaaagagactcatggacgctgaaaattgttagatatagaattttttagttttggatgtgttgtattaatctatttcagtcagctaaccccagagtctaaattgt

SEQ ID NO: 54370 - DNA, 2121 bp, Homo sapiens
aattttaagcagacacaattaatggtgcattttcttatgcctttagctctctcatgtcctattttcaactcttctagtatgaataggctttaaaaataaatttttttttgttaacccaagtataaatattaactgtttgcatttggatacaaagaagatatctgttgaattaatccaaagtgctgaagaactaagggtaatggatggaaacaacaaggaggtagattctggcataataaaagaaagaatgttttaaacatttgaactttttttgaaaagagcagcctttttatgagatatagtgagtcactggaggggtttaaacataggcagaaagcctggtagtagaagcatgatgagagattactatcttgacagggtagagaattgactaaaagatctctaaggtcccatccaacactaaaattctataactagtgaatagttaatttttatatatttaatactgaagagggtaagtaagcgttttgagaaagacttttcattccgtaaggtggctcctgaaaattttacagttaggtgtatcactaaaataaaataatagtggaaggatactgaattcagtggtaatgtgttacctatgaattgcagtattagagctgtttcttttttataatatctgaacctaaaaaacccactgaatccacatttataaaaaggggaaggggaaaaatgtagagagtttttttccctcaataataataataccatttaaaactagtaatattgatacacaatattaataaacttaaagagttatttaacagtaagatagatacccattcagaaatgtttcagacttccattttcctgacaagtttaggattcattcagtaggttaatagactatgatcccctgctctttatcatagttgggatttctgttggtagtttaactgaagaatcaaagattcagtgtacttaagcaagttatttctgtaccttgtattgtaacacttttaattttcctttggtagccaaatttcataaattagctttcatatgttaatggaaaaccctccttcatctccatggtataaagcctgagtttgtacctctaggcccctaattgtgtctgtacccacctcaggtccatgtatatccattgttctttgccttcagctcttttcattaagtgtattgattgaaaactatttggatatgaactgacacttttaaaaagtcatttttatttcaagtccagaggattgacataattcaacagggtaactattagaaactatatacctctgctaaaatatttattcccccaaggaatcctgaaaaacacttttatataagttttctaaaaaataaaatgaaaatactgtacagtacagttaatggtaaaaattgtttgtagatttgggaaccttaaagttttcctttctcttctttcccttgcttttctttcagtagaaaatgtgcatcagatgtttatgtttaattggtttacagactgtctgtggactcttttcctgtcaaattaccaggtaatgtcctttcacttagcagctacttcatatatctgtaaatgcagtttattcatgcacagattattattggacataacagtttcaaattaacattgaatctttggaaataggaaaatgcttgatagagtctagaattttaagggaatataaataatttaatagcctcccctatattgcattataagttaagtattaactttaagaaaaattgtatatgtacacatttatgcaatgtagtattggttcacattatttggaaggaatgaataattctcgtatttaaatggttgattttggtagccacttttgaaactgcattaagaggaacccttgaagattaggaaaaaaatcccagtcttttgaaataaagactttcaaactggtttagtaaaatatgttagtgactgttttaatgtcacctttgtgttattcagtatgtgccttagtataatggaagtgaaacatgttagttactttgaaatcattggttctggccatcatcagcattggcatcacggccaattggcagctgtaggccaatacattaaaataaactttcaagttacaggcatttcaggcattgcaaataagtaggttctccctc

SEQ ID NO: 54371 - DNA, 1315 bp, Homo sapiens
ctgcccacctgttgtccggaacaggccattctctgggcgggagcttcgcctggaacttagttgggatgggtccgggggtaggaggaagcggaggcgtacttggacttcgggggcagtttgaagggtagtgcagcgtagtagtgcggtgcgagggggagggggcgcccgccggggaaggggtgcctgtggcgcaacttcgccggccggtgctaggggccaggagagaagctgctgcttcctcttgcgaagttttttcccttcctaaccgagatgctgttgcgcccttccgcgtcacccccatccatttgcgactgacatccagtctgtgttagtggggaaaacgtaaggctgacggcctttgattaactctgtaattttcatgatcgtggtaaaatgagagtggataaattaatctggccagccgcaatccagccctccaggttggggggagtctgcccatttatccagacagttccatctcccgctccccaaggtacaacctctgagctgcttttccacctccccccaccaccttcactttccaggcttccccccaccccctttccaaatcaaggctacctattcttgtcttctttctcttctaatttttctttcattggagaagctttttcttgtttctttttgctcgttttatagtaaacaagttcctaaagcccctttttttgattttacatatttgggccgcagttggcgggcatacaactgctgttgatttattaatcggaactaagtatacgctactggaactttaaataactggaagtttaaaaaatgtttaaaatatctgaagttttgtgggatttgttttgtttccgtttttccttacccgtggaagaatttcagtattctttattcctgagagttcgagatgatgtatttggattttttttatgactcctttgaaataagccactgtaaattttgattgataaggcatttctcttgtttgaattgccattttcatggtttcacaggcaccccaaaacagatttaggaaggagggtgagattttgctgtagcagacaggactgtttgctgcgagtattctttttaaaacattcaatatctctaatttacaactaaatttagatcttagatttattttcatttcttttgctcttggtggttaaagaattgtatttccaggcacatgaattggagaacgtagtactttctgtttccccaaaatgtgactgcgtttgttccagtagactgagaatcggtacctggattttagtcctggtgaggttcttattcttaagtgtttgtttccttcatgtttaaggagttgtgt

SEQ ID NO: 54372 - DNA, 2048 bp, Homo sapiens
tcttctatattcttcagttacttgtagatagtttcatgtatagtgaattggggaagagttagaggaactttcgtgatctgtgtcctacaaaaaaatctaagacaggtgaagaagtgaaaagtacaattgatttatagttttcctggcctcaatacttgaataattatgacgatttttgagaccagtggttttaaacaattagacaaaggagaaatgcttggttggcttttactttgagctctcagtagattcattctttatgaagccaatataaaagcatgtgattaaataatccagatgctgaattattgtgcttttgatcaaataaatctgaggatttaaggatagcttgtgaagtaacagtaagtgcaaagcaacagtatatatctatttgttaaatctgagggggaaaacaggttattgaagaagtatgtctccagagaaaaatgtaggtattatgcttctgggcttttaaaaaaaaaaattgatgcttcctacaagagcatgaccctgaccatgtttttccagaaaaatatttaattcttgaatagaaagtgctttagatgagaataggatatactaattttttatatttgatctgattatcttagtccataataggaagtatatattggttcttcagttgtgataacattaaagccgtatttaatgtacttagaataaatagcatatgctcccttgcttaatactttttggcaatatttctcattgcttattatcccttaaaattatttaccaaccttctaaaaggacgctctcctagtcacacttgaaggaaattacaggatagttgcagttttactaactgcaaaaataagaggaaaatgagagaaaaaatgagaggaagaaatagttaatcctttgggttttataaggaatgtactagggacctttgggaacgaacaatttgtcttgtattttagcgtttgtaaacacgtaagggactttcttctcaaggaaaaaaatccatggacaattcaagacctgtcttttcacctaggccacatttctgtgatataaagagaaaattaatggatttgcttctttctatttaagtattttagtactttcaaagagggtatataatctgtttattcactttcacacctatccatttctctttaaaatggactccttgcttagtattttttgagtgtatttggatttttttaacgaaggattatgttaaatgttacttatgaaaacattaatttctactctaagcaaaatgtgtttcactgcagtgaatttaagcttcaaataattctcgacactaataatgaattttttttcatgtttatacttcagagctattaagattttaaaagtagtcaagatcaccagtgcgtgagagtcctaaaaatcttaattcattggcagttaagagttagggtactttaataggtgggaaaggtttggtgggagaaacaagtgaattactttaagataattctggtaagtgagactaaccagttttctaaataattcagaaataaaacactgccattgaagcttaagcatgtctttatgaaaagtaatcagctatctagaaatgcctgcctggcttgatgttcattcaaaattcattgcagtgattaaattgttcaagtaccagtcattgcttggggcttgttctgtttgtcttattctgtggcttagaacaataacttattatgtaggtatgaaattcatgaagtagcaccccaaaaaattgtttttgcaaattgagatttttttaacagtcctagatttaaaaaaataaatttaaacatatcccatgcatttagctgcatactccttagtagtgttaggtttctagagcaatttataataaaagtaaagttaggtcttgaagaaatctaaatcttttgatcatagagaaaatgaaagtgagcagagagtttacgtagtttgtcctaggtcgtgcaattcatctatggcacagtttagactggaacccagccttctgtattcctagattcctagtgcttattttctttttctttctttctttttttttttttttt

SEQ ID NO: 54373 - DNA, 1062 bp, Homo sapiens
cttctgaattattaatactgtagtaaattgctaattttaatttcagtacattcttaacctttttataccccagaattcctgagagtaataacaaagttaagtaacttaattttattggaggagagggatggtgagccagcccttggcacggtaaccatctttcaccctaaagtaggacccctctttccaggcttctatccccatctccattgctgtgagaatctctgacttagagtctacataactaagtagatgacggcaatacttaaaagaaatggtggtagaattgttttgaggggaaaaatttgttcagacggtaatactcattgcaaataagcttttgattgcctggaataaaaaaatctagtaattacttcatgtttttactatgttgttgttagggtttttttggtgaaaataatggtaatgttgtagttagttatttctttactctctctcaaattatagtcttctgttgtatgggacatttcccaccatgttctagaaaaatataaaagagaattatttcagcaaatctgaggcattgaatattcgttacaactattagcaattttatcaactaaatcatacaaatatgtgggtgagggtcaacttgctataaaagttgctagagtttgtttttaatttgttttagcccattcatactctgtgtacagtctttctgtctctctagtgttgttttccatctcagataagataaatatgtaccccctaaaacactgaatttttcaaaattacagcttaaaaaatagtaacaagtactaggttttcttaaaaatcaaaatttagaggaagaaaatgaaaatgtctcataattccacaagataatcagttcccagtgactttcattttaagaaagaatgcatagtacatgaaagtggttagaaaatttcaacagtacagaaaggtattaaatgaaaaaagcctcttctccctgaccccattccctagaggtaactattgttaacaggttcttgtatgtccttttgaggaaaaaaaatttattccatattatttcatattccagcccagtttacgccc

SEQ ID NO: 54374 - DNA, 1366 bp, Homo sapiens
acggatcacgaggtcaggagatcgagaccatcctggccaacatgtgtgaaacccatctctactaaaatacaaaaaattagccagacgtggtggtgtgcacctgtagtcccagctactcgggaggctgaggcaggggaattgcttgaacccagaaggccgagattgcagtgagctgagattgtgccactacactccagcctgggtgacagagcgagactccatctcaaaaaaaaaaaaaaaaaaaaaagagaaaaagaaaaaagtgagggtgaaggaggagagaagtgaagagtggaaaattttagcagttatttctctagaaggtacaaaaggacactataaaaggtatagaaggaagagtcagggtctagacttcaggcctgccttcaccacctaccatggaaccttgatctagtcagtgtgtctccttgggtttactaatttataaaagaggtgggcagggcaggtattattcctatatttatgattatgatcagctaactagatgcttttgaaaatgtgtagcactgggttgggcatggtggctcatgcctgtaatcccggcacttttgggaggccaaagcagggagatcacttgaggtcaggagttcgagaccagcctggccagcatggtgaaaccgtctctattaaaaacacaaaagttagcgagccatggtggcgcacgcttgtaatcccagctacttggtaggctgaggcaggagaatcgattgaatctgagagatggaggctgcagtgagccaagatcatgccactgcacttctgcctgggtgacacagcaagactccatctcaaaaaaaagaaaagaaaagaaaatgtgtagcactatatgaatgtaagctggatgtactattttatttcatatctaaataaaaattacccttattccacacccaaacttcctatattaagatgctaaactcacttgttattttgaaagatcatcatttttgataattagctatacaaagtaatgttttacagtatgaaatgttttcaaataccaattttttagaaactcatctttgatttaatgggatgtatttaactttaaagaatctaatctcaatcctacccccaaacatatagaacagaattttattttggaagtaaaatactaaaatatgtatggatactaaatgtatctgtaggcagaccactcctagttctccacttgtgctaatctagatatgcctttaaatcagtcattgaaacattctagtatgtctgacataatcactaatgttacctttgaacactgggtgttctactctgtatcagctatgcttacaaatgctactagtcctcaagcgtttggtatcttaatcattgggaagtgtttgcagcc

SEQ ID NO: 54375 - DNA, 1109 bp, Homo sapiens
aattattccagtgttcataagtcttattttgtgtggatagtgagctaggattagatgaagatgatcattaacattgcttgtagccttacagagaagattgtgcctacagttgggaagtataactgcgtgaaacacaagtggattaatattttaaaatattgatttactatgtaataatttgtgtggtggttaactccattttgaaccagaaatgtgtagctctgcccaaaagatgttaagcaagctagaaaccctttttgtggttgcattactcttgtcatgtcaccctactctccaagcttcccattagaggaatgagatttaaaagtagcactgtattgactgtgttctggcagagtaactttaaaataatggtagtggtgtaccattggaaatatgcaatactggttattgtcagatttttgctagacaatgctataggaaggaattattctaagaatttaacagaaaaagtaggacctttgaaaaagtgtgccacaaaagaatgagtcaccatatggaatctagaatcccatacttactacaattacataatatgtacagttttaaaaacaaattttaatactttataggaatttgtcttagacacattgtttttgaaaaatagagaatttccctcttttctgttttcttcttgcctctcttccccattacttagcagaaagaaaatactgcaagatccctatctttcctttgctagtgcttttggcctcccaccatctgtattttctaatgggcatgaaatagatacttctgaatgaattggtgaagttttagttcatgttatttgaagcatcttttgagtttttaatatttgttttgtgggagtcttatgtttgtagattatttgtttataattgtgaattaactgaactaagataaaacacaactgcgcattgtcaagcagtaacattactaaaataaattgctaccaattttatctttaaattttcaagttgtttgtggttaaatttatgacaggtagaatggtggagtggaaggagcattataattggaaatctgtgcagtcttgcatcagataacctaaactttctaggcattagcttgaatgcttgctaattctgtta

SEQ ID NO: 54376 - DNA, 1840 bp, Homo sapiens
actttttttaagtcggagaccagcttgatagcaaactttgttcatagttctgtgttgataggagaaaatctatttcagaaaattccaagatctaaaatcatactacttaaaccacatatgttatgaagcccacatgtacctttaaaatctgaattctatactattgtctttatttctggattcaggagtgtttggaatttttctttatgcttaaatataatgaaagggaagggattatatgggaagttttagtttgtcttggaaaatgcagacattaaaactaaaatgcagacattaaaacttactgtagtttttggcatcatagtagtcattgaataatttcggtaatgtttgtgaagatacattatacagaaatactaatttttcctcttttctccccttctcagccatctgttgaatcttcaagtccaggtaagtattttccatattttttataatctcgatttgagtaacatttgtcctactagttgcataaagactagaggagttagactattatctgacttgcttttcttctgaatgcttcttttctctggggaaaaagaaatggatgaaaggtttgactgcccatgaaagtacaggtgaggctactgtgatttcatcctaaaaatgactatttttgggttttctttttttttttttttttttttggtgagttgccatatgtatttctcacagttttgtattattgtttgacttgtagtatatatataaattgtgctttttaaaaaggaatcattagcttagaaatatttgcttgtgtagggatttcaaagtatttttatttgagaaaaaattgttagtgcattacagagggaggggaaaaataaagtaagcaaacgattcaacaagtgaatatttaatgtaaataaggaatattctaaataaggaaatcattcttagatttgaataggatcaagttttaggttctgagcacacatctaggatttttgtattctttctcaaatacagtacatattcattttttcctaacttagagattgcaaacctgtgatctttgaatcagatctgtgccacaaatttttgtttggccactgtagtgatctttaagaatattttatatatgaaatctggatttagggttcccatggtctggcaccactgggtacagtagttctacatggcagtaattcattggagttgaagcagtgaggaaagagtcaagtactagtcttttatcctcagtgtccagtgactgtcaagagaaatgggactgccttctgcatgggatatgtgggttaaagagtagtccaatatagaagagtgagaaagtgaaccctctgaggcatagtaatgttttatttgaaaacatctcacatgtattgaatacttagataggatgtattctgtattactgaattttccagattattgaagcaatcacctttctgtgtttaaagttttagaaagaaagcttttaaaaatgcttaacataagataagcctgttttcatggtgcaaggtcctttctatgaacatgaatcactggactctgagggttggactagatcacatctacatcccttttaaatgactagtgtgctcagctgacgttgattttgtccttttgatttcagctgaaagcatcttactctttttaatatgcttgagagtaaagtacattaggctttgtgcatttctgaaactcaattttttttgaactttgttttataagtatatcctggatggttaagattgggagtaatctggtcttagataagtgttagatcaccatattcatttttaggacatggaattatttccgattttttttttcaaacgcagaaattgttttcata

SEQ ID NO: 54377 - DNA, 1319 bp, Homo sapiens
acacctgtaatcccaggactttgggacgccaaggcaggatgattgcttgagcctgggagttcaagaccagccagggcaacatagcaagaccctgcctttaccaaaaaaatattaaaaaattagctgtgtgttgtggtcatagtcccagctactttggaggctgaggtagaaggatcgcttggccctaggaggtcgaggctgcagtgagctgcaccccagcctgggacagagcgagaccctgtctcaaagaagaagaagaaaaaaaagaattgagacttttttccacacgaaaagcctgttcttatttgatatgaccatttattatttacaattttttcatatttataacattataaacacttttaaagctataaacattttccttccatttttctgttgtaactattaaaaagcaatacataatagttgctgtgcgtagctttttcttggtacttttgacttacatccagcatcaaataaaaatatatacattaatattaataagatccacttaatttggtttaccaaactttttgaaatattccttaccaggaggttcagcaacatcagatgaccatgaatttgatccatcagctgacatgctggttcatgattttgatgatgaacgaacattagaagaggaagaaatgatggaaggagaaacaaacttcagctctgaaatagaagatcttgcaagggtaaataacatgtagagctagggtatgaattggttatgacttttttgtggaaagggaagatctgaaattttgattctctgattaggagagaaattgtgttatatattaatgactgaaaaattttgtgtgatcataggtgggatatttaaagtttgaaatgaaaggatttaaaaacaataactttattatgtgcaataacagaattcacatagttactttggtaaaacatagactgttaaatgattctgctataaaggtctggtcaaaaatggactataaaaggattctacacggcctcatatatcctttgtccttccccagttaccatatcttttacttattctccttcagagccaaaaattcttgaagtatcattttccattcactacataaagtgctctagattatctccactacataaagtgctctagattatctccacctcttcctatcaaggtgaccagtgaactttccttgttacatccatttttatattcacttttctctcactaccttactttttctcagcagtattcaatatagtttaacattcccttcttttacttgaattctggagtacaccactgtctggttttctttatctttttgtttctattcagt

SEQ ID NO: 54378 - DNA, 1027 bp, Homo sapiens
gactgttgtttttttctctgcttgttctttccctgtcctatcagtaaaaagtggtactactatttaccctgttgcctaagtcagaaaccagtgagtcattttccttctctttcaatatcttatttctaaataaacctatcatttgtatccacaagaatatcccttagccgactcttgatccattgctgcctagattaccattctttctagcctaggctattgcagtagcttcctgactggtttccccatttcctcttttaccatctttctcctgatacatttccacccagcagctgtgatcttcttttcaaaatgtaaatcaattaatatcaacctcccagcttcctgttatatccaaagaaaacccaaactcctcaaccaggccagcaaggccacctgcatgataatggcctcttacccatgtatcacactacctctgttatagccacactagctgcttttgttgttaaataggctagtttcttctgcttcaagggttttcagctcattctcactctctggtatatgcatcccaaggccggctccttatcctctgggttcggtgttgcctcctcagaatagcagcctttcctgtcccctaattaggttttaattagttttttgttttatttttatttttttttaaccactgtcccctattcaatgctttctttagtgttaggacacaatttgtaattgtttgtttaatttattgtctgtacctccactggttttgagaagatgaaataaaatgactgttattcaccagtgtatttcatggtaccttgcaagagtgctcactcaaaagtattgtatgaatgaatggatatatcagtctggtatgttctaataaaatatatcatgcatatgatttcctgtactccatgataaaaagaacataagaaataagacatagtgccagtctttaaggatttggaatacataatatcatgaaaaatgaatgcttatacttttatggtaataaagacctatgtctcataattttagtttgtaactttttaaagta

SEQ ID NO: 54379 - DNA, 1013 bp, Homo sapiens
ttaattagtagaaaattactaatgggctgtgctaaaattttggttatatcattgccttttcctgtttttctctcctattcctttccccagccccatatagtgccttaaaacttgctttcaagtgaccctgccttaggaaatagaagttaaaatagaattatttatagagatagggaaaaaaagacagttgaaccaatcctttatcatcctttcaactagacagccttataccttctcagattcttctctgacttctcccagaaacaattaaagctttaagtagcatagaatgcttttcatctgtaacctgaagctaagcaatattttggggccaatttgttggatttcctagagttattaactctttaggtttgaaccaaacaaaattcttgttgtgtttattgaaaaagtgaataagattttgttgtgttgattattgatttgcttttatagaagcaaaacattagttatgtcagggattgatagtgtttttcaccttacaccttggttgcatgaaatgaatttttgatgtattgtggcagaactctgacattcattcaggaaatatcaataactgtatagcatgtggttttaagttcattcaatttgaattctagaatttttcagtgaaaactaactcgaaagaagttttgatgtgtattgttacatttgtatgcatggattatgacaatataaaagataagtgttttaataaaattgggtgtataggttattatttattgtagtgattagtgatcttagagggaatgtcagaatcattctcatagtaaataaatagacttttgttttgttttgtttttttgagacagagtctcactctgttgcccaggctggagtgcagtggcacgatctcggctcactgcaacctccacctcctgggttcaagcaattcgcctgcctcagcctcttgagtagctaggattataggcatgtgccaccaagcccagctaatttttgtatttttaatagagatgaggtttcaccatgttgcc

SEQ ID NO: 54380 - DNA, 1091 bp, Homo sapiens
cctgaggtaacagtttggtcttgtcatttcaggtttctttttttccagtgcttattctaattaatttataccaactttctaaaaaaatgctattgcttttaaataataaaggctaattggcagtttgtgtttatttttcttactttattttgaaataattttagatttataaaaggtttaaagttagtatagaacgttcctgtatactcttacctcaacttctgctaaggttaacatcttggtacagtgctattaactaaactgcagattgaattataccagtttttctgctaatgtactttttcctgttgcaggaaccaacccagaggatgatactacatctagtatattcattttagtcttctgcatatattagaacaaaatttatatgctatggtctttcatctgcaactgttttccttacatcttagagaaatttaatttattattccacaggaggagaatataaaggattcatcaggtcaggaggatgaaactcagtcttccaatgatgatccatcacaatctgttgcttctcaagatgcccaggaaataatccgcccacgtcgatgtaaatattttgatacaagtaagtgttactggttgataatatttgaatataatttttactattttaggtattacctaaaatcctcttttttaaactggtctttgaattcatttagtctgaaattcttttcaacagtaaatggattttgttgtaagttattagtttagcaatgcagggtccctgttgttagtgaatatactatggtaattgtgtcatgtactacttgactttgggtgtatttgttttttctttgccctgtttttaaatgtttgtttcatggtcatctttttgtttctcatagtctttcccttagtttccattttttactttctttgcctcttagccttttttaggtatattcataaatacacctaaatttctctactttaaaaggaagaaaaacacttgaagaaaaataaactgtcatgaaatatgtagtaagataatattatctttattctaaatcagttttttcccctaagtttttataggaaatcatttcatgagaatacaattatgt

SEQ ID NO: 54381 - DNA, 1051 bp, Homo sapiens
gtcgaggctgcagtgagccatgatcactccagcctaggtgacagagcaagaccctgtctcaaaaaaacaaaaatttcatagatgacactgatgctgctcatatagggatcatatttaagaccactgtcttaagtgtagatactctgaaaatatctgaatttgactttgtgttttacatgttttgcagttgtcttactaatggaattatcagaattcacttctttgtctctatattttgaaataaagtttgtatttattgtttacgttgcatttcacctcagtattattactaatattttcatccagtcattatttgtcattcatcttcacaaaggtacctctgaggtagttaattggttgtttttgtattttatgacagagaaaccaggaacagtttactaagatggtaaggctagaaaatggatataaaatctgttactagatcttactaatgttttatgttatttttaaaataggagattatggtgggctccatgtttcaagcagaaattccagttggcatttgtagatacaaagaaaatgaaaaaggtgggttattagtaaagttacgtagctgaatttatgctttcagtgtaatgaactgttactttatatgtaaaatgtgataagaacatgacagcctactaagtaaccccattgtaaccccattggtttgtgaaagaggacccttcattatttctgtgagaagaatgtgtgtactcaattttttcagtttggtctatagaagcctagccaaaaaaggaaaaagtgaatgctttttttcattttaaagtgacttacaatgtctcaacagttttttttacttttttccccgtattttcagtgctctaaactttaacccttctctaatctttataatttagtttttagaagtccattttatatcaatgaaaggcataaaaacaaacgagagtaaataactgatataaacagcttatttgctcctgaaactttcactaagcaaaatggagtgcttattaaaatggagtactttggaccaggtgccgtggctcacgcctgtaatcccagc

SEQ ID NO: 54382 - DNA, 1146 bp, Homo sapiens
cctttttttttttttttttttttgagatagagttttgctcttgttgcccaggctggagtgcaatggctcaatctcggctcactgcaactttcgcctctcaggttcaagcagttctcctgcctcagcctcccaagtagctaggattacaggcatgcgccaccacgcccagctaattttgtatttttagtagagatgaggtttctccatgtcggtcaggctggtcttgaactcctgacctcaggtgattcgcctgcctcagcctcctaaagtgctgggattataggcatgagccactgcacctggccgtatgtgtgcttttaatgagttcatgtgcagtgtgacatcactcaggactagaaatctttatttcttttatttcagttttcttcacatttcaacttaatatacacaaaggcctttggagttgtattaatagaagttttttgttgtttatttctttttagcattctctccaaaaacttactttatattctaagtatgcacctactctcagggcaagcagcaggtcagaggcagtcaagggaacatcacaggccagtacggtttttgtgatagcaatatgttttaatacatcatttaaatgtttaatagctaccacttatttctcaaggtaattcctgcaagatataggaacattgaagctagcagtatggagtgactttattacatatagaaattctgtacatatggtatgttctgtgaacgtataattgtgtgccaaaataaatgatctgttggcttttgtatttatttttgtaattgaaatgtcagttttgtgctttactcgtatagtagttagcaatgttcaccattgaggtttttctttctgcaaataaatgaactgaaagacatttgtttttattaaatttcttttaaattttgacaatgaaagataatagagcctattttatattttagtatttatattataaatttatattatagttgaaaatagttttattgcagtatactttgttttttattttaatatgttcgtattatatatcaacagtgaataatgatcacattctcttatttatgcttagttttaatttttaatttttgtgggtacatagtaggtgtatatagttccggggtacgtgagatgtcttgatacaggcatgc

SEQ ID NO: 54383 - DNA, 3139 bp, Homo sapiens
catattttcaaaaataatagttacagttacaattacaggattttagtatgtgccagaatgattgtaaagtgctttaaatccttaaaactatgtggtagagttattgttacctcctttcacagatgagacagaagggaaataatttgcccaaggtcatcatacatgtaataagtggtagagatggtattcaaccaagagagcttggaatttggtaaactcaagataaagtcagactggatctgcagggggcataaagtggtacctcctctctgtttaaattgtttaatttacttaaactatagtttttgcccaagaacgaagtcaggcaagtagtagaaccacactgtacctcagttctcaacatttggctctgagttgtttatttagtaatatgttttaacacaaactctatcagtttttagaaatttgtttaacattgtcttttactaatttagtatatgaaaatgatgatcagctcctgtgggaccctgagtacttaccagaagataaagtgattatatttcttaaagatgcatctagaagaacaggtgatgagaagggtgtagaagcaattcctgaaggatctcacataaaagacaatgaacaggtctgtgaaagaaacaactgttagaactttgccatacacatttatacatgtaaatgctgtcacttgcattgttgttattctgtccaccaaactttttataacattattgacagggaatctgaggttataatccctgtaagatatccgttgttaccacagtgacttcattggtgtgaagctcaaaaacgaaacaaaaacctgttttattttgcctgtatatacttttcattaggctttttaaaattcctttggctatccctaagaatctgtgtatatcaagttggaattctcacctcggattatcttatgtacatggtaagaccagtgcctaccatgaacctatcttttttacctttttaatcattgtttttttctgatttgtttaaaattataggaatctcaagaagccacaaagaagggattttcattgatataaaatgaattctttttagtcctagggatactatggccaccaagtttatgcatatcctactttgtacatatttaaaggtagttgatttatcaggatcgaattcatatttgtttttctttggagttctctatatataacattcactaaagttatttgccctcaaaaaggatgaaaacactggatgtttgaaaaacttttaagaaattgtagcattgaactgtttatagtccttgtcacatattcaagccttttatttttctaggctttatatgaattggttaaatgcaattttgatacagaagaagcattgagaagattaagatttaatgtaaaagcagctagaggtaagtatagtttttattcattttcatgatttggcagaaattttaaaattaagcttttcagtttacctaggtatagcctaaacttaataatactgatttttctgagtttgataaatatttacaaaataccaagtattactaaacaaatcgttacggggagtgggattaagattgtcccttcctcctttgtgggaaaatacagtcatgtaagtaaaaatgtaaaaatttatactgccttatgcattcaaggcatatttataaatattttcttatttgatcttgataattgccctatgaactaggtagtatgacagataatacctttacttaaaggtaaaaattgatgagcctgagatctctgaactaaagtaacttggcgaaagcaaacataattcatcagtaatgaagccatgactaaaatttggatttttcttttttatactatatctggctcctaccccccttcactaagagtactacatatatatatatacactacatatatatatatatatatatatatatagatatgtaacaaatgagagatatttatttaacaaaaatttgagtgccttctgaattctgaggatgtaactataaacaaagtcccttcccctcgtggtgcttagagcttaggtagggaaactggaaaatagctgatgaattcttcaaggaaaattagagggtgctattgaaacctgtagtaatgggacttaacctatttgcagagagggtagtgcttttagggaaagcattcagaatgaagtaatatttttgttgggatgcaaaagaattatctcagtgaaaggggatgaggcaggaaataattctaagcaaaggagagacaccatgcacaaagtctgaagtaagaaagaacatggcaaatttaaggaattgaaaggtggctgagatagtttgatcagtaagaattaagaagaaagtggcacaagttgaagctggagaggtagggaccaaatcattcaaaatcttattaaataaggaattgttgtcactttatcttttgcaacaattagtaatagagctcaggagtaaaatgcttccctcatttttacgagaaggttaagttttcatttgtaattttgttatatgcaataattgggggaatattgcttaacagtttgttcctcccatcttgtcagaggaattatctgtttggacagaggaagagtgtagaaattttgaacaagggctgaaggcctatggaaaggattttcatttgattcaggctaataaagtaagtaatgataatctcttttttgcaaaaagaaatttagttgaacaactcaaatggtcatgtatcgtaatttgttatattgtctagtgttaaaggtttcataattaatatgacaatattttggtatttagtgagtaattatagtaaggctgcctatacttcctaacctataattacctgttggtgactgttttcagtgcatcatattgcaggtgtttaagaattgtactcatttacaagcatgttaatcaacttctagttggggtgtgtatgtgcaatgcaattctttatagctgttttccacagtctgtgactgttttatggagggcctttgaaatgatttggaaactttaaagcactttcaatatgacattatttgcagttaaaatatttattacatttgcttaagtcctgagtggtctaaaatcaaatacttaatatttaacttagttttagtcaacatttaattttctaggagcttctgtgtcgataaatcagct

SEQ ID NO: 54384 - DNA, 1941 bp, Homo sapiens
actggatttccttttaaatggtcagtattgccggtgcagtggctcatgcctgttatctcagtactttgggaggttgaagcatgcagattgcttgagcctgggagttcaagaacagcctaggcaacatggcaaaaccccatctctacaaaaaatagaaaaattacctgagtttggtggcatgcaattgtggtcccagttattgagggtgctgaggcaggaggattgcttgagcctgggagggcaaggctgcagttagcggtttggtgccactgtactccagcctgggcaacagagcatgacactatctcaaaaaaaaaagaaaaagaaaggaaaaaagttatcagtattttatttatatacatcagccctaaatcctcagtattttatatatatacatcaaccctaccaccagttctcccggctaagtaacaaaaaggaattctgtcagcatcatttaattccgtaggcatttaacattatgtgaggggagccattcagttgcacaaataggtacagcacagtaagccgcaagagtaacttagtaaacaaagcattagcattattatgatacttttaactcactgtggcatcttcccagactttctagagagtaaattaactgagtctgggttgctgttgggactagtaagagaatctttcaaaagggaatttaaagatacgctccctaggtacccgtactctgtgagtaaaagtattagcaaactgtttataacatttattttaacatgaatgccacttccaggccttttttttgtgtgtgtgtgtgtgagactgagtctcattctgtcacccaggtgggagtgcagtggtgtgatctcagcttaatgcagcctctgcccccacccccaccccctgctggggttcaagtgattctcctgcctcagcctcccgagtagctgggattacaggcacctgccaccatgcccggctaatttttgtatttttagtagagatggggtttcaccatcttggccaggctggtcttgaactcctgacctcgtgatccaccccccttggcctcccaaagtgctgggattacaggcgtgagccaccgtgcccggccaacttccaagcatttttaatacaggaatatatttttctagtaaattaggatgatggtagcattttaaaaagcacagtgctgtatatctgaagacctgttgccaatatattatttctcttaatagatgtttagaaagaatagctttcaacatagctgctacactgttgtatgttatatataggattatatttcagttaaggactagccaaatttattttcaaacttcagatgtttatcatgaagtaactttgttaaaaaggagattcttaaaagcaagcatttgtttcttacaggtccgaacaaggtcagttggtgaatgtgtagcattctattacatgtggaaaaaatctgaacgttatgatttctttgctcagcaaacacgatttggaaagaagaaatataatcttcatcctggtgtaacgtgagttaattttttccttaagagctatatatacatttttgctaagcttttctagatttttcttgagttaattattattttgataatcttgcttttatatacttgatcttaaccagaaggccgagagtgataaaatcttgcttttataatacacattaaactttaccatctattatatcttcataaataaggcatttagacttttcagtgtcttatgaaatattgtaaactacagttcatattatgtatgagacaagcatatcattaaagcaagatttagaatgtatatttttaatacactgttgagaagaaatggatcagaacagctgtgaaagcatgtttttcttaaattcagttccattcagtataagcacatacagttttaatcttctttttttttttttgagatgtagtctcaaatctgttgcccaggctg

SEQ ID NO: 54385 - DNA, 1107 bp, Homo sapiens
ataataccaaaaatatccaggaaggttttaggaggtaatcagtcctttttgttaggctcaaatttgtcttttaggtatcgcctttaggagctttaaaattcaatctatgtttgtacagaaattcttttgtacttttactagacatcacccctatcacttcagttaagagatcttccagttctagttgggccactctgagcacctgcctacaactttacaagctttaaaatttcctatgggtctctaaaatttgttactttaaagccgttatgcatttttcctataaacatgtaaccaaaaggagcttttcatttaaatattcagatcctggtatgatagatgaagcactggaatgaatgttaagtgaatattaggatatatttgttaagaaagccttctgaatttaacctcaactaatttttaattttcagctctttttaatataaaaattgttttattaattttaagggattacatggatcgtcttctagacgaaagtgaaagtgctgcatctagtcgagcaccatcccctcccccaactgcatcaaacagtagtaacagccagtctgagaaagaagatggcactgtaagcactgctaatcaaaatggtaagcaaccagagaaacatttctctttcttcataataagggacactttcttgcagtgacttgggaaattccgtttgggtttctattaaacttccagagcagaaagtaaaaaatgataacacatgagacaaacataacatcagcatacatatatactaacagaatacaaagtgattggacatcactaaaaagtaattttaataaagcctactgtcaacagtgactatttcttgtaagaaatttgttctttttcagtagcatctcttttcctgtcttgtctagttgggttgatgcctagatacaagtatttatgttaactcttaggtcaaaaccctgcagtttcacatgagatatacagatcattgcaaaataccttgatgtaaggtaacaagtgcactgttttgaatatttaagttctctttgatagcataataaccttgaataatgagaaaagataaagccggtatcaacctgtatattaatattctacagaaatatt

SEQ ID NO: 54386 - DNA, 3828 bp, Homo sapiens
tttccattaattcagcttagttagactgctggatccagtgcttgtttgctgtcacatatacctaatatgcttttaacatatgccaaattctgttcttagttctttacatttattaacttatttaattttcacaacaaccctgtgaggaatatctattatgatcttcattgtatatatgtaatgaaatggagatacagaaagagtaaataatttgcctaaggcgacatagcttataagtaatagagcaagaatttagactatgtatttgataccttgcttccttgataacaataactacaagctgttttataatagtttgcaaatttaacttttttctaattgtggtttcatttatatttctttcaacttaggagtgtcatctaatggaccaggtgaaatattaaacaaagaggaagtaaaagttgaagggttacacattaatggaccaacaggtggaaataagaaaccacttcatgcagatatggatactaatggttatgaaacagataaccttaccactgacccaaaacttgcccatatgactgcaagaaatgaaaatgattttgatgaaaaaagtgagagacctgccaaaaggcgaagggtaaacagcaatggaaaagaaagtccaggttcttctgaatttttccaagaagcagtctcacatgggaaatttgaagaacttgaaaacacagatgactaaattttagacctattttactttctttggagtaaattctggtgtgactaaaattttcagggttgatgggttaccttaaaaagttgatttccttgaagcagtttgaaaatttgaattgagtcttaactttaggaaatgaggtttcataattctgccttttgcagatttttttactttaaagctgtcagactcttttaagggtattttaaaaattagtaaatttgaatgaactaaagatatatctctaccttctcatttgaatatctttagttcattcagatttactaattttggtaaatctgaatgaactaaagatgtatctgtaccttctcatttgatgtattaatcataaaatttcactacaaggtaatttttgcttagtttgatggatgaatgggaaactcaagtccaaatttctgcttaataccaatttctctgagtttcttgaaatgtctttaaaacagacatttttctcaccaaacagtttgagtatctttattaaggaaacccttacgaatcctgaaaattatgctagcatgatttttttatatatagaagtttaaaaataaaccaggtcaggtttgtatatgtaaaattgttgacatcaatgatgtctttccatattcttatctgggcttaagaaatacattctgtatttttccagattctttgtagcctttgaaagatttttacagtacatatgtcttgactgagctgtcctttcttaatacaaaagcgtgtataattttcttaacttgtacagttggtaaacttttatgagaggaattgttattctgagtctgtcagctttcattttattttgctaaggtttttctaatgaatttttaagtgtttgtgtagtaattaagtcatatttcttatccaggtggttaaagcattcataaaggattataaaatttttttttttttttttttttttaaatttctacttaagggcaagtaatttgagaattctgaaattaagcatgatgcttagattgcagtttgttttgcatttgctataattttcaaaattatttttgaagcaagacaaaagtttaatgtcagcttaagtgcttaaatatatcatgctgaccagaatcctgttatttttatatgcatcataaaatttcccatttctgcattaaataaacagaggaggggggtcaagtgatacttagatattggcacacacaaggaacaactgttggcaggcagtatcgattttatgaagagaaagtgaagtttgaaaacttttcaaacttttctagttacaatccaatttttcagatttgataatgcttttccaaagtgaaaataagatacacaataatcattgctctgtgtgattacagataggattatccatctgcatagccttgtaaaagtgccattttatttttagtgctaaattcttgttaaataatgtagttttatatagctgatagaccaacctatatccaaacttttataaaatattaattattcttgtttttctcacacaggcatactccaaatgcttcttccagttcatttttcagccatcagttcaagagccaatgcctttttaaaataaagcttctgtggtcttgtttttaatggctcaactgtctgatgtaattgagtgaaggtttgcactgagaaattagcattcaggccttacccccatgaagtattactgttaacatatgttcggactgcttcccttcaccaatgtgaacaactttttttcccaaacagtgttaaaagccactttgcaacacttgacttcatcttaatgtacattcactgttgttacatacatatctaagtaaatcaaagttttgggtggaagtgttgagaagtatgagttttttgttgtttttgttttacttaaaacttttaatttatccagaatggcagtagctttagcaagcagatggtcacaatctgttttctaaatcattttttattaaatgaatccaaagtatcctagctctttgtcaaagatggtctgtagaaatgtttttaaagattagggatgctgtactttttgaattgttgcagtgttggagatgccattttcacctttttaaaaagatgcattttatttgcaggtttgtgaagttcttgcaaactcttactacagaaatgttttaaatacattctcaggcatgtttgcaaaaatatggcacatgtatacattttaggaaatgttacttttgttaatctttaaaaaatacacctaatgaaagacattccactattatgcgtaatgctcagctttttgtaaagaaatatttaattgtattttgtgtttatacaggtatttcacacaataatttgttcttaatgcagccactataacttgataagtcattgcactatttaaaaagttttagtaatatcatgaatttaatttgcttaagatttagtacatttcagaacttttgaacttttgacaaattgcattggaaaaagaagtctgttaatagtgatttagtctccccgcctcattcccacccccaacaaagcactatcattttcatttggaatgggtattttctgtttcatgatgtattttcaaatagagttcaggatctgcaattcagttcaacacaagtttgttgagctttaaaatgtatttgaagtaatatttaaataggcatttaaaatttcaaattagatgttaaatttatgcatagtaattttgcactgtaaaataattcccttctcccattccttgtctgccattctgaatatgcttattaaaatatttttttaaacatatttgcctacataatactgtgtgaatattttcattagattaattcactaagattttattagagattgtttgaatgatgcatgttattgacaaggcaaatatatatatatacacagtctgtttcttctattcctagacatattgcactactttttcagtggttcttggtcccctttaccacatcttgggtgatgtatttttgtcttcttcccctttgccacaagagatcctttcagtccctagacctccattcactctgtttctcttctgctggattatataatttaaaaataatgtgttcccgtattttgtagtggagttcatatcacattatgttttgcaaaataaaacttgttttgtcaca

SEQ ID NO: 54387 - DNA, 1490 bp, Homo sapiens
gacaatgcttgatgttttatgatatattttctcataaaaatttaagctgtcttacaaaatttaatgtgtcaatgcctgtttatattttataccattttaatggatgcatagtacttcattgtatgaatttccccactgtgaaactttactcttcatctaattttttggtgtaagtttttttactgagtagagtgtttacactaaaaccctcccttcctccatctctgatagtggctttctgttttgcagcattgctgggagcctggtatattcctatatcactttcactgaagagcagctgagcaaacagtcagaggctaataacaagctggacattaaggggaaaggagcagtgtgaccagaggattgcttcatctgatacgtaggcctaagtttttaatcaactcagaacactggcagttcctacagagacactgaggtgtcttgattatggaggaaataaccattcctttgcacttgtacaatctgaggattgattgctgccttttaaaattttatgaagagagaaacttataattgactctattttaaatatgttgtttgaattaatttatatcagactggaaaaggtactgggctttttaatttatttttcttatatgccgacagtgaaacatcagtgttttgaaagtattttatttcataatttgatatccaggtgtccctgagagctgcatatgtaatgtttgccaactggagcttcatcattcaaattgttgctgcatctggaggcagtttagcctttcctctgctggaaatgcagacgaatatgtgaaatttctcttctttgaatcttatttcttatgattgcattgtcttcatcatatcatcattccatttgccaaggaaaacaactttggcactataaaaatatgtggggctttgaagtgtattgctatctatgttggcttccctgactttcataggatgagcagagtgcattccttgaaaacatgttctttttttgttgtgtagaatggggataatgaagggggtgagaaagtaggccttttactaatttttcatctatttgacttattgattcaactaaaatgttttaagtatatgtgccaggcattgtgctaaatgctggggatacagagatgtttgcagaggtagttgaaacatctcactcctgccatagtgactcaggtaaggttgagaatttagctctgttaatctattcagaagatgtcactaagagtaagttgtttcagcactcaaaagccgcaaatctgtaaattggattaagaacacctgccctacctacccggcaatagtgtgaatccaaatgctgcaatgtgagatgaggtacaagtaaagagctgtgttttgtaaaccagtgcagctcagcattgactccctctctaagtgaaaattgcagacaggcaagtctgttttcccttgccaccttcctttgggtttggttgctctttggatgaatatgatgaggtcccacatttctgaat

SEQ ID NO: 54388 - DNA, 2885 bp, Homo sapiens
aggttatgaattagagttgaaaatcttatctgaacgtgagatttactttctagaatttctgtactactgccaccgggagaagctggatcagaatcataggtataggttttaaatagtgttcatgtctagctccaaatgaatgtgacatttttctgttaaagaaattctgcttcacaaaaattcaaactcactaataatgacaataggtgaaaattttaaaagtgggtgtaataacttatataacaataaatttttgctttatcaaaggggttcttttaaatatcagtttctcagaaatgtttaaaatacgattgtttatagcttttgagaaagcatatcccattttttgcttctgttgtaaaatgagtgtgggaataaagtcatgtgtgtattttaaaattttttgttttgtaggaagactttttcttggggtattaaaatgactgtatttgcaatgattattggagcctttgtagctgccaggtaagatgtgggcctatgactagcacattataaattgtcaataattattgataataaatgattgcttatcaataacaattttttattgcctaaataagaattatatctttgaaaagcatctagaagactcttgaaaaggttaaatctttttggctgtattaagataaaggttgacaaaaataagattcttgggattgttaaaatttaaattgatgtaatttagaatttgttactgtcgttgtgctgagcacatagcatgtgccacacaatatgtttggcattttacacatcttattatgtattcttcacaacacctctgagaggtatgggtataattttcctattttatagttgaagaaactaaaacttaagttcaataacttacttaaggtcacagagctaatggcagagctgaaatttgaatctgtggctttcttcagagcctgtgtgtttttataaaccatgtggcatttcttttttttttttttgagacggagtcttgctctgtcgcccaggctggagtccagtagtgggctctcggctcactgcaagctccgcctcccaggtttacgccattctcctgcctcagcctcccgagtagctgggactacaggtgtctgccaccacacccagctaattttttgtattcttagtagacacggagtttcaccatgttagccaggatggtctcgatctcctgacctcgtgatccgcctgccttggcctcccaaagtgctgggattacaggcgtgagccaccgcgcctggcctggcgttccttaattttgcatgctgctaaagaaaagcatgtctcctcttctgtgaggtgaggaaaatgactatgaaacatttgcttgccttttcgaataatgaacaataacattgctttaattggcctcacataagatatgtcacaaatgccataacttagatattctattaggttattaaagcttttcccatttttcttaagttttagttttaaaatacatgaggaaaatgtatacccacagacctagaaaattataatgatgctagaagtcttctacaacattttaatcagcccagggcatgcatatatgtatttactaatgccacacattctgccagacatatgttttccatccaggagttccagtgtacttcttgaattgactcatttaccttcatcacattcctgtagtataggtggaagaaaatattatcagtccagtcctgttttacaagtccaatctccaagtaaaatttcattctaaaaaaaagagagtggcgtaattggttactagaaattggctatatagctaactgcttttccttctatgtcatattccccccttggagaaaaattctatgctagcctcctacctttctttttagaggtgccctgctagtctttgaaacatttccttgaagctgatgggacccaaaattgtaccaaacaacaggggttcctcagggctttcttgtgtctacaaaaacttctgaaaaggattactgtctggaccagccttatctggttagaccctttgacttggaaaaagattgaaaggaagggaactcagacctctgaagtcagtcagaaggttgttagactgcttggggtagggagtgtgcattaagttagtcctgcctaaaattgcagtggcatagaactcattagataagtcttggctcctatacagtatctctgcaaaatcagagtctgtgcagccactattttagctagggtgctgaagtatgctgaaggcatacctttctcagattttcatttattctgtttaatttactaaattcttatctcgtgcctggtactctaagttccagaaattttcagtttccctaaacccccaagttatacttcacaggttcattgagctattgtttaagtatttgagttcctgctatgtgcttagacattgttctagcttgatctcagaactaaccatgatccacacttcagaaatttcacccaggggcccaactacctatgcaagatagtcctacctttcatgtggaccttcagaaaatgacttgttaatggcctcatccttttggttttcttgtctatgaaattgagctctgcctgcttctgcctgcttcacagatgtacttaatggtaatttggtgcttgttgtcatctggctttgaatgcagagcggtgtgctattaaatgacatgaatgaccgttgctaattatgtgtttaaatgttagtgcctcttatttctgaggaatcccttattgaggtgaaattgcaaactatgaccagaaatcaagaaatactagtagctgataaaatgcctaatattcacttccctagatgagaatatgttcttgtaaatattttagcttatatctatttaaaattaaatgcatgttctttaagttgttcttaaagtgttgct

SEQ ID NO: 54389 - DNA, 2212 bp, Homo sapiens
tttttttaaggtgtgtgaaatcgttgcagagatctgtatctgcactgccttgagaaatcctttgcaggcagcggactgaaactgtagactcggacaagatgggacaagcggccgcccgaggctacatcagcggggtggactgacaaccaacaggcagagagttttctcccaagatttttgtttgatttaggggcggacgttgatgtggcttgtatcggaatgccttattaacgttgccgatgtgcaaattgaattcacggagctaagttaggtttgttctgatcttgtttttttctttgccctttttgtagatttccctcctcactatgtgttggacttggccaggttagttggaatcctcaccattacgtggtttatgttgttagaacttctgtgtgtgtctttatgtgtagaacagtgaatctgtgttctcttgtttacagatggtggccacagtggcagttctctgggtgggaaaggcgctcagagtagtcaagtttcctgaccttgacagaaatgtacctcgaaaggtaaaagaagaaaagcgatactttattttgtgaaatgaagtcagtatgtattaacatattttatcagtgccttgcgtatttaaaaattgcagcctcaaaattgcccagtctagagtggttataatgaatgtaaagaataaaagtagtaatatgtgtcaaagaaggcctacagtctctttaaacttaagagaaaaaataacctaggaatattcttctgtttttaattaatgcacacttgttgagagtacaatagttttgcagtttctctatccatctaatctagccagtgtatcctgcattcattattctttgggcttattttatactgtctgcctctgcttgactccaaacgaagatgaaatgcctttactttttctgctgacaatagagccatgggctctaatacattatcatattttacagcaaatgatgtttctgtctcacattgatcatattcatatttctgtcttttctccctgccttcctccctttctttctgctatagtaatgttgtttatccaagcataagttttgtttgggtgtttgggtgtcaaaattgtgtatgataactaattttacgttttaagtggaaaaaattttgatcatataaacaaaattgtttctgtttgaaaggaccttgttttagctatctttattattgagttttgttatccctttttaaattttctagacgtttccactacctctactatattttgggaaccaaatcacgggactgttcagcacaaagaaactgaagtatggataactttattttactagtgaggttaatataatgtattcttaaaattgtacttgaatgtcaaatatttaacacattgttattgattctggaaaaaaatgaaaggaccagaaagcttctattactactaaataatgaaagtggtgccaaaggttttagtttatagtttatgctcttttctttgaagagaaagaggagttttttgtttttgtttttttacccctcattttgatgttagaagtcttaaaatgttataaaatgctatgataggaaatttttattatttttctagagccacaatagtgaagatatatactaggcttctgggatttcagttctttagtatagttcataaatattttaggcaacttccacacagcaaaattagagggtaggcacaagaacttttgcagtttttcttttaatgtgaagtaaggtaacatcagctagaaccctgataaaaatattattaatatcttacacatggcatgtaactgtagaggcaacatacttattttcagaaagaagcaatagctctcctctccatggtaacactgtctttccctctaacctcccggtttctggcttctgctcttattgtagtgtacatatcggttgtgtgtggtattaaaatgacacaaatagagaaaacatttaacagaaaccccatggcttcaccactaccacacaagctaaaaccctggcattgtaaaatagaatggagagatttttgagcatcaaggacaaggtgtttttcatttcttcctttaaaacccgagaaacctgacagaatgaccgagatgatatctctgaagagggttccaaggaagtcagatttatcatgggtgggacatttttttccatttcattacccaccaggaaagaaatgcaggccttctgcaaagtgctgcttgtgtag

SEQ ID NO: 54390 - DNA, 1031 bp, Homo sapiens
gaggcactattcacgtttccctcccctaaggtgcagataaatcaacaatgtgggttccggcttctgtgtctttactcccattattccctccatctgggctgctttttctcttcctcctctcacccagctcctgaaaaactcttacatttccttccgtattttggcagaacattacctcttctctgggcagccttcacactgccccccacttccctctacataattgatctctctcctttgtgcctctcctaccgcatctttatataccccctttatagagtgtccatctgctgctgctgctataacaaaatacctgagactggataacatataaaaaatagaaatttattttctcacacttctggaggctgagaagtccaagatcaaggtgccaccttaaccactgcatcctctgaaggggaagaacaccatgtcctcacatggcagaagggacagaaggtcagaaagggacaaacactgtgtgaaacctctctcataaggcatgaatcctactcacaaaggcagagccctcatgacttagtcacctcctaaagggcctgcctcttaataatatcacattggtgattaagtttcaacatatgaattttggaggacacatacagaccgtagcaaaggggctctgcattacatgtttacatatcactctcttccactagacagttgcttcttgaggacagtggcaggcaagggtgcctaacacagtttagatattttagttgattgaatcaatggaaacaaggaaaatgattaaatttcttccttgactgctagcttcaaaaggaaaaataactaaaacattgtattttaagaaacatccttgcagaaaaaatattatagaagtaacaatgaccctcataataaaaagcaaatatatacatatatacacatttttacacattttaaaaaacatacctggaatagaaccagagaagaacactaatcctcaagccacacactgctgctgacacttagtagttttgtgaccttgggcaaattactagacatcactg

SEQ ID NO: 54391 - DNA, 1620 bp, Homo sapiens
gggccataaagggttacttaaactgtatcatattttatccattttaagaagaaaataatatgccataatagtaattgcaaatgtggggatttaaaagttctccagaggcatttcttgtgaacctcaaggcctatacaggattggcggggcgctgtggcccatgcctgtaatcacagcactttgggaggccgaggtaggcaaatcacttgagcccaggagttggagactagcctggacaacacagggagactctgtctttacaaaaaaattaaaaaattagctggacatggtggcatgcacctgtagttcccactacttgggaggctgaggcaggaggattgcttgagcccagggaggtcaaggctgcagtgagctgtgattgcaccactgcactcagcctgggcaacagagtgaggcactgtcttaaaaaaacaaagaagtctatacagtactgaagtgactttattgtttgttgaaattctgtctcttcatatgagtaagcaccttgagaactagtccatttacttcatttctgtatccttagcaatttgcttggcacataacacatattcaataaccttctgtttgtgtgtttagatgtcttttctaattcttcattcagttaactttacaagtatttatggagtacttactatatgccaggcattgcgctagcacatgtgtgtagatgtgcacacacacctccttgtgttttcctgacatccaaacaagaaggccccactcactgcatttggttctcacacataccacagagctgaggctgggagttggagtcccgttccttccagtatatcctataatggaggaggcagcccatttgctcctggactggaatgctgttccatgaaattaaaatgctccccttttcctctgtgatggcattaatgtgggggccactcagtggtgctgtaaagtagggcacaggaggcttctgtcaccctccaaatccaaatcattaaactaaagcaaaatttggcaaaagatcccaagactcacctttgtgcttagagttacccaggatggagctgcatcctccttgatcccctgagagtgcatacacacggatttcataacagatgtaggattttatgttctctgcaaggaaaagggaattcccataacagccgtgccattactggtgagtcactaaagggagccattttattatctgatacaaatgctttcaaggtgtttcttgccttttcctagtttaaagatggttcaagcacagtctggactgatgacctatgttacaaattctcagcatctgatttgccatgacgttggcttctggaagttactgctcccaacttcaaaggatgagatcaaccaaccaaccaacctgagtttctttccatataaacaaacaggatcaccatgattaagaaggagacaaaagctatttgagttccaacacggatttaaatataaccacacacacacacacacacagacacacacacgcacccagactgcttttgaaacaaacaaaacaacttgccttcaagaaaaaaaaccttttgattcctacaaataaagcatttgctgtttacaggaaagtgaggctggaattttgcaggcatagaacctgaatagctt

SEQ ID NO: 54392 - DNA, 1004 bp, Homo sapiens
gggattacaggcgtgagccaccgcaccccgccgagtttcagtgggttttgaggttcattttgccaactttgaggttgaggttgaaaaagaaacacaaattacaataggatctgtgacctgtgctgaggacctcaatatttaaaaaggaaagagaggggaaactgggaaggaaaaaaatgggtggggggtggggaagataggcaatgaggcaaagtggtcttgtgaggctttgattagcattcagtgaatctacattttacatgtgaaaggaggggtaaagggtcaattatgcatttttctggaactcagtaaatctatgtttgacataaaataaagtaagcatgtgaagttacagctatctgtttggtaacaaaagaaaggcagtttttgcatgactcagctcccaagcttatcttttcttttggcatagtgagtttggggtcttgagagtttattttcctttcacacctgctagctcattgagatgacttcatctatgctggtgatcacagggaaaactagaactcagcgtcatatactcaacatatactggctcacaaactccagggcaagtcagagatgtcttgcatgctgaatttatttcaacagtcataaatatgagtgcctacactggacaaggcactgacaatacaaaagcaaagaatctgcctcaaagagtccactatctaatggggaaaagagaccccttccattatcccatccctgcttactatgggtaatcagcaagatgaagtcctataatattacctctactccacccaaaggggttgaggcccatgcagataatttattcaccatgactatcacagaatttctatagtttacatcctgttgagaaaagtccttgtggaaaattctcaagtctactctagcctggtgagattgcttgcatagacttaagctatatgattgagctcaaaaagccctttctctattcctaacacaggggattaaaaaattaattttagagagaccttctgttc

SEQ ID NO: 54393 - DNA, 1050 bp, Homo sapiens
gagttcgggaccagtctggccaacatgatgaaaccctgtctctaataaaaaatacaaaaattatctgggcatggtggtgggcacctgtaatcccagctactcaggaggctgaggcaggacaattgcttgaacccaggaggcggaggttgcagtgagccaaaatcacaccattgcacttcagcctgggcgacaagagtgaaactctgtctcaaaaaaatttttttgggggaaaaaaagaatatatatatatatatatatatatatatatatatatatatatataaaatacatttctagttagagattgttagatcaaaagatatatttttaaggatttgacacatactgtcacccaaagtggttaaataagtttagtctctcaccaggaatgtgtgagagtgtccatttccctgacccatggcagcaacagctattatcattttttaaaagcctcatttacccacttggtaggtgtaaccaactcacttttgctggaagtaatgcgttgagaaaatgcccaccatgatgatagcaatgcaaatgcttggtgccacaaacgccatccaattggctttacctgaaaagttaggaaatcctgtgactgagtgagttatcaccaatgaacatttcaaaatcctgattggtgtatgcgccctctgggccttacccacagttcctgggcagctgtgctcaagaataaggtaaattcacttttgtctatgcagtgcgggaaatgggaccctaaggggaccaattctatggttccaagaggagctctggccctacagggctcctccgactcacagggtcagaaagaaaggaggtacggaatgcaaagtacagttgtgaattgggagccttgtcttagtcctggctgtgccgctagcagatgtgtaatctgtggacttcagtttatttccttcttttttttttttttttttttttttgagatggagtctcactgtgtctcccaggctggagtgcaatggcgcaatctcagctcactgcaatctccgcctcccgggttcaagcgattctcctgcctcagcc

SEQ ID NO: 54394 - DNA, 2764 bp, Homo sapiens
aaaaaaaaaaatcatacgacctcatagagatgtttatgggttaaatgttaacgtatgaaaatgttttcaaaagtgcctggtacatagaagataatatatctaaattataataatgaatgtataatattattatataattatatattatatgacagaatatagaaaatatataattatataacctgtatattatatatataaaatagtaataacagcagtttgtatacatatatataaaacagcagtttgtgtgtgtgtgtgtgtatagacacacacacacacacacacacacacactgctgttattatcactgtttttgctgttgtaacttaatagggatgaaatccctcagaggagacttaaattatgggtcttcttgggaagaaagtgaatgatctttgtcttatatgacccatgtgctttacatggcatcttatttaatcctcacagtggtaagtaagaatgatactgtcaactcctgttttattgaggctgaaacttgggctcagatagttgggcaagttgcccaagagtcacacacatagtaagtggcagaggcaggggtggcctctgggcttgatttcaaaggcactaaactatagagacttaaatgcctaaagaatctgtggctgggatccactctttttttttgagtggaggttgggactatggaccactggcttctggcctgaggaagggtgtggatgacagaacatactcggtagttggagagaagcatcttgagcaaggagtgttataaggtcttggaaagggagcctggagttgtcaaagccccaggtgatgggaggaatattgacttgccacttctctctcctatttctccccttaaatgtagtcttcatattcagatactttcaacttccagaccctccaccagggatggcccatcttgcccactgtgagctttctcaccttctttcctgggctgcagcagttcccttcacttcctttactctcccctctctcatctgccagctgatcaacctctcctttaaaaccttttctttgcacaatggaatgatgtactggcttcttgcccaaaccaaaatagtatgggttctatttatcttttctatgcttagacaggaaaatcaaaatcttcaattctcttgaattttggatgactcaatgctcaggctagtactcaacaaatggcaaaaaaaaaaaaaaaaaaaaggaaagtttgctttcttcttttgaaataagttaggtgaggagaacaggagagcagtttggtgagaaggggaaagtgaggcatactgaggtataaaaagctagggggttttagtcttatgatcataaacttcagaagattcctgtgcctggtttctcttaagttcaggaattaaaatgagaatgatgactcagtggtagccaagcgtgaataacttaagctcaaccataggatctcagcacccaggcttcctcgtaactacaatggaaaacttagatgtggtgatcactagaactccactgactgaccacagaggaattgtaccttacctctgcaatgggatatttcttagcgcaagtgctatttgctggatctggaatttctctgctacaccactgaggtctgagggctgctaggagaacaaacaccctatagataaagaaaacagtgacatttccttaggtgtgcacacagtggcatggaagcacaggttctcagtgcagtaacttcagtgtaagggctgcttttgtatgcaaataaaagataaacactgaaagacaaagatgatttatcatccaagactacggtagttttctgtaaaattacaacacagccacttgaggtttgctaaataaaccatggaacttttgatcaacctaatatttagcaatctatcactagccagctatgcattcattcaacaaatattgattgaacccctaatatgtgaccagcacaatgctacctgccaagcattgaagatgacatgttccctacccttactatttagctaattagaatatttacaaagagtttgtaatgacaggtaaattatgtgaacagttgaaaaaaagacgggattcaaaatggtataaatagcttgaacacaaccatgttaaaaatgccaagaaaaaagtattatagggaaatatctgaaatatctattaacagtgattgtatttggcaataagaggaaatacaggtcttttatgatgtagaaggaaaaatcctaaaaacatttcttataaatgcatgtgacttattttttttaaagttcatgaacaatatgaaacatttttaaagacttggctttcataagctttgatttttttttttttttaaaagtatgctttacaatttgtctaaccttttgaagtaagagatgtggccatgtgactaggttttctccaaagaaatatgagcagaagtgtctgtgatctcatagagatcatgcagatgaggacaatacctaagggatggtatgccaaaaagatggaagaaaactgagtccacaaataactatggagcacagctgcccaccagtctggataccttacctcagggctgttatatggaagataaataaagtattatttaagccactgtgctttgggtcctctttttttttttaaggcagtttagcctgcactgtaactgatcttcacaatttccatgaagaggatgcatgtgatcctagttgactccttttgaattaaactttttcaaagtctacccaaagagagcttcacgttgaagtatctatcacacattagatcttcaataaatgta

SEQ ID NO: 54395 - DNA, 1413 bp, Homo sapiens
atcatctcaggaagttctgttgaacagtactgatctgctgtgtacagcctgctgtgtagcaggtgctttagaaatagtcattgcatgaatggtcctctagactgtatgccattactactaagagctgtggtttctactctcctcctcatttccctttctggccagcataccaagaaagttactaggaattcaagttggagtctctaggtccacacagtgaaggatgtaattttaaggccctgggaaaggcaagatgaggcatctgagtgaagaccaactcccagttcctaagactcccccagagctggcttgcctgtcctctagctgcagccagaccgatggtggcacccagagatgacagctgctggagcaggggctgggggaattggggcaggctgtgctggttgagggcacactgactttaaggcttgaagcctcaccactcagagcatgagggagtcacacctcatctttaactgatccagagtcagcttatcaccacaggagaaggtgagtgggtgaagagaacttgaggggaaaacagaaagggagatgtgctgaggctccagttcttccagagagtcagcgagaggtgcctcatgtgaggggaggtcatctatgttggagggtaagtagccatcatgggtgggaaggtcacctgctgggagcaccgtccagggacaggctgggttttcgggctttgggtcggagcccctgctctccagcaccttgtacagatccaccagttgtctgctctcagcttggagagctcttggaggtggtgggcttgaggcactgtgcatcatgtctttctcagaggcctgatgaccttggattcctttttccctttgtggccagttggagcaggggggatgtctgaaaactggggtcacttgatgaaggacttcactgatgaccagcggttcaggatcttcaggcgtgggccagtctatcaggagcctgtccaagggcagctgtgtcttctcctgagagaaaggaggaggaagaggctcacactgctgtagaagtgaccttcacaacctatttctccagggttcccaaaggcctcacaacctgcactgtctcctcagccctggctggaacatgttgggcactggagtttgcgaggtaagagaaacagttaacattgttggggaggcagaggggcaggagccagagactcctctcaacccccagccagtgagtgattcacagccctgctcaaccttcaacctgtttctttctttcttttttttttttttcttgagacgaagtcgccttctgtcacccaggctcaagtgcagtggcatgatcttggctccctgtaacctccgcctcccaggttcaagcaattctcgtgcctcagcctcccgagtggctgggattataggcatgtgccaccatgcctggcta

SEQ ID NO: 54396 - DNA, 3524 bp, Homo sapiens
tttcagtcaagtgcttctgctcctgatgtggatgacccagaggcattcccagctctggcttaactggatgccataagacaaccctggttcctttgtgaacccttctgttcaaagcttttgcatgcttaaggattccaaacgactaagaaattaaaaaaaaaaagactgtcattcataccattcacacctaaagactgaattttatctgttttaaaaatgaacttctcccgctacacagaagtaacaaatatggtagtcagttttgtatttagaaatgtattggtagcagggatgttttcataattttcagagattatgcattcttcatgaatacttttgtattgctgcttgcaaatatgcatttccaaacttgaaatataggtgtgaacagtgtgtaccagtttaaagctttcacttcatttgtgttttttaattaaggatttagaagttcccccaattacaaactggttttaaatattggacatactggttttaatacctgctttgcatattcacacatggtcaactgggacatgttaaactttgatttgtcaaattttatgctgtgtggaatactaactatatgtattttaacttagttttaatattttcatttttggggaaaaatcttttttcacttctcatgatagctgttatatatatatgctaaatctttatatacagaaatatcagtacttgaacaaattcaaagcacatttggtttattaacccttgctccttgcatggctcattaggttcaaattataactgatttacattttcagctatatttactttttaaatgcttgagtttcccattttaaaatctaaactagacatcttaattggtgaaagttgtttaaactacttattgttggtaggcacatcgtgtcaagtgaagtagttttataggtatgggttttttctcccccttcaccagggtgggtggaataagttgatttggccaatgtgtaatatttaaactgttctgtaaaataagtgtctggccatttggtatgatttctgtgtgtgaaaggtcccaaaatcaaaatggtacatccataatcagccaccatttaacccttccttgttctaaaacaaaaaccaaagggcgctggttggtagggtgaggtgggggagtattttaatttttggaatttgggaagcagacagctttactttgtaaggttggaacagcagcactatacatgaaatataaaccaaaaacctttactgtttctaaatttcctagattgctattatttggttgtaagttgagtattccacagaaagtggtaattatctcttctctcttcctccattagaaaattaggtaaataatggattcctataatgggagcatcaccacttattaaaacacacatagaatgatgaattaaaaaagttttctaggattgtcttttattctgccacatttattgataaacagtgaaggaatttttaaaaaatttttaagaattgtttgtcacgtcatttttagaaatgttctacctgtatatggtaatgtccagttttaaaaatattggacatcttcaatcttaaacatttctatttagctgattggttctcacatatacttctaaaagaaacttttatgttataagagttactttttggataagatttattaatctcagttacctactattctgacattttaggaaggaggtaattgtttttaatgatggataaacttgtgctggtgttttggatcttatgatgctgagcatgttctgcactggtgctaatgtctaatataattttatatttacacacatacgtgctacccagagattaatttagtccatatgaactattgacccattgttcattgagacagcaacatacgcactcctaaatcagtgtgtttagacttttcaagtatctaactcatttccaaacatgtaccatgttttataaacctcttgatttccagcaacatactatagaaaacacctgctactcaaaacacaacttctcagtgtcatccattgctgtcgtgagagacaacatagcaatatctggtatgttgcaagctttcaagatagcctgaacttaaaaagttggtgcattagttgtatctgatggatataaatttgcctcctagttcactttgtgtcaagagctaaaactgtgaacctaactttctcttattggtgggtaataactgaaaataaagatttattttcatgctcacttcttaaaagtcataaaaacaatcaaataggatcatgtttattgtcatgtgtttcctggtttctgacctgtgtgcacacccctgtgtgtttataatttttaaattgaattttatatggggtttttatttgctaaaaaccaggctgttgaatcacatttgggaagggtacttatcttaatgactaatgacttaattgggaaagttgaattcttgtaaaatacaaaatccaaggacttcttggatttaatctgattgtcacttcttagcagatcacttttttgataatgaaagttaagcatactgaatgctacttttgattgacaaactggctataatagtctaggggaaaaatccctaaacagataaagattcctaaagtaatggtggcagctgatgtttcagtgaacttttatcttgatgcgtttaaatggaagtaatgccagacctgagatttttaaggcatttttacagcttgtattgaaatgattggagacatggtttctttattagctattttgagacctgtggagttaagcaagacttttaaaaattggcaccatatacatctagttagttcctttactcttatttttttaaataaaagtagtacacatcatttccagggttgtaaatatatttggggcttgtttttggtatggatttaaaaggaggatattaagtattcattctaattttgttatttttctagttgccagagatggttgcactgaaatagaacagggagttgcatacaaagcctaaatgtgtattggatttcgaaaatactaggttggtgcaattggttttgtaccaacctaacatgtctttaggaaagtaccatcatgtggaaggaaacaacaggtgttaaaaggttcaaaggaatgagaaataggaagttactagaacctaactgatgttgaccttagaggtaagattattcaggtatattagtggacctccagtccaatggtatagcaaattccagggatctcaggtgcatgcaattttactttctaaagtaaacacttagaaaatagattataacccagacgttttggattatactgagacaaatatgtaaataagttttagcaagtctgaacatgtaccagcgagatcttcaggttaactaagaaaagcccagaaacttcattatttactgtgctttgtatggcataactggtaacaaggcagtaaaatgatacatatttgaactggaccatagtaattaaatgatttatcaatatcatttgcaagataattgtcaggttgagttaatagtaagtggcagcttcccagaaatttg

SEQ ID NO: 54397 - DNA, 1493 bp, Homo sapiens
cagagtttttctttctgagtgttctttttaacttcagtgttagtgctagtagtaaccttatatgtcatctctccagaggtcttcatcaaggattcacatggcagtcctgatctgaagggcatatttaaaatgtacttgtccagatttcactgctaaagattatgattcagtaggtctaggatgggcttcagccgtttgggttgattgtgatagcatacatgtctttagttgaggactgctggtattacctgcaattttgagatagagaaaagtgcaggaaaatcttcctccaggatcactaaagctgagccctagcttgttacctgtggaggcattgagacatttgttcacagaaagtacagtttggatttttggttttttttagaagaaagctcattatttagaaattttgcaatgttacttttctactaataacacaatcatcttcacttatatttttaggctcatgctgaagattcggttatggaccatcatttccggaagccagcaaatgatataacgtctcagctggagatcaattttggagaccttggccgcccaggacgtggcggcaggggaggacgaggtggacgtgggcgtggtgggcgcccaaaccgtggcagcaggaccgacaaggtaatttaagactttcttttccttttacataatttaaggacctcttataagtcactggctgggtcagacttatgtcacttttgggaacataagtagaagtagtagcagtgtctttaagaaaccgcatgttaggttatatttatgtttaaagcacttaaatgcctttttgtgtagtgctgttagtagtgttaagttaccacccttttgagttctttctaggtgccggtcatggtgctgggctaggcattttatgtacttaatgtcatttaattcttgttactgtgatgacattctcattttccagatgagaaaattctggtatagtgaatcaggttaactcttggcctttgctaaggcttacctgaaaaccagtctgttcactttgataattcctaactgctttttaggtctccacttaataaccattgtgttccttgtataattcctcttacgacacttaggattgttgacacttttttcttttactagactcttctgtgagagctgggattcatttttggcttactttctataatctctccaatgccttgaacagtatgtggcacaaaacaagttcttagagaaatattttggtgaattcccaagtaattgatagatttgaactcagatctgatgcttggaaacaaccataatgtcctcctaaattctcaacaccttacacacaaatttggggacccacctacttgattgagtctgtttttgatgattacaggggtaacttaccattgccagtgtaatgatactttgttcctccctctaagaccaaccttttttttttaaggtggtggttgtgttgatgggcttttcccatactttcttttttagttctgttattt

SEQ ID NO: 54398 - DNA, 1035 bp, Homo sapiens
accccgcagatcaatgcacatgtaacctttgactctcccaaaacttaactactaataacctgttgactgaaagtcttagtgataacataaccagttaacacattttgtatgttgcgtattatatactgtgtttttacagtaaagtaagctaaagaaaatgttgagaaaatatatttactgttcattaagtggaactggatcatcacaaaggtctttattttggataggaagaaaagggattgggcttgcttgtctcaagactgacagaggcagaatgttcaaagccacgttgttcaagggtcaactgtattggagaaagtcacattgatggcttttgatttggtagcttccgtttaagctttggggtgtgttcttagaggaatgtttcagtgcggcttcctgtttggctttaaaaactcatacaagccctaactatattatttcttctcctaaattcattttctctatcagcttcctttaaccttttgacatttgtgtttgatttattcatatcataaattgggctgtgccagaaatccagactgagttttatcatcctaaggtaaagttaaattaaaatattgtgagggcaaaccctttcaataaggtattagttatttttattttttttttttgagacagaatctggctctgtcgcccaggctggaatgcagtggcaccatctctgcttaccgcaacctccacctcccggattcaaacagttcttgtgtctcaacctcctcagtagctgggattacggacactcgccaccatgcccggataatgtttgtgtttttagtagagatgaggtttcatcatgttggccaggctggtctcaaactcctggcctcagtgatccccgcctgcctcagcctcccaaagtgctgggattataggcgtgtgccaccatgcccagccaataagcataattttttaaactgcaaaatggctataagacaaacttggaaacattttaaaataaaatggaggttaaaaagattaaaagtttttttaggtttagagatgatttttaac

SEQ ID NO: 54399 - DNA, 1473 bp, Homo sapiens
agaggaaaggatcatattctatagttaagacctgagaattatatttggaaataaatggtttagtattaaataatgaaaccagtgtgtgtttgtggatagttctattagtagtgaatccatggcctcctttccatatacaggttggtttgaaaattggagtataaggattttaggatttgtagaaacacggctattgttttgatttgctctaagtgctagttgctgaaacaaagcatagaggaacagttcttttatattccaaaatttgaaccctggttgctgacagacatcctagaggattaccttcttgtatgttattaagagttacatattgtgggaattatggaaattaaaaatgtggtttaggagaagataggctgaggattttacataagagggtagtttttaaacaaggtagtgtttttaagaaatgtgtattttagtattcgtaaagccagttctagattgtattactgataaatgatcatttaagagttcataagtatgaattccatattccttacttgtctctaattagcaaacactgaattcctggtctctaccaagttgcttagttacataggaaactagggtaccctcatccttgaataatctttctctaaaagattacaaggttaattttctcaattaaaatcataaatttaaaatacttttatgtaatatcagctctctaccaggtataaaacttgaaaaccttttcacagggagaatgaagttgaagaggtaaaagaggagggtccaaaagagatgactttggatgagtggaaggctattcaaaataaggaccgggcaaaagtagaatttaatatccgaaaaccaaatgaaggtgctgatgggcagtggaagaagggatttgttcttcataaatcaaagagtgaagaggtaaaattaagttttgtcgtgtttgaaaatgttcagatgtgacttgaattgtatttataatttttgttttaaaatttcacatgggttatttgtctgttaaagctttacataggatcatttggggcagataatttgctttataaggaaaataaactgtattatcacatattctaagaaatttagtcctttgatcaatttgtaattatgttttatgtggtagagttactttttcctaaaaagctgttagtggagtatcttgtagttattggtgttcagaaatatgatagttcttttcaaagttgtggttgtatttttgaaatcttgccaaactggggatcattaaagggctgtggtattatggtgttaggttgaaatcttgacattttcatatggtttaacctaaaatgtaagtgacttcatttagaattcaacttttgaaactgtctgcctataccatatataatggccaggacactcagtaaatggcaatgtgcattttgtctaaggaatgacgactttaaaaaccaaagtatatgtgggttttacttaagaaacatggaaactagtgaa

SEQ ID NO: 54400 - DNA, 2045 bp, Homo sapiens
actcctgacctcggtgatccaccctccttggcctcccaaagtgctgggattacaggtgtgagccaccacacccagcccttcactagcttttaaaattacatggtgttttgttttgttttgttttgttttgttttgttttgttttgtttggagacattctcgctctgttgcccaggctgaagtaacagtggcgctatcttggctcactgcaacctccgccccctgggttcaaacgattctcctgcctcaccctcccgagtaactgggattacaggcatgcatcaccacgcccagctaattttttgtatttttagtagagacaggatttcaccatgttggccaggctggtctcgaactcctgacctcaggtgatgcatccgccttggccttccaaagtgctgggattacgggcatgagccaccacgcctgacctaaaatcatgtttactttgccagttatttgttacagtattgtggtttaaagtcttggattacaggttatttaggacagtgattcctaaccagaagcatattcaagttagttggggggtgggaggggcagatgttttctaaactttttcttttttcttttttttttttgagatggagttttgctcttgttgcctgtgctggagtgcaatggcgtgatctcggctcactgcaacctctgcctccagggttcaagcaattctcctgcctcagctcctgagtagctgggattacaggcatgtgccaccacgcccggctaattttgtatttttagtagagatgggtttctccatgttggtcaggctgatctcgaactctgacctcaggtgatctgccctccttggcctcccaaagtgctgggattacaggcgtgagctgccgcaccttaaactttttcttttcttcagaaagaatttgctcttatggtgagcactgttaatgatgggaatatcatattccgtggatttgttgggataaggaaaaatgatatactattggagggagtagataaaaatacatggtattgggtgatgttttgaacttggtaataaaaatttatgcaaaactataatggaatcataattttgcatgataaacaatgaagttgtgattggtgccttaacaaatgaaccctatgcaacgttaagtttctcatagtggtcaacacaacttttttttgtttctttgagacacagtctcctgtctcccatgctagagtgcagtggcgcgattttggccattctgaagttcaagcgattctcctgcctcagcctcccgagtactgggactacaggcatgctccaccatgcctggctaatttttgtattttcagtagagacatggttacaccatgttggccaggctggtcttgaactcctggcctcaagtgatcctcccgccttggcctcccaaaatgctgggattacaggtgtgagccaccgtgtccaaccacaactgtttaatagagcccatgttcaatcactcagtgatatgcaaagattataactgtttaccaaaaggtactaatgtattgataggctattggtagcaaatccttagctcagtgcccaggagcgaaactgagggtgtttggtttaaagaaaataattatccatcacattagaactgtctgtaatcttattccagactaggggagaatctgggcatagcatatggaagtataaatttaagaaacacaacattggctgactttgatgaactaacttatatatagcttccagagcttctgtttggtttttatttaatccttgcagtaattcctgaaaggtaggtgtcatgcctccatgatatgataaaaggtatgctaagttctattcctggctgtgtcataacatatgggtaagcaggactttttttatattcttagatttctcatctgtaaaatgactaggtggactcagtacccaagatcccaagatcctgtcaattcaatataaacttgctctaggaagttttttgttttttttttgcagcatagatgtaactggaggaacttttaagatagcatttgtcaaacagtaaagggcagcatccaggg

SEQ ID NO: 54401 - DNA, 7118 bp, Homo sapiens
ttgtgcgtctcagatgtaaggtctgggagtcaccttgacccccctggagcggtggggaaagttagccctgagcccgagggggcgtgagtgaaaccaaagagcactttcgcgagtcagttacgccgtcacggttttttggtttcaaggtagctgaagacctagagagtttaagggtggccagagcaggtggcaggactccgcccaccaccacgcttcccttccttcagcccgcacgcttcactcccctcatggggtctcgcctctcaggcgcgcgcgaagagttgtcgcgcggtgcgtcctgggaattgtagtcccgacgcggagagtcgcctcaggagaaatgactctggcctacataccccacagtgccttgcggcgcaggccgctcccggatgtgtgcctggcgccggaagagaagacggcccccctctctcggcccggccatcttgtgggaagagctgaagcaggcgctcttggctcggcgcggcccgctgcaatccgtggaggaacgcgccgccgagccaccatcatgcctgggcacttacaggaaggcttcggctgcgtggtcaccaaccgattcgaccagttatttgacgacgaatcggaccccttcgaggtgctgaaggcagcagagaacaagaaaaaagaagccggcgggggcggcgttgggggccctggggccaagagcgcagctcaggccgcggcccagaccaactccaacgcggcaggcaaacagctgcgcaaggagtcccagaaagaccgcaagaacccgctgccccccagcgttggcgtggttgacaagaaagaggagacgcagccgcccgtggcgcttaagaaagaaggtaaagcaggggcagaatgtgggggagactgggatggagggaaggagcgagggggctgccggctgccacttgtttctggagctccgagggtccgcgggagactttgccgcctatatcctcacgtttcttcacgcgacaaaagtccggtcctgcgaaggtgccaggagcgtggtagccccaagttcaagccaccgccggcgaggttctcggagccatccccttcccgcctcaggttgtgagcagaggagcgtggtcggagatgagctgctcctcgagcgcgctcgaggtcctgggaggctgttgccttcccgccggattccttggcgggtgagcgcatggactgaggtgcggggaagccggcccctcaccgaagctttccgtagttacggaggagcttgggggtccatcgctgcttactgcgcagagctgctcctttgaggtgctgttgtttcaggctcctgtcctgccgtcttgtcccacgacggcgcggagtatccccgctgaaaagcagggggtcgttccaggccatcagacgtgtggagtaagctgcaggttggggtgccgcatgtcctttatttgtttctcttccacctctcaactgttaggactttctcataacttgctggggtgagttgagccgttgggaaatggaggagtttggccacactcgattaaccaggagcgggaattatgaatgaagactggtgattgcaggacatcccgaggaacgtcctcgagtcacgatcctctctctcgactccccaaactgaatctttcacgtggtggggtctgggcctcgtgggtgaagtgagtgcagaggctgtcacagcgttagtcgcagcagagctctttagagttcgcagttttttttttccaccacatgtgcgtgaagcatggtcagagtttcactggcggttaatagttgtttctagggcactgtgagtttcacaggattgtcttgatttttgcattcgctttaccagtttgttgcggatgaaaaaaaagagcaagcagtttggagataagaacgtgcatgatcaatagcaagcaggtgttggacctaaggtctgaatctttaaagctgcatttatatgttgaaagttgaaattaccccttcctgccacgtgcttctctgaaaggagttgtttctctttagctttagttgaattctgtaacagtgaactaattttaaaaatcaaaacaattttctcgtggtaggatttgttttaggagggtttttttttttttttttgaggacttttgtgaggctcggaatgaagaacctcggtcctaggtggtgaataaaagaaaataattaattcttgtggtaaaattataggttgaggaaaaatacagttggagtattagaaagcatgtatatcacttaggccaagtatctcttcagccagttaagctttatggcaatctagcacaattaaataaatcatttaattcgtgtgttaagtaacgctgacttgtgtaattatttaaactatgcttaagcttaagaaagtacacgaaaaagttgaatctgacgaataatgtgtaccaggtagatgtgttcactcattttgaatgttcaaaacatgaagcatggtttaaatgcctgagttattttgatcatgaagcccatctatgaaataagctcttacctgaaaagtagtattttaagttaacaaatgtggggaatgatttcatgaagttagaaccaagacttaggttcaccgttcaatgagtctttccatgggaaaactattccatgttagcaatcagcattttccttaggtcagtatttcagagcactactgttaagttgcataaaatacaagcatgtaaaatacaggaaaagtgttgaatggacaatacccgttttgagattctactgtcctgattactgggaataaatctgtaaacaaagtcgctgcatgtagtaggaaggttaacctgattgtgttctgtgattttgataacacattgtgacataatacttgacatactttagacagatatttaatgtttatgttttatgaattaattttgtacattctcttgcccatttgaagaacttgagaattgacagcagaatgtcattgagagtgtagaccagggattttctaaaaaagaatgaatgccttgaaactagtgcagttagtgagcttgcaagttatagataagtatatcaaaagaagcttgcatttttaaatgtcagtctttttcattaggtaggtttaatacgtttttaagattctgtaaacttgatattgggtggggacgccaactattgttcacttgggtgtgtttggcttggatattattgcaaggactggttccataactccaccccagtgcactttattactgatgacatttatttaaataccttggtgtaaggtctaatatttgtagtctatcttgagtatttacagggaatgaacttcaaaattctattgaagagattgatagttactgtttggctccagttaacaggcagcagaacaactgggtgtgtcttgatggtgttctactttcttagaaagaaccaaagtgaagcagcttaaaatcttgtaaaaccaattcctcagctgctttatgactttgtcagaaattgggaattagagcataccaacaatcttaaagtcattaatttaaccatcaatctgttgatccttatgggcaccaataatttaaattggttgcctttgtggggtttcagacattacaggaaaaaagtagtaaagggggaaattagtaaatgcttcagctatcacttagtgtcacaagttttcttatttcttacatgttgcttaaaagcggtcttaacgtgtgtgtatttggtttttaaagattctttgaaaataaagatagttgttagggcaaattttttagaggactctctccatgcataataagtaactgtttcctaacttggaagtacttagggatgtgggagtgtgtacaaacatatatacacttacatgctataaaattttaaactttaataggggaagatggccctttttgtgtgcctgtagctaagaagaccaaaagatgacactttttctggttaaatggctgttttaaactgaagtgatgttctctaataatcctaaatgccatattttcctttcagatttgtaattttatagaattatgagtcttaattgcatttttttttcagattagatagaataacatagtgcggccctcacttttgtgaggggccatatctagtgagtgtgttgatttgcttggttatttatgaatggctgctggtattttctttggtattttaaaagccaaaatgtattgcttgcctaaaattttttaaatttaaaagtttttattaagagactatcttggaaagtgacgggaataatggttgcccaaatgatttccaagtcagttatagaaaatgcttttgagggggagaacttggcaaacttaaatagaagtttaaaataagtttattgtttttattttatttatttatgtatttagtcggtggtatggattggaaggtttattgtctttaaatggcagttttcctaaggtactttgttacacattagagttgcccagtgtttgcttttttccaacaggaaatggtagtggattggaagagaagcagcttttgacagtccaggcctaaagtttttggattgcaaaaataatttgcttatgcaggttatcttatcgttttaggaataagacgagttggaagaagacctgatcaacaacttcagggtgaagggaaaataattgatagaagaccagaaaggcgaccacctcgtgaacgaagattcgaaaagccacttgaagaaaagggtgaaggaggcgaattttcagttgataggtaagttgtttcttgtttttgagccagggtcttggtctaacatgtaggctggagtgcagtggtacaagcttggctcactgcagcctctgcttcctgggctcaaatgatcctctcatctcagtctcctcttgagtagctcggactacaaggtcacgccaccacactgctaattttttttgtagagctgaggtctcactatatatattgcattggctggtcttgagctcctgtgctcaagctgtcctcctgcaatattgggattacaggcgtaaaccaaagaagtcttcatattttgttactttatagagtcacattttaatgttaagctataaattgggcataattgccaggtagcagtctggctaattgtttctattaatttttcacagaaacatctgtatgtgtgcattgttaagctttagatctttgggtaacagttcaaacttaggtctcttgtaatggaaacactttgttgaattgataaccaatttctttttctttctctctccagatacagagttaaaaggaaaatactgttagttgaaggaaaatactgttggtttattgtttatagcaaataaattacttatgcaagttagatgtgtttaatttttaagtgtattggtaaatagtgatggactggattatatgtgcaatgaatagcagtggaaaagtatatgcactggtagtaatgctttagagtgctaaaatagttttcttgttttgggaggctgtcttgttctggtttcctttgtgtttagaaacagactattttgaattttctgaagtgtatgtatttaactattggtttttgagccagtaaacatgttctgtatttttgatcttttggatgaattttcctcatttcttctggaaaccatggaagtataatttatttgtttatattatagaccgattattgaccgacctattcgaggtcgtggtggtcttggaagaggtcgagggggccgtggacgtggaatgggccgaggagatggatttgattctcgtggcaaacgtgaatttgataggcatagtggaagtgatagatcgtaagtcttactggtttttattttactttaatattttaatctatttaataaacaaactttgaatttctagaactaaagagtattatgttaactcagttttgttagttctttttcacattacagtggcctgaagcacgaggacaaacgtggaggtagcggatctcacaactggggaactgtcaaagacgaattaacgttggtattctgattttcttaaaaattctatacctaactagaggttaatccatacctctgtcaaattttacttgtctctgagataagaatgaatgctctcttctgagagttactatattacaagataatgtcttatgggatgggtttgggttatagtatattgaatgaccggttttttaatatttcgatatatttgttactcattttttcccccccatatgtatttgtagcttttcctgaaaccccacaataaggttatttgggtattctgattatcttagtgtccttaatagttcctattctagcttttgactttgttgtcattacaaaatttgataagctagtaaagcttcattttataattaactgccttgttctgttactttttaagtatgaagtatatgaactaactagtttatattgtttacttttcgacgtcttctggggagtatatttagtaagaaaggagttagagaatgtgagagcttatggtatttttgtatgaagaacttttcagctacatgtaaatggacctagatgcctttctttttctttctttccttagagagtcccccaaatacattcagaaacaaatatcttataattacagtgacttggatcaatcaaatgtgactgaggaaacacctgaaggtgaagaacatcatccagtggcagacactgaaaataagtaagtggtattgcgtgtaatagtaatgacccagaattgaaagcactggagttttaccaataagataacccatagatttaatgctgttacttgatggctttttgtttttgacaagggagacttactgtaccctcatccctcaaagagtatttgaaagaatgctttttttttctttttttaatagagacagggtctcactatattgcctaggcaggtctccaattcctgggctcaagcgttcctcctgccttggcctcccaaagtgctgggattacaggcatgagccactgcacccagcccttaaaagagtggtttatgtgtatatatttgactctaacgctttgaaaaatagaatattttaatgtggttatttctgtttgattagtcattttaccattgtcatacaactgtacaaattttactttgagatagttaaaactagaaaatgtggccattttaacattagttctatcttgaagttatttcca

SEQ ID NO: 54402 - DNA, 1165 bp, Homo sapiens
ggctaattttttgtatttttagtagagacagggtttcaccgtgttagccaggatggtctcgatctcccgacctcgtgatccgttgggccataaaactttgacaaatttaaaagaaatgaaaacatacaaaatgtgttatctaatcacaatgaaatataagtagaataacaaaaagataacagaaacatctccaaacacttgaaagcaaaactacatccatataaatattcctgggtcaaaaaggaagtcttaagagaacttttaaaaaattcattgaaataaatgaaagtgcaacatatcaaactttgcaggatacaactaaagcagtacttggaggtatatctctgtcctctgaatcccccagcatttttcatgttccttttgcaaaacactaaactttctattttaaaaccattatttgtgcatctttcttcttccttagattgtgggtggaaacaatcttccttatttttctatgctagcatctggctcagtgctcagtaaaagttatttgaataaatgaattactggacagaacaagctacttagctaaatggaattgaggccaaaccagttcctgcatggagttgggaagtgtttttagtgatcttatgcaaggtacctgggccgttacacaatgggggccactgcacaggcacaattctgagcaactgcctagtttgtctcacagaagagcctccctggatatatagctgccaaaagtagcatttgccaataaacaatgaaagtagagaaaattcaacatacacaattccatatctctgtccagtttggtaaagataacttctttagttaattaaatcagatctggcctctggcctcctcttattcccctgcctcaactctccaacttttcccatgcatctctctttcccctgctctattcatagaaccataaaacctcaattcagaaggacaataaaggtcatctagtgtggcttcccacttaaaacctaaataccctatagttaacatggggttgagctataagtttttctcagaaccaactcaacttggccaggtgcagtaggttcatgcctgtaatcccagcactttgggaggctgaggtgggcctggaggagtacgagaccagtgtgggcaacatagtgagaccctctctctacaaaaaataaaaaattagcca

SEQ ID NO: 54403 - DNA, 1026 bp, Homo sapiens
caccaccatgcccagctaatttttgtatttttagtagagagggggtttcaccatgttggccaggctggtcttgaactcctgacctcatgatccacccacctcagcctcccaaagtgctgggattacaggcctgagctactgcgcccagcctcctctccccttctgaagctttctctagagtgggttaaaaagagaaagcccctttttaaagaggtaaacgccacagttgggaagttggagtagatttggattgtgaaactggattagatccttagcacatttatatatatatttttgcaatttggggccagctaattagcttgaatcttggtttcctcatctttaaaatggggctaacatctgccttatttactttataggcttgttgttaggagtaaatgaaacataacgtaaaagcactttgtcgtctttatttgcaatacaacagaggttgattctggcatctgagggcataactgggaacttagatctatgcagaccaaaaaccaaaaatagaatcaccattgcacagagcctagaataaaagcattactagctgcctacccatccttccctctccacagtaaatttttcccaggacctttgcattgagctacttgctgaatattcttattctcagatgattcagacctgctttctttaaaatgcctcatatgtctaacacgtaactaccactgtatttagaaacctctgagcagagccacggaatctggaactgcttcccgcagccaagctccataggtacacgacacaactgccagctgcttttcattgcaaatcagcttgatccaattgcactgacagcgacaggctgaatgtaggccagcagcaggggttcatactggctgaatgtaagccagctcatatacttgaagaggactagctaggacaagtcacttcaccacttagcataattacctttaatgggtttagggctgtctacctggaggaagtgaacgacttacgagattctatgaacctattttcctcttcccagtccacact

SEQ ID NO: 54404 - DNA, 1091 bp, Homo sapiens
gagggagatttcaagggccatccctttgtttagatgactgggtggatgaagtgtcattcactaagatagagatcactggaaagaaagtaccagaaggagggcagaagctggtttgtggatatgtggatgaggacatccacctggaacctgttgagttagaggtgacagtgggacatccaggtaagacaagcggtggacagatgatagcttagaccagagatgagacatctagattcaggatagagatgtagaagtcatcagaaaaggctgggaaaaaatgagatcactcaggtgagagagtgtggactgggaagaggaaaataggttcatagaatctcgtaagtcgttcacttcctccaggtagacagccctaaacccattaaaggtaattatgctaagtggtgaagtgacttgtcctagctagtcctcttcaagtatatgagctggcttacattcagccagtatgaacccctgctgctggcctacattcagcctgtcgctgtcagtgcaattggatcaagctgatttgcaatgaaaagcagctggcagttgtgtcgtgtacctatggagcttggctgcgggaagcagttccagattccgtggctctgctcagaggtttctaaatacagtggtagttacgtgttagacatatgaggcattttaaagaaagcaggtctgaatcatctgagaataagaatattcagcaagtagctcaatgcaaaggtcctgggaaaaatttactgtggagagggaaggatgggtaggcagctagtaatgcttttattctaggctctgtgcaatggtgattctatttttggtttttggtctgcatagatctaagttcccagttatgccctcagatgccagaatcaacctctgttgtattgcaaataaagacgacaaagtgcttttacgttatgtttcatttactcctaacaacaagcctataaagtaaataaggcagatgttagccccattttaaagatgaggaaaccaagattcaagctaattagctggccccaaattgcaaaaatatatatataaatgtgctaaggatctaatccagtttcacaatccaaatctactccaac

SEQ ID NO: 54405 - DNA, 1050 bp, Homo sapiens
taatatgtgattcgacaatgtgtttaaagactgacttctcaggtatgtgatgagattggcaagagtttatgaggcagggcgtatgaagtccttggcccagttcctggcagcagactgcactcaggaggtagctcttatgattaggctgttagtgaagctgatagaccatcagtaaagttcttcactgatgttaatagagcatctgcctgggggccaaggaaatgaggacagaaaaaccaccatttcttgagcacttactctgtgccaggcttgtacctatttagtgtagatacaatatagatcaaaacaatacactttgagggagggaaaacaatggcagctgaccccaaaatagctcctctactgtaccaattttgtcatggtacccagaactagtcacaactttgggctgaggtcattatctagaatagtaacatcaggccctatcaaccacttttaccttgaagtgattacatggatcagattaactagccaccccaatggttctgaagtctgatagcctagggtcaaagtctggctcaaccactaactagctgtgtggctttgggtaaggtatttaacctctctgtgcttcaagttttccacctgtaccttagagatgagagtggtaactatctctcagggtttatgtgagctaaagcgagacaatgcatgtaagttctttatcaggcataaatgttatttgtaaagttgaattaattagtgagtcaacaataagaactttgaagcacagatcacaggactgataagtttctaaaagaaagcaaaaggccaaaaatattatggtgcacagaaaaagtcaggtgccaagtagaagccataagtaccttggagaggaagggaaagcctttcttttcttcctttctttcttccttccttcctttctctctctttctttctttctttctttgttttttagacggagtttcgctcttttgctcatgctggagtgaagtggcataatctcagctcactgcaacctccgtcccccgtgttcaagcaattctcctgcctcagcctcccgagtag

SEQ ID NO: 54406 - DNA, 1035 bp, Homo sapiens
caatctcggctcactgcgacctccacctcccgggttcaagcaattctcctgcctcagcctcctgagtagctgggaatacaggtgtgtaccaccatgcctggctaatttttgtatttttttaagtagagatggggtttcaccatgttggccaggctggtcttgaactcctgacctcaaatgatccacccgcctcagcctcccaaagtgctaagattacaggcatgagccaccacacctggcctcttaatatggtttaatttggtgtaataggtataaaataggtataatacagtgtagtttttctcttacagtttaatttttataaaattcgacttaaactcatatttctaagatcatttatattacataaaatcaggaacacacatctgtgattatatttttcatttagtcatttcatcattcattcagcaaaaagatttattagcctttcttcctatgtgccaggcactggggacatagaagtgggcatgaaagataatgttcttactcttatagaactgcaattctagggggagagacagacaataaacaagtcaaccaataaagaagcaagagaagtttagatagggagaagtggtgagaagattggaaagccaagccatgtaatcagaataaactggggaaagaagggcctcctattttagtatgaatggtccaaagaggtgttatttgagctgagcctaaatgaaatactgcaaggtgaacagtgggaacagttgtttaaaaaaaaataaactgaaacatgttttggaaaaaacccaacttaagcctttgcaggttttcacagtggaggaactttccatcagtacgctgcagggtgatgaaggctagggagccaaaaatgagatgggtcaggtaaggagttcaaacaaaggggcaagcaaaacagatgtgggggaggacagaatcagaaaattcacagagtaagaaactggaaaacaaactagtgagggaaatgtttgctaatcaagttagcaaggacttaaaaacatactaaatcccttgcaattacgg

SEQ ID NO: 54407 - DNA, 1564 bp, Homo sapiens
cacattgcctggcagaggatactgactcactaaatatttgtggactgattaaaagggtattatttattcaattactctgtcaacaaatatttatttactcttccagtaaatatttgttaagctcctactgtgtgccatggattgtgctaagcccaggagggagatatgatggtaaaatgatagacattgttcctaacctcatggactttacaattgtatcttggtggaagactgatactgtattaaaagtgttttagagacagatagaatggaactgtgagggattaaagaggaaggcatgtggtgagcctgcaagcatattcagaagtagaactgagccttggcaaatgattgcctgtgatagataaatgagtagaggtatcaaaagtgacttcagatcctggagtaagcaacttggttaatggtagaaccacttaattttttttcttgcagatcattatgcaatagaggccaagattatggatccaccatggtgagggtcagacatctgttggccatggttcaaactatgggtctataatgtatccatcgtataccttggggcaaaggcaatgatttacaatgctggtgcagggcaaaatggtgacttgaaaggatttttatttggtgcccattacctgttgttctgattaccttttcttcctcttgcccatgttcctccctttattccactgaccctcatatccttttcaggtatctgataactcatccctactaaggtgattactgatcattgtggctgtaaggtggagacgcctttttcccacctcccaaacccttacatacccggaatgtttgccttttaagaggaatagaatggatattaggggcataaggatgggtcacagagccagttgttatgattgtaatttcttggtgaaggagtctgcccttatgcctgtgccagttagacctatcctattgctttctatttccctatattctctaccttgcccttttccagtatttttttgtactctgtacatgttagttgtctttattctgaatcctagctctgtgatcttgaaaagtttacttaacatttatcgacctccatttcttcaactataattgggagatacatcaatgtcagtggattcagtgtcttcacatggcagtttctcaggattagttgcttttccccaccacacacttattggatccattgctgagagttctagactcaggaaatcactctcaggtatactcagcttttatagacaagcttaatggtaccacctcattggatttgagaggcatttctctcaactctgttccctctcttacttgcccagtttcatttgtctcaccaaattgtaagtgtataccactggacacaataattattaaggaagagtgtacctgggtctgcacaaatccattcccactgggatcaaagcaattcaataagtctctgcactgattaccaatcacaaatgtccttgtatatgaagactaatccttagtttgaagactaatccttagtttgaagactacacatgtgaatcaagcaaagtaacccaaatcattatgtgtatgaata

SEQ ID NO: 54408 - DNA, 1036 bp, Homo sapiens
ccccacatatagatagataaaagtggaagtgttgtggctgcagtagccggatagcagtgggggtgaagggcagggattggcaagtttaggctccccctcactcccctcctgcaatacaccccatagcctctgagccatgcatattggtcacaatgggaaatgtctggttccctaagacccttccagctctaacattttttacttaataattttattattctataattactctatatttttcgcagtcactgagaaacctcaaataccttaccttaccacaaaaaaagttatttttctgggccttaaaaattcaatcaccagataatgtgtctaaagaatttaaaaaacattcatgttcctctgctttgatatcaattttcaaacatttcaatctgtttccataggtcagttgaagttatgttacaacttgccttattaaccttaatttattgtctggttaccaaatgctatggagtatgatttggcactgtgtcttaataaacaggtcacacctgggagctagtgagacctctcccatctgagaagaaggagctacaacagatggtaaaacgactgaaaaccaggtggggtcactgtttaatgaccatctgaattaagtttggttaatttggcgtgtccctaattatccctagcaactggaccctctactccattttataagtttggatttatatcttttatgtaaactatcaaaacaagtccatctgtgatcctgaagctgtatttgccttaaatctaaccacaggggaaatcctaatttatttggttctagctatgaggagtccttaaacactgggtttttacagtgctctgcaatttactttttctcaggttgtcacctatgatatgagcattgcccttcattcttctccaagtttaatgaaaagacacttagcataatttccaaaactcagacatgtcaaaacttcaacctatgtgcatccctttagaagattttctcatgaaatctgtgtgcagcagtgagttggcttccagagatgtttagaaaattcag

SEQ ID NO: 54409 - DNA, 1024 bp, Homo sapiens
gaaacggggtcttgctttgttgcccaggctggtctcaaacgcctgggcttaagcagtcctcccaccttggcctcgcaaagtgctgggattacaggtgtgagccactgcgcccagccaatttgtgagttttctctctctgaaataaaagaaacaattctattcacccatcaacttcattgcaaagttttcttcttcctaacttcttaacagctcatgcttatacctcttctctgtactcactctcttggtgacctcatatggtcccatggccttaattatttatatgctgatgactcccaaatatatttcaaacctggtcagtcatctcttctgaacctcagcgcttattcatcatatctgcatcaatatatagtaagcatcttaaacttaaaatgacaattgttgctctcctgattgtctggccaaatctgtgcctacaataggtcaatggcaactccattcttcccactgttcagccccccacaccttggtgtcattcttgattcctttttctcacaaccacatccagtccatcagtaaatcctataggctccatttcaaaatgtaaaataattcaaccatttctcatcaccactaccaccagcatcatctcccacctaggaaaatgtaacaactggtctccctctgcttttgcctttcctcccttcacctccagcagccgaagtgatcctgtaaatagtaagtcagatcccagtcaattccttaacccaaagttatcaatggcttttctttttactcagagaaaaacccctagtccttactatggcttaaaataccatataaaatctgtgcccatgatgaaaatgtcctaatattgacaatggtgacaattgtacaaatcagttaatatagtaaaacccattgaataaaatatttagggtgtgtacagaatgtgaattatatcaataaagctgttataaaaatctgatccctacagcaatcttatcttacactgttccccccatgctcatttctctctagccatattggacttccttttgcc

SEQ ID NO: 54410 - DNA, 1034 bp, Homo sapiens
gttaactgctgtgcagctctcatctcattgtgcacacagcatggaaatctttctcaaaactgtttcactcaggtcagggtaacaagtttggtagagcaaaccggtgaatgatactctcatgcaaaactgaacagatatgcaaacatatgtatgtggttcagcttgggttgcatgggttcagactttgcaatgtgtagtttaataggtaattacccttaacgcttttgcagggaacccaactaccttgaagaaactttaatttttttgtgcttctaatttgtctccatgtcacatagccaaaatatagaatgttcaagtgttttctcctcaaaagtataattactagaatatactggtttttaaaataagtttatttttataaatttgtttccagaatccacattcatctcaatggaaggatcctgccttaagtcaacttatttgtttttgccgggaaagtcgctacatggatcaatgggttccagtgattaatctccctgaacggtgatggcatctgaatgaaaataactgaaccaaattgcactgaagtttttgaaatacctttgtagttactcaagcagttactccctacactgatgcaaggattacagaaactgatgccaaggggctgagtgagttcaactacatgttctgggggcccggagatagatgactttgcagatggaaagaggtgaaaatgaagaaggaagctgtgttgaaacagaaaaataagtcaaaaggaacaaaaattacaaagaaccatgcaggaaggaaaactatgtattaatttagaatggttgagttacattaaaataaaccaaatatgttaaagtttaagtgtgcagccatagtttgggtatttttggtttatatgccctcaagtaaaagaaaagccgaaagggttaatcatatttgaaaaccatattttattgtattttgatgagatattaaattctcaaagttttattataaattctactaagttattttatgacatgaaaagttatttatgctataaattttttgaaacacaa

SEQ ID NO: 54411 - DNA, 1017 bp, Homo sapiens
ttaaacacattttactgacgctttgctgtataccaggtctataatcagaaagcaggtgatttaaaggagttggagttgtcaggaaaaagggatggttagagattcagcttgcaaaatttgaataattaaagataaatgatattagcgccgtaataagattatacacaaaatgttgaggaggcagagaggacagagtgactaaagttacctaccagtttttactgaagagagatcattttatgttggtcttagtgagttttatttccctagttacagagggcaaagggatattgctagcagctgcattagtttgtgcaaaggtgtggaggcctgaaagaccacaaccaggtcagtaaaaacagagtgattgtgtgtgtgcctctggtgtagaaagataagggagcagcggggctgaaaaggaaggtggggattaggcccaggctgtgaaggcattctgtgttacccttatgcatttgggcttccttctgtaaacttcaggcagatagcggagcccctgaaggaagtggcatgatcagtgttctaggaaagtaacaccggggtctgtgaaagatgattattgggatgagcagctgtaggtgacaaggccagttaggaagtgactaagaatccaaggttgtgcattttgcagaaccatttttacagagcaaacagggaagtggccaggcaaggttttttgctgcccctagtctcttcctaaagctttgtgctttccagctgaacatttctatggttctgaggggtctgcttaaattctatcagatggaatagatggcagagaagaaaagcaaaagaaaagtcttcagtagaacaatcatttttagttagaacagtcacttgataattaactccaacaatcttgtaggcatagaccaaagaaagcaaaaatgcttatggaggcaaggcctagccttgcttttgtccacaggaattttcttatcctatttctcaaaccgtcccccttatggctcccctgccatctgtctttcatcctagtca

SEQ ID NO: 54412 - DNA, 1351 bp, Homo sapiens
aaaaaaaccaaaactttataccaatgatttagtaattttgaggcatagggtagcttacgtagtggaggatgtgccaaatattctcttcaaatgccaccttctcaatttataactaaaatagtgttatctgactaattcctctgaattttgatgtaagatctatataggcccccaaaatgatcgtagtacatgccagtcatttctcagtgaaataaatacaataccagagtacattatgggttttattgctttcttttatggtagacctgttaatggggaaaaaatacatcaaatcaaatagaatcttatatctgtatgttaaaatagagcacttacctgaagtcagtggcctggatcatagccctggatcatttcccagtctgtcctgtgctgtgtgaccttggacaaggcgcttcatctctctgggcctctatttctccatttgtaaaacaagtggctgcagtagatgatggctgagagcccttcctgttcccagatgccttggtccaaagaccccacccctctgctggtcctgccaacgtgttggtgctataagctgcttcagatataaaattggtttatctataatgtttgttcatttaatagcttctaaaaggcctttttgttatacagtgctttttttctagttttatggacttggttactgtaataatgtcttgtttttagccatgtaactacaaacagatattctcttgatgtcttagtaaatttgcatttgatatatcattgatgagattttgttgttatgtaatattctttggctacgcatctgtccagcatcttattaaccataatactgtgatcattatttggaaatatgtcctatggaaagaataaaagcatgtacttcacagctagcatgttcacagatttgaaagaagtttcattaaaagcaccattgctttctgtactgcgtcagtgcctcattgtatcatcctacttgtgttttgctcaataaatgaataaaagaccatttctcttcccctttcccttccttcactcagttaacattttctgagcacctcctgagagcaagctgctgagagtcaggctcccatgacacccaaatgaataagacttacaccagcccatgtcacagtctgagcaaggaggatgggaatgacagatatgtaaactaatcatcgtagtatcatgtggcaagtgctataactcaggtgaacacagagtgctgtgagagcccagaggaaagagggactagctccacatcaacaaagacctctaaaaaggcttccaagggtggtgatgtttgggctgagtgagagaagaacagtatgcgttggaatgaggtcctgggaggagatgagaggag

SEQ ID NO: 54413 - DNA, 1557 bp, Homo sapiens
attcaaatacgctctgaaagtgtgcaagtaaaatattttctttcttgtttgtttgatttatctccatgtcaggtttcgaaggcatcagcggacctcatgtcctactgtgaggaacatgccaggagtgaccctttgctgataggaataccaacttcagaaaaccctttcaaggataaaaaaacttgcatcatcttatagtggaatagagaaacagctcctcgcctcttcccaacaacgcaaattatgagcagctccttgaagagatttaccttcagcttatttggtaaccactgctaataactaaaatgttctcagcttggaataatggactctgaagtctctattttccaagttgtcctttctcttaaaataccctttactgatttaatacagaataacaatcttattttccacttggtaactatggctttatgttgggttactgtttaaggaaagttgatctgggcctttttaaaaacataattatatactttagaaatacaagggattccgatatgtcaggacctaaatggcctaagcacctgtcaaattaaaattccaaaattcattgaaatcctaaagccttgatattatattctttataaggcgtgtgccagcctgtatagtatataagagagaggggtgtttgtgtgtatatatatatgcctttgtgtatacacttatcaaagctattttcttatgaaaacgtccctctctccataccatcagtttctcagttccagaagttatacctttattttgagctgtgtataggtagaataaaaaattcctttcatatcgttattgtacaaaaagtaaagagtatcctaaagattgtattcattgtaatcaagtaatgcaatcatctctcctctcttgaaatcttgctggacctcttaggctacaataaactgtaccaaactaaactgacagtccttcgataatatgaaacattaatttacaaggacccgttagggcttcaatgatgctgagtctggaaaaggggaggagacccttgggaggactccaggcagctgtgctcccagggctcatgttctctactggattagggataggcacctctgaaatctccaccctgatgattggaatgaaacggagtgaacatgagcccagctgagagaggagcaggaatgtgtgaaaaacagctgctctccttgtcccagctttgtgattgagccctctgtcttgctctctctgccttccctgtgtctttcttctcttaccagagcatctgtttgcagaggtaacattaccttccccagccacaggtatgtggaatacggtgaggaaaaaaaaaattaaaaaaaaaatgcaagctgtcaggatgcttaagctcttttcagacatctgcagtttcatccctaccttgttcacataccatccaagaggcacataggctacccaagagagccttggattcagtggtacactccttgggcccaagggctttagcagctggatatggggttccttgattttcctctgggcccaaatatagccctcacactcttggaatttccaggtatgggggtagcc

SEQ ID NO: 54414 - DNA, 1758 bp, Homo sapiens
ctgcctggctccagtccattgaggaatgcaaagtgctgggtgtacttcacacagtgtgtaagaggatgcagatactaaacactcggaaaccaagtatcctttgtgtttattacactcacatacttattttatctgatgctctttaacagttctttgagataggaaagtattgttatccccatttttccaatgagaaagctgaggcttaaatacgttatcagtcctctcccaaggccttagatctgggaagtggcaggacgggagtgagcccagatgcccccggcgaatccctgaatgtgtccctggaactaaatatccaaggcatagtgtaaaggcagtgccacaagttcaaatagagggcctggcaggtgtaccagcaaatgcttgaaggggcagctgctgctcagatccagcccagttttataggattttctgatttttccagaagtcttccttttaaaaggaaatctctccatttttcaaacgttgacattcaatttaaagttaaaacacacacacacaatggagttaacactgtatggggcccaaccaaacacatctgcagcctggatttagcctgcaggctttgatataaataagaactgctcatgaaaatagaggaactattcttaagaacctaactctgcctactcagtaaggccacattagatagctgttgctacctggtcacattaccttgaaattcttctgttgtttctggaatctttttcatttcccaccaagcacatgtttttcatcttgttagtgagcctaggggccggcatttagtaaacatttgtatgtgcaagggaaggtgcttctgtttctcccctgacaaccctatgaggtctgcattgtagtccctcttttacagaagaagaggcagataaagagctagagaaagacattgaaagttgaaggcaagaccagagagtaagtgggagccagtggcttttttttttcttttaacctgctcttttattacagccacatgggtgtgtttgctcatgaaagttggcttcactccagtgattcaattactggccaggccataatggcttgtgattcagaccctggggcttcctggtgccttcctcccagagtgtgctctgtgacactctttccatccccaccctgctctccctgcttcaggcccctcttgacaaagatgaaaatacccatatttccctaatggaccatcatgttcctaggaatttctaggaacctgagaattcagatgaaacacagcattaaaaccaatgcgaagtatttgaatagctaaatactacatgtgtttattcaaatctgttacccatatgcaaaaatgaaagcaaggctgcagaagtgatagccagagtgttatccgactggcagtctgcacaggcatgcacaggccttggcccttctgggtgggatagaatacttggtggctcaagatctgcagatgctaacttcagtccttgtctaggagccgaaactgtcttgtttagcttgcatgcatgagaagggaggtgttacacaaacacaaggcaatcagcaagccccctactttaggtcaccgcgtgtcagtcacccctgattaagaaccacatagtgggccaggcgtggtggctcatgcctgtaatcccagcactttgggaggccaaggcaggcggatcaccagaggtcaggagttcgagaccagcctggtcaacgtggtaaaaccctatctctactaaaaatacaaaaattagccaggcttggtggcaggtgcctgac

SEQ ID NO: 54415 - DNA, 1052 bp, Homo sapiens
ctttgcagtaagagggaaggaaactcagatcagaaaatgggctgattccagtcacagtcagctctgcaccatgcacactaaactgggctgtgcagtgtgtggcttgggagcctgtgcagttgcaagtggtgctaagttttgcttttcctttcccacgccctccctcgggtaagccacaccagctgctcagatcctccaaggttcagcttcccatgtattgcccttggccatgataaagcgcttaatcactcaggcctggaccaaatggaggggcccaccccaagcacaactgccaggagggcagtagctatcactggtcacccctgcggaaacttgctgcccctacaaaggccttgagatgagtggagagagcctcgtctgagggtcaggaacccggctcctttccctagtcctgggggaccttgggcaagtcattaaatctccttttgcctcagtttcctcttatgctagccagacaaagtgatgaggtgtgataatagacatgaaagagcttcaaaagcaaaggcagtgttatacaaagaaaacaagcagtgtgaacattattagctgtagtgagctatgggacctgccactcgattcctgaactgacttccctcccaatggagtgttttgttctttcttgatttggaggcagagcccctttctttgcagtatttaaagtacttagtcccctcttttaaaataagaaacccaagggcctgaaaggttgaatggtctgtctcttttccccaccttccagatcccatgggaagtcagggaacaaggccaagggttaggctggactttctgatttcatgttctaggtgctaagcattaaacaggcctctcttgataataatagtcgctttatactgggggtcccccgatagtcagttcttttgagaacataggatgtgggacaatattcctcacgtacacttcatatagcatcttaagtaactttaaacattctcctttatgactgcatttttttcctctagatgtctgtcattcagaatagtgaacacttaggcatagacatagaatctaaa

SEQ ID NO: 54416 - DNA, 1034 bp, Homo sapiens
ctccctaggtaagttatttagcttcctgtgcttcacttcccccatctgtgtagtggggaaaatatagcactcttgcatagggtgactgtgaggggtaaattagtgcgtctaaaggacctggaacaccgttgtgcacatacagaagtagtcagtgttctaaatgtagcagaaggagtcaaaacatttaccactgtggggtcagatcacagccaaaatgctgtttccccagtcttcagaaaacctatcaaagaagaagcatgccctcaccctcctttcctctagcactctctctagctgccctgtgctctctctgcctctcaccatctgcttgtactagatagcagcccagacctgggctcaggtctaggcagtaggtctctgccctgcccttgagtcaggaataacacacactcccgctgggacacaggacagctatcagggttagccacacactgtgggtggccccggcagaatctgcaaaaagaacattctggtgagaaaggaactcaagtttcctgcatttgagcaaggcagctgcctgtgcaaaccgttggccctagatttccagaaggcaaaactatcttcaagcattgcacactcactgaacttgccactgccccatttcacctgagactatcctccaaggagaatgggtgctgtatgaggggccttacgattctgcaggctcatcttctgggctgatctctcagtacacagcctgcctgggctatttgttggaaagtcctgcaacaggcagataacatttggttgggtttttctctttcccctcccctgtgtgttctgaagttggtcctgcaatgactcccaggaaggtttgggggaagtccactggggagaaggaaagaaattgcagaaatttacaaattttcaaaattgactttaggtattgtttcatgttgccctttttggtttttttcctataaattttaagaatttcaaaatgaaaaattaaaattataaaaatacactaaccctctgtatgggcaagggtggttacttgtgatatgtttatt

SEQ ID NO: 54417 - DNA, 1048 bp, Homo sapiens
tgtaaatattttccggcccattgtggagttctagtttcacagtggctttcctggctgggttaggtttaaattaagcaggtcatttggtcttcagatatctgaactcactatgtctggtttatgcccagctctgatctgctctggtttgtaggagtaagaacataactcttccctcaaccctgaagttcatctgtcagatattttgagtactcatgagtacatttctaacttacaagtacactgctttgacgcaggctcttcctttgaagatgtagctcatgaacaccactttcaaaaagctatctctgatcccaggacaagatagagcccctattctgtgattttccaacgtagctgtcccaatacttttcatcagttgtgtgatgtcagcctgccctctgtcttctgtctctatatgggacctaccacatagtaggcgttcaataaacttaaattgagtgaagatcataccggtcattgtgatcaactctctgcggatatcaccttgagggagaggatttcagaacaggaagaatctttggggcctgagcatttgggtgaatggtattaccattttagagatggcgaatgccacaggaggaaggattttgacaggcatacagggtgggatccagagatttctacatattaagtgtgttgttgctggggtttttttgtttttgtttgttttaattgacagattctcactctgttgcccagcctagagtgcaatggtgcaatcttggctcaccacaacctccgcctcctaggttcaagcgattctcttgcctcagcctcccaagtagctgggactacagacgcctgccaccacgcccagctaatttttgtatttttagtcatgatggagttttaccatattggccaggctggtctcgacctcctgacctcaagtgatttgcccaccttggcctcccaaagtgctgggattacaggcatgagccaccatgcccagtcccatttctgttgttttaaaagccaaggtgttgctgtgttgcccagaatggaatgcagtgatacaatcatactt

SEQ ID NO: 54418 - DNA, 1062 bp, Homo sapiens
atttttgtatctgattgacctttgattggtagccaccaaactctggaaagccaggaatttctttcttgatctgtaaccaaacttccaaatgcccagaacttccactcttcaaaggaagcatattacaaacagaaaactccttcgaaaagtgaattgtagtccaccctttaggttctctcctttccctgcccccacaaaaaggaaagttctttatctctgccctctgcctttctctccctgccccctcatgcagactaacagtctcttgttctgatatagaatgttctgtaattatttgtcctctgaagattaggataataaaacatttcagccaccctcttttgggttcccactttgccccagtgaatagaactgtgccccaccatccttctcctcatagccagcagcctcaagtcccacaatagctctgccttggtacagggagccaacattgtttgcatagcatacgttcctggacaattagaagatccagtttaaccttcagagcatccccatcagtttgtgggtgtttgttccgggaagaggaggagagatggtgacttttgtggtccacacatgatgctacccacacacaagttcaaatctttagagatgagctgaaaattgtgttgctaaagttcacatgtaaaatcagactttttaggtacttcagtctttctgtccagaagcagatagcattaatatttgcttcttataacactacttgcccacctcactctcattaagtgaaagcttttttaaaatagcccaatttcatgtaaaattaatattcattaatcaagatactgtaatagcacacctttctgaaaatacattctggttatgattggtgtctgatgagggaggctttaaaactcttactccaaagatgatacagtcttgggccatcgaacactcaatagattttttatgggctaggcgcggtggctcacgcctgtaatcccagcacttccagaggctgaggcgggcagatcacttgaggtcaggagttcgagatcagcctggccaatatggtgaaaccccatctccactaaaaatata

SEQ ID NO: 54419 - DNA, 1042 bp, Homo sapiens
cccccgcttcagttctggctggcctgcccaccactccttactttatgaagtaaatttcctccagtcgcaggacttgtcatgggtgatgttcactgtagggcatgaattgaaactcagcaagtacagattgagaatcgcttatctgaaatgcttggatccagaagtgtttcagatttcaggttttttttttttcaggttttggaatatttacattatatacttaccagttgagcatcccaaatttgaaatgcgtcagtaagcatttcatttgagtgttatgtcagagcccaaaaagtttcagattttggaggattttggattttcagatttgggatgctcaacttgtatttgaaaacaagaacttaaaaaaaaattctttcaacataattaccaaacacccactctatattcagcagtgttccatgtgctgggcattgaaaggttaagtaagacatgggtcctgctgttgtggagctaagtagggaagagggcacatggacagaccattgtagtatgacaaagtgaatgcagtggtgacactgtaggaagcaaagggaggccaataattcagcgtagcagtcacctggaaaggttactggaagccataatacaggtcagattcgagccacctttccctgccttgagatttttgtaaggacacagggacataaattggcacttagtgtctaacagtgtctggcaatggatgatatcccatattatttgtagctcagattagtggaggaattagctaagaagtatagagagaatgttgctaaaataaagtaatgataccttagtcaactgtcagttactttaaggaaagaaattaaagtatatgaaatcaattagaacaaaaatagttcattgtttccaacttatgtgattggggcgaggtgttgaaaagaagtattaactagctcatgtctgggcccaacaggaaagaacaccatgactcattagtgatagctgccatgagtgctgatccattagggatgtctaccgtgagtgcaagaggaaaagaggcaacctccatgccaca

SEQ ID NO: 54420 - DNA, 2072 bp, Homo sapiens
cctgcacattttcaaagcaagaataataatcgcacccccattataggattgtttcaagtcaaggatgaagcgagttggtgtacatgaaactcttgaagcagagtccttaatacatattagctggtattgttattgtggattctctgtttatcttcccctcctatttgactgcaaggatcgagacgtgtcctccttgcttactgtcatgtccccggcatctggcacagtgccttactcaggaggtgcccagtcaatgtttgttgaataactgaagaaagtatcttgctgaggatcaaatttaggccaagtctgaatcagaatacgagttctaacactaaggttcagtatttccacacagttctacattagctttgactttaggcaagtcgcttcatttctctgtgccttggtttctttgccttgaacacgatccatcaggtttttcctggtcatgagcaacgtgtgtcttaaagctaaagacacacatcacccgtccatcagccttttcgggcaacccatgtttgtgctccactggccactaggtgtcgtggttggtcaaatatcagagaaagcaaaaaataaataaaaataaaaataaattgaactgattgacctaccaacctaccaaatgatgggagtgagcttatacagttattggaagctagttacctctggatgagttggctgagttgccttggaaactcagggagttgcccaggatttgcatgcgtggactttgaagcaaagcatagattagagcccacagctgtactcacaccagctagcaccttggactcactggaacgtcacagggccttggtttcagtaatgtaatgcatgtaacatgctcagcacttcgccacagtgaaggaagagcactacaaagttagtggttatgagggctacttctggtatttgatactgtaaaatgctgcttttctgttccttgccacgccaactgctaaagctttgaaggctttctgccttgctccctgctttacaaagccaaatttttaaatagccccttaaacagtagagtggacagggtatcagtatcaggttaaaagggcagcctagaatatttggagggacaccagaactccttggaatgtcactgtggagcttagtcaacacaaagcagagtgttttatacatgactgggacccagagtggagggaagtgagtgagcattgttgaaaaatggccttcactgaaattgctcaagtaagggttttctttgttacatggactgtcatttagatctaggtgccttctttttaaaataatttggggaagcttctaggaataacaatgactagtatttattgcacacttactatgtataaggtattatacaaaacatcatacttgcatgatttcatttaactctcacagcaactctttgaggtacatatagttcttatgtccattttgtagatgaggaaattgaggtgcaccaagattataataattacagccaacagatattcgcaggtcacacagggaatgggtgaaagagtccgaacacaaacccaggcctacctgattccagaattcgttttcttaatggctacactgtattgtctcccacagtactttggatgcagttaggcacttgaccagtgtttactgaggtgaatagttctcagactatagttagccaacacagagaagactgcctacgcaggaaccatagagatcttgacactcctcccacccaaagccacatgccctctggcctccattagtactgtgggatgtatatgctgttccatgtgctggatttcacccctaacttcttaaaacattttttattgttgtataatagttgtgcatatttgggggatacatgtggtattttgatcatgtatacaatgtataatgatcaaatcagggtaattgggctgtccatcacctcagacatttatcttttgtttgtgttgggaacattgcacatttttttagctgttttgaaatatacaataaattgttgttgactctaatttttctactgtactgtcagatactaaaacttattctttctccctaactgtattttgggaccccttaac

SEQ ID NO: 54421 - DNA, 1056 bp, Homo sapiens
gtttgtttgctgtccccgattacaatgtaaaggcctcaagtcaagaatgtaatatacttcattcaccactgcatctccagcacctacaaccatccctagcacatgatttacattcagtatacctctcaataataaataaattaatgtcattatttcttatcatgtaaggagatgatatggcaagagtcagaatacagatttatggtttggttgttaagaacaagtgatgctgacatccgtccatgcacatgggaagctagtggattcttttacattctagatgcagtataaagggtggatgttatggctgactgcatttatctgcaagtgggtaggctgggccacaatcctaatacaatctctgaccaggctagagagagctccttctcttcctagagatctgtatatgttctagatcttaaaactttttgcctttctcactgttagaggaaagtattcttctacaagttcaaattccatagccatctgaggggagtttagatagtaatggaaagaaatatatcctggaactccagggtagaaatatccaagccatgtccaggcagccaaaggagatttttcagcatgtgtcttttctggcagtccttgataatggccagccaagacactgggtatgctattgcttaagcatgttattacttagttctacatgcaaagtcaaataaaactgatgaacttggaggtgtgagcaagtctgccaagctccgagttgctccgagttgcttcttctccctctggtattgaacaggcctaggaagtgaccatctccttggaactggctggatttaaaagatgaagtcaaaacttgctttgttaaagtgtgtatttgaagattctttatactggtgcgtttttatcaggcctgggttgatagccttggctcctatcctttcaatgctattccagtgttttcctgtgtgtgtctttactgagtatctacgatataccaagtaccttactaggtcctggagagacaaaaatgagctagacacattattaaccttcagggattctgcaaacctgttgggggagaaa

SEQ ID NO: 54422 - DNA, 1043 bp, Homo sapiens
ttacaggcgtgagctactgcatctggcccagagagggactaaattttgttctctgttttgtctctaccaccttccacattgccaaacacatagtaggttcagagacactcacaagcagcaggatggtggaagagccaacaagctacaaaccctcttcctctacagttttctttggccttgctctgtggctgtctgtcattgtccctccagttctccttgggagacacagctatgctagatctttctcaaaagagccccatcctctctatctggggaccaccgtccaatttagtgttaggtcttaatttgtcccacaaggcactgggcatgttatggaaatagacacgaaacagctaacctcaactgccaagggttacataaatatcagtggggagacacagaatctgaaagtattgtataggctggggtattcagttttgtttattggtatatacatggaataaaaatatttctactggtaacatatttcaataaaatgttaaatcatccccacttttgaagatctcatggctcacaggctatactgtattaaattctgaattttggatgttttcatttcataatttgatccagattatttttctccctagttaacattaatcatttcctgtgaattttcctagtattaggaaacagatgtcccatatttttatctgagtttttcccaaatgctgaccaagactttagtacttgtgtgctgtgtgtgtgtctgtgttgtgtacacagagaatttttgagaaataagttttatctgaatttgcaaataaaagcatcacagatatagttacatatttatacagatttgtacatggttggaaacattcttagacattctgtttaatgtagtttagtatcgtttggctaatgcagacttccagcctaagaatgcattagaagtgtctcatgatagtatgcttgccaaagtaaggaatggtgtagcaaagagaatacagttagtgcaacctgtactttaatgctcttattttaattacattttttaaaaaactgttgtctcttaacta

SEQ ID NO: 54423 - DNA, 1028 bp, Homo sapiens
gcaaaagagtgcaggaatttgggggtcattcagaatgtcaccagtgtggggtttatgttggctcttcccaagttcattattcagagaacagcggaagaaagccacttgcacagcccgagagggatgcagactgcagtggaattaagtccagagttaaactgcacaagcacaacattctaggaggccagatttgtagtttaaaaaaaaaaaaaatcaaagtgcttgacttgaatgaccaaatacttagtatttgatatctaccgttttcttcttttggacaaaccacctaacaagttaaattcccaaacaattgaataggatttcacatcacaaagatcaaaatttttaagctttaaagaaatacatggaaatcaaagttcaccaagacttgcagatgatttattgcattttatttattaaagaggtaaaagggcagaactgatacccatctgtgttttctatttatgttatcactaatgttagaatttgaccagatctttgaactaagctgagtctgacttatttctcaaatgagtcaggattaagaatatcctatttttacacaatgattccaaagtcttatatataaaagatccagaaagattatgcttcaagaaaaggagaaaagacacaggagacaatttccagttgactgaactctctgaagctgaggtttgctaagagtccaaggtggaattcacagagtgacattggtctctgtggggtggtattcactgtcacactgggaaaatgtcagaggctgggagaacgactgtcccctgggagctaactctgtccactgagtgtgtcatgataaatgggtttcattcatgaaggaaacactgctcttctgaaaagcaccaatactggccaggcagccagaaaacccaaatatattggagactcctggcagaaggggcctgaactcccttctagtctcttccaaggagttgtcttaatattccacagtgttttctgtggctgctaggcccaaactgcatggaaccatacaacaaaagttgtgtggc

SEQ ID NO: 54424 - DNA, 1036 bp, Homo sapiens
gtatgtagtaaaatagtcgtactcgttgttattatttgagaaaggtacactcaagttcaggaattctttaacgaaccagagttagctaaaagaaaggtatggaaatgcaggcctcaagcagaaagcatcctgagtgtgccagtctcagcagggaatggttgtccttgaaaaggaaagactgggttatctgaatgtgcaatgtgaaaagagtatgtgtgtcgggcttttcacatacacagcattcagacactggggataatgtagtatatgtttagcctgacaaataaatgaatccaaataaatagatatgtttagcctgccaaataaatggatgtcttttgtcagtagggcatttattttcatcataggcacatagaaggcatggttttctaaatcggtcacatgttaaattgtgagcctgcatttcataagaattcaataacatcgatcataagaagggtatggagattaaacagaagagccagttttcaattattaaattctgaattttaattgtacccgtaggagaaagtattcttgtgagttcagcttcacattctcataccatttagtttccatgtgcatatttttgcatagctggagttagtgtatttattctctgttggtctgcctgcctttgcatctgaccttggttcatgttgcccttttcctgtgtcctcacactccacatcctttttcttgtaatggcaataaaggaaactcctgtgctgataagtggccattggttcaacttttcatccaaatactggatatttgggttgtttccagcgtttcacagatgagaacatatttgctataaaccttgtatccagagagcttagtcagcagcttattaaacaccttctggaatgggactctctgccaaggtttttgaagtgataccaactcattaaattaagagtcctgagaactggcattcaggatttcctgagacagcatcttattctttggcttattttttctcatacatttaatcagcagatatgtatggacgacctagtgagtgccacagagt

SEQ ID NO: 54425 - DNA, 1003 bp, Homo sapiens
tgtgctcctcctaacctcctttacctttaaacatccagtgtagtcttggtggctcaaacgaaaaggtctcctagacctttccagaacctccctccataatatgaagttacatttgtttattgagatattcaagaacatttattaaatactttttaaaactgttttcagtgtgtggtacatagaccctaggggtctccatgatcctttcaaggagttcacaaggtcaagtttaaaatcatattaagatattatttgacgttttcattgtgttgacatttggaatgatgttacaaaaacagaggtggataaaactgctaattaaacaaggcagtagtaatatcccttatcatcacacactcaaaaaaaccaaaatgccattttcacttaagaatgtccttgaagcagtaaaaattaagtctcataattttgagagcacatttaaaaaattctctgtgacataataaggaaactaaagctcttctgctggtaataaagtatgtctcaaggaaaaatgcttgtgtgattatttcaattgcaagttgaacctgccatcttttcacctgacactgcttttgcttgaaagaatgtctgacaagctctgattattcagacttggatatttggcagacattttctcaaaaaagaatagtctgtcacttcaagaaaaatgattatatttattgctaaaataataaaaattcaagccaaacttggaattttggaatacttgtatctgccaccatgagcttgaccacttccccatatttcgactttgctgatgagatcagggatgacgttaatgagtacattttcaatattgtataatgtaatgtgtcaacatttggaaaacctgtataattcagtgaaccaatatttttcagtgaacaatgtgtgatgttaaaaactctgcatgggttaaagttctgttccaatgcaagagagactaatcaattttaatatagcagaatacgggaagttcattgaaaggatttcagccagcctg

SEQ ID NO: 54426 - DNA, 1106 bp, Homo sapiens
ttatcatgtaggtgtaggttcttacgagaggggctttggggataggttcttcaccatcttaagtggttcttcctggtaaatatttagagaaatttttcttgtggctatttcttatgatgacccttgaaataattagaggatgctattcgtattcagcaactgcatttctacgggaaataagtccaagagcatgttctcttgatctaatttgataaagggcccagtttggaaagaagagtggccagagtcaggagcttgccatctggagctttggggacagaattatgggatgttacaacagaaaggggccatcgtcattatggagcctaacttctttttacaaatgaagaaatggatgcccagagatttgccaagttcacatagctaattggtggcagctccaggattcctgattccagctgcccattccagcaactatatccttgtcatgaagagtgtacttaagagcatctctgtgcaaaacgttctgcaatgaaggacaggttcagtctgtctggtgtcatagccaccagccacttgtgcctcttgagcatatgaaatatgactactgtaacttaggagttaaattttgctttatttagttttaattaaacttgttaatatatagctaccattttgggtagctcagcttttatagacatttaggaggaggaaaggccttatccttatctcctacctcattctcaccaagtgagaggccttcttttcgaatggctcctgtgcagctgctttgtgccaaaccaagagaatcactctaagtcttatctcctcccctcctacctctcaagatgaaagttagctcctctgtaaaattgacatgagtggagtagatggctcattgaggcctcttccattctgaagcattatgactttagacctggctctctagtgattatcagtgacctttagcagggcacatagtctgcccatacctcagtgtccttatctgtcagctgaaattaacacccgttctaccctctctcagattaggagaggctcaaagtagaaaatcaatgagatgagctccatttgcaacctttattttttaataatctatggtatctggaaatatttttggttttgat

SEQ ID NO: 54427 - DNA, 1083 bp, Homo sapiens
tgtatgctgctaggtaaaaacaaaaggaatgtccctgaaggaagaacgtcaccgcttccatttcgacacagtaacccacagggtaacagcacagcactctggggatgagggccacaggtacacaaggagcctccgcaaggccttgtcctggcaagtcgtgtttcatggaaagttttcttgagaaagctaaatctgaggattctgggacatgagtgttactcatggccagcgtcatcatacggagcctgggagcaaattgttttttcaagaggtgtatgtaggctattgaattttgactagaaatggctttagtggtcaacattaattttgctttatatccagcagcatttcttatttttatcagggatataagtgaaggaaaaattgtgagggaaggcaacctgtaaagttctcattcatagaaacgatttgtggccttgatttcctggatacaaataccatttaaaaaatttttagagaggttttgtttggattgaatttccaatccacatgtatttctccattcccccttgagaactagaagtcttttgtatggtaacactttccagaagcacctgaaaggagtcctttgggaatggccacaaactggataaaaatgaaaaatggaatctcaaaagtgcagcttggttttgaaactaactttttacaactttgattatgggaagtaactttgttgtgtgtctgttgttgacctggcattacaactccattagggcaatataattagttcattttacagaagacagtacaactcaagagagcttcagtaacttgtacaaggctgcagagccagaattgaaacctgtgcctgtttgagtacactacccctaggactaaagaaacacataactcaagtgttaattttctaatagctttaagagacgtgtttccttttactgtccacagaagattgtcctgataagcatataaaacatgaaagcatataaagcattgtaaagctcgagaatcagaatctacaagaggacagaaagtccagggaagagaaagtggaactgtttcctggcaggtaccatgtttataaaaagcccagcaatcacttat

SEQ ID NO: 54428 - DNA, 1119 bp, Homo sapiens
acaattcttccccttccagtgtggcccagggaagccaaaagattggacacccctggtttagagcttgagtttgcggtttcagtctcctgggcaaatcacctgacttctcagatcctgttttcccgtttgcaaaacagagataataacaccgtatttcaacagatttcagatgtcattgattagatgtgccggtattctatgtgccattattctatgtgccactattctatgtgccactaagaaaaaaaaaaagctgctgattaaattataatgcacatcagctgtaagagtgtgttagtttttctatggccgctataacaaattaccacaaatttagcagcctaacacaacaaatatgaattatctcacagttctgtacattgaaagtgagggtgggcttggctgatttctctcatctgggttttacaaggccacaatcaaggtgttggcctcttattgggaggctttgggaagaattcatttctaggctcatttaggttgtgggtagactccagttccctgcaattacaggatgagggcctccggctctttgctgcctcttagctgggaggcatcctcgactcctagagatctccctctggtccttgcccttgagcccatatcagaactagcaacattatgacaaatccttctcgtgcttgggatctctctgatgtttttttttgtttttgtttttgctgcatctctttgcctccagccagagaaaattctgtttttaagggctcctttgattagatcgggcccacctatagggtactctccatatattaaggtcagtaaccttaattgcataatgcaaagtcccttttgccatgtaatgtaatatattcacatgttgcagggattaagacacagacatccttggagctttctgcctaccatgaagaatcattccaattatcagggatcttaaaatgtgaacaaaatatgcttcttagaattgatgaaacaccatatttggcttaggaataaaacagctactgatatatttaaagtacttagggtgttactagtaagtgctcagatgttaactgttgttataattgacatcattatcatagtggtcacgtaatatccatcatctttaatatcaattaa

SEQ ID NO: 54429 - DNA, 1015 bp, Homo sapiens
attgagataacatcatcataccaagtttaaccagaatctcaggcaaattagaaaggtgtaacctttagactaggtgcctgagctgtgcctagactaatgaaatcttctgaattattagaccatggcctgcacattagaccatggggcttcatgtgggtatataaggtcatgattggctgtgcagataagttgtcatgggagggttggatgtctggccaagaagcagaaggaatggattgtgacttcttgacagggataccttgaactgttatacaggttgttcactgcacaaaagtgcctgggcaaggaggcaaatgggaggctcacatctgctaaacaaacaaaaccacatgcatcctggagtaggattgcctctgctaggagaaaagggaacttctttctgatgctatcaagcctgcaaaagtctaggtgtacatggaaggaatgcctttttttaacacacacaaaggcacaatatggctaccagcagctctgcttctcaaagcccctgtagccacagtagtcctctagatgccatcagctggcagagtctgtcacttaaccatttggtttatcatgtcaggctttattgggaaacatataaacttcatgaatgtcagtggaatgaaggaataaaaccatgttttctgtggtatgtcagcaaggtacatgtaaaaaagtaatactgattatatatgctaggaaacaaacattcagtggtacacattgcctatgatgagtttctttctcttcaattcattatttctgaggggtaggtaaagaccagcactttgggtgctgttgacattgtttattgctacttaaacaccagcatgctcagtattgcctaatacttgccagggtcaccagcacccgttgtgtagttggcctggtgcagggaatggagtagtagtaactcctgggaacgtggagagggattcatgttatttattgaccagccgtaggcctttttccttggggacaggatgcaagtaacagtggttgcaggagcctt

SEQ ID NO: 54430 - DNA, 1057 bp, Homo sapiens
actagcccagtggttcccaaacatagtcatacttgatgtcctagccctggaatatctgattccatatatctagggagggacctggggatctacatttgaacccttctggtgattttactgtggtttttcatctgatccatagtgacgaatatatggtttattagtgcttctcaaatttattgtgtatacggatctcctggggacctggttaaaaggtagattctgattcattaggtctagggtagggcctagattcttcatttctaacaagcaagacaccatttcttttcttacttggtttagaaagcaatattgaacacctccctctgtggtactaatgtgtcaagaaacctatcattggcattagaatatcaggttttaatattttatccccttgaaaattttctacatatttggagacaaaacaagtattgccaacagacctggggagaagggcctggacccggctcaacttggccttggctagcccgttgtttcctttactggacacgaccagatggccttcatcatcgtggctggaatctgcctctgcctctacttcctgtttctatgcttcatggtatttcaggtgtttcggaacatcagtgggaagcagtccagcctgccagctatgagcaaagtccggcggctacactatgaggtgggcagatttcttggctcgttctggaactggtgcttgcttgatctttccacttgatgtgtaaacacacacaccctggagatagaaagcctttactttgaaatacaaattgagagattctcatgtaggatctctgggcaaaattagaggccaaatcttactctgagaagcatctagctggcctaaatcttggtgttttctgtggtacaaatgtgtttccattttcagtaatgaataaacttgttcagccggttcttcagcttggtgatggaatgtaggttacatactagctgggagattggactatggcataattgggattttgttgggatgaggctttagtcaaagttctgtcccagaatcaaccctgtcctgtaattaaacagggtttagccc

SEQ ID NO: 54431 - DNA, 1071 bp, Homo sapiens
tttaagaagctgactgttccacagagccttagaggaccctgacaacacactgcagataaaaactcttgtagccctggcagacaagattcgtaagatgcgaggttctaatgaagattaaacagcctagaaaggtgttaggagatagaaggaaggtatctctgctttctacctaaaatttctggttctaccttgaatacagctgttttttgttgttgttgttgttgatgtttgttttaggttgggatagctgggtagacgccatgcctccagtatgcattgttactctgtacgtctaaagtgtacctttaagcattagctgcttacaattgatgttatggatccagggtaacagaattcagagccagtctattggaaatagtgaccctgcctcaaaccctctgctctttttccagactccagagcatgagggccgttactatgaatgtgatgtccttcctttcatggaaattgggtctgtggcccataagttttaccttttaaacatccggctgcctgtgaatgagaagaagaaaatcaatgtgggaattggggagataaaggatatccggttggtggtaagtgaatgtaattgatcttgacatgtgtattggaggggaactccatctcactcttggcacctctatgcctcacctgtctcatctgagaaatgggaataataacatactcatgatggctgagatcataaagtgaactaatttgtgtgagagattacagaaatgggaaacaatgcaattattgtgcccacttaagattttaaatgggcttaagatcacttaagatcattacaatgatgataagatcatgaaatagtcatgattgcataatgaataacactgagataaaagtaaattttcttttttatgtgtttcaccttgcaagcacaaatgttaaaaggaataggggtggtttaggttctttccatcatatttgtttaattggggaaaagttagaacttgctgcaaggaggccatttcttttcaatctcaacaaagtcccacaagaattgtgtagagacacagaaaagcataataattacctgtaatgtcctac

SEQ ID NO: 54432 - DNA, 1049 bp, Homo sapiens
tcctatgacttctaagtcttcaggtttggagtttgatagaaattaatatttcccttttgtctcgttggtttccaagtcaaagcctataagaattttttgagctgtttctaaaatatctttccaaaagtcatttctgaaacgtgcatcctttctcttgcaggagaaaatgcagaagtctccatggacgtttccctggcttaccgtgatgacgcgtttgctgagtggactgaaatggcccatgaaagagtaccacggaaactcaaatgcaccttcacatctcccaaggtatgaccccttgctgtctaagctgacagtttttatttggttctcaggtatgtggaaagatttgcttacttttcataggtgtgtcccttcttcgcatgaggacagctttggtaatacctgctctgcggagcattttatttcctcttctctcctgccacgggcctttcctaactttgcttttgcctattactgttaagatttcctgcaaaatagtaaaaacatgaggttgaagcctctgagtaccttgccccagctttagccatttttttcctaaagaggagaaagattaggtggttttatcactgacggtgtgacctcaggtaagcttacataatctgtctgagcttcagtttttcttctgcaagatgagataagagtacctaccttgggagtctgtttaagggctagatcaagcttgtccaactctgcctgcgggccgcatgcagcccaggacggctttgaatgtggcccaatgtaaattcattactttcttaaaacattataatttctttttgtgattttttttttttttagctcatcagctattattagtgtattttatgtgtggctcaagacaattctcctccttccggtttggcccagagaagccaaaagattggacacccctggactagatgatacaatgacgtaggcaggatgaccttctaatttaacatcttgtctgggacatatttgagagtcaaagcggatattaaccagatgggccactaggagaaaacatataaactaaggccctccatggg

SEQ ID NO: 54433 - DNA, 1039 bp, Homo sapiens
cccttcacttgggagtcttcttgtcctataaagaagggaacagttgacagagtgggaccctttaaaagtgtgggaccctttaaaagtgtggggcccaaacttcaaaggcccctcttgcctgtgtctaaggctagtgttgctctgaaccctatggctccaaggagaacaacctgtgagtaatttgtaacctgtgtgtgagctgatgacattttttacagcttttcatatttatactcttgtgtttctccaagcacccttttcaacacagtttaaagtcccaattcctactcccagcgttataagtaggatgtactttattgcctaagatttgactccatgggagctctgactgattctttctgttgaccactgaggctactaagtggggagaagttgtagccagcttggtccctgaccaaggggagataccaactctgaacattgtttctgccaagctgggagtggcacagtttcttctacagactcttgctcttctccacctccagccctgggtctacatattcccctggtgtcctcaagtccagagtctctccttggatcttgcacagatgggaagatgtgggagaactgaggtccagcagttttgtgtgcagactttgacccagtcaccccattgtcagtgccatgctttgttctgccttctgcaacccctggtactttcaaattctgagtggcttcaggttcctgcagatatgttggctcacttttctagaatatcccctctataggagtgtaggctgtggctgccaggaaaccctacttcatgtattttttatgttttaaaaaaattttgaggccaggcacagtggttcacgcctgtgatcccaacactttgggaagctgaggcaggcggatcacctgaggtcaggagttcaagaccagcctgaccaccatggataaaccctgactctgctaaaaatacaaaattagccaggcatggtggtgcacgcctgtaatcccagctactcaggaggctgaggcaggagaattgcttgaacccgggaggcagaggttgcag

SEQ ID NO: 54434 - DNA, 1048 bp, Homo sapiens
gagagagagagagagagaggggcacgcaggtagattttcacaacgatcaaatcagctattctaaatgctctgtgtactgacagtgtcctggagagaaagcaaagaaacccactgtgtgttttcctcacttgctttcaggtttgttttctttccacattgatgttgattatggtcaaataggaaagtgctgttgccacatttgctttccagtgttttaacacttgctaacttagatggttctgagttctctagctttgttagcgaaagattggttcatcattgggttcagattctttggtaaacaaattccttagaaaatatcctcctggcagtattttccacaaggttaaatcgtcttaagcacactgagaactgtgttagcagtgggcctcagtttccttaggatgtctctttgtctacctggccccccatcccagtccgtcttccgcacagctgccagaatctcctcctttgctttaacatcctctaagcaaaatgctgcagcactcagggcaagcttcttccctttgtcattagacccttcctgttctctagccttccctgttccctccagtccctctcacattccctgccatattgaattagttgctttccctgctattttgtgcttatgtgactttttatacatggggcttcctctgcctgtaatgccttttcctatctcgctgcctagtgaactcctattctgcaattcattggtaaatatcacctcttctcagtagggtgagccagaagattgtgtcttctgtgctacaattcttgaccttctactcagaactcttgatctttttgtgctgactgtatacttcatatatacttctaatgcagtacaaactacatggaattatacttatttatatacctgccttcaccactttactgtaaacaatttgagggcaatgactttgccttatatgcctttttatccctactcttttttttatagaagaagtttaattgtttcactctttatagacatatataaacatacatttttatgtttatatacatgtatatagttccaaat

SEQ ID NO: 54435 - DNA, 1052 bp, Homo sapiens
aattgaacatcacatctctagtgctgaaataaaatgtggaattcaggatttgagactcgtagcttgtcctttgaattatacagcagctgaaaatcgtgtttctttttttcccatctggacttctcacttggtggttttcccaacgggagggcatctgtgaaccttttaatgggagaagtcatcaagctgggttagggctgtgctcccagggctggcttcggaggcaggtaaaatctgactcccttttgcttttcagctacagacacagccattgctgccaccaccagctgggtgactcggaatctaggggttgccagtaattgtgggtttaagtcacagaggaaaaagataagaggagagccaggctggtttttccacaattaaatgttgcctctcaggcttctctgttggcaggaatccaagaggtcaggaaccaccagccatattatttttgtccctggctgcctgctctcatttgtatcccctcctcattcatgggaacgaagaaaaggtgggttggaaataaaaaagcttgttctagcctactttttcctttacgaaacttgtcagaaacaaagctttcctgtgaaacagacgggatcccttctagtagctggcttttcctgcaagcgttttctgtctcttcttttctttctgctggcagcacaaatgtattttccgggttaggggtgttaccattgttgaaatctacttttctccttgtatagtcatgctggtatgcggtgttatttctcaagcactgccctgtagtctggttctctggtatttttgtatttgttaattgtttaactcttccattagtcaaactcaacttgttatcctttgtcactcaaactccattataagtgccctgaggacaggcatggttttatagctctttgttttggcctcagtgccttaagtatagaaggcagtcaacagctggaggtgttttagatttctacattcatgaaatattagaactagaaaggatcttagtaagcctatgatccaactgtagtatttcatgaaataatacattatgtaaagtg

SEQ ID NO: 54436 - DNA, 1047 bp, Homo sapiens
gctaagtggaaatgacaggcaaataactaatcattacagtgtggtatgctgggtgctgtgaccaagttatgcccaggaggatatggaaacttaaagaaaaggcttcacagcagagaaaaggaagacttccctggtagggtgtgtgggtgtgtgttggcggggagagttgtagagaggcaatcagacagctctttgaggtgaatgttaaagagagaaaagcctggtgaggaggtgaggatgagcaaaagaaagagcattctatatagaaggaaatggcttatatgaaggtccaaatttgcacaacagcctcaagcttttaagtggtggttcccatgtccctaaactcttgcttattgactcacttgttcactcactcactcattggttgtgcaacacatttattcatgagttcatttaaactttattaagtcccagccatacgaacactcagtactggggatataagatcacacgagacatgattcttgtaacgggttagggaagagggtgcctggaaaacagacacttaaacctacaaataagaaaaaacatgttatgtgctataataagaatacacaatgtaatgtgaggagccttgggaaggaaagagtttgctatgagattcaaaactgtatgtctaaaaatttttttttgaaacctgcaggtttgggttttagcatttctattcctaagaatgcattcaagcaaaggagaataaggacaacaagaagagccatgggaggatgagataggtagattacctgatttatgtatgtttgggtggaaaggtaaaggacgtggtattctgttatttgggctggttgtggttatttcaggtataatctctcctagacagatccctacttctagctccaagtataaagaaaaagatttaccctgtaataataaataattactgtctactgactgtattaataatgctgggtaacaaattaccctaaaagttaggagctttcaactataaacattttttttttttttttttgagtctgagtttcacccttgttgcccaggctggagtgcaat

SEQ ID NO: 54437 - DNA, 1022 bp, Homo sapiens
cccagcagcaatgctggcagaccttggaaaaatggaacactgggctgttcatgggctgtttccatggagaacatcacatttcataggggaaatacgagtagtcacttggaaggcccacctcttcaagagtgaaacattataccacagcctggtatttcaacctatcttcaaacttcttggcttagtgaattcctaaactttatattcagttgctgttttccacctgcttacaattcttgatcctgcacagcaactcttctgatcagaattggagcaagtggagaagaactacaaaagggacccaaagaggggcaatggccctggaacaggggctatgggggtgcgtggggaccaggctgcagtggctgcagggctgatgagtgagactctgactgaggcagaagcagagctccaggaaactactaaagttccaggggaagcaaagtagcattttataagaacaaaatgaatggagaggagaaaacctatggtggctgtgaaggccctgagatgccatgtatgtcaaattgataccatctgatggccatgaatttattgtaaaaagagaacatgcattaatatcaggcatgataaaagccatgttgaacagccctggtcaatttgccgagaatgaaaccaatgaggtcaattttagagagataccttcgtatgtgctatcaaaagtatgcatgtattttacttacaaggttcgctacactaacagctccactgagattcccgaattcccaatcacacctgaaattgcactagaactgctggtggctgtgaacttcctagattgttaaataaaataaattacattttgaaaaaaaggggcccgaaggaagtctgtgggagctgaggagagggaaaggaaaagagcccagtctgacaggtggtgtttctttttgcactcaccctttctattccccttcccctttaacctctttccccgtttaaccatctttcactatcttccttcccttccaagagatcttccctatgtagcaccatcagttccc

SEQ ID NO: 54438 - DNA, 1593 bp, Homo sapiens
gtattttattataccacaattatcttatatttatgaggtttctagtacttgcagactgagaacagattttttaaatgtattctggctcaatccatttaattaggctgttgaaataattttttaaagttatattacaaatgggaaaaccactcatctgtcttgcacgtttgtaaccgaatgttgcatgtgtcctatttaagtggcttctgaattaagcaactactgtgtatactatactaacaatatatactatagtaatgctttattttttaactttactattgtttttgttttatttttgtccactgtcatacagttgcatcttaatttttgtttcatttcctggtagttgtttgtggctacatcacagtttcagatagatccagtgggatacataaaattcaagatgatccacagtcttcaaaattccttcacttaaacaatttgaattccttcaaatcaactgagtgccttcttctcagtctgcttcatagagaaaaaaacaaagaagaatcagattctactgagagactacagataagcaatccaggatttcaagaaagatgtgctaagaaaatgcagctagttaatttaagaaacagaagagtgagtgctaatgacataatgggaggaagttgtcataatttaatagggttaagtaatatgcatgatctatcctctaacagcaaaccaaggtgctgttctttggaaggaattgtagatgtgccagggaattcaagtaaagaggcatccagtgtctttcatcaatcttttccgaacatagaaggacaaaataataaactgtttttagagtctaagcccaaacaggaattcctgttgaatcttcattcagaggaaaatattcaaaagccattcagtgctggttttaagagaacctctactttgactgttcaagaccaagaggagttgtgtaatgggaaatgcaagtcaaaacagctttgtaggtctcagagtttgcttttaagaagtagtacaagaaggaatagttatatcaatacaccagtggctgaaattatcatgaaaccaaatgttggacaaggcagcacaagtgtgcaaacagctatggaaagtgaactcggagagtctagtgccacaatcaataaaagactctgcaaaagtacaatagaactttcagaaaattctttacttccagcttcttctatgttgactggcacacaaagtaaggctgttgctttcaatgcatgcaatattaactttgagtgtttactaactctgtgttttgcttacctggcttttcttccttgaagttgcttaattttttttcctccaagaggaattatttaaaaagacttttgtctgtgacataaccaagatttattctgtttacctaaggaacttattttcttttttgcaatttcatttattctgagtcactttatttgtaataagtgaagaattttaatacttagaaataagttgtaaagaaaataatgagaatcttaccatgctttagaggaacgtaatttctagaaatagttaaaagatgaaatactaagatattattttaccttctttatatagctgtatatactggtagtatgaaagcaacta

SEQ ID NO: 54439 - DNA, 1651 bp, Homo sapiens
aattattctttaatatttaaagccagaactgaaacctcctaacctacattacattctaaatatgtatatataaaattgtttgtaacccatagaaagaataataaaaatgatagtgagacataattgaaaacaacagttatataatttaagtgtgttttggtttaaattgatttgagggtggtagggacaactgcaaaattaaaaactccattaccatattacattatttctttgggagatactttatagctccacaatggactgatagtaatagaattattgttgctttcaatatttaaaaaatttgagcataacagattaaaccaaaataatccttttttcaggaaaatggcgagaaaataaagcatgaaataatcaatgaagatcaagaaaatgcaattgataatagagaactaagccaggaagatgttgaagaagtttggagatatgttattctgatctagtaagataaaattaagctttaatgaagttcctgatgtgttctgattattaatttgacattttcatcaaaatatgcaaatgaatcagaacagattaattctgaaagcttagaatgcaacctgtatatgtgtttttaaataaatactcttgttatagctctagtagagtagaaattgaatgtttcggtatgattcaccttttctttgaatcaacattatggccatagtttgggatatatattggaatccttttaagattattgagataaatgtatttgaaaggggatactaaatataagtcttagaaatttggttaaaaaaataaaatattctgatggctttgtttactagtcatattcatatgtataatctatttatgaagaaaaaaagttaatattctttcttctatttagcctgcaaaccattttaggtgtgccatccctagaagaagtcataaatccaaaacaagtaattccccaatatataatgtacaacatggccaatacaagtaaacgtggagtagttatactacaaaacaaatcaggttggtattaataaaataattggacttttaaaaacttgccaacaaggttgcagctatagtagtgtaaagagagacccaaatattgaaagtagaatactttcatggagcatcagaggggctatcataagttctttagtaataacagtggaataatttttaagtgagtattattcgtgctagtataagaaatattttgtctgctaagataaattcatgcatggtatttaaaaaaatgacaaagttaagcatccaaaaggtatacaaatataagaaaagttttgattaagcacatttttgttgagggcctccaacacgtcagagattgtgctaaagattaatgataagtaagatagaaatggtccatactctcatgaggcttacatgagtagttatgtacaaattaacaggagtcaaacatatatacaaaactgtaataacacaacaaaataagctcagactttcaagatgaggattctaaagggactggcttttttgttttatatatttatatagttgattgatttcagatttagatacaaaaatcagggaaataattcaagctagatagatgtattagaaaacttagattatgagaaaggtatccataaatctctcaaaatcgtagctgatgtttttatgataagtt

SEQ ID NO: 54440 - DNA, 1107 bp, Homo sapiens
agcctcctgagtagctgggattataggcatgcaccactatgcccagctaattttgtatttttagtagagacggagtttctccatattggtcaggctggtctcgaactcccgacctccggtgatccacccgcatcggcctcccaaagtgctgggattacaggcatgagccaccgtgcccggccagatataaaattttatatggcacaaataagatgaatgattcttcaagaatttttatgatataatcagatgtgaattaaagaattttctttacctaatgtacttcaaatcaatatgagatttaatttttcttcaattttttaaaaatattttccttctttttacagtggaatgaagttaccacatcttttcgagcaggaatgcctctaagaaaacacagacaacactttaaaaaatatggcaattgtttcacagcaggagaagcagtggattggctttatgacctattaagaaataatagcaattttggtcctgaagttacaaggcaacagactatccaactgttgaggaaatttcttaagaatcatgtaattgaagatatcaaagggaggtggggatcagaaaatgttgatgataacaaccagctcttcaggtaatgaacagatatgtaactgtaaaactgaattactgtaaagttttatctctacttatattatacttttactataacagcagcttcttcaaagaagttttatttctttggaaaactattaatgctgttagttcaactaaaatcatttagaaaaattgtaatgtgaaagttaattgctacaaaatttaaagtttttaagtgttagcatatataataaagtagggaattggaagggaaatactgatgtattatcacttccgcatattctgaacactttataacattttaaggacatattactgacctttagttgcatagtttctagattataagttcacagatccttcccttcaaacatataatttaatttaagaatacatgtaataggataatagcaaatcttacataataaataacagacaaataacaggaccaggtaaagtggctcatgcctgtaatcccagcactttgggaggctgaggtgggcggatcaa

SEQ ID NO: 54441 - DNA, 1060 bp, Homo sapiens
ctagagtcatggcaggttgtttcagcagctactacataaaactggtatttgggttacaggaggccatttcagcagctgggcttgagaaaaactcagttattgaagatggtcctatatgccccaagtgttttatctcccaggcccctagactctgattttggacatgaccagaatgacctctaatttgtatggttaatttttaacactctcagaggtaggaacatccatacagatgagcttgatagtataaagaaatgcttcaaatatttttgatcaatcaatgcattctaccacatcttccctccaaaaaataaatggtcatatcattacctgattatttcttatatgaatttgtaacctagcacacaggatgcaactctcttcttttcgtaatttctttgctgcctgattgaatgctgaattattttcatgcatttgtctggctctatattcaagttaatggccttgtcttgaggcttaaattaaataatgtaaatgaaagcatctacacaaccttagcaaatataagtaggtgtgtattatttcttgttcttttgtttccagcttcaactttactgattccattttgcttacatagttctgtggttcttgttcaggtccaactatcttgagcaaaatcactcacctgtgcatggataagaggaattttgctgtcctgtcctcagttactcttgagtgttccagtcattttgacctcagaaacagagtctagcattcgtcacttacacccaaccttctgacagctctagaaattatattctcattcatgcagccttttcacattggactttttagagactagatcacactgttttctcatagtacactaattgttgacaatcaacaacctgcaagtcattttcacacatggccttaagaaatatttcattcatcctataatgtatttgtgtactgtttttttaaagctgcaagactaatctaactagcctgattatagaaggatttgaaagtcaggcagaggagataagatttaatgatgcaggaaatagacaataattgagtttctgaggcaggaagc

SEQ ID NO: 54442 - DNA, 1049 bp, Homo sapiens
taggcctcgtctttaaatcactgttatctgatggcttgtcaccatagttacccaagttatagtcagatggtattttttccaaaagagctgccatagtaggcctagctgaaactggcctggtttgggaggcaccgtaactctctgtactgtagcttctcgcagacaatggcctcctttgggtaaggtttttaaccggaaaacttcccgcctgagctttcacttcttgatatgaagggtgttcatcttcatacctgccattccttttcaggaactgggactcagtcactgtaacgctgctttggcgatccagccctcccctatatgggggtctgccgtacctatcagttgggggcagctcatgaggctcattgacccttctaaacatggccatttctgtggcgctcaccagggagtcggcccttctcaggaagcccgccctggccccttggcttgcgaactgggcattcaccacagcatcctcattcacagatggctgagaaaatgaaaacatttgctccatcggtgggtatcctctgtaagctctaggactaatcaaatccttggcgatgtttttgctggcctgttgcacgtactcgggattgtgttgaaaagggggtggtatcctcttttcggctttcacttccactgatccttgaggattgaagctttggtcaaactgatagactttttttgtcatagaagctttttgttgttgtggccccttactacttccgtaggtgagcatctcatcatccagcattgggactgactggcttcgagacatactggacataccatgctctggtcccagcatcttatccggtcgttcgtggcttcctaagtgatcactcccagaagcatagttttctaatggtatgttatacaccttatatgtaccaatgtcaatctcatcgatactctgtgactttttgaatttattagacttgatatctttcattaggggggaaagcctctctgtgcttttgctaattgaaataacacctttagaagattccgggcggcagtggatttgagaaaagacattacta

SEQ ID NO: 54443 - DNA, 1123 bp, Homo sapiens
tccttaaaaaatatgtaattaatgggtttctagctttagctgatttgaaagtatgaaggaacattttactataatcattacattatttccagaagctctctctcctttatttaattttttatttgatatcttctgtgccacaaaatgttttttaattgtctcttttcatgatttagacatgaaaagactgaaggttaatgaaaatagtatttgcaattccaacaaaaagtagagctttgcaattacagctcatcaatctatcataaaacacacttggtttctgaatttcctctcttgttctctcctggatttatgtttgattaccttctggtaaatgttttgttaaatggataaattatagatgtttatattgcagaaacagtccagatgatgttgtaattttcctagaaattctgttgcattcttattatccaaagctctaagcttaaaaatagctcagagaaggcctggccacagggttggtgggattatccaacagggaggacagcacagttcattttaaactccaaaaaaagaaatcagcttagagatatgggcatgtgatttctggttgatttaaattcaccacccaaaggataatcctttttaaaggaccagtacacataaattttgtatgttagagaaatattagtacattgatatcttgcactttgaatgcctacagctcttaggatgagggaaaatgaaataatgcagtgaccaaattagtgccttaagagcaagccttcatggtgttcaatgatgattgccaggtattatgagaaagagcaggaatctcagataatcctcattgtgcttcacattaactaactagaattaattctcatttcaaattttaatctgataagagtactctcattaagtattgggatatatttagggctgagtatactccataatcaatactatattgactctatgccaagctatttaaaaaactttcctttctatcaaaaacctgaattatagacgttcagttcttagagagttcatatgaaaaatttacattgcttttgtaaatgtgagaaagtttgaagttttaatgagttttattctagtatttaaaaaaaacctttgcagaacaaaacataaataagaattt

SEQ ID NO: 54444 - DNA, 1050 bp, Homo sapiens
taaaaaagcaataaagcagaaagaaagcatttgccattttattaaactgtgagagaaggtgacaatacagtgttctttcctcatattttgtacctacacgatagcatttattagactttttgtgtgtctccccactagactgtgtttcttgaggggtaggaccatggcttatttatatcttccattgttcttataatagaattttgaacataaccccttgttcattaacatttgttgattaaattgaatgcacagtgagaaaaaggcaaattgttttaacagttaaataattttttaaaaaaggataaacatatagattggctagaggacaaaccttagaatggtccggaggcagacttacaagagaattacttaaacatctctcgattcaaacctacaggtctggatgaatactcaaaatataagtatatattttggggtataggtgaacctgcggggcatatttatggcaagaccaagcaaaagaagaaaatatagtcccttcactttgagtagtttatgatgacctagggccctaggtgacagggatagtaactatcattttttgggaaacgtggaaatgcaaaaaaaaaaaaaattgcctgataagatatatagacacacacacacacacacacacagacacacacacagacacacacagagagagagagatattaattcccaagtttgaatttctctgggaaatggccacaaagaaatgcctgaactgtttgctagcaacattcatggttttataaagaatatagcagtgatgtcctgctagaatatctgtcttgatcataatgagactgtgagaacctatcaagtgcaagatacccgttgcttagtcaaacgattctacaagtatggctgaagatttatatcccaaaactggctatcaaagatggctggtttaaaacaatcaagacagtatagacaaatattacagggcaagaatagtttggatgatgatatcctagagaaaaaatcacttttagagaatgggacttgttcactatctaacaactttctcttttacagattcta

SEQ ID NO: 54445 - DNA, 1048 bp, Homo sapiens
atggtagtgaagtcagagatcattaaaaaaaaaaaaaaagtctagagactcttcattttactaaaatagcgacccaaagttgtatcactgcttaggaatttttcttaaacttacagaagagtgaaatatttcactaactgaattatatgagctgaaatgagaaaaagaaaatttatgtgtgtgtgtttggcatatgggaaaatacaaattcatataggtagaagtagaacttctttatagagtagtaaaaggattatgccccaaaataactgaggtcaaaagtaatcaattatgaaatcgtttaggaaaaaataattttcatagatacttagaaaacatccaaaacataatatctagtatccttttacatataattcttaacaaaccatctgaaaacctaccactgtcttccttcagaattgcttatgttagtttaatatttcttttttgaatagaaagaccctagttcatgttatggttttcttatatatagctggttgggggagcccttgggcagttataaagtggaaaaaataaaactgtattattactttcaataagcaacagtaatcttgcagtagtttcacttttttcaaggtcttttgtggtggtctttaaaatttacaaacagaatttggtagatttacttctaattttccactagtaaaaaatttcttcttcatatgaagacaatgtcattatccttaagcttcctttagtccctactgagtacaaagagaaacttgattggctcttcaaacaaaaactatctgtttatctgtcaattacctttctcttcatttcaaacagaaaataggcttgtgttttcaaggatgaaagtgtatttgaggatgttaaagagaaatgcccaaacattataaagccgaagtattaagcattcattgcattccactgacgctaggtgtcatcaaagctaaaaccaaattttctagagtaaaacttacatacaacagtccttactgacctgaaccagatgccttttccacattcaagccaaataagagtcctctgagtggaaagactacaa

SEQ ID NO: 54446 - DNA, 1020 bp, Homo sapiens
tcttttgtttagaacattactactggatggaaatccattccgagttcctcgagcagccatattaatgaaaggaacagctgctatacttgaatatttgagagaccgaattcctacttaacatggagttgctttataacccttgtcatgtattattaaccctggttaattctaaggaggatgtaacatttgttttagtatcatcttaaaaggtgattattgtaattgatcttgtagtttcccagtatcacctacctgttggtataattagcctgggccatattcactgccagtaaatatttttacatttttatttaagatttttgtaaggtgttgtatacatttgtaatggtgataaccacaatgtgttcatacatttgttctaaatgttttgcttatgatttatcctgctaactttcattttcttatagcaagcagttttttcaaaaatgaatttttatttaatgtggttcagtattataataacaaagcatttttgtagaactggttttttttctcatttatttttgtattccatacaatgtgaccaattgacttgaatatgactagccagtttctatgtttttgttagatataaaattaaatcgaattttgttgaatactgttctttggcatttaaaaaataagaccttcttatcttgggccacatgtcaaaagaaaaaggaaacaaaaatatattaaaaataagacttttcattacccatgataggacttttgtgatatggctaatctcagtacacatttcaacttaaaacctttttatttacagcaccataattttaaaatttacttgcaatcttggtaagactaaacttgcagtgtttttctaaaagggaatttgataggtaaacttgatttaataaaaattaaatatcatttttgtttacaccaaaattatcagaagtaggttgattagtcattataacacttaccatatgattctattaagaagtcaattcagtagcatgtatatcaatttatatagataggtagatagctttt

SEQ ID NO: 54447 - DNA, 2338 bp, Homo sapiens
tcaggtccatgtggattaataggaatttccatttggggctttatgttaatgaattgccaagccactaatttttccactgataggaaaagcaaaattaactgaagcctgttaatatttttctcctagaaaaggattcttcacatgcagtcatttgctttatacattgtactgttaaatacattttttgttgttaattacagcaaaatctttagattatgagtgttaatttagtatattgttgaactttaaaaaacatttgttatctagcagtaaactatatacccaaagaaagctgacagataatctagcaattaaaacaacccaatgtgagacaggatagggtactgataaggaacttgagcaatatagtcaattgcttataccatatcccagacctgctgtatagtttttggacaggttaactagctgttcttagttttctcacctgtgaaatagggataataatagtgcctgtttataagaattaaactaaatgacataatccacacaaagcatttaactagagcctaatgcttttatgcacgtaaatacttaagaggaaaaaaaaaggtgatgtcgtggaggagagtgatgtgatgaattgagaaagttgaatgactttcatctgactatcaaaaattttttagatgtttaaagcttttaaaaagtgagacaaaatataatttgctttctatttctcagagcatagtttagggaatgtagatcttaaaagacgacaaatttaagatagtccattgcaaaagggatctctaatccatcttctggttctctcttgttttaaaggactgagaggatatttgatagaattgagcatttagatttgctctcagataggacaagtttgctttgggcggggggtcctggatcaaataagttaattgggaataaagatatacttaagagacattacttattatttactgcctcattttatctcactatctggctcttcttttgcaaaataatgtcattctgttgacacagctattatatcacattttgagcaacttagaatgtcaagaaaataatcaagacatgccttattacatggacatgttgcattaaaaaagccatgcttttctctagaaagttcccaaaccactttccctttttaaaaaaattttaatgaacaattcatgcttttcaccaaagattataaaaataatacatattcataaaattttggaataaataaaggaatatatcagttgtagtttcatcactgatttactcggttaactttgtggcatactgcatattttatttcaagctattctccatttggagttatacatgcaatttgtgtctttttttttttttttttttttttgagacaggatctcactctgttgcccctactggagttcactggcacaatcgcggctcagtgcacccttaacctctcaggttgaagtgatcctcccaccttagcctccctagtggctgggactacaggcatatgccaccacaccccactaatttttgtagagaccaggttttgccatgttgcccaggctggtctcaaactcttgagctcaactgatccacttgccttggccttccaaagtgctgggattacaggtgtgagccaccatgcttggccataatttgtatcttgactggtttatttgtcataagtatttttctgtttataaaccatactttaaaaatgtaatttaactgtatactttaaggttgattatgacaataaaggaaacatattgtttctctaggccagatttctagaaaaattattaagtcagagtttgactcgatatatcaaaaaaagttttatcaagttttatcagttacacattgaaactcattttcttttactacatctttttcagcacagcattttatatcctttcttttttttttctttgctaatgagatagactaagttgtaatttaactttcatttggttgtctttttttttgagacagagttttgctcttgttgcccaggctggagtgcagtggcatgatctcagttcgctacaacctccgcctcccaggctcaagcaattctcttgcttcagcctcccgagtagctgggattacaggtgcccgccaccatgcctggctaattttttgtgtttttagtagaggcggagtttcaccatgttggccaagctggtcttgaactcctgacctcaagtaatccacctgcctcagcctcctaaagtgctgagattataggtgtgagccaccgtgcccagccaactttcatttgttagtaaatcatattaataacaggaataaaactataaaccttgattaggcttacttagaaatgtttaattcttcctcttta

SEQ ID NO: 54448 - DNA, 1040 bp, Homo sapiens
ttctttattgaatggaaacatgaattggacattcaaaaattatctttttctatttgtcatcttttttcaattagaattttgtttccttgctctaagtgcaaaatcaaaacatttggtatcagtgaggatgtctatcttgaatcactgattcattcaaatttatgtttaacatttacttttttagcaaatgttataatttaacaaatgttttatagctcacttttttaaaattaatctcagcatgacaattttgaaaacaaatctgatttttcctttatatgtttagcatttatcttgaaaggaaatgttttaggtctgcattacttggcctttctttgagactattctgtgatatgttgtttgccatatgatgttttatagttaactatggttggagtatacttatatttgatgctttccctgaaatcaatttaatcttttatagtcttccctattcattggggaaccttcatttgaaatttttggcattagaaggaaatcctttgagaacaattcgaagagaaattataagtgtaagtatatttggaattcagctctttgttaaattgaaattcagacatatatgttgatctgtaaaactgcaaagcatgtcttggtgaatgtctttgtctccacccttctagaaaggaacacaagaagtcctaaaatatctacgaagcaagatcaaaggtactttaaaatgttctcttatattttgaaggattcataaaaagtggtgaagaattaatagtacataaatttaaatgtcttttgggtatacatatttggaagtaatagatcctggcatgtgtggctctaattctaaatccatatagtctgtaagtatgctgaggttataaaaatatctttaaactcacaataataatgtactatctgtaatccctttgaattgtgttaagtctgccaattaggaaatttaacaaaaaagattcagtaagcacttagtacttcaactttgaaaaaggagtaaaacttgactttcaggatatatgggttctattgactagaaagtatattga

SEQ ID NO: 54449 - DNA, 1019 bp, Homo sapiens
gactacaggcatgcaccaccatgcccagctaatttttttttaatttttagtagagacgatgtttcactatatgttgcccaggctggtcttgaactccagaactcaagtgatccgcccacctcgggcctcccaaagtgctggcattacagcacaactggcctaagtaataatttttatgttactatttctctttaattataattaaatgtagaaaaatttacatttatttaattcagtggtgtttgaatattcttgattatatggcacaggttcataagtcctcatagcgatttcttacacattctttaaagttgtatacgatcagaaactaatttttttttctctatttttgttttttactgaatatatattacagggttgaagcatttggattgtaattcaaatctcttggaaactatacctcctgaattggctggcatggaatcactagaattgctttatttgcggaggaataaattacgttttctaccagaatttccttcttgtagtctattgaaggtactatttagttgattattaaataactatattttccaaaagttaattattaaaatgcatttttaaaggagctaatcttgttttacattgggagtgtgtattagttataagtactgtgtttttcctatgttaatacttttcagaattttaatatgattacttacattaatggtatttttagtaatacattttttaaaagaaataatttaaaaaatagagatttgtccatttcatctgacaagtagttcataactggagaagtagtagataaagaggctaaaattgtaagtaggagacctggaataccaaccaggattatgtacctaattctataaagtgtcacctctcacctttacctaatcataatcaagtatgtttgaaatgaattacattcttttggctttaagtgtgtagaattaatggtgtcttgtaaatttgccatgatttgccttttttatatatacctttaagctctagtgttaaaagagtttattttaaac

SEQ ID NO: 54450 - DNA, 1600 bp, Homo sapiens
ttcctcaaaaatttgaatggccgtttttttcagcttcatttttccttttctcaggaatttttctttcttgcaaagatgtttttcatttcacatgacagtttattaataatatgcctaattcttcttaggcacttcataaatattggatgaatacatgaatttttgcattgaaaatatgatgcataatatggcatgactttgttttaacagaatccgttatgtaaaatatttttgaagttagaattcatttatatcctgtctactaccattgatgaacatatagtgggcctgcagatattgaaaatcaatcttgaaatgaatgatgatctgtgaaattttcagtgaatgagagttacacaacttatcacatcttaagtagtctcttttatgttgtaattccttcaaaaatttgaaatcctttttagggcattatttatttatttttttacttgtttattcatttattttgtctttctctttttaaaggatctttcaaacaatcatcttacaactgttcctgctagtttttcttctctgtccagtctggtgcgactcaatctttctagtaatgaactgaagagtttgccagcagaaataaatagaatgaaaagtaaatattttctgttttacataatacataaatttgaagttggtgcaacttacatttagaaagtaatttttaatatagttacagagaactaaagtagtagatttttatagtggtaaatgcaaacaatagcaactagtcagattttctccagaccattattatgtatcaactgtctaaagaaataccatcataaagatacttaggcatatgaaaaagaagaaaatatgattattcgttgtagtaggattatatacctaagctatactgtctttcattcattcattcaacattcataaagaggttagtcccctcttactggtgaatctacctatgatatttagttgtattatagctgtagcctcctcatggtccataagtaataatgtcgagaaataagtcttgttttgtctgaggtcccaggttgtcaatcttttttaaaagaaccaaaatgtcaaaatttattggttctgttaaaatttgccatcaaaccataatatctgaagtattgtagaactaacattaagggattaaaaaagtcaaggtacattttagtaccttttaaattagtatacttcaatataaaattcttaagagtctaaaatcattagtgatttttttgtttgtttgtttaaagaaactgttattaccaggcactgtggcttgtgtctgtagtcccagttacccaggtggctgaggcaggaggatcgcttgagcctagggagttctgggctgtagtgcgctatgccaatcgggtatccacataagttcagcagcatcatggtgacctcccatagtgggggaccaccaggttgcctaaggaggggtgaaccaacccaggtcagaaacagagcaggtcaaaactcccatctgatcaatagtgggattgcccctttgaatatccactacactgaagcctgggcaacatagtgagacctcttctctctctctcaaaaaataaaataaaataaattaataaaaaaactgttattt

SEQ ID NO: 54451 - DNA, 2021 bp, Homo sapiens
aagtatgaatcttaggatggagtaattagctaagaaaaggagatggaggaaatctatagctaaaattatctctctccccagttagatccctatcaagtgtgcaaagatttcagctaggtaaccaataacagtaaccgacttaacaatattattggttcttgttttagaagacatcatttgactttttttgtcccaactagttttattttactgtaatttagggttattgtaagcaccttgtatttcccattttccccctgttatttgtaaagtaactgtatatggcatgaaaatagcatggaattcgtaagtgagtatttaagttgtgataaacctgggaactagttcagtcatctcttaattatcatgaagtctatcatcctccatgatttgggacttctaaaccattacactgaatatctctacagaagggcttaactgaaaagaccaagtatgaagaagagtggaattccatattacattcaacttgacatcctaggtcctcaaacagaaatagctatttttgccttaaaaccgaacatataagatgtaactccattgtggtatatgtgtgcatatagttttgtcaaaattctgaaagtcagttatagtatgtattagtccgttttcatgctgctgataaagacatacccgagactgggaagaaaaagaggtttaattggacttacagttccacatggctggggatgcctcagaatcatggtgggaggcaaaaggcacttcttacatggcagcagcaggagaaaaatgaggaagatgcaaaattggaaacccctgataaaaccatcaggactcatgagacttattcactaccacgagaacagtatgggggaaaccgctcccatgattcatactatctcccaccaggttcctcacacaacatgtgggaattatgggagtacaattcaagatgaaatttgtgtggggacacaaccaaagcatatcacagtataacaaattaagtgtctagtatgtcctatcacattgcatgtcaaatcaagagttgattataagcatgcaatcaaaacatcacaaattatttatgtttggctaaaagcctttatttctttgttatttttctttgaaaccccaatgtggttactttagattactattattttaatgagtacatatttttggatatgaattttgataagtacttaaagttagtaactatatttgatttttatgagtccagtgtcattggttagcaagaaatgtctttgataaatatttattgtattgccactaaattattcatcatttattttatcaaccaatagccataataaactgaaaatactccctgaagaaattacaaacctaagaaacctgaagtgcctgtatctccagcataatgaattaacctgcatatcagagggatttgaacaactttccaatttagaagatttagtaagttctgattttccaatttttgtacaatttggggctggtgggatttttcatcaggctgagaaattaagatagatgattgaaactgtgggaacatggacagctgattttgtgattagattatcagaaatgtgcatttcaataagatagctaaatttgtcactgtaaatttggttttcctgtattatgaaatcaactttaagttttaatttaggaagagtttgggaaaggtgcaatgaagattactttgttattcagaggctttacagcatagcagaatagaggaaagttgtctttagcatataccaattctcttttctatacccatttccatttccttccttatattacctgcggcccttctgccttccaaatgtccaggtaattcactgaaggtctgtcttctctacttttcagaatggccacacttcctggcaaaattttaattccattgtttcacttaccttaaatagagataactgtaaagcaatacaaatattattttagtcatatttttattattattttatttttggggggacatggtcttaccctgtcacccagactggagtgcagtggcgcaatct

SEQ ID NO: 54452 - DNA, 1037 bp, Homo sapiens
ggtacgaccctattgtgtctcctgtcagaaagcctttggcccaggcaacctcccttttctctgggctggctttggccccctttctcagactgctagccagaatttctgtgctctaatctaatccctgtgctcatttcgaccggtttggttagcccagttcagttccttcccaggttcccgcaatctctgttaaagggaccctgctaaaaatacggtctaaatttaaacggggcgctttctgggattcccacattctgtgggataagcaacataatatgtgacgaaaccagctatcaaatcacgggcaaatcttttgtttctttggcccttattttcctcctcttattgtaatcttcaagggcaattaccaaagctaaaattatatgttttatcggcccctttgtgaacctgcactgttccctgccgagacgctcttctgtatgcagctgtgcagagttctacttacaaggaataatgagtatattttctaagttgaagatcaggatagatgccacacagagtgtttgaatgtggggacatcctgagaaacctgttaaagaccaagaagcacaaatctgggtaccatgaatgaatggccagatgctcttctgattgtcgtgtgtgtgtgtgtgtgtgtgtgtgtgtaagagagagagggaggggaatggagagatggagaaatagagcatttttcctgtaatgtttttcttcatttatatttaggttttaagactgattaaaaccttccattttccttctaatgattgctttcttattgtgacatgtataaagtagattaggcaagcaaatgcttctgaatgaatgaaaagacacagaatccttactccacctaaaagagtttttgatcaatgggaacatactcattttcaaactacagttgtgcatatatatatatctacttggtttccccaaaacctgaaacatttttctctaaacttgcatacctatcatgctaacattctgttctcttacctgtttaattttttaacagcatttatcactatcagaatttatat

SEQ ID NO: 54453 - DNA, 1011 bp, Homo sapiens
atttcatcacaacacattagtcctttcatctttgtggggttttttgtgttttttttgttgttgttttttgttttttgtttttttgagatggcgtttcgctcttgttgcccaggctggagtgcagtggtgcaatctcagctcactgcaacctccgcctcccaggttcaagcaattctcctgcctcagccttccaagtagctgggattacaggcatgtgccaccatgctcggctaattttgtatttttagtagaggcagggtttctccatgttggtcaggttggtctcaactcccgacctcaggtgttccgcctgccttggcctgccgaagtacttggattacagacatgagccaccgcgcctggctgtgttgtttttttattgaaagtctgccatactagacctgaagttttatgttatcagggacattcacttccttttccctactctatttccagcagctgggaaaatccttggaacagatttacgtacataatatttgaagaaatttgtgagttttttgactgcctctcaatgatattgtagatacagtgaataaaacaggcatgaatcctgtctccagattctatattttctatagtcttgtttaattgtgagcctaaataaatctgaagtgatttaaaactgtcatagattggttatatttatttgctttaatatatctgtcattcgtcttcaggtatatgtcttattcctatgtaaaacagacattaacataattatttaatctattagacctacaagaatcttcaaaattatgattcaactcttcatttgactgaaaaactgacacaggttcttagaagtgaagtgaaattttctcaaatcacatgcttgatgacaggggtgggttttttttgtttgttttttgtgtgtgttttttgttttttgttttttgagacggagtcttgctctgttgcccaggctggagtgcagggacgcgatctcggttcacgccattctcccgcctcagcctcccgagtagctggcac

SEQ ID NO: 54454 - DNA, 2230 bp, Homo sapiens
caggtgactaatgtctccccgagcgctagctctgagcagatgcggactctcttcggtttcctaggcaagatcgacgaactgcgcctcttcccgccggagtgagtatcgtccaccatcactgttcctgctaacgccgcctcagcctgggcctaacacacacaatttccttaggcccctgtcgctgcttccccgggccaggctgcttgagtggctggtggctggtggatttacttaagacggttgtgttccaggcctacaaaaaaatgcagagaggcagggccagggctttttggaattaggaaacactggctgttattctcgggaaattttttttttccgccttaaattgtgccaacgtggtcgtttggctttggggacttaacgcaagactaaccgcagtctgtacgtcgtatataggttaaatcccttttttaaaaaactgagtatttgttctttgcgttcttggaagaaaggtaacaaaattattcatgcctgtgttaatttggtgttaaactttgtaggttgttcacttattgttattgctgttatgtggttctggcccagcaatataattcaaagatcatattctttttgacagacgcttagtttagtgtgagcctgattacttaatttgtataatgtcaaaaaacgggttataaaccagagattttcctttgtttgaataatatacagatttgtgatatttcacagttgttcttgagaaggatttttataaatgttgaaatttgaattagagtgtatgactttttatcctttttgtctcacttttattttgaaaattatttctatcgcaagaatattaagtggatgaattgtaaagaaaaaatagttcaaagaagctaagaagtaagataaagtgtactactaaaacagacaattggaataataataatagtcttgtgctttttggaagacttattggtggagaagtgacaattcaaatgtcattatcagtaaatatcatatattgagaattttatgatgtcacttaaatactaaacaggaaattggaatcctctaagaatctactgttatggtacgtgtaaccattaactttctgctcaataaaataattgacaaaagtttatcataatgagatatttgttaagtattagcatatttcatcactttccacttaaaatactttcacaagattattggtgttttcaaattggtatgtttctaatttttagggaaatgtacatgtggagagaggatttacttagtttgcatgacgtggagttctgggaacaaacacgtaaatctttattcctgttattttgacagatacttgatttggtaatgaaagacaaatagctttcataacatgaacatacaaaaatagatgctttgctgttgttcagttttctcaagacttactgttttaagcttgtaaaattaatgaacagtaaaatagcagaaaatagtgatacattggatgattttaatagttttattagtgagatatttgaggtattcgaattactacaattctttccaatcctacaagttaaaaattttgttatggttgctgacttttaaatgctgtttattctctgaaggcagttttatgatgcatttagaaaaaaggtaagagagatgtaggcattatactggttcatcttttacctaatgcatgaccagtatactagaggaagttgtgatggaccagagtctttttgttttgtaatcaaatgaatagttccttcataaccaggacagctagtgtgtgcttgagaatgtctccctcaactatatgatctgggatattctgcattaaaaggactcccttcccagtattgggagaaagagagataaattgacacatttttactctgactccttcatttatcttcccacatacaagatcattttgtcttttaaaatgtacaaggttacaataagttaaatgttattagtggccttctacatttgatcagtaatgtagatggctacttttatttacttgatgttgcattttgtttttttaactataagtttcaatacactaatctgactggcacaagttgcatatagttcccagtggtccacagggttcatcattccaaaaatatttattcataacattgaatggctcagattacataaaattctatctgttgtgaacaggtcacctgattgtaactattatctacacagttggccttcttcatctctgggttccacatccatggattcagcccactgt

SEQ ID NO: 54455 - DNA, 5117 bp, Homo sapiens
ctgtcttacttacactgccatagcttgcagtttagcacttgtctttcttttacctaaggaagtaatttgttgagggaactagcccttttgcttattgaaactttgcagggtggcactagtggaacgtagtactactcccatgtgtgcctacattttttcttttatctgaaagtgctccaagccagaaatccttgattatttacagtgcataagagttcttacatgctgtgggtaaaagagtgcagggcatggaacctgtttattttatgcagttcaagaaaactcattgattattgagtacatgttcgttctcatgatattcatttgtccctgatataaaaattgttcatctttcttactctgagaaagccattaggaagtttctaagccccaaactactgttacctgtatctaaaaatagctggtattggtattataaagaaactgttgacaattttgtggtcccctcagtctctgagacttcagtaccaaattgtttttaacctgatacactgtaaatataagttatgattataagtttttatctgaactgcaattcactacattatttcagtgaacagtatatgattgagaatgttttcttttgaatttaactacattagtatacagttaggtttttttaatctgttttacttttgaaatgtgttggtttgtgaattagcatttgttttaactgctattctgtttctcttttatgttatttgtttattttttagtgattcgcctttgccagtctcatctcgtgtctgctttgttaagttccatgatccagactcagcagttgtggcacagcatctgacaaacactgtattcgttgacagagctttgatagtcgtaccatatgcagaaggtttgtgctttgtttaactacctatgtgggcatcctaagatgaccatctacctcagtagatgtagagtgagcattagtagcatgttaaatctaagctattaacatttttaaacccttgttatactgcagtccgtaatttttgcttgcagattttttttaattctaaaaattagaaattaggtctgttattataaggtatttaccttttgttttcttttaaaacatttttaagttgtttaaaaccatgtcccttattgtaactccctgagatacatctacttagttaatttaatgttaagttttatgaaaaagccctgaaggtaaatgattcactccatgtatgcttacagagccttcaaataaatgcatgatgttatttctgttttaaataaatgagtaggttgattttattttcttaaagcttcctcacattgataatctggaaaaaaaaaaaacacattgaatttcagtataccaagggttgcagtgattttggttttcgtgaaagttcaagatttcctgtagcttaggtgccaaatgggcactgggtgttttattttatgccagattttcttgttcattcttgctatatttctagaatatctctaaataataaattcttctctctgttatttgtgtgtgtgatttttatagtggagaaggcaaatgcaaaacccttccagatgcctgaaaaacagtgggtcctctgcagctacaggggattctagacattaactaaaggccagcaagcactcaagtgccccaagtgttttcctggtgtaaccatttgttaactacattttctctctttttacattttaggctgttaaagtaatttgacagaaaaaaatgagcaggttttttggatctaaaaagccactgtgacaagaaattttaataccattttgtaaaattttctaaggcgtattttataattagtttgttcccaatgtactgctacttgatttgcattttggtaactataaattttactcgaatcactgaaatatgataaaactgctggattttaagttaataatttaatatgctgaccaggatttaaatgctttcccctttccttaataaactggtcagtggaagtggaatcttaatattgttcattttagatgctatctgaaatctttgaaaacaaatgtgagcatttacaccataccttgtaaaagttgtgaaatgtctagtccttaacagagaagttgcctctggttttctaaagaaattaacttatatttataaatgggttaagacatgttatgtaatagtacctctgtctccatgatattaaagtgtatgagcccagttttaaggttttgtaatgtatagatagataaatttttgagttagtgtgttttggttaagcaatttcttttatgtcagtgtgcctgttgtaggataagaccatcaacagaaaatttacagaattcaaattcaggatgaataaaatagagtataggtcttggaacaagggtcaaatcatgtgagtaatatgtaaaacattttggttagcctgtaaatttaaattttttattggctaagtattatagttcccaatccctgaacataatacagtatatcatataaatgactttcataaatattttcaggccatagtaatttttctagacctatttttggaagtgaagtatttaggaatatacagtatatagaattaggggaatatttcattcagaattctattgttggtgaatttaattctggtatgatatgctgtattaatgttacctccagtaaatacaattccctccagatttagctattacacttcggtgttagctcttggtcagtgttttagaacagtagacatagtctacggtaaggaatagtcttaattggtaaaactaagatagctgaatttggaaggaactcttaatagtaatggatttggggattttttaggttccttggttaatgtttgtttcttttgtctgtttctttttctttcatttctacacattcatgcagtatttcatggttctatcaaagcagcagtaaaaaaaatactcttgacgcatgaaaattaactggtgaggggcctcattgctatttttaaattgtagttttatttttaaatagtctttttttaatcagaggatcagatgcatgacttttttttttttaatggatgcagatcttctatcaggtgtctcacaataaattcaagaggattttagtttgccagaaatgttgcaaatgcactaatttgagtaagatgttgatactgaatatatcctcttgagacataattttgcatgcaaaattatcccataatctttgtaggtttgttaatattgatgcattactgccctatatctaaatgatcttctcccccttcccctccataactcttggtatctaaattgatgacagctctgacacaagcaagataacagtgctgtgtagtatacatttgtttatattatcggcacttctcagtataggtggaaggaaccattacctttatttaacagtggtttttcttttttgttgttgtgttttacagttcttttccctggttcagcctgaactatataccaggccctgctgaaaataccacccaacagttttcttctgcagcttatccagtttctcttaagtgccctgtacatattgtatgttttatgatgagatgcagtttcttaatatgtattacagaaatactactggtatttgcaaatatgtagtttaattgtattattgaactctcattttgggggcttgggcacattaacagattaatccatctgtatagggcttttgctgttggatagaatttaaattgtctacataaatatttgttttaggacccttagattttatctgaatacacagattaggctttaaaaacagatatatatgtcatttttggcttaaggagtttggctaagttagcttttcaactggcactgtatggcagcattttttggtatggttagcatggcacatggcgaaacataaagcattttactgtacaggtaaggaatgtgccatgttgttttacctatctctctttctctctcactcccatgcacacatcctgtgtgtattcagagaccttcagaaacattcatattcattttcatgagtcagcaaaagccctacgcttgattccaacagaatatttcctttacatactttcttctcttaatttttacaaaatttgtatggtaggtgtaaaagaaaatcatagtaactgtaccatattattaacccctaaatcaaactttttttgtcttgtgtatcttgatttttctgtgtgctttatagtgaagcagccgacacgagtcgttgttcataaaacagcttttgaaagttgagagcacacccctggagaaccgactgtgcttgcttacgtttggttcatgacttaaaaatcgagtacaggtgatgaaatcttggcagtgttaacaaaaaagtagtgtgtattgtgctatttttttttactctagaaacttaaccatttgtagagaaaaaggaaacaaattttcacacattgaagttcattctgacataaaattaatgataaataatcatagaaatcaagctttgtattttagcgaacataagtactttcaacaaactcaggtggtgtatcagggagacattttctgggtgtttttgtgtgttttctgtcttagaaaagaatgtgttctaatgcaaggatgtttctctgcaggagttattcctgatgaagctaaagctttgtctctgttggcaccagctaatgcagtggcaggtcttctgcctggtggtggactcctgcctactcctaacccacttacccaggtactagttctattgaattcttaaagggtggggaaaaaaacagaattgtgcataaagctaaacatatttgaactttgtaagtactcataagattctagttcagatagcattatcacatgtctatatcaaaatcacaaatagtatagaagatctcttagacttttgtattttaagaacattctgaaaaatcataaaatatctgttctgtcacttttaccattggctctcaaaataacccatgagtagttttggaacagtctcctgaggcatgaacacttctctgaacacactgttaaaaatatattcatttggaccaggaaagaaaactgaagttaaaatttcacaagtgagcccttcatttttttttccttcccctttatcttttcctgttatttggggggttttgaattacataggtggcttg

SEQ ID NO: 54456 - DNA, 1932 bp, Homo sapiens
aaaataaaataataccaatacagttgaagcttcctatatacccattatttattacatttcctgttctgcccacaaataactactaaatttgttgtctataatttttttttctttcttctttctttttctttttttttttttttttgagacgagtctcactctgttgcccaacctggagtgcagtggcgcaaactcagctcactgcaacctccgcctcccagattcaagcaattcttttgccttagcctcccaagtagctgggactatgggcacaagccaccacatccggctaattttttgtacttttagtagagacggggtttcaccgtgttagccaggatggcctcaatctcctgacctcatgatccacccgccaaggcttcccaaagtgctgggcttacaggcatgagccaccatgcccggcctacaattttttttttacatgtgtaaacctgtaaggggcatctttagcctttccactcaagacttcatgtgtaattttggtaggcctttggcctctgcctcagttcctccccacctacaaagtaaaaggtaatgctcttccccaaaaaattactatgtcataaatttttttttttttttttttttttttttttgagacgaaatctcactctgtcgcccaggctggagtgcagtggcgcgatgtctgcctcccgggttcaagcaattctgctgtctcagcctcccgaatagctgggactacaggcgcctgccaccatgcctggctagttttttgtattttgagtagagatgggatttcaccgtgttagccagtatgatctcgatctcctgacctcgtgatccacctgccttggcctcccaaggggctgggattacaggcgtgagccaccacaccggcccaaaaatttttaatttatatgaataaaagttcttagcatcagcatattttcttgtactggcatttctaaaaatgtgtttgtttatggaaagttaatggatgttcagcaaaataggtatttttctaattccagatgactcttagtcattaaaacaaatacttgtaaatattcaaaacagtgctatgctatatgttgtttaccaaagttatcatggagtcctcccctccctttttttgaaggaatattttgctaaaataatgttatatacttaagtatttatttgaaatgctcgtgtgcattttaaaatatttcagatcccatttcttggttctgtttcaggttgaatcatgtagctgctggtctcgtttcaccaagtctgaaatcggatacctctagtaaagaaatagaggaagctatgaaaagagtacgagaagcacagtccctaatttctgctgctatagaaccaggtaaacaatgtttatgcaattttgttgtgtgattcttagcaaaaatgattttgacataaatgtggaattgtgttgagtgacaccctagtcgtttaaaatgttgtaaactctgataaaagattgtatagtggagtgccactcagacgtatttggagacaattctggtggtcacaggagtaccaactgcatctagagggcaaaggaccaacatgttgctagatatcctgcaacaaacagcacagccttccacagcagtggttaatctagtccaaaatgtcagtaggattatctaatacttgaaacgatattttgtttttcttattatttatgtttttctaagttgggatagcctaattttaatttttttcattgatcaagagaacctagtgaaaatgcttctgtttaaaatgatatttctttaaagaaaattagttgtcttctttgcagattgtctttttgagagtaaatgaatagatatcatattatctgcccatatatatttagatctatggccctggattttctttcttataaatatcttgttcattaataaatgggaatgttttttaatgtgcctattgtta

SEQ ID NO: 54457 - DNA, 3293 bp, Homo sapiens
tcaggaacagaatttttttttttaagttacagtaaaaaggaggggaaggctgtatatcagctgtatatcttcaaagtaattggtgaaagcagggttttgggggactgcaggagggcgattttgctagagtataaggtttctacctttccactaactagttctctgaatttcatctaatgatttaaaggtgaatgtggggatattttattagtaactaccttctatatcacattattgaattattctgtacttactctgaacactgaatgtttgaaccaaaaactaacttcttcagtaatagtttacttcacacgtcacccctctcgcattagttttgttaaatcagttttttctcaagcttagtatttctaacattttgtcatcaattaaaagaattactagaaattaggagttttcttgagggtagtaaagggaaagattcatggtttgcagatgattatattactcatttaattgtttagcttataccagtattgtgaaacaatctttcatttttctgtttttttgagacagggtctctctctgttgcccaggctggagtgcagtggccctatcacaactcactccagcttcaacctccgcaggctcaagtgatcttcctgcctctgcctcctgagtagctgggactacaggcatgcaccaccacacctggctaatttttttgtattttttgtagagacagagtttcaccatgttgcccaggctggtctggaactcctgggctcaagcaatcccctcacctcagcctgccaaagtgctgggattataggcatgagccactacatctggccacatctttcattgttagaatcatctatgatgtgtctgcatttttaagatcacactgtattttaaaacctagtttgcacatttgtgattctagagagagacgacgacgaagaagcaggagtggcacaagatctcctaaaaagcctcggtctcctaaaagaaaattgtcccgctcaccatcccctaggaggtaagaatgttaatcatttaaatgtattttttatatttttcagaggtttttcattttaaaactgtcctgtagtttttcttttcagcagttacagttcttaagaatgttttaatgtattctccttctgacttgtgacttaaacaccattaaggactgaacattttagtcctataaacaagttagttttgtagcctgtgttacttctccaaggttttgaagttggatctttgctgtactacttatatcctgtgaaattgagtcaggctcatcatctaaacaagttaaacctgttgctgtacattttactgtcattctagacataaaaaggagaagaagaaagataaagacaaagaaagaagtagggatgaaagagaacgatcaacaagcaagaagaagaagagtaaagataaggaaaaggaccgggaaagaaaatcagagagtgataaagatgtaaaagtatgtttacaaattgatttatttttatatttggggtgatgttggtactttcagaagttatttttctttggagaagtttacttttattattctccttggcaaagcaggttacacgggattatgatgaagaggaacaggggtatgacagtgagaaagagaaaaaagaagagaagaaaccaatagaaacaggttcccctaaaacaaaggaatgttctgtggaaaagggaactggtgattcactaagagaatccaaagtgaatggggatgatcatcatgaagaagacatggatatgagtgactgaatattgcctctgagggagtccaactgtatacctgcatcagtgtcattcctttgtgtgatttcttaatgctgtatttgttcatctcaaacctagatgtatacagctctgagttataaatggttataaagctcctgttactcatattagttatttacatcaaaaagcttttagaaaatggtacgaggtaaccaattcttgtcatggtgaaatctgattgagtaaccaagcagttttactattctggtgctgcttcataacaaaaatgaaaagctgcatgcatctacagcaggcatggattgtttatgtcgtatgatatcctttattaagtaagttcacttatagtatttctataatttgattcattgccgtaatagagccatgtaggaaatgcactgattgcatgttattgtggcaagaatatcctaaatgtcattaaaatcctccaacatgatggatctacttatggtcttgtttgttgacatgacaaattaacattcttatagttacatctggaaatgagcatttgaaatagataatcctttaagccttgtggcaaaatttttgtggcttttgtttaactttgaaaggttattatgcactaaccttttttggtggctaattagggtttaaatacagaaacaagatttcaaataaaactgtctttggcagtgagtaaatagcatattttgaagtagagttgtatactttttcataagatgtttgggaatttttttcctgaagtaataatttattccacatctacatcagtgaaagctatctacctatcctgagtctatcttaaaggaaaaaaagaaaaaaaccttatctcttgcccttattttgaattttccactctttcattaatttgttttaagctccgtgttggaaaaaaggggtagtgcattttaaattgaccttcatacgcttttaaaataagacaaatctacttgataatgtacctttatttgatctcaagttgtataaaaccaataaatttgtgttactgcagtagtaatcttatgcacacggtgatttcatgttatatatgcaaagtaggcaactgttttcttagttacagaagtttcaagcttcacttttgtgcagtagaaacaaaagtaggctacagtctgtgccatgttgatgtacagtttctgaaattgttttacaagactttgataataaaacccttaaacttatgttcatgttcctgtaaaaccgtatttgtatttatttacgctactgaatgtatgacatttacctcattcattttacaaattctttccctttctgtccacatatttcagtatagtaaaaagaggaagtctatcactgtagtgataattgccatcaaaattgtcaaaaatgatttaatttctatccaaaatagtccttttcttagcttagtatcattttattgcttattttttgtgtgggaatggggttggataaagcaatgaactttagtataaacaaatcccacctatatctagcaaatttatattttcggtgaaatacagatatttgcctttctggag

SEQ ID NO: 54458 - DNA, 2100 bp, Homo sapiens
actttgtagtctatgaatattaacatttgattttacaatgctatcattgatgttctctctgtagatatacctgtgtttcccacaatcacagccactgtgacttttcaggagtttcgatacgatgaatttgatggctccatctttactatacctgatgactacaaggaagacccaagccgttttcctgatctttaactgacgtggaaaaggatgccgtctaaccaaggaaagaaaatacagagaccctagaagtggatccaaatagaagggacaaatgctttcagtgaagaaaagggaattacacattgaatcgacacatcagtaatacgatacagtgaaatgggcctctaataagaatttcagcgagttttctgatgtgccattttttgtctttttaaaaatatacatattataaatgtaatagtttgacacattaatgaccctaagacctgcgtatgtgaagcagctatgagtgctgtgatttgtttttaaaaatttttacacttcttgttgaaatatatatgcatataaatatatctatatctatatctatatctaaaacactcctggaccattaacgtaaattaaatgtcttaagagatatggagcccttttaaacttgtcatctttatgcaaggtgacatttataaatattccttcgagctttgttttcataaaatgtaaactatgtaacattatgtatagttcagtaatttgaatgtttgttcaatataatgaactagaaggaatgcaattttctgtagatgaatgaaccaaatggtaaccattaaacaattgcatttatatgttgcaatacatttcagaaggagcgttcactctgcagggaataaggtacctcctttagcaccttagtgcaattcattgtggtgctatttgtttttacctgaatgtttgttactaatcttcctttcatagaacctctattttttttttttctaaacttgagtttgagtccttgttatggtcatcataaggtaatggttagcatgtttaaagatattcctcttccaaatctcagcactttaaaaaaaaatccaaatttttaaacttgcttcctaataagtacacatcggtctgattattttgtttgtttttagtagaatatggatgcattggtgtcagttttaaaaaacaatacacatattttggacaaccctacatatttaatcctttcaaaataagataaaaacattttatatgctaacagaatatatttgttacaagttaaagtccagaagtatacacaagattgattactcctattattttttttaaatcacaggaaaatattgatttcattgtctccaaagtgataaaatcatgtattactcatttttgcacttaaaatttttcttatttattccaaggtggtttgaaggtccaagtatgaaaataaattagggggattaatgtataacagttataaagtatcatgttgtattaaagagcttacttagattgatgtttttaaaatgtatcctgatgaatgtctcaagaatgcatctgtcaagttttttagactgaccagtagcttaaacttttttcaggattttaggtaatttgaaaggagtttagagacccttattgaaaatatgatttaaaaatccaaagcataaaccgtaagaaaaattttaaataaacatctttaaagctgcatcttccatactgatacatgcattgcgtatgttgacattaaatacattttataatgaagaaaaataatcatagtaaaaaattgaaagacctaattactacgttacatggacctattgaattttgggggaacgtgttagtaaacccagactagctttgttgaatagaagttgatcgctgttatttaggaaatgggtagatcaaatgacttagagactgaattatcctatcagtggttacatggggttggagacactgaaaggcagtgatcactgttgcttctaggctcccttactttgtaggaatatggtatactttcaggaatatgctatatatgttttcataagtacagacaccttagggaagaaaaaaagtgggtaattgaagcttatggttgattaatttcctaacagcacagctatgaat

SEQ ID NO: 54459 - DNA, 1050 bp, Homo sapiens
atgctacattgataattttcttttgataatagttaatatagaattccttattcttcacaatatttcttattgatcaatgcagaggctgtaatagacagtaaagaagattgaattgaataagtgactttaaagatatacaataataccttaaaaatttttttactaatgattttctttattcctaaaaatagtggttattaaaattatattcaatgtgaaattagtttagatctaataatttctgaacttttactctttgctattcttttttattgcccttgtcttaatttcttatacatatcttattcccttttagcataactttatttctgtagacagagtaagaaaaattgaaatattaatgaatgtcattgaaagatgacagatgcttcttaggaaggtgatagactatggaaaaagtttcctaacattttttttcctcccattttagagctcctcatctgggtagagaattggtgtgcaaagagagtaagaaaacgtttaaagctacgatagccatgagccaggaatttcccttagggatagagttgtaagtttgttactaactacaaatgtttatgaaagaaactattaaaccctaaaggctgtaataatatttgcaccccagtggtgcatttgagacctttgaaatgaaaagcaaatagccattgccttgatagtgtgtgcactgttctagaacttttctggttcgcaaaagtattgatttttactactttcaccagataaatttttgagtagattttctttctttctttttttttttttttttttttttgagatggagtcttgctctgtcacccaggctggagtgcagtggcgcgatcttggctcaccacaacctccacctcccaggttcaagcaattctcctgcctcagcctcctgagtagctgggattataggtgcccaccaccacgcccggctaatttttgtatttttagtagagatgaggtttcgccatgttggccaggctggcatcaaactcctgacctcaggtgatccacccacctcagcctcccaaagtgctggga

SEQ ID NO: 54460 - DNA, 1767 bp, Homo sapiens
tgtatgcttttgtgtatttttcaacttattgaataacttagatgtatatgttgtataacctagaaaatgtaagatagtttgataatttcaagtaccaaaggaatatttattttcacctacatgttacatatttatggaaaaatatattaccttgacactttttttaacctaaaaattttacttttaaatatttggttttgttttaggaaagagtaggaaactttttggcagacttttacctggtgaatggacttgttttagaatcaaggaaaagaagagaacatctcagtgaagaggatattcttcgaaataaggccatcatggagagtttgagtaaaggtggaaacataatggaacagaattttgaggtataatttttaattcttctaatttgtagttttctaagaagagaggggatagatttcattcttggtggcattcagtaagtatataaatgtactcacagcttttatttactgtgtgttacctttttctgtgaatcttcatttcgttgatgtcattattatgaagacaaaaaaatgtcttttgggatttttttgtgaatctgtactttatctttgagtcttcattaataaatagattaaaagcgtgaaacctaatgttattattatattttgagatggattcttgctgtgttgcccaggctggagtgcagtggctcaatctcggctcactgcaacctctgcctcctgggttcaagtgattctcctgcctcatccccgccaggtagctgggattacaggccctgctaccaggcctggctaatttttgtatttttagtagagacagggttttatcatgttggccaggctggtctcaaactcctgacctcaagtgatctgcctgcctcagcctcccaaagtgctagaattacagatgtgagccactgtgcctggcccctagtgttatttatttatttatttatttagagttggagtctccctctgtcgcccaggctggagtgcagtggcaagatcttggttcactgcaacttccgcctcccaggttcaagcgattcttctgcctcagactcccgagtagctgggattacaggtgcttaattctttctgctttgctaatcaaaatccgctgctttgaaggcccagctaaagatccatctacttcatggtgtcatctctgacttacaccttcccatatgtttcttgtttagcatatgtttactgaaagcatgctatatgcaaagaattgtgtgacagtaaggaaaggggaggagaaattaggaaataaaagatgtatgagacatggtaactgctcctcaaatcttattcctctgtgaagtgaatttagatgcattcttaaatttattttttatttgtataattttatatttccaaaaaaatactagagtcatacaaagaattcttggacaccttcatcaagatttcccagatgggcccaggcgtggtggcttacacctgtaatcccagcactttgggaggccaaggtgggcggatcacctgaggtcaggagttcaagaccagcttggccaacatggtgaaatcccgcctctacaaaattagctgggcatggtgacacatgcctgtaatcccagctactcggaaggctgaggcaggagaatcgcttgagactgggaggtggaggttgtggagctgagattgcgccattgtgctacatcctgggcaacaagagcgaaactccgtctcaaaaaaaaaaaaatttcccagatgttaatgttttactgccatttgtatagcactgtttttc

SEQ ID NO: 54461 - DNA, 1999 bp, Homo sapiens
tcaggcttggcctcctgggcaacatagcaagaccctgactctacaaaaaatttaaaaattagatggctgaggtggcacaagcctatagtcgcaggtgcttggaaggatgaggtgagacgattacttgagcccagaaggttgaggccacagtgagtgatcacaccactgcactctagcccaggtgacagagtgaactcctgtccaaaaaaaaaaaagagagagaaaaagaaatctgcaggctggaaactcaagcagggtttctgtgttgcagttttgaggcagaattgcttttttttttcctggaaacctcagtttttgctcttaaggccttcaaactgattagattaggcccactcacattatgtagggtaattagctctacttaaagtccgttgattgttaatcacatctaaaaaataccttcacagcaacatctagactggcgtttgaccaaacacctggcatcatagcgtagccacgctgacacataaaattatcatttaactttatacataaagctaaaaagccctccttggccactgcccacagtcccacatccccttgcagaatgtcaccagtttttatatcctccagaccttttttatgctctccatatgtaaatatgagctcataataataggtagccttttgttgttgatgcttactttttcataaagtgtcgtgtcatatcgtatctactgttttgcagctggctttttttcctcattctttagtatgtcgtagaaatcttctcttaccagtacatgtagtgctagttcactctttttagcaattgcatagtattctatatgatggatatactgtaacttaacatattcagtcttgtttttggacatttaaatgaatagtcacatttgtgtccagttttctgccattataaatgatgtgtttatcatccttttacatgcctttgcctgttataagtagcaagaaattaagtggctgggtaatggggaatacacacttaacattttgttgatatgataatttacatttactaagtggtttttcattataaggtttcaaaaactgataattaccacctggttatttcccagccacagataaattctgttaggaaatctaagctcactgattttcctctctaagcctaatggcattatagcattctcagttgtgaggtcctacattgcagtccatttgttggctttaaagtcttatttgtttgtactttgttcttctgggcagcattagatggatcacttcaagagaagataaaaattgaaactgctaatcatctagtactactgctaagcagctcaaagctcttgaagcatctaggtgatcttcttaaatctttgacaggtaaggagggagtcagtaatacttatggttcccattttgtaggtagaaacaggtgcagaatgctttgctttttttgcaaggtggactggaacacaactctgaacatgtagttttgaaatgtcagtaaacagcagcagggtggagacatgtgatttgcatgcagatagaaatgggaagcttgttttcagtaagttatttatcttttttttgttttttttttaagtaaggtatttcaaactctgaatacctgtgggtctgaaaaaggtaaaagttaatgttgaaggtttaagaggactttattgaaagaaagtaatgactttttttgatgtcctttacaccacttgagtttccctaaaacactttaattgtattggtgagcaagggtactcttttcctcttttctttgttgaaaacaggcagctgtaacttgaagtttggtgcctgttagagaatagagaatgtgaacaggtcattaattctggttgtactagagattcttgtgtgacatggactatttatttctttttattccactttttttctatctataaaatgggaacagtgttatccctgacccctccttgttactcgtgatatttgactgccagcttaatagttttgagatagctttgtgctacttgggagtaggatc

SEQ ID NO: 54462 - DNA, 1073 bp, Homo sapiens
aaacctagatttttatatttaacttttgctcacatcccaggaatcagagatggaaacagaagaagaggtggatattttaatgagcagtgatatttactctgcaactttatcaacaaaatcaatttctttcacgcgtgcccagacaggatggctttttcgggaagataaaacagtatgtgcaaatctagatttttaaactttaagcattgttcggtatttaatatttccaaaataacgtgatggaaatgcaagaagtagcttacagaattgtctccaagtagtttttttctctcttccttgaatccagataaggaattataatggatggttagagtcagaatgtgtccttggagaattcaggaaagaaagctgagctcatttgaattctgtgtcaggaaggactcttattgctagctgtcttgttattatacagggaacaatgttttcacatgattccattatatttctagtgctttattcgataagaagactacaaaaagggataaacttgactctatttccctgaacctgtttgtctccctactttagacttctcatttacttaatatttttttcttgtattctatacatatgagtaagattaaataaccttacatttctgcaacactgtagaattgttaaatcaaatctcgggggaagtttccccattagtgtaaattatttccataattcccattgtatctgtcagcaagaggttatataagactattcaaatatatattcggaaaattttgaggctaggcgtggtggcttatgcatgtaatcccagcactttgggaggccgaggccggcggatcacgaggtcaggagttcgagaccagcctggccaacacggtgaaaacctgtctctactaaaaatacaaaaattacccgggcgtggtggtgcatacctgtaatcccagctactcggaaggctgaggcaggagaatcgcttgaacccgggaggtggaggttacagtgagccgagatggcaccactgcactccagcctgagacagagtgagactccgtctcaaaaaaaataaataaataaaaataaaaataaaaataaat

SEQ ID NO: 54463 - DNA, 1110 bp, Homo sapiens
cgttttagccgggatggtctcgatctcctgacctcgtgatccgcccgccttggcctcccaaagtgctgggattacaggcgtgagccaccgcgcccggccaatactattttcttttaggacacatgctcaagcaatgataggtgttatttaatagtaaagctgaattctagcttctgggagtggactaaaagctagaattcagctataaagcaacaggcagccccccgcccccccgccgcccctgtgtgagttgatgagttacttttttagggcttcttgatacataaggcaaccatacttccctctttgctctggctcacccctgttttcctggcagaattgtcagtagtgtcactttcattcttagatttattaattttgatgataaattctatgtaaccctagttattattttcatgcagcatgtgaggcatgttttatttctgtttttcctgtctagggaaaccaagaataccaactcactttgccttgtctgtgatgagaactgaaaaacctacagagtaatgaattcttacagttgcattagaaattcagtagccagggtggatttttcacggagccttaaaggagcttcctggggatgtgatcagcatcctttgacagcagggccaaccagtttcttggctttaggactgtgtgttttgagcagccattagctggggtgatcctgatctggtgatttataaagccatgtgcaagactgaagcacgtcagtgtattgtaaactttttattttcagtatttttcctaatttcggcaagtagtgctttgtggaatactgtttgagaccagcgcattaggctagaccatgacaggtccaggttaccaaagagaacagtaaacacacaaatgtgtgaatccatgagtattagatacagaatgatctgtaaggtttccagggtgtggagatattggttgggaaagagagtattagtccaaatctgagaagtcaaatacaaaggccaagaatttaaatggtttatcaagttgaaggataaagcaaggtttggtatcagatggttaggcataaggttacgggtgtatatcagaagaggagttctcaattccaagaatgtggtccatccattg

SEQ ID NO: 54464 - DNA, 1065 bp, Homo sapiens
tacaaaaaattagctgggcatggtggcacgcacttgtagtccctgctactcaggaggctgaggtgggaggatcacctgagcccaggagcttgaggctacagtgagccgagatcgtgccactgtattccaacctgggtgacagagtgagtccctgtcacacacacacacaaaagttaaaacaggaacatgagggcaaaagcctgggggagaaaaattgtgagaaaagttgtaggttaaggggaagttagtaacttagcaagatactagacatggggcttactagtaactaaggatgaaggacaaatgtgataggttctaaagctctcatcaaacaaggcttaccagattaatggagaggatagcttttaggatgtatgacaaaaggttttttgcctaggtgatgagaatctaaaggaaaaaatctgttaacattaaataaaaacttgctattttaaatgtcatgagacaattttttaacaccattttaataaagctaaattttaaaatatattcaaagagaaatctttaagttgacttttatttcatggcagccatgtaatcatttgaaatgtcttctctggtatcaaagagaaactaatactttagtagaaataggaaagtgtgagcaacattattcttgagagtactaacaaagattttgaccataaatacaaataattaagaggtaatctgtaatcactgattgaaagtatatttgtacactttttgtcttacttcaggattttcttgtctgaagtgaagcctttagttccttttttcagtgttatttggcattttttcaggctttcttcttaaaaataatactttctattcaaatctttgcatttgtataaagaacttattgttcttcatggctaattacatgggaaaaattaaaaatatttaggttcataggcttaaagccaaggactagtgaggactttaaaatgttatcgtgataattaacattatttactgaggcatatgtgatgcagcttaccaggtcatctaatatgtcagggatatacagaaaatgtattaccctttttattgcaaaattataga

SEQ ID NO: 54465 - DNA, 1528 bp, Homo sapiens
aaagtgctgggattacaggtgtgagctaccataccgggcctgcattaggtatttatctttaatgttaattagaaaatgttgatgcttttgaaaaagttaactaagaaattagcctttaattttctctagagtctttgtttctaactcaggttaatttatcacccattttaaaaacactaaattttgtaagatatatctgccgtatcttacacacagacagatacacacacacttatgtacacatgtacctctgatatggtcttaatttcaagaattttgagcttcacatttctttcatttctttgtacgtggtagtttattatagcctgttatgcagctttatttgtctgtagaataactcctatctccccaaaatagcagataataaataataaaaaactatcagaatatggcttgtggcatgtatatgagctatagatagcaacataggaatgtagaaatctatagataaatagtatgattcccattttacagattttgaaactcaggtacattgagtctaaataaccaaggcacatatttgggattcaaactcaaatttaactgtctcacttcaaagatgtctctttctattatacacattactttactgcaatttttccaaattatatttacaaaattagataaggttcaggtctatctggttacccattcaggagggtttagttaccatagggttattgtttactcatctataatatgcagtctgtacctgagtggcatcatattgactctgctacccttgtttgtgggtgggatgggagtatagtaaactatacagaaattacaagtaaatagtagatatttgaagttgctcaaaattgccttttaaattttatttatttttaaatggaaaaatactatttgaaaggaaattattataatttgataacagaatgtcacattactcttttaatttaaaagtttgtaaatatctcaaaatttaggtagttattttttaccttttgtttttaaaaatacagtgcctttactttcccgaattctgccttccgatgcatgtaaaatatacaaacaaggtatcaatatcaggtaaggtgatttgatttttttctcagtaaaagaaagttgagatttagaggaagatttttttccctgtaatcataacttacatgtgttttatgacgttaaaatgctgtaacagagtcacaatattttatctcattcgagacataatagataaaaaaccaaagacatagaacctttttttatttttttattacttagagaacaaactcaaagtggaaaagacataaaatcttgactaaagcaaagatattattcttatttaactacagactatccagaaggcaaacagtgaggatcttgatgtaatattaagaagatttacagtggttaccttcctgatcctggatttattaaggaataagggacacataaggaagacccaattcttgcctttttctccatctctttcatgtctttccttcccctgtttactaatccgtgtatccgttcatctgttcat

SEQ ID NO: 54466 - DNA, 1025 bp, Homo sapiens
ttgcatcatttgaatgagtttggttatcttggcacagttaggtaaatcgttactgataattaaaaaactagtaaaagctagtgtgaatatggtataggttgatgttgaaatatctcttctcattattctttggggatcataccagttttattaaacttacttactaacttattctatctatataggtcccatgttctctgacttctatgtctcagcttcttttactgttccaagaggccttcagtaatttaaacattgctctttgatttttggcctttcaaaatatattgtagatgtagatacacacatacacatacacacatacatgcacgtgcatatatgtgtacatgtattatctatctatatgtataataagccagtggtgtttttactgcatgatgaaaatttaaattagttatttttaaaatttaaactttagttacagctcttttgaggaagcttaagcagcaatccagggaaagtgttgaagaaaaacgacctcgattattaaaagccctgaaagaggtaagctatatttctttgttaattttgcaccttggaagtaattataagtgtagttttaagcatttttttcttaatacaacttaaattctcacttattaggggccaaaaaatggtaaaaatcatgcttaaattaagcaataattagtgtatgaatgtgatcttagtagaagcacctcagtttgaactaggaagataaagatttattactttcaataaattagataagagctctaaagaaaaaaaaaggaggtaagtcacagttaatggcaataattttcctttgcctttgaattagaagattctctatagctaaagccattgctactagaagtggcagttttttttgtttgtttgttttggagacagcgcctcactctgtcgcccagctaattttttgtatttttagtagagatggggtttcaccatattacccaggctggtatcaaactcctgagctcaagcaatccgcctgcctcagcctcctagagtgctgggattat

SEQ ID NO: 54467 - DNA, 1055 bp, Homo sapiens
tctcctgagtagctgggactacaggcacctgccacagtgcccaactaatttttgtatttttagtagagatggggtttcaccatgttggccaggctggtctcgaattcctgacctcaggtaatctacttgcctcggcctcccaaagtgctgggattacaggcgtgagccaccatgcccggctatgtctgtactttgaaattatcttaagcactgtgatttaagtttttgattttttggcttgtgttacattaacattttatgttttttgaaaaatcagagataatctaatattattaattactggcaaaaactttgtgacctatttttgtgtccatttcttctgatttctgataattttgctaacattcttgtaccacaaaacagacaatgcaaactacttgtcagagactgtttagaatcatttcactaattaataataaaatttcaagattatgttgcttttctgccttacagtggttacctggtaaacagtgatcagcccagaccagtatgagatagagatatggatacaactaaaaagcctttttttcccacaatttatccctcacccatggttcctagctttctctgatcgagacagctctggtttctttatgcactctgggatctagttgtcttttgtctctccagaagttgttcacagtttgtgcagacttatgtcatggtatacttgtgttatggtagttttgggaattctgtcggcctttgtcttatttttgtggcacatcaaaggtgttaatgtggaggaagagacagcagttcatattggtttgccatcttacattgaactagaagtcttcatttagccttcaattttaaatttctttttgagagaaggcttttctcaacttctagagtaggttaagttcttcttcttgtacattttcaaagtggtttagtcttttcctttgcaatatgttgcatacttctaattaatttttcagtatgtgttccctactctgtgtatcttgataatataagctttgtgagacttcaagtcatgcatatgttatcttattcacccctttatctct

SEQ ID NO: 54468 - DNA, 1057 bp, Homo sapiens
aagataatcacggtgaggagtgctagcccctctccacctctctccttccccgagcctagggtgtgcctccccaggcttctggaatcctaggccccctccagcagactcttctttttgcccatcatccgggccgttcggtaaatcatgatcgactcagtaatagcgtgccagtggtcaaggggttggttcttgtgggtgcaaaggaatgtatcctccttgcccacttcaaagtttgtcgtgagaagctgttttgtttgagacaggccttcgatttgctgattctggactgtcagaaattttaggttgcctcccacccaacatggttttctccctttgtttatggagctatatatctttatttctctctcttccccctaccttggcattttaaattttgaacgcataaattgccctcctcccttcattgctcacatacagatcccatcttgactgcaactggttgtgattttgcctgccaccaggttgtttcttttttgtctgctttcagtaaacttagaatgttagatttctgaaagccacacagtagaaatttgttggtatttgatacgtagaacagttaaagtgacttctcaacagccgatttttgtttgagtagagatttgattttttgcttgttttaagtagataattgctaatagtaatgtctcatcttgatgactgtgactaaaaatagtattatgatttttatggtaattttatcttagtcaatattgaccatttctttttgccttgtcagctgaattttttgtttaattctaaaaaataatgtgactgagttgacttttaagcaacagtaaatttattattgaagactaatgtgaacactgacattttaacatttaatagccgttttaaactgggtagttggcaaatattgttgatcgctctgctattaatatgaaaattgtatacattcagttagaacacactgaaccaactttgtgctcaaaatgatatacgtatcaatgaaatatttgcctgtgaaataagctcacttaattccattggatcgtaggctttttaggacaaaaattca

SEQ ID NO: 54469 - DNA, 1571 bp, Homo sapiens
catggcagcctcctcaggacgggtactcaggaatttcgcccgcagggactaacaccacttggacccagggactccagcttcactccgctttgtgcactgggtggggcggtcgcggtgacgtttcaggcaacgcctctgctgtcagccaataaggagcgggagacgcgtcgggcctgcgctcaatgggccgcgctggtcccgccccactgtgatcgtgagactgcagacccgctaataaaatccaccccaacaatcgctgtgtgccgctttagtgcgctcgccgtcggctctacctgcgtgctttagctccttctcgcctgatccttctgtctctcccaaccccggacacccggcttcgactggttatatcttcggtgttcttttcctctcttcttctttcgcggttcagcatgcaggaaaaagacgcctcctcacaaggtttcctgccacacttccaacatttcgccacgcaggcgatccatgtgggccaggatccagagcaatggacctccagggctgtagtgccccccatctcactgtccaccacgttcaagcaaggggcgcctggccagcactcggtgagctgggtctgtctggggctgtccacagttgggcggtaaaagagatacggcttatgaatttgaaaggcatgtaagtaatttataatatgacttataaattaggaaggcaaccgaaagatgtttctacactgtaattcttgcagcacagctttgtatcggatggtccagtgatcgtatttcttttgataagcaggactggaaggagccgtttgtccagcttgccatttagatttggcctgaaattcaggtgattttgacaaatttgcaattaaaaatcgaaggtcataacttttttgagttacctttagcagcataaattttaaagatgtagtacggagtcagcttaaaaaatattaagggtctgataacttgactagaattaagattgtttccagtagctgtatgaatagttattgagtacctactatatgccaaatacgtgctcgtatatatcatgtgtattacatgtattgtctcatctaatcctaacaacaaccctagtctgaaccgaattctcattttttcccaataaagaagctgagatttagggagttaagtaactagccttagactagtaagtattggagatggaattcaaactttagaaacttgaggttgctttaggaaccaactcctaggcactcagctacactatgctatctctaataatgctagtaacaatttagcctattgcgtcatttaagcactgtggcttagtgattaagaacacaactcatgaccgggtgcagtggcttacgcctgtaatcccagcactttgggaggctgaggcgggtggatcacctgaggacaggagttcgagcccagcctggccaacatggtgaaaccccatctctactaaaaataaataaattagctgggcatggtggcgggtaatctcagctactcgggaagctgaggcaggagaatcgcttgaacccaggaggcagaggttgcagtgagccaagatctcaccattgtgctccagcctgg

SEQ ID NO: 54470 - DNA, 1052 bp, Homo sapiens
agatacttttataatgcaatataaaagtctcatggcaaacataggtataaaatcctgaaaattgttgattttaaagaactttttacattatttttcaattttatattacctagggtcagtctacataccatcaaaagtctagtttctcattaatgacagaatattcttttgttgttgttgttgttattgagtatcaatatcaattttttctttaagtttttatgtgtaaaaatcaaatctaggtgtatttataaaaaattattttaagtcaaatgatttaccttgtttcactgtaaaaatctggtagtttgatttatattgtctcattttatcgattaaaactttcagaactacataacaaaaagatcaaaaaagtacaaagaatagtaaccaattcttttccattacaaagtatattgaaatttattttgaacctttcattgacattgattcatttagtttagagttgagaactaggtagaaattgtttgaaaagatatgatgtttcaggaagcatgtcacttagtggagattggatgttttgaaaaacattatttgcttcatgctacttttggatctcaagtgtgttttatttgactcttgagcctttagagaacaaaccttattattctttactatatcagatagccaaactatttaaccaaactagaattgcttttagttgcattttccttggtgactgagagttccatatattttgtaagtgtttatacatagaaggaatgaatgtttcttaatgcaatgttcttttcattttatctgattcccttctgtctcaggtacaaacaggtacttcaggcaagtggcatctgaatttggattaaagatttcttttgttgattgttccaaaatcaaattactagaggcagcaattacaccagaaaccaaggtaactcagctcattttcagttttgcctgtttttccttcgatgttttgttttcatcatttctgtttactagaggatataatttaatgtgaataacaaattttattttatgccattggaaacatcaacaaaattaagatagac

SEQ ID NO: 54471 - DNA, 1022 bp, Homo sapiens
gtatacggtgtatttctgtgtcttcatttttataaacatttatggaataacttgttttgcaagcattgtgtggagaaatgtcaggtcccaccaaagtttaggcctattttctgtctttgtataggagtttacagttagaccaaaagtcaggcagtctcaccaagttaaaaaaaaaaaaaagatgtctaaataatgacttgaaataattcatgtaacgcagatttttgttagtctttccggaagatgcctgctagtaagtttggatgcacaagagggcacactcagcatgtgaaatgggtttgtttttcacagtaatgaaatgtgtattacgttaagactctcttgtttaaaaaattgtcttaaaataaatctctcctgatttatttagggatttttgtttaaagttgcttggcccccagacactctggtttaggctataaccccgatgccagaggatgagtggatttaggtcagggcttgtctgttctatcacccttcattctgtgtctcccaactctgctgctactagtgcagcattgcaatatgggaggaaggaagtgaagctaatgtgtattagcttagtctcccagcctcacaacacatgtaactctgtgaccttagaaaagttactcatcctccctaaatctcaatttcctcaattttaaaatgtggacaacactctacatagctcttaggtttgttgcgagaacatggggaaaaaaatccctaagctaatgccttcgttcatactaagtacccaataaacgttagcacctactatgaactattatcttttattagacatctctactacattccaagtgcttagaagtgctttatacatgttccttcaaattaatgtctgtgacaaacctttaagacaggtgttatatccaatttttattcattaaaaaaatgaattaatgcacacaaaccacctagtagagtatctgtctcatggtaagcacacagtagatgcatctattattatttcagataaggaaataggcactgaggatgag

SEQ ID NO: 54472 - DNA, 1571 bp, Homo sapiens
aaactaattatgacaggctcttggtccaagagacctcttataagtagcaatccagtaggttggtcatggagtacatgatttctggccaaacttcatttaggcaggtattaaaatatacacattggggaggctatgccttaccctactgcatgggggtacttgacacacactttcagtatttggattgagcatatcttaccaatggtataaacaggataaaaacaatcttgcttttcatttaaaatcatagctagaagagataagtttcgtaattttctctttttttgcctgtgaattataggggtatgcaaaatttgatatttggaccagaaaaatgttgagggtaattgcagtttatgagacagaaacatgcctccactgacacaatatagtgatcaaaaatttgctcatgtcttctttcagggcaatcatgactcatgcatcagttcttaagaatgacagagatgtccttggaattagtgacacactgattcgactttctgtgggcttagaggatgaggaagacctactggaagatctagatcaagctttgaaggcagcagtaagtcttattattgtgtgtgtgtgtgtgtgtgtgtgtgtgtctgctttatcttgggcatggggggtcactatatttacaaagtgtggtctcactgtgaactctaaagcttttctgttcctgtaatagaccaggtgtataaataaacgtatagggagctcagtcaaagtgcatatttaaaggatggtagtattcagaaaaaggacttcttgaggagttgaagctatggcctatatgtttaataacatatttttcttgtgcactgttattatagcaccctccaagtggaagtcacagctagtattccagagctgctattagaagctgcttcctgtgaagatcaaatcttcctgagtaattaaatggaccaacaatgagcctttgcaaaattttcaagcggaaattttaaggcacctcattatctttcataactgtaattttcttagggatcatctctgttaaaaagttttctgtatgtcatgttataattacaggtcaattctgttaatatctttttgttaattttgctctatgtttgcctctgaaggaggtgagatttgtgctactttgggagattatgttcttttttcatgtctaagatttattttgatcatgtttataatataatggtaattcatttttgatgttttgtgaagaatttaaatttaaacgaatgttcttaaatcaagtgtgatttttttgcatatcattgaaaagaacattaaaagcaatggtttacacttagttaccataagccgaaaatcaaatacttgaaaagtttactgtgaaattctactgatttaagactatacttaatatttttaaaaaaataaatcagctgggcgcggtggctcacgcatgtaatgccagcacttttggaggataaggcgggcggatcacgaggtcaggagattgagaccatcctggctagcgcagtgaaacccccatctctactaaaaatgcaaaaaaaattagacggacgtggtggcgggtgcctgtagtcccagct

SEQ ID NO: 54473 - DNA, 1084 bp, Homo sapiens
tggcaggtcaggtttggaaaacaggcaagacccaggatgttcttgatgatgaacttcaggctgcacagccaaagtcctgctggaaaaatgtttgctgcatgcctctgtgatgaatccaatgtctaaaaacccccttcttctttgtgttatgcttgtaaaattcaaacttctgttgccagcctgactgctgtagcttgggttatttacccctatgctataacaaaggatgaaggctcaggcacctccagcacttggtttatgacatatgtgctgggatttctctcccacccagaatacagagaaacggttatccagaattgggatattaataataaaaggtgggggttcatttttaccatctatccaatttattcgtagaaacattataatagtaacatacttttgaagccttgtgcacatgtgcgtgtgtgcacgtttgtgtgtgtgtgtgtgtgtgtgtgtgtgtgtgtgtgtgttttcctgccacctatctgttgggaaattggggtagcagtgagactggtggagcgcaaactgaagagagccacaaaaaataaaaggacttctatttactgaatgcctgttatgtgcaggtacatacttgacaattaccctttccatatattacctaatttaatcttcacaacaatttttgagtttgttacctttcattcccatgtttcagttgcaaataataagacagaaaagattttataactttctctaatcatattcctagtaattagtagatcttaggcttttgtacactataatgctatgtgtcacgtttttctctcttattagtttataaaaatattttcaaatcacttcgttgaaaatattgtacaaaaaagaacaaattgattgagaatagtaaaaaaaaaatcactgaaattgtctgggtcagataattatggtgatggagatttcctgtagaatagctattgattcatcaactgattgacctttgtaggagcttgagtatctagggagcatattctgaaaaatcccgtagaaggtgacaggagttttcacttgtctgacagtaacttgttaaatgattccattcaccacgataccggca

SEQ ID NO: 54474 - DNA, 4982 bp, Homo sapiens
gagattaagggtgcagtgagccatgcttatgctactgcaccacagcctggggaacagagcaagatcctgtctcaaaaaaaaaaaaaaaaatagaagtagagagcaaattattttttattgttaccattatttagtaacaatatttaagcgctttataggtaaaaatccttaagttctggtattccctttgggaaccattataattaaggtttacagaacacccatcatattcttcccaaacattttttcattgcttgtaactttccaaagaattctccttttgggctttctggttttattttaagcccaaaggtgaattttttgggaagtttgagctaaattccttcaaccaaaatatacaagtgaagaaaaaaaatttgtatttaaacatttgcacatttacttctacctgaagcatgtgaatgtcaacacttcatatttcataagtagtgggttttcataaaaatagtattgtaaatataaatcatcttaaagttagtttttatttcttcttgaatatttagcagttaagtacagttactagtcttttgttgctgtgccatatacctggtttttccataacagtttaatgagttgaataattccacatggaattatgtttattttcctcaggaagtggtatataagatacatattttaatcctcaaatggaaggatgtagttcctaaacgtaaagtcctgttaatgcagttatctgctgattttataatactataatatttgtgtatactttgaaaagccttaaaaaaagtttaaattctattttgatatagtaagcagggttttaattacacatgatagaattttaaagagacaaaattaaaatgtttaagtagaatgttttcatggttgatccagaagtcttctgttgaataagcagtaagtattcttccttataaaattttcatagttgttataaatcctgtttatttttggagctatctgataactaaataatcttccttatttcttcttttaatgaaatgtttgatttgtttctcaatcaatgaagatccagctccaggtcccacaggggctcttcttccccacgaaaaagatcttattcaagttcatcatcttctcctgagaggaacagaaagagaagtcgttctagatcttcttcatctggtgatcgcaaaaaaagacgaacaagatcacggtcacccgaaaggtttgggtttctgtagaaataagaatgggtgttcttaagtgtgtttaatagataaagtaaactttcctagtcaagggttagatttttattatctcttgtgttccgactttctacttttcaactttgaacttcaaaaaaacattactttgcttatcctttgtactttgatcaggttgtttagaattgtagatcaaaccattctttgatcattttattgtttaaatttttagttccatttataatttttatagccaactctcggttatttctgtcttttgagattgcaattcagaagctgtatgtcgaagtaatttatgagttgacttttatacttaggcttctttaaatactaatagtcaagaattctagagcatctaataaaaaattaactttcagatcattgggaatctgtcctcatttaaatatgtgtaaatgcatttccacagcaaattgcttcatgccctttgtctataaggaaattattccttgtagctaatacatttttcattttgcagtccaaatcttttttgagaaaggcctatattaggttactttatctgtactgacacttttaatattggaagaatgcaactgtcatctgtcagccttttctgcaacaggctaattactcagtttcattaattttctctttgttcccaattatatagtcattttaatggctttatttgtagtctttgcaaatttttcatattttattagcttgtgaaaataaagattatgtaaagtctattaattgctgggttcagtggtaggattatctcatgattcctacttgtacagaatgattagttttgcttcttcacattttggagtttagatgttaagatttcacacagtcttgtttctctgcatttgtttctttgtaaaaaaaattactctgtttttgagtggaattcattctgttgctttcttaccacttctgcaaatttttatcttagccacatataatccccctagtttgttgtcatctaaacttaatgaacatgttctctattccataagccaggtgattggtgaaaacactaaacaaccctgagcccagggccaacccctacggaacaccactactttacccaggttgatattgacttattcatactagctgcatgaatataaccctatagcaaattgtacaatcatcttgtgtgacctagatttccaaaacttatttatgagtatattttctcatacacagaagccttgctgtatcttttttacataatagacttcttacactttctacaccgtgtcacagggattggtttagtcacacttccattaccaagtttatatgcttttgttgtacattttctgtaattttacacatttttgcaaggcttttctttgatatcttaaataattgagaggtggctatattttgaaatgagattcttttgaaattgtagagaattttttattgtatttatatgataactgggctcatatccaaagtctaaacatcagataattttatgtgtgtaagttcctatctcaatttttaatttttttgctagcatcatggtactgaattttgtatactttcacagtcttaagaatgaatgctgagatttagctctagcttactagaatgcctactctctccattatgtcttacagacgccacaggtcatcatctggatcatcccattctggttcccgttcaagttcaaaaaagaaataatgtattaaaatttacatcttaaaaaaatccagtacagtgcatgaagcatatttttaaagaagttggtgtcttacttggtcagaagtgctaaatctgctagtagaggtgcatgcctttcattgcttttcaaaacaatacagctgtgtttatttgtgaagttaaaagtaaatagcattttaagccataatgtcccaaaatagatgttctgtcattcattatttacaaccatttgcttcatttaaaaccatttcagctataacaaagtactttgcttcctaatttaaacccatttttgtcatttccaaatacatcctgtccattggctaagacaggattacctaggcttgcctgaactttgggcatggaagaaagactggaaactagttggaaacaacatacttatggaaaagaaagtcagcctttttatgctgttaacagatgtcagagtgattctcaccaaaaaaagttaaactatgttgtaagcagccaactgtaaatgtctattttgaaattccctatgctaagggtgccttagaatcattgtgtctcttttatccagctttacttttttgctccacatttaatgcaaaagaatcttgtgatgtctacaaggagagaagtgggatatattttcctttctgacacataatttggggcaaaaaagaaagtcttaagagtttatcttttctctgctgatacggttgcttgataaagacatctcaaaatgtttaccaatgttttaagaagctttgtgtgatattcttccaaatgtagttaccaaatataatatggtagaaaaggctaaatcatacttaatgagcaaattgaagtaagcttttaaagtatatttctcttttggtgaaaggccaatggagacattgtgaatttaagtgaacatttgcctcaagatgttaactataaacacactgcatacaattttcttctgaataacaaatgaatgcttattgctgcatgatgtaagcaaaagtcattatttttcctattcatttgaaataagttatggcttaaaatgcttttggagtttatttctcaaaattaaaatctggtcacatgagctttagtttgttttctggtttaaaaaataaaaaggtttctcttaacagtatttccagtgacaatgcaaggtaagtatatcaaaggaaatcaacagttgtgcttgggggctttttgttatgggatattgatttcttgttttttttccgtaacattgtctgctgcaatttaaataaaaattacgacattttaagatatttcatagacaaaccaaacaaaaatatatgtttttactttaaagtgaatgtttttctcttcagctgatctaaaaatgaaagcaagatatcttatgtagaaatattttgataatatttttacagtgagctttcccatgtttttatgtcttaagtttctttgctgcgtttatgtaggttgcacaagaacttttactcacttgtaattgtgcctcagactttttgaaagtctaccttctaaattgccccgacgatctagattctacatgttaccattggtttattcttgtgctttctgtatttaaaactttggctgtactaagcaaatgcaaggttataatttagctaatagtagtttacagacaattctgatgattatgatttcatttggtttaactaagctgtactagttcatttcataaggaaatgatactgtagacaaatgtaaataaagcctgtgagtcaagcatcaagtggtgtttgttagaaataaactagagatttttaaactctgatctaatgttcatttttaaactaattacagttttctgttacctttgatttgttaattttttacactctttatattcacctaccttttatatatgagtgcttggtattttaaattccaaagccattatcactgcaacctcagaatttttaatttaacctttttttcgttttaaatagagagctcctaaattagttgcacacttcttgccagaacattacatccctcattccatgtggtaaaataccatatcgtagtgtgcttcctgaattactcttaaactgtcaccttatataaagcactcaactg

SEQ ID NO: 54475 - DNA, 2192 bp, Homo sapiens
aagcagtgatttaaatttaacagtgtcctcttgaaaaaccttaatcacagttaagtgatggcatgggcaatgaattttaatcatatttaggaataaaatactagatattagtgtataacaattagatatatgttaattgagcactacaaagcctgaaagcttaacaaagtggggctataactagtaattttttggtaaaaatatagtgatctttttctacagggtattattataagggacaaattatagttgtaaattagattaatgaattttgtgagttttaaaatttgtacgaaccatgtctcccttgtgtcatattttccaataatataattacctaacaatgacagaattatacattttccctttaattctctaagcattgagtaaacagaaaaatatagggatgaaatacacacatgccaacattcaaaactttgtactaactagaaacaaaaatagaaggggatttataaaggaaaatgatggagacattttagagaaattaagtataaatcgcaacattctgttttcttggatgtattctgggtagcttctagttacttgtaaacaaagtattcattgtttttgtaataaagtgataatgttttgttttatagttgagtggctttagggtaatttaatcacctggaaagtgatatttttttaattaccttttgttactaaatcttatctaatttaaaatactatgttttgaaagtatatatcttgtatagttatctttttatatgaaaatgaactctaatacatatctttctttcagtgttcatatcacaaagctcaattaaatggtcctggaaaaaaaaaatcgttccatgttgttccaggtcccgttcaagaagttcttccagttcgcagtcaagatctcgttccagttccagagaacgttcgagatctcgtgggtcgaaatcaaggtgaatgaggtagcatctctctgtaaagcagagagaaaaatatttaaaggctgcagaaggtgttgctgctttttttccccttattttgcttctacttgtcgattttattttagcattagaaaactaatgcacttgcctcagcttaattttctcaccatgaaatgtttccattgccagcagtgtgccaagacattcccatgattgaaatcaggtggctattttgcaatatgcagcgtttattattttggcactaagatgttatgaagtaggaagatgaagccaagtcttatcgccacatctctagtatattaagattatatatggccaggcacagtgattcatgcctataatcccagcactttgggaagctgaggtgggaggatcacttgaggccaggagttcaaggttgtagtgaaccttgatcacagcactgtaatccagcctgggtgacagaggagtgtctcaaaaaaaaaaaaaattaatagtagttcaaataaaattacatatgtaaataaaaagaaaaattttcttcattattaaaaggaagaaaaataaccctgcctcaaaacaggtcctgttttgcacggcagttgtttcaatattttcagaaacaaatttgccatttatatcagataaagttactagagtactgtatatacattttcctttctaattttacacacgctattatttatagagcacaaaacactcaaaactaaatcaggaagtatagtcggttagttgagataggatgtggtcttaagtagtaaacagtgttctaaagtttcaggttgcatgtagtcacatctgtagagggaaacataatttgaaagatgctcttgcaggaaatttttctttgtttagtcaaaatatgctctctttgtttttaagttaatttattatgacctaaaggcatctaaaaaataaataagaaaatgaaattccatatttgtggaaattcatattgaagtctaactgtggctgttttggtaaaagtatttgctgctttgaatcaaatttagcattaaagggctgccacagtataatcatgttaaggagaaaagaatgttgtgcacacttgcattataagccaataagaaatagataacaaggccaggctcagtggctcacgcctgtaatcccaataccttgggaggccaaggtgggcgggctgcttgagcccaggagttcaagaccagcctgggcaatatagtgagacctcgtctactaaaaataaaaattaaaacaaccagccag

SEQ ID NO: 54476 - DNA, 1103 bp, Homo sapiens
cctgatcataagaggtcttggaatgcaactaaagaaataataagccagttttgaagtttttaagaaaaaagtgagatgtgtttatctgtcctgtgtttcagagtgatgactgtcagtatattgagatactagagaggcagaatggatcttcagatttgaggagaccagctaagaggttactataatatgctagagaataaggaacagagtgtctaagactaaaaatggtgatttcaaggacttttaaggaggtggacttgaaaattcttgggtgatgcataagtgtgacagaaaaagtgtgtatggcctccaggtttatgtctgtgcaatacctgagacaaagttgtcaagtctctatttgagatgagtttagtaggtgaattttagaattcagaattaatttgctgagatacctgtgatatatgcatatggaggtgctcagtacacctaactgttttatctttcctggtaggtaacactaatatctaaatgtctaattataattgaatttttgttaggatgaggatgaagatgacgctgatctctcaaaatataatcttgatgccagtgaagaagaagatagtaataaaaagaaatctaatagacgaagtcgctcaaagtctcgatcttcacattcacgatcttcatcacgctcatcctccccctcaagttcaaggtctaggtccaggtaaacgggtacaggtcaagggtaacaccagtcaaaatgtcagtatctaacttttttatttataaattttgtttttcttgacgaaataaactttcctttttattttaaaaatttaattcaaatcaacttttaaaataatttttcagcttagtaccatacagttgttgtccagtatttttagaaaagtaaagtcttagcatgaaacttccttaacctattttagcctcatgcttttgactaaaatagacttaaaaactgaattaaatttttatatacacttatatttaattaatctaaagagatagcttacatatagaaattaagtaaaggggagatctgtattttcattcaagatgttaaaggctagcacagaaattttctaggcattaaatcattgcttattacataatgtttt

SEQ ID NO: 54477 - DNA, 1675 bp, Homo sapiens
atcaacacatacctctttaattttcaatgggagactttttcaaaatatgtcaactcacttttcctaaaactagctcattttctttaattccagtctctcctttaagcttatgtcagagacctgccaattgaattgtatacattggttgtgacatgagagaatagtggtttgctaatctcaactactttttaatagaatcatttaatttcaaaatttactggctacttcagagaacctgtgtgacttttacctatgtgttaaaaccaattaaaccagggccaaaggatggcctttattgtgttattgtgtttgtctgtgtaattaggaattttccaagctctaataaggcctgctacattttaaagtagcaaaatttcagaatatcagaagatttcagactatttgcagttggtaaacagtggaatttaatgcttggttgttactgagcccacccttcccagaagaattacgattaactgtagaggaaagtcctttaaaacttggttatagcagaagtttgagatgttttccaccaatactttctatgaattaaataagtcatgtagggcaatttggaattgaaaagagctagaagtacagccatatgacgttacaactaagttctctgtattttctgtggtgatttctaatatgctttctaaagactagtaatttattagatgggtaggcagccattgttgattagatgttttttgttgtctggagatttgggcatgatgtgtttattatttaaatcaattgtcatagggtaacaatttgtgccctcttttttaaggatatggtggtggttttaatgaaagagaaaatgttgaatatatagaaagagaagaatctgatggtgaatatgatgaggtaagctatattttggtgttcaggttgaatataaattagaaaaacagaaaaaattcttaaatgcaaaggaaaacaaacttttttttaagtgcaatttgagtcttcagcaactgatcattttcaggaaatcataaatatctaaaataattttttagaaaatgtattaagtttaatgcattatcagctgacaagcattttgaaattgtttttctctagtttggacgtaaaaagaaaaaatacagagggaaagcagttggtcctgcatctatattaaaggaagttgaagataaagaatcagagggagaagaagaggatgaggatgaagatctttctaaatataagttagatgaggtgaacaattttcttgtcctatttcccttttgtcttattggagttataccataacatgaatgcttttgacagcctcagacacttggtgaaaatatattctgtgttttcatttgttctcacaaaggttttggatttccactctgccaagtactatttgtacttggaacactactgttctggagatacagtggtgaccgaaacagaaccagttttctcttacacagttctagaggaggaaatatataaataggtaattttgatagcagtaacgttatgaagacacatgatgtgataacagtttaaaagcaactttggttttgccgatggataatgtctaaggaggtgaagtttgagctgaaacttgaatgataggaaggagccagcaataagagccgaggtgagagcacatttaggcagagaacagcaaatacgggttccctaaataggagat

SEQ ID NO: 54478 - DNA, 1100 bp, Homo sapiens
aaatgtttacctaatagcatatagtttttccattatcaccaattagcccaaccacattatctgtttacttaaaatctgattttgtctttcaactgcttatatgtcacatgatcaaaggattccttctatatctagtcaccctgtcagacttaggcttggtgaactgcttccctgttttctttgcctctctaactttaggccgttttcattgtctgtttagtttctagggatcagagggccactgttcaatcttttcgacctagctcttccagacttcaacagaaattctacttttatccccccccaccccttttttaaaacttacattctcatatgtgagaacattataacataatgtccttgatccccccttccccagcccaaccgccactttcaaccctcaaatcctgccttattcttaggaagtgattttgcctttccaccgattgggtaagttaaggccttctgacaaggatctcgtttttttcttccctcacctaaggtatgcaccgtacctccttcaccgcccccaccaacccccgtttgattgattgtttattctgtctcctttgcaggtttctcttcttttggccactgatgttgggattcttcgcagccatccctggccctctttctttcctctattttcatggtgttttcttctaagcccaaagtttaagtaactttgccatgataacccaagtttatgtctccagctcagacttctttgacccatatatccagctgcctattcaacattgccatgcaaatgtcaaactcattatattcaaactgaatttgtgattttacccctgggacctgaccctcttccaatgatctctttctcatgattagtaccactcaccatacatttattacataagctggaaatctagatgtccttcttagcctaaatagccctttcttgatatctcccataccccaaaaattcttttccattaccaccctaggcaaagaattactatgttttgtggaaaaatagccacctagctggtttctacatgtttttatttccaaatttaaaatccttttttaaaaaacccattttgattgcttttaggataaagtctaaaatcttt

SEQ ID NO: 54479 - DNA, 1049 bp, Homo sapiens
ttagtggagctgttaatttaaagttatattttttcataagacatcagaatttctatacaggttcagtatcacttacctgaaatgtttgtgggttcagcatccctaatctgaaaatctgaaatgctcctgtgagcgtttctgttgagtgtcatgtcctctctcaaaaagttttagattttggaacgtttttggattttggatttgtggattagtgatactcgacctgtggttataatttgtcatttacttctcaaaatgacagaggcacttttcatactatataaattttgcttctctgcttaaatggttcagtccgttgttggaacccacatttactcttcaggccactgtacattttctttgtttacattaccacttaataaacatttctttgacagtggtttcatcctagtttttattttaaaattgtaaaatatctaaaaatttgatattcatctatattatagcctactaatttagtatttttcacttctaaagttgcagcaatgtgaattgggccagaagatcagagtgtaatatgtgtaatactccaaagtatgctaaattagaagaaagaacaggtatgataaaaccacattgtaactaaatgattttttttaaagcactaaatattgaaacgataattgtatcaccttcgagtaagagccacagtaagtgaggattctgtttattctgccctgaatgtttgttactgggatttttttccccccatacacacatacaaatcttttgtttcacaatttataaaataacagtgttagggacctttatcctaacaaggagggacataagaatactttcagaaatattctcctcctctccctttcactggtttgcatgtttgttattagtaatgatataatgataccatttttaaattcttttgatagcctgctgtgacttaaagggcaaagccacaccatttaaagtgttcttctaaagctttggcagtaattctgaaacttaagctatgtgctagattatctgaaaaactttttcaaatatcgattgcaaaatgcagaactgtt

SEQ ID NO: 54480 - DNA, 2214 bp, Homo sapiens
aggataaattttcagagtatattttccatgcttaatggagttaaaaggaatatttttaggggaaaaacttaacctaaatattatttagagtgtttcactttagtgtcatcccatacttcacatctgtattgtattctagtataatgccttaaaaatcagctttttaaagtttaagcattccatgttatccagagcatttaacatacttttaccaatatacacgtacacttctaaggtcatgtgagtgaaccagtaattctttaggtttgagtttgttgagtataagcataaagtcttactgtactacatgtgttgagattattggttttggtggttgtgtcatttttttcagcgaagtctcagaggtttgagaaatgccctgtaaaactcagttttcttacaattattgaatctttttgtatttttagtcagtacaacctatcatatttggttccttagcatcctacctactgcatgtaaaaagataatttcattaagatccatgaagccctccttgatttataagtttttttcctcattggtccaccgctagggtttaaaactccctggtagcttgtaagtaattagtgaagtggagttaactctcactttcaactttgtaaagggattataactaatgatatgtgctaatgtgaggacttgaggcagagatcctaagtaacttaatcaagatcacatgactggtaaatggaggattgggatatcttattctgaatttgtggctccaatcaagtatttttcccccagtaaattgtgtggagttttttgttggtaacattgacattaacatgactaagatggattagaagttatgaattccagatatgtagtgaggacaagttaaaatgtaaaattttacaaatttaaatttttataaatgctttttaatctgtttttagatgtggaaatgtaaactttgctagaagaaccagctgtaatcgatgtggtcggggtaagtatttaaagaagattctatttatactgtatatgtatcatttatttatttctccaggttcatattgcatgatttttctgttttcagagaaaacaactgaggccaagatgatgaaagctgggggcactgaaataggaaagacacttgcagaaaagagccgaggcctatttagtgctaatgactggcaatgtaaaacgtatgttttttaaattattgtctgctctttcttccaaaataatagatctggccactacttgtttatattacagctcttattagtgacattgacaagccagggtaaccttttaaatccaaggtattgttattcagtctcatctttaagtatagtataaagaagttttaaattattctttgcattttttaatggtaatagttgtcactatgatggattatgtataccagtaaacaaatgcttatggtaagctcaaaaccaatcggggggtggtggtacttaaaagtactaaggcctattacttcctttattgaaaaatcccaatttttagactgtatagttagtgtgaaatacaccacaaaactcattttgcctgtttacaaaataatgttagattcataagttgtgtgccgtaagtaattaagtctaattataggtaggtttcttaatgatttttattttcaggcttagatttaattcttcattgatttttccaacttccatcttttctctatgcagatgaatcctatgtgtatgaaagaggtctaaatcaaaaaagtattaaataaatttctctttttgtttgtttgtattttttgtttttgagatgaggtcccactcagtcacccaggctggagtgcagtggggcgatctcagttcactgtaacctctacctcccaggctcaagcaatcctctcacttcagcctccttagtaactgggaccacaggcccatgccaccatgcctggctcatttttttatatttttggtagagacagggttttaccatgttgcccaggatggcctcgaacacctgagctcaagcattctgcctgccttggcctcccaaagtgctgggattacaggcgaggcatgggccactattcctgaccctagagtcttaaataaatttctgatcctcaggattataaatttgtattggaaaagtttccagctacagatttggtcactggatttggtatgctttggaattcagtgcttgaactgagacctcaaaaaaataaattaatattatttatagggt

SEQ ID NO: 54481 - DNA, 1059 bp, Homo sapiens
cccatgtgtatgaaataacagaatttttatgccttattaaaataatttctctaaacacttgaagagcccgagccgcctcttaccctaaacgaaccccacgcccctgaattgatcagtcacttccgcctccacctttccagctccacctaaggaagcggaagtactttactcttgggtcctcccacctgtagggggctctccgaggcttctagtgccacgaaggcctcctgcctgggttgtccttatggcgcctgtgagtttagttctagaaaagatatttgtattttaacttttccatctaacaaacagtagcacaggcatcttagtctggacaacaacgtacaagctgaattcctggctagttccctcattatcaaaccctgacacagtagtaggcgcgagtcaggcagtgtggggacagccccgagttgccgaaagtccccggcccgttttcctcctgtgaagacatagctgcgggtggctgtgctggtggcgttcaagatgtcgaccaagaatttccgagtcagtgacggggactggatttgccctgacaaaaagtgagttcaagaagggtcctgaattgggacggagtttgttagtggaagctttccgaggtccgtccggcattttccttttttatgattttctgtgccttaagacgggttgaggcggcgaaccgccagttccctggcgggaagaaggctcccaatctcctcacgagagaggtctttccgggagcctttgttctagatatgtcttcagcgtttcctcgacattacctccgcaaggtagcctctctttttagagtgcgagatggcctacctttttgcccccacccccctcccccgccccggccaggttttagcgataggaaacctctccagtcaggccagcttggtgttggatctcccccacgtgacttttctctgcagaactttactcttgttcacggaaaatattgctttctcgcactcgtccttttgcctcttatagttcaccttgttttgtatttttactcaaacttttcctccatactattttccccttttccggaagctc

SEQ ID NO: 54482 - DNA, 1050 bp, Homo sapiens
ctttcccttagtgtaacatcgaacctacaatagccatacccatattaagcatacctacagtgtttccaaaccagaggcaatgtcatcatgtaattttgtatgtgggaggggaagctccccagcacaagggaattttctgcaaaacccttatcctaataagaattctgcctctggaggtttcttaaactacgcttatccaggagtactttccttgccagtcttcacagtaactgaaaattgctttcaagatgatattaggaagccaatctaaatggtcaccctttatcgactattcattgattactcttctagggtccctttaaggaggtaacaaagcagaagccgaggtgctatgtttattcagttattagtgtctagcacaatgatatgtgaaatcaggcatttattaactagtgttgtttccatagtaataactccaacgtcgagtaggttagtacacttacgcatttgcaaaataaacttgaacacatagagatgaatttaaatgaatatatacccacaagtctgctatttaaagcctccagacctcacgcgtacatggctgacccctatgctggaaatcaatgcttaagcaggactttgcagtgatataaaatgcctagcaattggcaacacgagatgctttgcttttctcaatagtgagaagagttaatgtgcagggtactgttgttgagcatattattttctgttcagaatactgaaaataagtatgtgttaagagtttgtgctcactttagaaatagaagccctgtgaaacagatgataatgacgtggtcttgatctgaacagagccttacgtttcagctgtttacttgtcctcttccctaggaggaattagaatttcccagaatctcaacagcctgctttctgcctttgtttagacttgctatgtgttgcaagactaatgggtaatttctgtagttgtgattaagaaaaaggaacagagatcagaggggtcaccaatgcttagatggcttgttagagttttaaactctaatgaataacttgtggtagggctaaataaagccc

SEQ ID NO: 54483 - DNA, 1041 bp, Homo sapiens
gactatattatatgaacaaatgttggtatctgataaatagcactaatatcaagtgtttatatttctttctgctttcaaagggtaaactttttgagaggattactgctgtcctgaatatttagtatattgagctgttattcttaaactgtatcataaagttttatttacctaacagtcaacaaatatcagtgagtactatgcatactatgtgcaaagcactctgaaagtgcttgcattattcaaaatcagcaagtgtgtggttcctctaaaaataactccacagtagaacataatcaaagatatctcctagaactgaaaaaagcaaaactgaaaagcgtgatgcaaacctgactttttacataggttggtttccgacttgagtttgagggtggaaaaaagaacaccttaatatagattgtcaaggtagcaaagttatataaagtttagagctgtataaatgtgtaaattgtgtgagtacagctagtaggaaagccagtagaaaaaataactaaagagagaaattgtttgaggggaaaaaatagtcctttccagcagacttcagaatacttcatttataataaacatgtgaacagatagtagcctggggaagttattgaaataagcccctggataagcatctctctagtactggaaataacacaagaggcttctggtcccagtgaagatcctttcaatgttaataataattacttcttataaatgttgttccaggcttgctgttatgtaatttaatatttttcctatttaatccttaccgtagttgacatcattttcatttgaaatacacagaaattgaagcatgtatttaagttgcattctcaagatctcacacacctattatatttattcaacaactatgtattgagtacttatcatatgtcagacattgtctcacagtcttgagatacatgaataaataaagcagaccctggcttcacagagcttccactttagcaaaagacaggccataaacagttagcattaaaagcaatagaaaagaagacaaggtaaatgatatat

SEQ ID NO: 54484 - DNA, 1034 bp, Homo sapiens
ttatggctgcatagtattccatggtgtatatatgccacattttctttatccagtctatcattgatgggcatttgggttggttccaagtctttgctattgtgaatagtgccacaataaacatacgtgtgcatgtgtctttagagtagaatgatttataatcctttgggtatatacccagtaatgagattgctgggtcaaatggttatttctggttctagatccttaaggaattaccacactgtcttccacaatggttgaactaatttacagtcccaccaacagtataaaagtgctcctatttttccacatcctctccagcatttgttgtttcctgactttttaatgattgccattctaactggcatgaaatggtatctcgttgtggtttttatttacatttttaaaaagtctttaatgtttttcttggtcaaattgtcttcagtttgaccattaggagtcacaccaaatcggtctcctgtgtccttatgacatgaacccatcattttgtttacttctatgctttctggcataagaaaatacaacaggctcatattttctgccttacttctggaatcaaccatttcatttaactttgattgattttataccatacaattggagttagaatcattacattttgctttaaaaatgtaactttacttaactgctttatagtaaaattatcaaagactcagaagtctaggctacttcctgtgatattcttctaaaccacaataagaccttaaataacttcagggtgagggatagaaaaaatattttgtgtggttttatctaacaagaagcctggaacggagcctgtaatctgtgtgtatgcaaagagcaccagaactagtaagaaaaatatttatctcaaggaaaataaagagggtagttgtcctatggctagagatacaagtaggctcatagatctttacatgtgatcctactgcttctgctcatctatgactggttctttatctgtttcaaatttttcaaggttttttcaaaattcctagtgtgaagtgtatgatttc

SEQ ID NO: 54485 - DNA, 1070 bp, Homo sapiens
aaagagatacactttagcatcatgacataaagaaaagacttcttaaatgtcaatagatcagttcacttcattcaatttttacccttaattcttgttcactcaaagagaacaaacacttttcatatttaaacaagatgatagttgttgctcagtctcatataattttcagacagcacttaactgatggggttagcatggcctgcatctctcccaccactataaaggctgaaataaaaggcttttttatcttcaatgctagggctcacaaaaaaaagactctagagaggccttattctctcttaaacacacctttgataatgcagctcttgcaatttgagaaaaactcatcaccaataaaatcagtttagatagctcacttgggctattgataacttattcttcaaacttgttccatcttacttggaatagcattagcagcaactgaggagacacaggttggaaagaaatttattctggcagagagcgaaattaggtattgaattgtaccttccaagggtgctgttattttctttcttttacttttttttttttgttttgcgctttagtctctttgttggggttccttttttttttttttttgacttctacttttctactattttccttagaatgttgcccattataatttttagaaaggaaaatattcttttaaaaattttcataatgacaagacagtaaaagtatgcaagctggtgtgttctccaaattgcatatatattttttggaaaagaacaacttttatatcttttctgttacaaaaaataaaagtaggtacaacaaatgaaaatcttttagattcggtttttacgaaatctttaaagtggtcatctaaaaaatcattgttgagatacactcgttgaccatttttaagatacctagattttcttcaagcagagaatttatctgaaaaataagaaatagcatcttcaattatttataatcttttgaaatccaaggacaagcaggcactttctagttttttgtttgttttgattttgtttttgttttgttttgttttgttttttttgagatggagtcttgctctatcg

SEQ ID NO: 54486 - DNA, 1049 bp, Homo sapiens
aatggcctacgaactaggaaacaaacccccaaccaaacaacaaatctgttggtgcctttatgttggacttctcaggctccagaactgtgagaaataagtgtttttataagctacccagtttatggtgtttgaggttttgtattattgactaagacaattagttttgatttaaaatatatgattctctggtttaagaatcctatcaggttcctgctaatctataaatgaacttcaaatgtagtagggtactccactattttaagaaagtaaattattaaattacacttgctttgtatgatttgtaattctgggatatacctctaataggcctctagtaaacctatatggtgataggaacttttctctactttaacctttagaatttgtgaacatatttttaaaaattcttgaaagataatatgttaaataataaataaaattccgataattaaggcagacatttttcactttttaattaaactcaagaatgtattttttatttgaaaaatcagcatagtattgaaaatgttttctaactatcctcaataatacaaaatggaattaacgcaaaatattttaaccctggtttagaatcctagcacacacagtcacttgactcttaacagctctatctgcctaacagaaatctctatagattattttatatatctaaactaaaattttactgtaaactacaggaaaaatgaattatatcatcaaaaacagccaagacaactaaagtgatttgttcagacattcaagtatttcaataaaagagaccccaaatataaaggtgttaatgccctttattccagttattcctcttttacagaatggaaagtacctttacaataagaaatagcccacaactagtaggcaatactgaaatgataaaaataataatttacacatgattgagtcacaaaggaggaccaactattgtttatttccaatgatgaactagacattagtacaggcacttcaaaattgtttcgattcaaagttttcacatttggctttttgcatttttttcttcttcttcttttttt

SEQ ID NO: 54487 - DNA, 1178 bp, Homo sapiens
gctttctgttttctttcttttctccttcctcattctcttataccattttccccacctccttgtaactctttttccctccaatatctcttttcataccttttctattttctgttttttccctcctttttaaaatttcttctcatattttctcatttttatctccacgactctaatttctgttcctcacatttaatcccctttcctcctctcttttacccttttttctttttgtctattttttttattcctccttaatgtccctatcctgtgccctgtcttccctcttttgactcccatttctcatccctctccccataccgtttcccacccctgtggcacacacaggcatggtcactgttcccctccagtaccatttactcaccctcataaatcttatttccataaacatactaactcacatactctcacatcctcacatgcactggcacttccatgctgtaagaaccacttccacattcagattgtctctcactgtttttaaaaggcatactctccttctctgttccacattgtcactcacacatgtgtacacactgcctgtctcactcgctgctctcactctgtctctgcttctctctttttctctttctgtgtctttctatcccctttttattcctaccttcctccctccatcagtcttcacttttacttatttttctcattttcccttctttcctctgagcttgagctctgaggtggtttgtcattaataaacatccataccctgattttacccctaagcaacactgcagagtgggagtctgggaatattttatttcctatgaaaatataaatggatgatcagcaaagcttagatctaaacaaagctaaacgccctattccttcatttctttcccatcaccctcccttctccccctgccaccccacctcacatttccctgaaagatcttctttttctccactgggtggtagttggcttgtaagtctggcttgcacaacatcagtgtacatgacatgtctaaggtgaaagagagtgggaaatgtttctgtttgaaacatgcaacatatttaaatttaatgatgtgggtgtggtatatgacttacaccttttggaacatgcctatgagttcaaatttggaatactatcgtattttttaatatacactaatacatatgtttttaataatttctgtttt

SEQ ID NO: 54488 - DNA, 1049 bp, Homo sapiens
tttcctgacctacagtttttaaaattgtcttatatcaaatggcaacaagaaaatttctcttcgaatttttaatttggatttcattattctttcctgatttgcagtaacaagtggcatatattaaatatcgttaaatatattttgatttgtaacttatgggttataaaaccctggggttttgaaaattttataaataatactgcatttttaaatggttatttcgttttaattttataggtggctacagtcaacgacttccaaatgcaagtgctctgggaaaaattttcactgctttacctcttggtaaccccatttatcagatgctagaattaaaactagccatgtacattgatttccccttaaatatgaatcctggaattctggttacctgtgcagatgatattgaactttatagtattggagaatttgagtttattaggtttgacaaacctggctttactgctttagctcatccttctagtttgacgataggtaccacacatggagtatttgtcttagatccttttgatgatttaaaacatagagaccttgaatacaggtcttgccatcgtttccttcataagcccagcatagaaaagatgtatcagtttaatgctgtgtgtagacctggaaatttttgtcaacaggactttgctgggggtgacattgccgatcttaaattagactctgactatgtctacacagatagcctattttatatggatcataaatcagcaaaaatgttacttgctttttatgaaaaaataggcacactgagctgtgaaatagatgcctatggtgactttctgcaggctttgggacctggagcaactgtggagtacaccagaaacacatcaaatgtcattaaagaagagtcagagttggtagaaatgaggcagagaatatttcatcttcttaaaggaacatcactaaatgttgttgttcttaataactccaaattttatcacattggaacaaccgaagaatatttgttttactttacctcagataacagtttaaagtcagagctcggcttacagtccataact

SEQ ID NO: 54489 - DNA, 1031 bp, Homo sapiens
gagtgactcagttataacatccctaaagatgttaaatgctgttaagaacaagtcagcattcagcctgaatagctataagttgctgtccattgaagaaatgcttatctacaaagatgtagaagatatgataacttacagggaacaaatttttctagaaatcagtttaaaaagcagtttgatgtagagatattttaaatattgtacactttgcctttttgagtaacattccagagataggtattttttgtaggctgtttcactgaactcagttaatgaaaactgtattaacataattgttgtagcataatattaatagtgcaaaagtacatataagtcattttgatgaaaaatattccaagactaagttgagaaaagagatactattttggatgtgtatcagtatttttgtttttaataatgattgatttgtggagcattgttttttcacataattagttttaaaggtaattttctaagcatacctttggaatttttccatcttttttgaggcttttggtccagtgaagttctaagtattcactggcacttctctcctcaactgtaattctatttttaataataaaaatggcatactgtagggtcttcagagtagtgtaggaatactgtagaaatactttttcagaaacgaatccatagctgacaaattcactcagtgcccaatatattgtgattattttcgttgataaagaactagatacaaagacctctgaaattgatgataaaatttgtatctcattaattttatcaaaatgaaactaaaagtacatatgtattatacacttgaacatgtgtttgtatatctttaaaattttcctttatgttccattccataggaaaacacacatatgcacacaaaactcagttatctgtggggaaagtggtagtaataattgagattcatcaataatcatataatttcactatagacattacttgcattatctcctatcagtccttctaacaaaacttcaattaccagatgaactgactttagttttcatcttattttt

SEQ ID NO: 54490 - DNA, 1054 bp, Homo sapiens
ggacgtcacttgtcacatcttgtgacctccaggtaggttcctggatccctctacagcacctggagccaagaggtgcttcagtccttagcttacagacttccagggatggaacagtatcccctactagaacaattcaatctatttttggacagttctaatcttaggaaatgcagcattttgttttaattattgttgatgtctaaggttcaacttaactctgtgggaatgtcatctatatgaaataccttcaccatttgaagactgtgtcagttgtcgatattcagtcagtcacaattgaatctaaccactcgtcatctggaacagatctccccttcttacttacaaagcagtcaggagtaattctgtccaacactgtgctagaatccagctgtatgttctagcctattgatttccccttattatttatcttcatcaaaaaaataataaagtaaatctagaatgattttcttttcttaatgtatccatggtagctcctagtaatcagtgtttttctaagagtgcagaaaacttctgtttaaatcattcctttctgaagctttgcctataatgtacattaactcactagcctagtttgtaggctgtcttactcctgctttggggagttgagtctatatttgcatatattatcttctagcacttttcccattcttcttagctcttctgtcattagttttaaatgccctggttcatgtctttacctagggtgcattaattcattcacagacaatgtgaccatttgcaaacaggctagtttgttctgacaagccatggcctaaatggcatgcacactccaaaatacagtttacatattgtggatttgagtgtgaactggtctaattggcagatgttcactaggacatctatacccctaaagcatgaattaattagtaaaaatattttttaaaaatttgtttctgttcttaattttaataaattattcatatcctaatgcacctttataaaaacggtgactgatgatcatttttatatttatgtatacatcatggagctaatttgaattagcactaaaata

SEQ ID NO: 54491 - DNA, 1054 bp, Homo sapiens; identical to SEQ ID NO: 54490

SEQ ID NO: 54492 - DNA, 1054 bp, Homo sapiens; identical to SEQ ID NO: 54490

SEQ ID NO: 54493 - DNA, 1054 bp, Homo sapiens; identical to SEQ ID NO: 54490

SEQ ID NO: 54494 - DNA, 1052 bp, Homo sapiens
cgctctggtacttatagtagaaaaccactcttaccctatactcctggctcagatgtggctggggtgatagaagctgttggagataatgcatctgctttcaaggtattgcatttttaattatttctattttggctgaatttatttcataaaaatatttgaacatagctttcaactgcatcttatttaaggttttaaaaggccccattacacaatttctgccactcgggggactcctctagtcaaaaaaggaattaagaaattagattttatccagaggccttatttgtttactacattgtagtgaataggtgctgggtaatttctgtatcttcatgtccccacagaatgaactgtgattttttttatttaatagaaatatgtaaggaaagaaaacacacaaggaagttagactatttcctaactcttgatgatacataagctaacataatttttaatttctcttataaattttgcttcataatataaagagaaagttaattcttttgaaaaataagtaaaacatgaaaaaatgcaaggtcactatacagttttggagccctgactcagtgaaaatgttatgctcaggatatatatatatacacacacacacatatatatatatatatgcccaaagacatattcatagtaagctcatgtcctagcatctttcctcataattccttgacctgctcaactttggcagcaccttaccaaaattaggttgagacagagaagattactgtgcccctgtacaggaagactggcaaattcatacagctttccacccctcagcttgtggcaacctggcttctgcccccatcgctccactgaaaggattcttgctaatgtcactaatggcctctgtattgctgaagttaatgggcccttttatgtcattatctttcttgatttctctgtgacatttgacactcttagccacttaactttttctttaaactttttctgcagcttctgtgacatcattttcttctgttctcctctccccctcctttctgggcctccgttttcaggcctctctttttctctggata

SEQ ID NO: 54495 - DNA, 1057 bp, Homo sapiens
tacctgcaggttagtttgatttcacattttctagctcaatctgtctcactatcactattgtaaagtttatttctacgaagtaaagggtcttatatgccagcatctcaaagggtgagatgaaaaggatggtaaagaaaaaaatcagctaacaccatttaattacaggacttgggttctagctttgcttctgtgtgaccctgaccaagtctcttaacctcttgtgatgttttctcatccataaaatggatggcgattttatttttacttctgcataaaataatagtttaaataacttctctacctgttctgaaaacagttaagtcaatggaggtggaagacttatgctttttagaagaaatccggtattacaggattttaagtattatcctatttgccatcagtatgccacgttattttattctttgtgtaatctcctttgacaggcttcatcgttatgaagcatatgatgatcccgtggataggtgagttcaaaggcaatgagtgcaggttggagcctgatgaatcagaatgctaaaggctcagtgggagataagatcaacagaagcaaagtaggagatagtgtggtcaggccatgccccatcactttcaagcctgataggataatgtagtcagatagtactgggcaaagcagatgagtcttccaaatccagtaggatgagtcatcttcctttattcctttctcccaacttagccaatgccaaaatgtggggggggaaagatacagatcctatttcagagtaattttacttttattattacaacagtttttttatggtaatcatgagatgtgagtgaaagaaatatgtaggaagtaggtagatatcgaaaatggaaaaagcaagcatctcataggctatgtgtgtaggtgtgagagagagagagagagcacccagcttacagaagctaggggcagggtggggcattttcttcttgctctttgtgttctctgagtttaacacaccacttcatgtacagttaaggttcagaaaaatacgcattgcataacaaccaatatttagtattaatgttttgttta

SEQ ID NO: 54496 - DNA, 1025 bp, Homo sapiens
tttcaccgtgttggccaggatggtctcattctcctgacctcatgatccgcccgcctaggcctcccaaagtgctgggattacaggcgtgagccaccgcgcaagggccaaacttatttttatgatatctttaaaacccttcaatgactgctgatgtatttaaatcaaatttaaaaatcaataacagtgcttgtataatcttgcctgactcttcctcttgcttttgctttgtatcactctctccttccatcactgtacttcaaacacactgcccaccattcattcctcatacactttcagcttatcttttcagtattttaccagtttaaatataattttcagagatgctttgcctgtttgcccagtctaaactgggtgtccctttaattttcagtcatagaagcttatattttttctttgttgtacttatctcagtttctaaatacatgtcagtttttgtggtggtttactgtttcctcctgctctgaactgtaaagaccataaaggtagggactagatctcttttgttctctgctaaatcttctgctttatcaaagtgcctaatacatagtagaggctcataaatatttggtgaaaaggtgaataaacactcaagaatagcctaattattttaagatttgttatgaaattttctcaaaacaaaatttactaaatgtaatttgctttaatcttaaaaatcaaagtttttataatgtactttatagtggtaaaaaaatataaaagaagtattaagaaatacaagtatagactgggattaacatgttatatatactacaaatattggagaaaagacttcaaatatgttctacttcatgaaaaatatttaatgaatagtgactttttctgctgattccaaatttagttggcataacataataaaaagtgaaaaatacctggccttaatcaattttctcctcaattttactgttctcaggttaaactttgttctaaagataataaaatgtccaaagcgttaagtaaaaatggattccttgactatatgaaga

SEQ ID NO: 54497 - DNA, 1044 bp, Homo sapiens
tgggagagctgggataaggaggcatctcatattgaaatgtgcacctcacaagtcctcagcaacacttggtgatggaagatggtaaaattgttttgcagaccataaagtcttcaagttttgctaccctggatacaatctttaatgttggtactcagtatggtgggaggatacattcactgggtatatggaatatgttccttaaccactcttcccagtcctccttctaagctggagataggagaaagaattgacaactgtaaccaagacatacttatgtttcatcaaaccaaagtatgaattcatcactgcactgagcagtggactaaccaatatgtagatatttcttcattaatattttatattaatttatttgctggcttatatgcttaaaatgtctttgttttaaatgcaggtgatccaaggacatatgacccagatttcaaggggcctgttgccaacaggtaagcaattattttttggggaatatgcttttttaaacatacacagaaagctttgggggatgggggaggtactgttttccagtcagtggagaattgtgtctactgtgaggggaaaatgatatatttctgcctaaatgtcaccttatttacacagggaaagtacagagaataaatctttccatgagtcatgaatatcttctcccattagcaaatgaactgccttacattattaaactaagtgtttgtacttttcaaaaagagaagtgaaaaaaaatgctttatgagatttaaccactttgtagagaagcaaactcattcaagtagttgttttatgcacctgtttactctgggactcaccattgcaaatgcagagttgccatgccaacttcttccaagccaagtatttgtgctgctcagcttccaagatcagagtgctttctcagaggcagtcattcaccaatgcatcgtgtgcactttaagatagtttaaaatgctctagggaaatatgtactcatctcagctggtgcttcctgccctctccaaggttctgtgccattttaaaattagccagtaattcatagtc

SEQ ID NO: 54498 - DNA, 1062 bp, Homo sapiens
cccgccaccatgcccggctaattttttttttttttttttgtatttttagtagagacggggtgtcaccctgttggccaggatggtctctatctcttgacctcgtaatccgcccacctcggcctcccaaagtgctgggattacaggcgtgagccactgcgcccggcctaacaagcaattcttaggcctgatcatacatactgtgtcacatattctaaacataattttttattagtgcatttcactatagtagattttcacagattataatgccacaggtcctacatataacctaattttatgaaaatacttagattagcagatttatttcctcattctaacttagaggcaaggtataggccagttctttggacttacctgttaggtgaaaaatagttattttttcattttgaattatagcatctctgaatttacatatccaataaaaatgacttgattttttaatgtcaattttcttcggtagcaaatgcctattattattgctggaaatgatcaacaaaagaagaagtatttggggagaatgactgaggagccattgatgtgtgtgagtatgtgtaactgccgctttatttcacacttaagaagggaacaaaggtgctatttctccttttcagtctatatgtatatattgggatatttagcattgaaacaaaacttagcaacatattattacaatgatgtgtcaaggatgccaagaaagtatcataataggccgagggcaatggctcgcacctgtaatcccagcactttgggaggcggaggcgggcagattacttgaggttaggagttcacagcctggctaacgtggtgaaaccccatctctactgaaaatacaaaaattaaccaggcgtgatggcgcctgcctataatcccagctgctcaggaggctgaggcataagaatcgcttgaacccgaaaagtggaagatgcagtgagcagagatcacaccactgcactgctacctgggcgacagagtgagtgagaccctgtctcaaaaaaaaaaaaaaaaaaaaggtgtcatcataattttgttgcttatttccag

SEQ ID NO: 54499 - DNA, 1747 bp, Homo sapiens
atcagattgtgtttactaaatgttttttctgacatggtaaaatagatagctttcaaacatataatgagatttgtctttgttgataagatgtacttgtagacctttagactagtgttggtttcaaaatttgtgaaacattgttttagattatggttggcaaatttttttgtaaagatccaaattataaatatttcaggctttgcaggccatatctctgtcacaactactcagttctgccattgtagcaagaaagtaactgtagatgatatatgaacaaataggcgtgactgtattccaatcaggctttctttgcaaaacaggcattgcagactacagtttgttgatccctgttttaggtaattgcagaaagtcatgaaacagtgattaaagcaaaaattgatgctggctcaaaaaaaattccttaaaatatatcaattttcttattaggaattaaacatgggccagcgatgttcagatactagaggaattgtcttcgaagatgtgaaagtgcctaaagaaaatgttttaattggtgacggagctggtttcaaagttgcaatgggagcttttgataaaaccagacctgtagtaagtaatatgggttcataatctttataggatcttttatttattacattaaataagtatttttactttaaaattgtatgttcagtgtgtttctctttttaatatctgcttattttattaaggatataggaaaaatactgttacttttctttctttttttttttttttttttgagacagagtctcactctgtcaccaggatggagtgcagtggtgcaatctcagctcattgcaaccttcacgtcctgggttcaagagattctcctgccttagcctcatgagtagctgggactacaggtgcacaccactctgcccagctaatttttgtatttttagtagagatggggtttcatgatgttggccaggatggtctcgatctcttgacctcgtgatctgcctacctcggcctcccaaagtgctgggattacaggcgtgagccaccgcgcctgaccatattgttacttttcttaattttttaaataattcttcaagttttcttactatacattatagaaattattttagcaactgcaaaattactgtagttggtgctagatttagagaggcagtccaccctaaatatgatcatcctgttaatatgtactcattttctgtttttactcattaagaacatttcccctagtaagatttctcttgttaaacaaaagcaatgacttttttctagagtatgatactatgcctaacaaatgcctcttactacctttaattaacaaataatataaacttacgtgcctattccctgttccccaccagtttcttgttgctgtacatcaccttctctttgtacactccctaacatagacacttaggcagatattgtgtgttttaaagataacatgaacttttgctttataatatcttaaaatactaggtagctgctggtgctgttggattagcacaaagagctttggatgaagctaccaagtatgccctggaaaggaaaactttcggaaagctacttgtagaggtaattttaatactgcttgctttgttcaaatgtaaagacactcattttcatttaatatttagaaatgatttttaaaccacaaactaatcaatttctactttgatagcaagaagataatgtggttttatcaagatgagtttcaaagacatttctttttagagtgtgccactat

SEQ ID NO: 54500 - DNA, 1905 bp, Homo sapiens
tcttggagagggggtgtcaaagatttctttaaaatcgttagtgatgtggtctcgctttaagatttttaatgggatcagaagaaaattcggtacttaatcacttccggtaatcttcatgacctgttatagtgactgcagtgtactctcaatgaggaagatatagatacgaaaagaactagagccgcatcacatggggacttctgcaaatacagagactcggattaaaggtggagaagatggagctaaaggaactgcttatttaatacatttgaacaacttttggggtacttagaaggtgctttgaaacctgcatttgattaagcaagaattcgcttgcaagttaagggttagatttttttattttttaaaaatatgctttctgccacatgtaaaccgtaagttgtcctgaaatgataagctttgatattctatggtgtttattttttacttatctttttgaatgaaaagtgaacaacaagaaatgctggtggtaattttttgggtcaatgatgagttggcatgtattctgaatctaaagttgattattactactttagctctagaattactctgagacctgaaaattacctgaatcgtgactaagacgaagcctgaatgatttaagttcttttttgttggatacaatttgttgttgttgttgttgttttggttttgtttttgagtcggtctccggtcgcccaggatggagtgcagtgacacaacctcagttcactgcagccttaatttccctggctcaagcgatcttctacctcagcctccctagttagttacaatttttaaatggaacgttttcctattacaagatgaaatcaagtgaaaattgagatgtatgttgaatctatgctgtggggcagaagaacgttgtagaggtaaacattgatgagattaccactttattttgaaagggcactccacagaaggatgttattatcaagtcagatgcaccggacactttgttattggagaaacatgcagattatatcgcatcctatggctcaaagaaagatgattatgtatgtataatttttttatgttggaaagtttattttaaagaagtgtgacagtcataagcagtgagacagtatttatgtcttaaaatggcatccaactccatgcagagaactgaggatgtgctgtgcctttgaacttcagttaagtgtgctttggacgtctgaggctgtgggcttattagaatctcagtttttacctatactgagagggcttgccagacaaagtagatgagggtttgaggtacaaaacgggtttctctttttgtagttaggggtaatactttcaaggtcaatgatgtgttggcatgtattatctgaatctattgctgatgtgtaataacactttagctctagaattactctgagaccttgaaaaagttttaccttaaatttttaaatttcgaggaaaactctgggacaatcttagcaaaaagtagtaaacaacttagttaagagtaaatgtttttccctgtagtatccaaactcagttgtcttagtctaccgatttgtgggatatatggtatgtattaattttttacttaagtgttaggttcccataaccttgaaaatactctattagcaatcatggagttaaggccatatggatggggctggactcgtttctgcctttatctgctatctatctttatgccctgaatttgggttagtagcaaactaagatgcaccacctgttaaaaaaacttctttttttccttttgagagctataacctcactttgttgcccagactggaggacagcggtgcgatctgggctcactgcagcctccatctcctgggtttaagtgagccacctgaatagctgggattacaggcacattccaccatgcccagctagtttttgtatttttcgtag

SEQ ID NO: 54501 - DNA, 1922 bp, Homo sapiens
agtgtgggaaaaatttgtttctggaatcctaatactaattttcatgtatcattgattagccactgttttatctgggcttaaacatctttggcatgtttagggcattttgatttttcatgtagttatataatttactaatagataataggttttgtacagagtccacattaaaatagatgtctgataaatatggtataggtactcggaaagaaatactctccctgaacttcactgatgaaaaaggtagatgtttttctgtctctggctcatgggagaaactaaagcactgtttgtattgtcagccatagattaactaatcctgtgcttctcagataattgtttttttctgataatagttgtgtctgaagatggcttctaacattgagcagcacagattttaaactcactactgatcagtgctgttaaggtcaggagaggtaaaaatagcagcatggctaatgagttacctttgtgtttaatctctttataacttgttaccagttcaaatgacagatttaagaaattgtgtattattttaggaatactgtatgtctgagtatttgagaatgagtggcatctattggggtctgacagtaatggatctcatgggacaacttcatcgcatgaatagagaagagattctggcatttattaagtcttgccaacatgaatgtggtggaataagtgctagtatcggacatgatcctcatcttttatacactcttagtgctgtccaggtaaatactaatcaaaattgcaacgatcttgatagtatgttctcttacttcagagttggaaattgaaactgtatcaggatttggtcaaaaagttttgttacaagtgaagctgtcctacaaggtcaatgatgtaatggcatgtattagctgaatctaaagttgatgtgagttctaaaattacactgagaccttggagggtaaaatttttatcttcagtatgtgtaaatactgtaaaatagctaaatggagctatttgattttgatattagtgaacatctacctggtggtttaaagtctttctggtactactgggtgctgagatgggaagatcaggactttgtgtggatgtgagttagtatacttgagtatcttggaatgccaagttaaaatttatatgtagaaaattatactttaaagatttgagttttcttgatactatctaattttattcaataacaggagagtctgcatatttgagaaaaggttatatacacagagacaaaaggatgtgcttgacaacttaaaaagagttgagcataagatcattagaataaacctgaaagggacatttacctaatacttgtctttattgcagattcttacgctgtatgacagtattaatgttattgacgtaaataaagttgtggaatatgttaaaggtctacagaaagaagatggttcttttgctggagatatttggggtaatgtcagatttagtccattctacccaaaataccaatattaaaatgtactggttttgctagtaaccagtttataagtttttcatcttttcaggtcccactaagcagctggtctaactggagttaatggtctgctggaacttccagcatgcactgtggtagttatatcagcatatacaggagcactggaacagagggggccagtctaaaagataaggtaggtggaatttttttccccaatatttggtggctttgtaaagttttttaaaaactacttgctggaaagggaaaaatatttaaaaaaaaaaactttacaaacttgctgaatatttgagtggagggagggaatagaattttatttgataaacgtagataatctctgctttagggatgaacacagtgcaggccagagagaccagctgcttcatgggatgtgaaaaatctacttttataaagtagggtaagtttatttcattattagaaa

SEQ ID NO: 54502 - DNA, 2000 bp, Homo sapiens
caattctcctgcctcagcttacagagtagctgagatgtgcaccacaacacctggctggtttttgtgtttttagtagagatggggtcccctggcctcatgtgatcctcctgcctcggccaccaaaagtgctgggatttcaggcctgagccacaatgcccagccccacctaattttttttaaaaagttttttgtagagatggggtcccattatgttgcctcggctagtctcaaactcctaggctcaagtgattctcccacctcagcctcccaaaatgttggaattataggcaagagctactgtgcctggtcaatttgctgttatttttgacaaaggaattttcttgggaagtaaaggcacttcagatttagctttcctcctgactaccctaaagtgaaagttaagcttgaactcaatttaaagtggtagttgtgcagtgtttgtttttagatgactcatgtatgatttggtaacacctgccttgatttgatctatttttattgtaggagaaattgacacaagattctctttttgtgcggtggcaactttggctttgttggtaagctttgaatatttgattgaaatgattaaagttcatgaatactctggaattttttttttttttgagtctgatctgctgaatactctggaatttaacaggcatctttttttttgtttgtaggggaagcttgatgctattaatgtggaaaaggcaatcgaatttgttttatcctgtatgaactttgacggtggatttggttgcagaccaggttctgaatcccatgctgggcaggtaatttatgaatacagatgaaaatgtattgtcattttggaagccagtgtagtaaaataagaaaattggttatttcagtgtttgtcaaatacacataaagttaattcgactgtaatagggcatcttacataagaattgcttaattgctatcattactttgctttatatactatatacctttctctgtcggtggattcgtctgacctaagcaaacataagtgggtttataagcaccaaaacacttttgttttccattaatttttcactaaccatacagataaaaaaaaaaacaacacatttttctttctttcctaagataaattatgaacctcttttcttgtgccagagaacactgaatatgtgaatggatggctgtgaaatactagccatgaagaaattttgacaataatatttcagtgcagaattgcatactagtaatagtatgcttggattttttcagatatgtggtattaatacatgtttggaattttaagtgtcagatcaagaagaaaaacttaagatataaagtggtgttttaataatttgagttttatcacttttaatgtcaagaaattattatacacataaactttatgtctgtaattttagatctattgttgcacaggatttctggcaattacaagtcagttgcatcaagtaaattctgatttacttggctggtggctttgtgaacgacaattaccctcaggcgggctcaatggaaggccggagaaggtattgtttgataagccatattctgctagctttagaaccttgagtgaatgctgctgctttgtcttgcctgtttctatattgtaaattggccatgagcttatttattacctttccctgttgtgaattttcagtaatatatcctactaaaagactccccttgacaaagtagacccccatgagttgaaatactcattgatcctaatgtccatttccagacagtcttgtacaggaatctccatgtttaaggacagttgattttggcaaattggattttttaaaaattagactacagaatttttgtttgcaatcttcttatttaaggaatacccagataatttggtttggagagaagattattaaattttcctccacataataggtctctcttatcaggtctgtaagggacaaatagtgaatactcatttgcaactatgtaattgtcctgtagagcaagtgcagccataagtggtaaga

SEQ ID NO: 54503 - DNA, 1979 bp, Homo sapiens
aaaatgagatcagccttgagtggggttttctttatagacttctgtcaccatattttgaagagcaagggtttagttgattttaagcaggtgtgtacccccctggacagtgcttgtagaaaaacagaactatacccatggatttcatgattatactgctagcttcttggttaaggggctgagttaggcattcattgcagatagaaacaaagcagatgcatgcttatcagtgagtactgagatatttagcatggttacctatgaattgaagtttggtctcttcttacccattaattgattatctttcattctaagcaagtatttcataccctgcatatcagtatatccctggatttcgtccttccacatggtttgacactttgaacatcagattacctaagagtgagacttaacccacttttaaattgttctcaaaattagggaaataaaagagaatgaaattgtggcaacttttttccctcctagttaccagatgtatgctactcatggtgggtcctggcttccctaaagataattggaagacttcattggattgatagagagaaactgcgtaatttcattttagcatgtcaagatgaagaaacggggggatttgcagacaggccaggagatatggcaagtaatatttctgacatatttctataaattatttcagcgtttgcattacttcatggttccatggatttccagggtggcattccgagtgttgctttgaaagcagtttttttttctatttattgtagagtgtatgaaggatatagaacaatcttacagaaatttcttgtcgcttgttgctaacaaaattagtatatggtaaaggtcaggtattcataatttgaagttaaagaagttttcattttgtgatctgtatataaattcttttttaaataggtggatccttttcataccttatttggaattgctggattgtcacttttgggagaagaacagattaaacctgttaatcctgtcttttgcatgcctgaagaagtgcttcagagagtgaatgttcagcctgagctagtgagctagattcattgaattgaaagttgcatagtatagttttgccattttaacatttctgtatttgaagtgcttatcgaatctaaaagtgactactgttaatattttgtatattgtgttaaattaattttaataaattatataattatacatattgtaaaataaagaccggtattttattttctgctttttattctgaagtcctgttattctgactacagttctttgtgtatacttctgtgtctgttatgttcaataactgagctaacataaaataactctaggtttctacttgatttttcccccatgtatacctttcatctgttctatagcaagttgatgtaaattggtttgtcaacaagaatgttaactgatgaaagtggatagaacccatacatgaattaaatgatgcacaaaataaatggctgttgaaatttggaaatgattgataggtttgaatatggttattctgaattggtcacagacttaggttaaatggcaatctaccatcttaaaatggggttgtgattcggactgtcctttttttttttttttttttttttttttttagcattttatatatcagaattacccaaagaaggagttgtcttcaaataaggaaacactaacgggtaagttgatggtcaccacagtatttttttgcacctgtctttttcttaaaaagctaaaatgggtacaatcactcttttttatttttttgtgacagaatctctgttgcccaggctggagcgcagcagcacgatctcagcttaactgcaacctccgtctgccgggtttaagcaattcagccgcagcctctcgagtagctgggactacagccgcacaccaccatgcccggctaatttttatgttactttagtacagacagggtttcaccatgctgaggagctggagaccagcctgaccttgtgatccac

SEQ ID NO: 54504 - DNA, 1051 bp, Homo sapiens
ggcggtttccccgtcgtcgggagaaacccgctcacctcagggtccccgctacaatttcggactccaggagactccacagagccgcccttcggtccaggtggtctctgcatccacctgtcctggcacgtcaggagctgcgggcgaccggagcagcagcagcagcagccttccctgccccgcgccaaactcccggccagctcaaggcaaggagtgattgggtggaggagtctccttgaggctagaggccggcagttcatggaggctcgggggcacgtgggtggtggttaccacagtgaagttgtgatttggttggggcgtgagatctgagtgccctgggaatttggtgagtctgggtgattagaagccttgacttttcaaattggttctattgcaagaccttgactgtggatggctcagttctgagaaaggctgaagtatcccatataacgtccctcacagtgtctgacaaatgacagtttgtgcgtgagtttgctgatagaagttgtgagctgatctttggctgctgaatttaattctccaaatcctgctaaggtgggataaaatagattaaattgaacatttcatctaattcagggaaaataatatgtttagtattaaaagagtgggctgggcggtggctgacgcctgtaatcccagcactttgggaaaccagggtgggcggatcacttgaggccgggagttccacaccagcctggccaacatggtgaacctcccacccccatcccctatctctactaaaagtacaaaaattatctgggtgtggtggcacgtgactgtggtcccagctactcaggaggttgaggtgggaggatggcgagtccgggaggtcgaggctgccgtgagctgagattgcgccactgcatttcagcctgggtgacacagtgagaccctgactcaaaacaaacaaacaaaaaagatgcatgtccttcaaatcatttattattttgttagtctctattcatgacaaagcatcaccatttttcacacacgattgcaacacaatggtaaagtaacaaataccaaatccaat

SEQ ID NO: 54505 - DNA, 1039 bp, Homo sapiens
agcttcttttacgataactcttttgaaacagtttcactcttcctgtactctcaatcacttcactttctacagataatctgcctcctactttttaacaaatttgaggtcatcttgatgagttcttgaacctcccctccttcaaaattttgttttgaatatttctgtttttcttccatctctcttccatcttatctcagaggaagagactgactttcagacagaaggttaactattctaccttttaaaaaaatctccactaagttattattacttctcagttccctttattctcttttgcatctttaatattttcgtcacaggcttttcctttttctaagagtatgcttagatttctcccctaaaattctgcctgtttactctacttttcaaactattatttcattttctttttactgcaaacttatcaaaagtaacccatgcttgcttctttcatttctcatgtttaaactgagtcttattgtcatcactctccccaaagttttctcttaaataccaactaattataaaatcctttgtccttcttttcacttctgatcttccatgatctctctatggcacttgacactacccttgttttctcttttcttaattctgccctctcttggctatgtggaattattctctcctggatattttcattctcctacctgtttgattatttcttctgtcccttcttcactagtactttttcttttctttttttttcttttttttgaaacaaggtctcactgtgttgcccagcctggtttttaacaaattcctgggctcaagcattccacccgcctcttcctcccaaagtgctgggattacaggcatgaaccaccgcacccagccatcatcattactttttcttattccacttactaaatataaaagtttctaagatttttgcccttgtttcttttctttctaaaatctgcacttggtgatctcatcttttctcacagcgtccatcatcatttctgttcaactctgaatctatatatttttctccatatttctcctacatatcttaatc

SEQ ID NO: 54506 - DNA, 1131 bp, Homo sapiens
cggcctgtcctagtgcttttctactagtgttgtatctcaggaatagcattcatggaactggttgagaattgatatgttctgtaacaattatgcagaattaatactggaccaaggacaagcaagtttctgaaaatgcaaaaaaaaaatttgttttaaaaatgggctgccaaaataatttgataaatttgctttgcttatagttggctcagacattcatattcactgctgaggcactgaagaaaaaaaaacagtggagttatatctcttatgagtttatttctgaagtcacacccttaaagattaggggaactactggattccttgttaatttgattggtttaaatttataggggtagctttctctctattaaacggacttctttcttgctactaatgggcatgattcaatttgatgatgacacttgcagttcattttgacagggtaccctgtatgctgttaattgttttctctaaatttgatttattccagaaactttgtaaagaaggtctccacatttctgagggatagatattttcacttgaacaaatattttaagcctttatttatatttttataatgcttgacgttgctttgagaacttgaatggaaaaaatctgttttttgacatatgattgtatttgtggggagaaatgtaacccttattttgaaatattctgttggaaaggaagtctgttaaattttttgattttgtttttaaaggacagagacatcttaaacagttttaaaaatataattaggatataatatatatctacttaatactaaaatgaactatacatataacttaaaattctttcatatttctaaaaacataagaagtaaaggactgtttgagattttccctattatttttattaataggcatatactcaatgatctgtcactggacatattctataaattaaaaattaactgtattctttcctttacagttgaatcttaagattcactaatatttgagcccattttttttaaagtagttttcttacctttatttccttgactgaaatgacagaaagcactctggaacatagtaccaaacatgttttggcatcttcatggatgtcagccaattcacgatcaaccattactcttactctcgaagggta

SEQ ID NO: 54507 - DNA, 1407 bp, Homo sapiens
cttgtggcctcaggtgggagaacttggtgtgagggcctcacttaaaaagaactttccatcccactggtagaggcctcccctgccctcgtttttttttttgcactacctttctacaagaacataacctggatgcatgaatcaaaaacatgaacagcatgaaagtttcctgggccttgactggagaatgcagagacctagttgtccaagcctgggggaactgtgtgacgatggaaaataccaggaaacaattcgttgttgttgtgttattgtgaagtagcatttatttctctataagatgatattaagtcatctactgtgttctggttacctgaatcgtcttctaacgtgcctggtgtcaatgatgaaaataagagactaacctcgtagaagttgtttccccttctttgcgtaaaggagatcagaagtttcctgtgagctttctgaacttcctctttttgtttcagaacattttccaggacatgaggaaataatacatcagtattacagtatggggtatttgaccgggaggctcttagcacaaggactgaaatatgaatatgagtcatctttactattcattgtgttatttgctgaaagggacattgaggagcatgatatttattgctggccatctttttctgttttggtttctcccctgccttgtcctatacatgtggtaaacatctttaatgcacatcccaaactacacatgaatctggtccaatctttctcttctagcacttcacactgctttcagacatttgggacatatctgtccaccttatcttccctccactgaaactaatgtgggctttagactcagaaagatatgtctggatgctggctctgcccactgctacctctgtgatgttggacaagttacttaaatgtctctgggccttagtttcttcaatataagatcaaagtagtggcacctgcttcacaaggttgctgtgggaatgaaataagatagggtatgaaaaatactttgtggcacaggcatttaatatgtgccatttttttcctctaacatataataataagtgcagtttggttgatccttactatatcctcagtctgtttcttataactattattttttataaaatacaaaatgttttttattctttaatctttacataaaaccctgaaagataagtatcattgttttaaaccccattttacagatgagaaagttgacgctccctagtttaagagatttgcccaaggccacacagggttaatgacagagtgatcctggatttagacccagatatgtcaaccttccatatactttactgctgttccagtactttcccaggtgatgacttttaagatggcctaataccattcagttccaaccacctttgagcacctttgagcaatccccttctctggtcatggtct

SEQ ID NO: 54508 - DNA, 1062 bp, Homo sapiens
cctaagtaaattgtccgatgtcctgtggtcagtaagtgatggaggtggggttcaccctgacttcgtgtggttgtaaagcaggggtgttcaaacttttggcttccttgggccacattggaagaagaattgtctgggccacacataaaatacactaacacgaatgacagctggtgagctaaaaaaaaaaaaaaaaaaaagcaaatcgcaaaagaaatctcataatgttttaagaatgtttacaaatttgtgttgggccacattcaaagctgtcctgcgctgcgggttggacaagctatagagcttgtcttttaccttcagtgccaatttagtaaatatttatagggattctgaatttatttcaccatcttctaccccagacaatatccagtctagacaacttcctaatctggtggcctgatggggaccacttttagctgtgtcgtttttatttgttcctttaagtttcctttgtgacagaagaactagaggaactagaggggctgcaaagactgaggagataagaaggctttaattctgtttaattctgaatagatctttgaccctgggcaagttatgtgaacctatgtgtcctttttgggggtgggagtgagggagagttggatttaccctgaacgcaagcttcagggcccttccaaggttctgggaagagacactagcattttggtatttataattttatattcattttatcaaggaatcccacaaatcgtatacatttcaggctccccaacatagatctgtcccttgggtggtgttggagaaccaaagagataatgcttgtgaatgcactttgcaaagcagagtgcactgcataggcatgaagtggaaatggcaaaaaacgttattagtattattagtactgataatagctggaatcgaggaaacctttgttgaaggactagtgggagaaagaaggggtttaggtctgaggaaaacagggaagcctattaagctttctagtaaacgactgagcgaagttatgaaagcttctccccaggagaaaaatttctgtttgtaagaatttaacacacacttatgcct

SEQ ID NO: 54509 - DNA, 2127 bp, Homo sapiens
agacacgagaactgctctctagggtgtgggcagtaagaagactgtggggtgcagaggtcagagctagaccgactctgagtcccatcctggctttgtgattaatatgaataaaacaataatacccttatttcatggtctgtagcagtgctgtccagcagaaatataatgtaggctttttatgcaattgtacatttcctaagagccattattttaaaaaagcaaaaaagaaacatgtagaatttaataatgtgttttatttaacttggtatatccaaaatactttcatttcaaaatgtactcaatataaaaattaatgagatatttatatctttttttttacaaacagttcttaaaactcggtgtacgttttacacttatagcatctctcagtttgaattctaaatttttcatcagaaatatttgatttgtattttgattttactaatttaaagtaaaaaagtaggttcactcgtctaagttgaattgtgcttagaccttttccagtagctgaatggaacattatttttaaaaggtaaattaattaaaatgaaatgaaattttaaaaatgtggtttgttggttatgccagccatgtttcaatgctcaaaagccacatgtggctagtggctactgtattggacagcatgctccttcaggtattcatcttcactatcagaagagaccactagactcagacaatgagagtagcgtaaggggctgcagaaaggattggctgctgggtcaggttcagatggggaggacacacctgttggctggactcctggcagccaaaggctggcgactgatgagcaagtaatgagtgcctgactcagggacacatctgagcgtttgatgagcccttgaaattttatctgaaaatgcagtcctcagtttcaccatatcctgagcctaattttaccccagatgttgtgcagctgtgagttttcccaagggagtgctgctttgtggtatgtgtgagttggctctttggtctcagtgtggtagtgtgaactcctggaggctttgagggcagacacagacttgaagcacttttatttgagttgtttcattgctccaggagggtattacacatatgggagcaatttaaatgtccagaacaaaccacatgtcttcttttaagtccagagagcaaggtgattgcagtttctttgttcggtttgcttattttttactgcttatttctgtgtgcataaattcagcgacatgctaatagacatatggccaatggtgcttagagaaaatctgtttgtaaacctgaatctctgttttgcctacacatttgcattgtattcctgccctgctccaactcgttgtcctagaccatccagtgttagcatttttctcatgagatgaacatttcgttataataatgacagtagctgtcatttgctgagggctttctgcatgtcaggcagcctactaggtagtttacagatatttattgtctcacaacaaccttcagcatgggcaggattggtttcatttgacagatgacaaaactctggcttgacaactttaccagcatgagagtgctagactagggtcagcaaactacctcctctagaacaagcccggcttgctgcctatttacatgcagctcctgagtaagaatggcttttgtgtttttaaatggttgaaaaaaaaatcaaaagaagaataagagttgacaggtgaaaatgatatgaaattcaaatttttcacccataaataaagttttattgaaacacagccatgcttattcaccatatctgctttcatggcacaaaggcagatttgagaagttgagatgggtactgtatggtctataaggcccaaaatatttactacccatctctttacaggtaaagtttgccaacccttgtgctaggctgttgagttctttcagtggactttaagaaccacagtgaagagcagtgtggttctttcatgtctggccagcaccaggcctcatgcctcacactctgaatggtggggatatttactgagcatagagctaaatacggtacgtggaagaggagactgaagcttagagaggccaagtgactgcccaaagtctcatagtggggctggaattcagacccaaagtctgaactcctaacagttatgt

SEQ ID NO: 54510 - DNA, 1265 bp, Homo sapiens
gaaatcgaagactggtgaaagacgatagttttttttcgtgttgatgattcatagccttgttttagacttttataagtaataaaaagcactggatactgctgatttagtctcttcctagaggctcatatttgtgtaaagaaggaaattactctgtaagttttcccttttgctttttcctggctctctctttctgtgcctttgtctatattgaagcctatttttctgatgttccttcttcatctccagccttcatgccccttcccaatacaggtgttgcagggatcgttagctagaatgtctaaggaaccatactatcaacccaagagaagggaagcttggtgaactcttaaaaccaagtagatgaaaccttcttgcagagtcccgggatataagccattccattaggaatccttccctgggaaatatgaatcattgctatgcctgatataaaatcactgacatggtgttcatgacagctcaccatgtcatccctcacacctttgccatggcctggaggctgactacactactacttgtgtttgttcttttattgctgaccttgtcaaccaggtcattctttctctcttcctatttctaagagaaaattcattccccagaaccagcaagtacctgaaccattgccactttatatgtgctgccttatttatttttcatctcattctttggctgggagtaaaagaacctttctctcctaccctggtttatgttgcctgattatctgttcgtcggctggtttgatgtttatttaattctgccatgctgcttaaccttagaagcctggttttgtggcttgatttgagccaagatttctgcatgtgacttctaacttgtgggtaaattaaggtttgtttttctctcacccatctttgacccatgatattaaaacgttatttgaagaaaggacatccaacccatataccactctaggtttctgtgttaaaactattgaaatccactatacattatttcagatttatgtaggttaaagggatctgggtttgaccttttccccacttatcttcagcaaatagagacatgtgaagaggaagtttatttatcaagcacttatagagaatctaagtactgtgggtaagaggaggggtagagagaatggagataaaagattcactgaacatctaattttttttctaggggaatttagggtgtgtatgaatagtaataataattgtaacaatagcttacatttactgagtgcttacctgtactgtgttggggctttatat

SEQ ID NO: 54511 - DNA, 1571 bp, Homo sapiens
taaactgaactttaaaaatcctttgaggctttttaaaaaatgtatttgaagaatttccaatcagatcaacttaggaaggcccacttaggtcaaatcagacatggaggaattaattttcttgtggagctggtgttgagcctaagtccatcgtgctgcctgggtggggaatgccaggcagctttccttctttgctttccctgttctctcctcaatcactcatctctctagataaggccacagaacagccagagtgatcttttaaaaagtaaataagatcatggcagcctatttgtttgttgatctgtcagtcaaaaaactaaaaggatcacaaaaaaaactaaagggatcacaactgttttgcttatcgctgtgtatctatcatctagcacaatgcagtcaacaaaagaatgattaaatgaattaattttaggcaaaaaaattagcatgtgcaaagatccggtggcatgaaggaacaggacattttgggaaacagtgaaaagttgtgtatggctggcattgagctggctttgggagctggaagagataatacagttgggtcagatcataaggatcatgtagattctgtcaaggagtgtagatttgatcctctagaaatggggaaacactaaaggattttgttttttttgaggtggagtctcgctctgtcacccaggctggagtgcagtggcacaatcttggttcactgcaagctccacctcccgggttcacaccattctcctgcctcagcttcccaagtagctgggactacaggcacctgccactacgcccggctaattttattttattttatttatttatttatttattttttagaagagacggggtttcactgtgttagccaggatgatctcaatctcctgacctcgtgatctgcccgccttggcctcccaaaatgctgggattacaggcataagccaccgcacccggccacactgaaggatttttaaacagagtccttgggttggctctggccattgtattttgtatttggaaattatttgtctcaatgatgattttgctacaatgattgcacacgggtaatttcaaacagaactttaaaagttaaaatatgctaaagatataagtgtgcttgtttatgacagagcttggagttgtatgtatcaaaagggtcaagccaatgacaacataactaaacattttatacaaataagttattagttgtacaggttgttaaattttccatttgatgaagggaatcaagtttgagcattatctcttgggtcatttagacgatacattgtggatttatggctccttttggtagagtcaactcttgacattcggttgacagtattgcccttaaggaggatgctaggtggtccttccctcagagtcactatatagcagctgtctgtgagtcctgccttggaaagacaatattattctttcagcagctattatttattgagcacctacaatgtggcagatgaactaatcatcttaccttatgtgagtaaactttatagcatctctttgaggtagatgtgtccccattttataaatggagacactggctcagagaaggtaag

SEQ ID NO: 54512 - DNA, 1138 bp, Homo sapiens
ttggaatatattacgatctttgaatcatgactccacaggcctacaggatccctttccagtctcctccaaggcactcagcctcttattattttctagctactctagggtcttttcaggccctgaatctgaaacatgacatttgtggaaaatgatgggaagtactttatggctaaagcttagtctggactttgggggctggtgggacattaggtagactaagggtttggacttgaccttgtaggtaatggaacacttttgagacatttttagcacaaaactaaacgtaatggagccactgagctgaggagtagaatattcttctattgtctttttagagtgctcagagtccctgcattgccactggtcattgccctttgtacttggaaatgacttgttccaattatgacagccttgcaattgcgcaggccgaatgtttatcagaaaactgtaagttaaaacatggcaatgacatctctctccttgtgtgtcatatttaaggcacatgttctctgaaatcaagaagctgggctaggatcttgcactggccccagaccatattctgttgtgaccatgcttcagtgagaatgtgtcacgtgtaaaatgaagataagcaagaatatcagtctgtttgaaagtgctaataaaagtaaaatattcttggcaaataaagctattaatgtaggtgttgaaattttcatttagtcagagcagtcctaaatttaaatgtaaccttttgagcccttagatcattgagttaagactctttctcatgcggatgaacagtaaatgcttgttatctgaagatgtaaattgggaggagtaagggacttctgccccattgtgcattaatgcctactgtttgtttccctgacttagaatgtggctccatatttttgccctcaaggcagctattgatggagtcatcctatgctccaaaccttgagctaagcaccacatatagtcatgtgccacatgacgacgtttcagtccagtcaatggcagactgcctatatgacagtggtcccataagatgataatatcacatttttactgtatcttttctgtgtttagatatgtttagatacacagatacttaccattgtgttacagttattatacctatagtatatagcacagt

SEQ ID NO: 54513 - DNA, 1640 bp, Homo sapiens
ctgtgatatatatacccctgggatctggggggcaggcagcaaacctctttggaccttagagacaaactgggcatagtaatcatatctgctgtactggttgttgtcagaaacaaaatgaaataagatgatatactttgtataaataatgtttatacaaagtataacattatactttgttatatggctacattgtctctagtgtaagcaattttatttacaatttgtactctacttgttttgatatcatttatggcaactttatgtattatagcatttcaaacctggagggatctaggcagactgtggttgattagttgatgtttagaaagactggttaattcactgccagaatgcagatggggtggttggggaggataactgttttctccaggcagtgggtcagactgttcccaaagtgtgatcttacccatatcacttaacctctctgggcatctgttacctcctggaaaatgaaggcaaagctgcctacttgtagggctgatcatgaagaagattgagatgttttctgtaaagtgcttggcacttagcaagtgttctataaatactattattattttcattcctgaaaaggaaggagttagtattctagtgttgagtgtcaaaagactgggggaaggagtgtgggaggggtttatacactttccttcccatcctctcagttgtcctccctcatctccactccctccatctccaatcttttctcccctcagggctgaatgaaattgaatgtcttgtaaacgtgtgcagcctttgccaccgggccctcggacatgcccttttaacattctgacataatggatgaaaacatgaacagctgacagtcattggttaaatctccaaacttttcattccctcacctgtggggatggtgccctctgcctggtgaacccagcccaggcagagattgcaggagctggctctgctggtggtgggcctggttacctaggcaacgtttacctgtgctgatgacaaagggcctgtcactgcctcctgatgcatgcagaagaatattaagtttgcggggagatggaaagaaacaattttctcttgaaatgaggtagatgcaggtgttaatttctttggagtgaattttctgttttcagagaggcaagggtagagcttaaacacaaacttctggctgaaaatatttagtttgcgaacctggcaagcctcttaagaaaaaaaacaatcctggtgccgggactgttaggcttcctgtcttttcagcagcttattgcatttgttttactgctttgaaggattggaagtctctgaaggccatttctttaatgacttggaatattaatgtaaaaacttgcttgttggacaatacagtgaatactatagctttgcctctaattggcttttcagtccttcacgctgtaaagcccccttcttttaagacattttctttattttgaaatatattttatatttataaattttatttataaaatatctttattttataaataaattaataatgaaggaaagtgcaccaaacaattaaatagcccaatgatttatcatgaagtgaatatattgatgattgctgccgttaacaaggtgaggacagaacatcgtaggtgtcccagaaacagtccttctccccactttca

SEQ ID NO: 54514 - DNA, 1074 bp, Homo sapiens
ttggacttacagttccacagggctggggaggccttacaatcgtggtggaaggtgaaaggcatgcctcacctgcggcagacaagagaagagagcttgggcaggcaaagtcccctttttaaaaccatcagatcttgtgagacttattcactatcatgaaaacaacacgggaaagacctacctccatgattcagttacctcccactgggtccctcccacaacacgtgggaattcaagatgagatttggtggggaaacagccaaatcatatcaaaagttttatctggcatatctagtgagtcattatcagaagcagtagtctctctgaagcttttctcatctatccaccttacatttttatgattaaaaattccaaaaattacagaagtggagggaatagtccaaatattcccccatcactcaaatgcaactcttatcaagattttgtcacaatttgcatggaaatattcacaacctataagaagagaaagttttaaagcaaggcaatatctcaactcacagccatccacttacctctaatggccagcatcagagacaaagacttctgccttggttactgctgtcctgagcttctagcacaggtgtgcccctagatgatttcagtgagctattgttaaatgaatgtgaattcactgaagaaccacagactgtgggagctggaggaagtcttggcttgtcgtaatgaaccacagattacagatggagatgctgacatcctgagattaggtcacagaggtgcatgggagagttaggccaaggtctcaactcagggctctctccacttttccacacttcctcctcattttgctagctcatttaattaccactttttcttcctttctgataacactgaagtttaagagcatttcattacaagtgtgatgatacaatgtggtattaagacatgacaaggcaagttttattggccattactatttgcctcaagtgagtggcaaagcctttgaccactcgaggcatatattaatagccctataaaatacatcctggattgctagtgctattaccgtctggctattacatttaaaaaaatattgta

SEQ ID NO: 54515 - DNA, 1064 bp, Homo sapiens
taggcacttttcttaaactctctgggtctattttcttctctgtcaaatgacaacaagaatgcttgtcttttagaattcatatgtatatgaaaacacctggcatagggccttgaacataatgagtggtcaataaatcttatatttttgttgttgttattattgtcatgataatgaaatccaatgggaaattttttcttttaattagttgatttatttgtaagactaaaaatgttgttgttataacagatccttgtcttgcagggcagtctttctttgtttcctctctagccctcatcccttggaaaaatgagctgaaccatgttggttggtgcaagaggggctgacagaagagagttttgataaatccacaagataactttggaaactctttgccattttccctcctactcaatgctgctgggactttgagctcgctgaggcagtctaaggctgtgctttgacttcagtgctgtgccttgtgcttgggataattgtgttttccatttgatggcccccaatgctttgtgtaggaattggatggtgcacccatgctcctcaaatgctgaagcagtcatgtcacttggtggggtgaggtggatcatcagcaacaacatacttttcttttctttttgaattaagcacacggaaaaatccataatctaaacatgagggacattaagttttggatggaagagagtgaattttgcaacaataacaactaaaaacccaggacacagaacaattattgaaaacaacttgctgaagtatataaataaataaaagtgtcatttctgaagtatctttccttccctaggctcactgccattgtcatgggaaaagtgtgcatggcagcatttactctgaggtaataacatggatacatttcccgttgctcaagacttgtacatagagtctgaagacaaattcttcctatcttgctgagaaattaacttctatttttccattcctgtgagccagaagggtaattaccacatgctgttcagtcatgagtttatggaaagaaacacaggcttcattcagggtcttcaccaactgggtggggt

SEQ ID NO: 54516 - DNA, 1049 bp, Homo sapiens
agggattcacagatcctttgaagcccatctgaggactgccagccaggacccctagcttggtgcactacctttcttgtttaatcacattctaatctccaaatcaaggcctcttccattgtgaatagagatagaaactcagctcagattctttgatggaactgtgttcagccaagttgtgtttgctcatcactgaagctttaagagatggttaaagaaacaaggtaactgtgtggaattacttatgatcacaaaggcatctgtagcaaaggatcagtctttacaggagttgtcttctgagcctgggtatgaagggtctctaaactattttatgggaaatttaaatccctcgatcgaaacaaattatcataggagggaagaaaaagtaaatctcattaatggttaggtgtagtgggttaagtatttgcaaaagtcttggtcattttgaaaatggtaataccagtgcaatgagttctgaaatctgtagacatagtgtgtgtgtgtgtgtgtgtgtgtgtgtgtgtgtgtgtttctgaagaaaataaaaattttcacatctaaaataaaggctcagtttcctttggggtgccttagttcacagcagtatgacagctaaccagaaagctgccatactgtgattctgtttttatattatttaattagatgatttaaagattctctaaaaattctggtgcagcctttgtgttcctgggaggaatcttacataacttggagtcctagaatagaggaagagaacagtggtacccaggcctcgtttgctgttatggtttatgtcgcagacttgctaggtatgacttccaacaacacaaacagaaggtgacaggttacaaaagagtagataaaattttttgctgacttttctcctggctacactctccctacttcctccccattaagagtaatgggagagttcctgaactaaagttgcattgtgtttccatgcagaaaaccaaagactccccgtaagctgagctgaggtaggcagggcatgaaaccgaagggctgcaggtttgtcatttgttgttaagagc

SEQ ID NO: 54517 - DNA, 1986 bp, Homo sapiens
gcccggccaacacagcgaaaccccgtctccaccaaaaaaaatacgaaaaccagtcaggcgtggcggcgcgcgcctgcaatcgcaggcactcggcaggctgaggcaggagaatcaggcagggaggttgcagtgagccgagatggcagcagtacagtccagcttccgctcggcatcagagggagaccgtggggagacgggagagggagggggagggggagggggagggggaggccaaatggcattgttatggggtcttatctgcaaacgcagaactccattatgttttaatgatggatgagccatttttacaaatttgcaagattctagaagaaagaacaatctggaatgtgttcttacatacttttttttggtttattttgtttttctgtttttttttttccaagatggacactcagtgtgaatgttcttatgtactgttgattgtacctctaagatgatgtaatgacctcatctcatctagctgtcaacaatggcccccttttggccagaggttatttgactgcttcagagagatctggaaaacacaatttcttagttttatctgtggccaattgtacctctgtaatggctgttttgtccaccattgttttctgggatttctgaggaaaattctgagacaagtaactcctttgtttgtggaagttagttttggaaattacaaatgaagtatctttttttttttgagatggagtttcgctcttgtcacccagctggagtgcaatggcatgatcttggctcactgcaaccccacctcccgggttcaagcaattctcctgcctcaacctcctgagtagctgggattacaggcgcctgccaccacgcccggctaattttttttttttttttttttttggtatttttagtagagacggagtctcgccatgttggccaggctggtcttgaactgctgacttcaggtgatccacccgcctcggcctcccaacgtgctgggattacagacatgagtcactgtgctcagccagacaaatgaaatttctatcctaaaacagcatgcattacctaatcccaggtggttaaaaaaatgtatatatatttaatggttgctctgaaaaaatatagacagcatgggttccaaaatattaactatagtaaggagtcccatcatggttttcatagcatcctatcctgtacttgtacttgtatgttgttgcatttataaagattgaaattcattactaatgtagttggttatcagtttctttcctagaacagggagcacctgtcctgaaccaggtccagggtagtgtacatgacacctcagcaatagagtgattttctctagttttacagtttctacagtgaacatattatttttcctaattacaaaatataaatctctttaaaatgacgcatgcataattaggtactcagtattacttttaggaaattatatttgtgcaactgaagaaaagacctacatgggaagaactagaatggaaaggaacaggttgagggatgtatataaatggtaggtttctcactttgggaggccaaggtgagcgaatcatttgaggtcaggagttcgagaccagcctggccaacgtggtgaaaccccatctgtactaaaaatacagaaattagccaggcatggtggcttatgccagcacatgcctgtgatcacagctacttgggaggctgaggcgggagaatcgcttgaaccggggaggcagaggttgcagtgagctgagattgcaccaccaaactccagcctgggcaaagagtgagaccttgtctcaaaaaaaaaaaaaaaaagaaaaagaaaaaaaaggtaggtttctgctcttggatctaagtgctcgattgtagagaagatatcataaagagagtccaaagtgtgagttcatacccacaatagccagtaattgacatggcagctttgttttgccttcacttaaaatactggcatggtgtgtattttgttgtctgtccttcagaattggattt

SEQ ID NO: 54518 - DNA, 1352 bp, Homo sapiens
tatatttcagtatgcctctaagtaaaccaagtagctcctcctccccctcaacacctggtatgattcatgactgatttgggtagctgtaatttttctaatgtcagttagaagggaaagaatttaaatttactacatgccaatcatattccaaagccatacttagtattaaaaccacagaaggagtcatttacatttaacaggagctgtgggtcttaagcaatgatcatttggtaatgtatgttttgattttaggttaaaaagaaccttgatattgtgggatttctggttttcagatgagtggctagtagcctgtttttagaaagacattggggatgggaacatgtatttggcttctttgagtacagaaattctgcttcttggtggaccacagtttgactttgttttcggggttaccttggtgtaacaaagcatcccttatgccttcagggctgtccttaccacccatcacctgccaattggttcctgtctatgtcagtgttttgaatcagaatatgaggtgtgaaaaatacttcattcgattttagaccactcctaccttttgggtagtattacatttgaaagtttaggatttggccttgttcacttgtttatatttttactctaaaataggtgttaaatatattttgagcatttactgttgcagggcactgtactaggtactatggaattacatacaaactggagagataggctctgctctcattaagcttgttgtatgataggaaagaaggaaaacaacaatgaaaaagctacatagccctttcattgcagagtggtcagtgctatggtgtggacagagtgtcctgagggagtctaagtggaagataagttgagggagaagtggatagagagtgtgtgtgaccttatgcaaaggcactggagtaaaaaggtgcatctgtcattgaagagaatgaaaaaaaaagttcagggacaggagctcagtgagggaaggtgagtatgcccagaccatgaagtctcctgggctacagtgaggactttggactctatgagctaggagtgttctgcccacttaaaaaaagacatgtaggggacacacattattttatttgcctgaagcttgaccacctctcctttagctcccttccgcattctggaaaatgcttctccatttctgtagctccatggttaccatggaggcagccacgttgttttaagctactctgtgtcccaaccacagatgattgatccagggattttatttgattccttgggggtgttggaattggattataaagtgaagagctgttggagaccaagttctgtcaagcagcctaaagagcagagatggaagaatgaagcaagaccacaga

SEQ ID NO: 54519 - DNA, 2362 bp, Homo sapiens
atacaaaaattagccgggcctggtggcatgtgcctgtaatcccagctactcaggaggctgaggcagaattgcttgaacctgggaagtggaggttgcagtgagccaagatcttgccactgcactccagcctgggtggcaaagtgagactctgtctaaaaaaataaatgaataaaaataaaataaagtaaaatcaagcagagataggatattcctgggctctccacatgctccaggcactggttccagacctttccaacatgaatcctagtcttgggttctataatataacagtattcccctaaaaagttttctgtccccactttctgtttatactagccacaattagtttctgtcactaatgtaaaattattttctctatatgtgcaggtatttgtagatatttataataattttgctttagggcaatcttcggattgtaaatgggccttaaagcttcttaattcatggaaagtcaattatcctctagtttagtttgaggatacaaagggacaggagaagttaagctcatctcatatttcccaagaatgtaaatgtgatgaaagggaactttgcagtctaagcaaaaacacttggacaagataacttacggacttgagtgtaaaaacttaagaagtgaactttcacttgtagcagttctctctgatgtgagtcttgctagtccactcaggttttatttcttttagaaggtgatgcaaacagcaatattattagcttaaacctaaaatgtggtttatttaatgtaaccatgaccaactgcattttcataattctgtctttgctgcattatcagctggcagggttattcacgctggactagctctgagcctgctaattcaaataaacagtccttgccaaccactgctgagctttgagaaggtctaggctaaagatgggcaaattaaagacaattccacactgtggtaagataatcaactactctgattacctagtaactaagctaattgggaagcagtgtagtatatgggataagagcaggctgtgtggattcagacctgtgtgggaattccacctctgctgtctacatgctagatgacttcaagcaagttccctggtctttctgaatctcagttttcctgttgataaaatgaggtaataatagtacctacttcgtgggactattatgatttagtaaaataatatttataagacacagtaagttcttttttttattattactttaagttctgggatacatgtgcagaatgtgcaggtttattacataggtatacatgtgccatggtggtttgttgcacctgtcagcccatcatctaggttttaagccctgcatgcgttagttatttgtcctaatgctctccctccccttgcccccgactccctgacgggccccggtgtgtgatgttcccctccctgtgcccatgtgttctcattgtccaaatcccccttatgaatgagaacatgcggtgttgggttttctgttccaagacacagtaagttcttaagtattagcattattatggatattattttgtaaagcagttaccataatgcctagaatttgataaatgctatttgctcttttaccttaaaaatgtacctatccatatctttgaaacttcagtaagtaaatgtcttccctgatttacctgcctttgggcagcaggttaagaatccctgacataaactgaccttctcattttatagacagaaattgcaaccccaaagagtagcaatttttcagggttgggcagagctggtctggagcttaggggtctgtctcctaattcagtgctttacccactacactgcctatttcaagtgcagatgacctagggcattctttggctgcatcaatatgtataaagagacacatgatgcttgcaaaaggtacagttagagacttttacaaacccccaaacttgtggatatggaaatgcttatatactccttatttttccccaaatcatatttctataaggattctcatttcctgtgcacattccttttttatgtgaatacagttttcctgaagtatcttcccttgcttgatggcaattttttctttttgaggtggagtctcactctgtcgcccaggccggagtgcagtggtacgatcttggctcactgcaacctctgtctcccgggttcaagcaattctcttgcctcagcctcctgagtagctgggattacaggcgtgcgccaccatgcccagctaatttttgtatttttagtagagacggggtttcaccatgttggtcaggctggtctcgatctcctgaccttgtgatccacccaccacgacctcccaaagtgctgggattaccagcgtgagccactgcacctggccgatggcaagttttta

SEQ ID NO: 54520 - DNA, 1089 bp, Homo sapiens
cagagtcctatgctaggtgccctccagggattgtaatccctgttttatagatgatgataatagatatatgtaatagatagatgtaatccctgttttataggtttgggaattggtccttaactggcaggtccgtgggactgtaaagcctcaggaagagcaattgcctccatcacagaaagcataagaggttgtaggaagaatagattctgtgggcacaggcctgccttgtattccactctacccggagtgcccagcactgggcctggcctctgccagtggtcagcaaatggatgtgcaatggacacatgaacagactctgcatttggtgggagctttgaattctctgactggacttgaaggaccttccaaagtcactgaccatttagatggaaataaaatatacatccccatcacttggctgttaaatataagctcgtcacagttaaagtctggcaaggctggactgggggaacagtggcagttcctgagagtgctgagggtgggattttccttacagttctattaattggatgtgtccagagtgatctcgtgtttccttgagaattgtggccacatactgccctaagtgctgctctctgcattttgtggcagttgatgggatatgatgagtttgtggggacaaaagactttaaaaggtctctgtgagaaatgactcctattgcctttgggtgagaggccaatttatcagaatagcaaatgccttatgttagtggcatactttgaacacttgccatagaatgtctcctttgatccttgatagataaagaagatataacccccattttgcagaagacactgaagctcagagaaattataggaattgctcaaggtcacatgaaattccaatctttctctgagctccagggtcagttatcacctgcctacttgataactccacttggatagctaatgggcacctcaaatccagcacgacctaaacagaggtcccaactcctgctctttctctgaagagcactgatgctctctgtttcagtaaatggcatcccagggaacccaggtacattagtcctattgctgctgcaacaaattaccaccgacataaaagct

SEQ ID NO: 54521 - DNA, 1036 bp, Homo sapiens
tgtagtctgcgtcagtgctacttagagtggggtctgtggaccagcagtatcagcatcacctggacatttattagaaatgcagaatctcaggactcaccccagatctcttgaatccagatctgcattttaacaagatgtccagtgattcctctgcacattaatgtttaagaagttttgctggctgggcacggtggctcatgcctgtaatcccagcactttggaaggccgaggcaggtggatcacctgaggtcaggagttcgagaccagcctggccaacagggtgaaaccccgtctctactaaaaatacaaaaattagctgggcatggtggcagacgcctgtaatcccatctaccagctactcgggaggctgagacagcagaattgcttggacccgggaggcagaggttgcactgagccgagattatgccattgcactccagcctgggtgacagagcgaggctccatctcaaaaaaaaaaaaaaaaaagctttgctatagggaaagtgacaaacacataagcagataattactgtgcacaatgagattgtgttaagaatgggaagagtaggaagcacagctgcccagagaggagcgtccactctaagtgagtgtgtgagtgcattttttgtgtgtggccagtaagggggtaggtatagtgcttggtcaggaatagctggcagaatgaggtcatagctgaggtaatgtttgaaggaaggagtaaatattttaataatagtaatcatagctttcacctatcgaatactgaataatagtgtaacaaataatagtaaacacaagtagttcttagcatgctccaggcccaggcctactcattttaattttttttttttttttttttttttgagacagggtctcactctgtcacccaggctggagtgcatgatctcggctcactgcaacctccacctcccaggttcaagcagttctcatgactcagcctcccaaatagctgggattacaagcacataccatgacgcctggctaatttttgtattttttggtagtgataggtttt

SEQ ID NO: 54522 - DNA, 1517 bp, Homo sapiens
gttttgggcactgcacctattgattgatccctcagtggctgctggttggctctttgtcccaccttcaccatcatctggtctttctgggactcctcagcaggctcctctgggtgggctagccctaaatgtgagtgatcctcacagttctgacccctcctccacctctctcccctctgctcctcttccctggtttgggactcagattcacattgaaccttttttaactggcagggcaagcctctgtggtccatctggaaagaaccacaaagcatcctttgtcatcctgttttagtatctagaatacactctgaagatcagaagcagtctctctgtacaagacatgtgtttcccatcagcagacagcagactcttttgtagctgggttcaaaatctttgttgttgaccgcttctggcatcttagcttttgtgaatctggggtgataccttttggtttccctgccttttctttaacaccagatctccttcatcctgatgcatttttaaacaccagtcaggatatgccatttatgttcatgctaaagtcttcactgacactcaccacaccaatctacttttattcccagttactatgttagaatcctatttagatagatggagccaattgagcgggccctgcagaaagccatattcagttagtgtaaatcttcctgctggtgttggagacagcaaggtcccctgggattctgtctggaaatcttattggattttcaagacttaagttaatatagagaccccccaagatagtatagggcctcatttctttgccttgaaagatgtttttagaggtctgtctcaagagtctcgctgataaggaagttacttcaaatatttcaagagaaacaaccacaaagagtcttctattttctcaatattttttctctccctgcccgtccatctttttagtattttttaaatgcctgccctctatatttatttccctctttctctcatgcactcattaaccttaggcccctgtttcaaatggaattaattagtaaccataaaacttggtaagtgatggccttaagggaaaagtctttctttcttctttctttctttcttttccctccctccctccctcctgcctttccttccttccttccttccttccttcctctctctctgtctcgctctctttcatgacgaatgaatataccttgtagacataagtgaatacatttcatgatactgtacttttttcttttcttaatcaagtgaacatcttccttagtgacatatagggtactgtctcctgacttttgctctgagacgcagcactcagcagaacagagtgtgggctttggattcagagccataagtttgagtcccagctctccctttatgctgggcaaacagtgtcgctcttctgcagttccattcccatgttagtaatataggcacgaccatttctgccttgccatattgtgttcagaactaaaggtgattgtgcatgtaaagtgcctcactcccagtgggctttcaggcatccccaggtg

SEQ ID NO: 54523 - DNA, 1078 bp, Homo sapiens
aataaaaaacttgctaatatgccctccatacaaatgtagcatggctaagatttagaggatttgttcctactctgttttatgtttgtttgctttattgcacaaagtagtgttttgcatttgtgttaatctatatttttttaacttagtatgtaagtatgttccatgttgttgtgtgacttgctttaaaaatgaaccaaatattgaacatctactgatatgatggaaactgaattgggtatttttacataaattagctcatttactgcagcactctagtgaggtggacattattatccctattttgcagttgaggaaacttaaggctcagactgtttcacctactcagatcaaatagctaataaggaccaaagtcaaaattcattggacatggggctgacttgaaaagcctgtgttcttttgggtatgcattttactggctaccaaatatcccatctatcatgccatgttgtgacgcaaatcgaacatcaggtgaggggccccatagtggagctacctgtcacccaagataggatttctcctttcaggcaacttcttcaaagcctaattcagcacacagacatcaggtagaaaggtgattatttcctgcctggataggtttccacccatgcggctctcctatactcttaggtgtacattattgattccaggagtcatatgtgtccctatctgtgttgtgggtaaggagccccacagtcttttctcttgaaagacttggctctggctcagctgtgccttgaatctgtgattctgtcgcataccccaggcttttctgctcaggatggggcccttttgagaccaggtctttggtgcttgctcatgtgcagtctggaatcagctgcacagggctgggaagctgcaccgcccacctctaacaggctcacagcagaattcttaacacaggtgctttattttagaagtttatactcttcattgtaaatagctaataaaaagcgacagctacagcccatttataaatgcacttccagaaaccaaattcaaagggtttactaaatggcaggaacctggtcaacagctgttttaaatgcatttatttctg

SEQ ID NO: 54524 - DNA, 2022 bp, Homo sapiens
tgtcagtcaatcctaggtgcttgaaaaacatctcatttagtctttacaatagcttatgaagttgatacttttgtctcagtctttaaataagaaagccaaaactcagattggtttagtgatctggtcaatattacagagccaggaagtaagaggaggaattgaaaacaaggtctgcccgcctgggagtctgtgctgttttaagtcactttactgtcccctgctctgccacactgcctgtgttttcagagaggaggcaaccactaggctaaatgactatctggcaaaaatctatgtggagttggttcttcctattatattgcatctgtctgggacacctgagtgtttgcagagattcttgccccgattttcagcaccctcagctgttagccgtgctatggatgtgatgttggggaatttctaagattgaagtggccagttgcatgtagatgagaagactttctttaatttgccctaagtagacattctgcgcagtcagtgtgttatagaaagacatttctgggaggcaggtgatccaagggatggtggtcaagaagcacagaatatatagagatgggatagaaacaaatgcaatgaaagatcaggacattttgttcaaagtagaaatttcaagtagggaatcttcctcccacctaccgtcatgaactccaaggagattatgatttaataatccttgtctttatgtgtattcttcagtctatgagtaaaacatgttactggtttctcttctctgtaagttgcagtcatgtccctgcaagggagctagtttgtatgtattgctaggggctttaagatggtgattctccaggctaggaacccttccaagagattctatcacttacccaaagccgaaacacttgtccagtttagcaggaaatatctatatgattttgaatttcttggtttcggccatttgtggctctgaattcactgttgccctgaggaagccatctctgacccaaacactccttgttaaaccactggcatagctcaagtgacttggaaacctcactgtaactactattgcataacttcaacaacaaaccttcattctgttgtggtaaaacttcgctctatattcagccacacattaattagtacttatattttcttaaatgtacactgtgcatcatgacatgtcctcaggatatggagataaaatacttcatttttgctctcaaagacctaacagtctagtgaagaagactgcattctgaagtctctgaatgtcaaaaagtgctggttgaaaatatttcatttttttgataaacatgagaataggtaaaatcattttcagaagggcttatggaggggagacatctggtcctttacaaagacagggtcactgaacccttagtgcttttgtgaggtgacagaacacagtgtccccagagtgatgtatttccttgaaagttttttttctttgagaacatagggtggggttcttcctgaggaaaatattgatattgccagcctgctcctggtgaaattgaaaaaaaccaggaaatttaaacaaaggcatgattcaagaccaatatttaggaggaagcactcaccacaggaccagaacctgacccatggacccttgtactctgcatcgctgcagttcccatgctcttcccagcacctccctaaaatgggtcattctatgcaaatcccaacagccttccaaatagaatgtcactgccctgattaacaagtatttgtatactttttctctaaaatgtctacttgacatatcatatctttttgtatgtttcttccagcttctatttgttctttagaacttcagtagagtgcctttttacatttaccaaacaatgcaaaggacttccaggtaagtggacccctagtaaactctccagtgggatagatgcatagctttgtaatggcagccaaaaccagtttgtaaagatctcattttccccttttttacccctgagaataaaaggaggagtttaaaaaaatctatgcactggccgggcgcagtggctcacacctgta

SEQ ID NO: 54525 - DNA, 2657 bp, Homo sapiens
atgctccatcacttcctagggtgttgtctacacctgcatagccatagctaattttccattctcagcaccaaccaggggaagaggaggaaaggtagcctccttttcatgataggtgtgaagttatgcaggacactctcagggtgaatggaccacagtgtggctcctgactgggcagggaggaagaatctgctgctagagaaagaagggaagacagtcatctttgacatcatgagttgcataagatgggaataaaaactggaaaagacctaaatcaccatattagaaaactctagccattctaaagacattgaagaatcctgtttggacctttttagcagtgaggagcgtccagctgtggttatctggagaatgcaataggcagaacttgctggtagaggccccgcttccttgtcttgaatgcctgcctttttttttttcttttaaatttttcatctgcttctggatcacattgctgtgagccacattgggtcaattcacatggaggattagatctgggcacaccgtatcttttatgtcttttatttctttgactttattctgctggaaagtgttggcccacagccagaaccggcagagggcaaaggagggattactttcttatcacagggaaattaaatgcctgagacagcaacatagtgatttttttaaaacaaatttttaggaaaattgaactcaccctgtttactttcatagaaggcttttgggctgtgggaaggaacctatttttgtacttaatgaaatggatcttggcagtaaagggtttaaaactaactttggatttatttaaaaagtaatatccttgccactaacttgtcttctgtctttaaaggaaagagaatttttacagtgcctatagagcatgccattcctcaccagtcatttggcagtcctattagcaaactcatttgtcaaagcctcattaggtgattgcaaaagtactctcccaggacccactttggacttcttaccaagtcgtgtgtgtgtgtgtgtgtgtgtgtgtgtgtgtccgtctgtgtgtgcatgtatttgaaatggaagtgtgggaacatgacagtgtagacaagcttacagcccccatttttctttgagtggccccctctgataaaaggttatatactggaagaggacttaaaacctttgaaaaatcaaattctcttggaatataataccaaagtgttgttgttgtttttcttgcatctacatgttccatgaatattttccaaacaattcaatacattactcttcagcccacgcccatgctgacatcaaaaacttttgggaagaaaaattgttatcgaatagcagtgtcgcaccaagcagatggggtcactgtcccccaggataaggcatttctcatgtgcttgagaagaagactgtggatctgaaaatatgataggggctgcggcttattgaggcctcactattgagagggggcttggagttatggggaacagtgggctctagtgcaggactgctggggtcttaagcccactggaccacttcctagcttgccagccttgggccagtttatagccttttgggcctcagtcttcttatctgtgagaaagtgtaatgtcacctcccatgtcactgtgagcagtacataagtggatctgtgtaaatagcttggagcatcatgtagcatgtggaaatgctcagtaaatgaaccaggtctctcaaactctagggcccatgtttttccccttcaccactaaaacctcatgagaagcatgggctcaggagtagcaggaggcttctggcacagaatgagaagatgggaaagcgtgctgcttggccacaatggaaggaggagaaaggtcaaggagctcggtcagtaatccccactctgaggccaaggaaagaggatggaggaaagggcaaccagaacatcaaataccacataagcaagaagccataagtttctttccaaactaacagttaagaaaacagacctaaccacttctactcagggactacatcttatttgtttttgtatccatagtgcctggcctctagttgaacttgacaaatattggagtgtgttggcctgtttcttgttcactcatttgttcagtcattcaacaaatatttaagtgcctatcatggaacagccactgctttgagagcttacaatcaatgctgaagaaaacaacacggaaggattccccctgccttggcttcacctgggaggggagatgggcagtgagcccatgctagcttctaatgcactcaccacttcttttaataaatacaatactctccccgcttcccctaatgattctgtgaagcaaactagtctatagttcctggtatcttcttttcttgaaaagttgacatagatgacagttgtgtcctgaagtctgatagcttctatgaatttctcaaacattggttaccaactggtttggggatcaccttgacaaactgtgtaatttagaggtgagggcctcctttattggagtcaggagacctcttggatttgtgtcttcactctgttatgagttgagtggcctcaggcatcttctgagtttctcattcctttactgaaaataataatgcttatcttaaagtagcttgttcagaacttgccttgtctcaagaatcagccagacatttataaacaaatctgaatcctg

SEQ ID NO: 54526 - DNA, 1063 bp, Homo sapiens
cctacccctgcctttttttttccagcctccatctgagagcctctttctgtttctggtaagggtatcttcacccgtcaccaccctggtgggctggcttttacgttgagtgctttggtgtgaaaagcaggcttcgttcaagttgacttcaactttcctctttaaccttttatcatgtgttcttgttcactctcttccttcatggtgtcaagtaaagccagtagggatgaatcaggttcactgttcttttggagatgtgaaatccatgaatggggctaggtttcattatgtctccctctgggtagacccaattccctcctaattgcctttttcctgttgatcattcacatcttctgccttggaatttctttgaagttttatcatgttctcccttcatcatgtccttccctttgtgacttcagattttctgtgggtagctgtaatttcctgcagaacagtgtctactagattccctctgagcatggctggtgcagtggtaggattctgtgaaacgttgtcagatgtgtgagtgtgcagattgataaaacagcgtacactccctgcttcgttcccacctctgttttatgtggatgatgacaattacagcacagcacctcatatcggtgcagagatttctcctgctgtgatctaatggtggtctgtgtgcatgtggactgggaaccagaaggtggctttttctaggagatcttggctgcaggcaagcctatttctgccaagctagggattgtccgggtcttgatagagctagctgttttgtaccattgttagtagccaggctgtaattctgacatttcaactacttggactctgaaaaggtgtggttgggccccagatcatcagccaagtcttccactcagcctgcttcatgacctgacatgcttagcatttgggcccctttccaagagtgaagtaacacactgatggggagacaagaaagtgaaatagtggccccttggttctcacggggaagaggggagatgtgttcaggcctccccttcctccgccttcattggtggttcctaggtgagaatcactgggaatcagg

SEQ ID NO: 54527 - DNA, 1101 bp, Homo sapiens
ggcaggattccagtgtacatagtttatgtgggagatgatcccaggaaacttgggaaggggagtggggaatgagaaggggaggaaggaagccaataaaggatgtgctatcaagctcgccatcactgtggacagctgcagctcagttccactgggaacgtctgggaaagagtgtagcacaggtgcctctgagtgatcacacctgagaggggaggttctgctggccagagaacctctggtaaggaggtgcaggggctggcagttggtcaggcccatgggcactgttacaatgaaggctgagggaaaacgggtggggcatcgattgctttgctgcaggtcccatcccggattcaccttcccagggatgctagatgggagtctagacattgtctctacagaggatgaatctggaattcagaaagatgatggaggcccactgtggagaagccggttcttgagagttgggtgagaatccaggcttcctgactcttgctgcagtgccctttccacttggctacttaaggcagaaatttaaatttgtgatgacttttgaggcatactgtacctgattcatggaacaatattgtccttcccaccatgggctctttagtctttcttggagtgaaaaattgtcaaaagattaaatcctatttgggagccagagaaaaagcaaaagaatggctgagcgtgtaaataaagtctcctaggaagatcatatttttgaaggtatttattattcatatctttttgtcattgtcgtgttgtaagtgtttacctgggcttctagctttttgcttttccaaggacactgctgatccatcctagaagaagctgacagccaccaccttgacactggcttattgctgtccaggttatttaagatgcggaggaaatcttatcacagagaagcagcttctaaacatgtcctgccaggtgggtgatgaggtaaagactgcccaggcggccttgtgcacaccacatacttgtggagccactttgatgaaagggtctggattatttgcaaagtcttgtgctaggtgaaggtgggctctttcttaaattctgaaatgcccacgagtctttggtaatgttcatagtgaagca

SEQ ID NO: 54528 - DNA, 2076 bp, Homo sapiens
ttttttggatgccattgtgaattttttttcccctatagctattgcctatttgcataccctctgaagttgcccgttcttgaaggacactgataatgttctcctcccctgccctttcctttttgttgccagaataacctaatctaaaccagaaactccatcttttcttccccagggctcctatagacccataggcggctagagtgtacctgtgagcctctggggagatgtctcaccgccagagagctgtccccaactcaggacctcacctgcctgtgcgtgcgaaattacacctgagatggagtggctgtgtccagctaacaaagccgtttggggaggggatttcaagcatggctattccttgttcactttaataaaacatggcatgaattcaggcaaagggacttactccttactccctcacctcagatttttctgtgttttgctgttggtataacttgtcctgtgttgctaagttttaaacatatctatattttgtttaaaacactaaccatggctttgtttgagtggcttatttttatgtcctaaggagttgacctagacagggaacagttagtcatattctgtttcaggccaatgcctctgagccccttcccttctcgtttttctctgtctgaaatgatgctcttggctggccccattttgctgtttgtccaaacgggcgcccctcagcaatgggcaactttctccattttggtgtcttatctaagaccttgcccactggcttaaagagttggcttgggttccgtcacagtgatgagttgcctgtcccgccgtctgtagtcgggagggctttttccgtgatgagaatgagctgcaaactcaggcaaacactgatcaggagagacatgaaacccaacctggcccagtcggcttaaaaatagtccagtcatttcacccctggaattttctcttgcttatgtgggtggacaattctcttggaacaccaccaagatcatgaggaggagaaaacagagcaggcaccaaccacatgaatccaacccaggctgaccccgtagccggtggtgcattggccctcacaggtttgcaccctgcatgcagggccctttctcccccacgagagggcgctctcgtcactcttaaagcaatcgtactggggaacactcaggttgtttcttagtgaagtccccgaagagcactgcatttaagctgctactttgtgtctcagcttctactttcaaggtttgttatgaatgtaaagacattctccaactcaagcaagtgtgggcaatattagtgtctggaaacgcctgttgcaaatgaagcacagccactgcttgtttgtgtttcgttagtgaaacgtgattgtaacccagggtttttgacgctcacagaagcatccgccttggtaatgctgtacatccaggctgctcttctttgtccctaacctggttgcaatgtggccgtagcatgcttgtgttgacatctgacaggagatgaggacttgacttcctgggctgatcttgcttattttggggagagcaggagtgcccgtggttagtgtggatcagcctgacaggagattttctattgagggaggatttaagactgcatgcaggcaagggaaatacaagccatatttcaccagctcaatacaccagggagcgctaccatttaacgaaaaccaccattctgacttccgggtttttaggtcatctggcagccactgggtggggtcagtttcttggcccttgattagaagttccttctgattacaaaacacctcttgattgaaatctttgcattttctttgcatttgcatttccaccaatctttttattttttattttttttgccttggaggatgtgtgtatgtgagggtgaccttctctttatttgtgggaatcggggagtgccctcctccctacaaagtcactataaagctacgggctttgctgcccttggtacagggtctagaagtggttgttgggtggtgaccagcacagtgacagtttatttcctggacctttgaacctaaattcccacaggaagaacataaaggactcagcaaatcttgccccccgacccccgtctcct

SEQ ID NO: 54529 - DNA, 1059 bp, Homo sapiens
gcaggtcataacacctgcagccacagttcctggggtggccccaagtctggatgcttagggatttattaattttttgagcaactccagtatcttaaaaagaattcatccttctcttccttttgttgttgttcttcttttattcttatttttaaaatttaagcgaggtaaaatcagcccctcttggctacaggtactttaattactacaggagatcatagtagctacctcactggtcataagggttaaataagataatgtataagacagttagcacagggaatgagggaattgtcagggaataagtacctggtaattagtagcttttactattatctaataatagttcttgatatttacttagtgctttgtaatgtgaaccatacactcctgtgtgcttatctccttgacaattgggtggaaatggcatccacattttatggatgagcaaatggccatgctttggggtttgcccagggtcacaaagctggcaagggactgagccaggatccccactcaggcccttcgtcatgtcatgtatccagggttctctccaatgtgccagggtcgtgtggtttcctgggggtgtgatggagagggaggcagtttccctttcccattttagggacaagagtggagatgggaaagtactttcctggggacagaggatggaggtgaaggtggtggatttctttagttatggggagttaagttgggaatgttaggcctctagtcctttccttttctcttttcttttctttttttgagacagagtcttgctctgtcagccaggctggagtgcagtggcacgatcttggctcaccacaatctctgcctcccaggttcaagagattctcatgcctcagcctcccaagtggctggaattacaggcatatgtcactggctaattttttgtatttttagtagagacagagtttcaccatgttgaccaggctggtctcgaactcctagcctcaagtgatctgcctgcctcggctttccaaagtgctgttgttacaggcatgagccaccgcacccggtctgggccctgagtcagtttct

SEQ ID NO: 54530 - DNA, 1243 bp, Homo sapiens
ttgtagagttaagttccagagcctgccctgttaatgatggcactaaactgccttccagagaaggtcagaatgcatagctctttgtaggattgttggtgaaacttgcagagaaggtattttctgaactgatattcaaggatgagtaggaatttataggtggatagaaaaggaattgtattccaagtagaggaaggaatgtgagtggacacacagatggatgaaaatatataatgtgttcagggaatggctagtaatcccagaggtcaagagtggcaggcagtggttggctattacacttaaaaggttaaagctaatgccgtaagcattggggagctctcagaggattttaagaaggggagtctgtgtctagatacacttcaaaagggttcctgtagtagcagtgtgaaggctggtttgggcatgtgtcagaatcatttgaaagccaggagggcctgctggaaggcctcgcaatagtctaggtgagatcatgcatcggctttgggatgtggcagtagaagtgctggcttcttgtggttttgggggttggtgcttcacagagtgaagaaagaggtgtcacaagggtcattaaaatcccactggtgtgcctgttgatataggaggcacccatcttactctctaacggtgttctacaaactagccaggctgtgaactgttcattactgtttgggccaaaataaggggcttgcaccagaatataaatcaatgcattgcttccatcacggagaaaatcttggtgcacacacacacacagtctactgaagcaaaaagtgtgcttagtgacaaagttgatttggattctagtgcaagctcttatttccttgcagcccacaaacaacatgtggactttcaccagtccacaaccataaatagagtaatgctgctgtataatcaacatatcttacttgctctatacttcaaatatcttcttctctacagctgaattttgtagatgaaaaatttattttaaagtttcaacattttaagaggtttctttttactctacaggcaagccacttatgtaaaggacccatcttttaatttttgagttttggaaacttacatgagtacttaaccttgattaataattgataactctttctgtagagatgggccggtgacctcttgctactctccagcattgttaagtgctattgcctttcagacttcagattctttccaacctctaacacttgggccattattccttctccaaggttctcag

SEQ ID NO: 54531 - DNA, 3219 bp, Homo sapiens
tcatgaagatttttttccatgtcaataaatatatttcttctcttttctttttcttttcttttttttttttcttttttttgagatggagtctctctctgttgcccaggctggagtgcagtggtgcagtctcagctcactgcaacctccacctcctgggttcaagcgattctcctgcctcagcctcccaagtagctgggatcacaggtgcccgccaccatacctggctaattttttgtatttttagtagatacaaggtttctccatgttggccaggctagtcttgaacacctgacctcaagtgatccatctgcctcagccttccaaagtgctgggattacaggcatgaccaactgcactcagcccaataaatatgttctataatacgctacttaatgatacctattacattatattgtatggaagttccattacttacttaatctgttcttcctggacatctgatttttctttattgtaaaatgtgacatcttaaacatctttacatattcatcttcttccacgtctttgattacatcctttgtatagctcttagtagtgtttttgctgggtcaatgtttttgtaaataaaaaaaaaatgttaaagactttagacatgtataaccaaagtgccccagcaagagattgtaatccgcttacactgcctccaggagttttttgggagtacttgttttttcctaccctctcccaccagataatatgattctttttaccatttttaacccattggataggaatatattttcatgtttttatttgcatttctttggatttttgaggctacgtattacaaagctgttattttaaggcataccagagaacatgaaatcttattttatccatattttggttttatccatttgctttgaaccccctgaatcagctgccctgatggatagtttttttttttttggtgtgggcttggccatgatggggaacttggttgaaagatgagtgaagttaaggcagttcaaggatgtcatactttttagaagtaccagacaatcagaaaaaagtacagaataggagaaacaaagaaatcaaatacttaaaaaatatattcccccaggtcaatgctttgccatgaaaaggagaaaaaacagttctttctctctaagctgcagtaccccttggtcactgttccaaagcttggggcagaccatttgtcctatactatggctacatgtggatgaagtcatttttgtgtggtcttttaagactgaaggtactaatcacaattttaacattgcttctccagaaaaatactttctgagttacgaactttggggacacaaacctattggtcatttggagatctagtttcccttttatttttctaaattaaacattaaacaagacaatctgagctttgcctttttttcttttgggtaacttgatttcccaattataaataatgattatttaatgtctgttaattctttcacagtttagggtgaattctaattagccatctccctaagatatgtggtttgtggcttgaaaagttttctaatgccttccctccctagaactaatgactcagaactgagaaagactgacacagagcttcatcttctgctggggctgcaaatgctctggagattgcccacgccctcttgcagccactgctagatgaagatgaaagcccactgcccagacggcatcagtatttcacctgctcagtattgcacagaaaagtcttggtttgacttacagcctgctcattgctggaaggtcacagcactgttttttgatggagttttgagtagtcattttttctagtgctttaaacagattaaaatgtggttttatgggtagtcatttcctagatgcttgtgaaaacaattctaatcctaattgatggtagaaactgattcggagactcagtaaagaaagacatctgtgacgttcagttcaaaatagttaattattgattgatcacccaccagcattagcttatagatacacctgaggattaaacatgactttctggaacaaaataacttttttttttcctaaacataatgtacaagctgagcttaaatgagtgaaattataaaaggagataatctcaattttgccctatataagaataaaatatcagtcaaaatatttaaagaacagagatttctgtttggtgcaattttctggttaagaggttaatggaggggaatggaaagttattgttttatggatgcagaattttagttttataaaagagttctggaggtagatggtggtaatgattgcataacaatgtgaatatatttaataccatttagctgcacatttaaaactggttaatgcctggtgcagtggcttgagcctgaaatcccagctcctcaggaggctgtggtgggagaatcacttgagcccaggagttcgagacaacagtgagctctgattgtgctactgaactctagcttaggcaacagagtaagacgttgtctattaacaaaaagtaagaagaaaagaaggttaagatagtaatttttatgttatgtgtattttactacaatttttttttaaaaaagagttaaattggaaacaaaagtcttttaagagccttttggtctgagctttgacttaataaatacaatattaaatgaaattgtgcatttactaaatatttgagggacattattctggaagccaggtctcattttctaggactggagaagacagaatgtgttttggactcaggatgtgtttgtgaaagagcttaaaatttctttaggtgattgtgcattcctgtgatatgcattttctccaaaatgtacagaaagaaaaataatttgaaccctaattaattgggttctaattggtctgtgttttaggctctaaaggatcttagatcctttagatctttattaaatactggtaattcagtatttaattgtaactgatttttatgcaactgcgcaggagaagaagtgttcaggtgcagctttcttcccatccgtgccttccctaggccattgtgctttgtgttcttaagactcggtgaatgtttctgaaggtcagctagagtgcagaggagaattaatattaaaatgcatttaataaataagctgtcagatgattcccgaagataccataagcagcagaaagtcttctttcctctttcattcagatcgctgtgtacagagggaatgatggttaatatagtctctgttggcatctcctaacgggctttggtaa

SEQ ID NO: 54532 - DNA, 1201 bp, Homo sapiens
gtctgtgtcaccaccatgtgtggcctggattattgccacagtctactaatttgtctaccagtttctgcccttgttccttgagtcttttcctaacatagtcatgtaatgatcctttaaagatatgactcaggttcctcccttttactcagaactcctgtctcttagagtgaaaaccaaagactttatagtgtcctacaaaaccctccatgacatggtgtttcccatcaggatctaccttgatcttagccaaaagcccaagaagcgatcttatcctgatctcacctcatctccaacttatttgcccttcagtcactctgctctggccataatttcctcctttactcacttggccaagcatgctgctgcctctgggcccctccctcatttcctctggctgaaagatgtttttgtaagttaggtatttgtatggttccctcacttttcttcaagtctgaccaattttgccttattagagtcagtttcagacctgcctatattaaaatggaacccctttgttaatttcatatactgttttccccttaccatgctttacttttcttcactgcacatttcatcatctgacattccactaatttattttattggtttattatttataaagtgctaacaaatactttaatccaaactctttgggggcagggcccacattttgtttactgcagatccccagtgtttaaaaagaacctagcacatactaggtgttcagaaagtatttcttaaacaaatgtattattagtaaatctgagttttaaatatagttttgtcacttcttaattatgtgacactcagtaagttacttctcagattcaagttttctaatgttaaaaataaaggtaacttccgtttcatggagttgtttttcagagtagaactaacgtttaatcttcccaactaaagtgtgagatcaaatttgcactaaaaatatgttattattattgctgttgatgccgacgggagacagggaaatactgggtggaagagggcggttcccttacaaaggctccaccctcaagcctggatatccctgtccccaagtgagaacagacattcctgttttcatgcacaaaatgttgccttttagcccaccatgccccctatcctatacccatataaaccctgaaccccagactccagaagcagatgaggagacgaacagatgagaagacgagcagatgagcag

SEQ ID NO: 54533 - DNA, 1192 bp, Homo sapiens
ataaaacttttcataagaatgacttcatagaagtttctattctttttagagatatgattacctatctgctttcagtttacactattgcacttgtgtgtgtgttgtggggggtatcctctggtcttgtgcaattattttcattttagttactcaaatgaattgctgattaaaaagtaaattttgatggccatgtaaattggagatgattctggcttaaagggataactaggcaggtatttttgaaaattaataagcaaggctatcactccacataaacaaagcgattttttaaggaacagaacacttgatatactggttgatgcttcagtctggtgtggtatttgaagagcataaagtcgtaacatagattttcattttaatgggagtgttgtaataccttcataattttttttttttacttctcattagtttttacaacctacgaattacctaaaacaactttagtcatttgaattttgacttgccacttattttactatgtgcaaaattgtcccatttgagaaatggaatctgtatgtatggtattggtgtctatggctagacattaggactattacagagtttgcagatgtcactatgtctaatgcagttctaatgcagatctgtttggggttttgtttaatatatggttatggagaagtctagaaaggaatgacaatgaagtagtagttactgtaaatcttgtggtcacgtaatgaaaatttaggagacttttctgtacaccactttagctctgctctttgtagattgactcatctagaggagattttgtacaaatttttttcagctaatttctccagttcatttgtttattgatatagtattacattattatttagttaagcaaatggtctacaccacatgacttcaagcctcaatgtcttcttttttgttgttgatttgtatactaaatttcagaaatggctttttatggggaaggttggagacaaataatgactatatacacatatatttcacatatatatgttattgaaacatatgagtgtcatatatgtgtaagtggatgtagacaagtaatgagtatatatacatatacagtcatgtgtcacttaataacagggatacattctgaaatgcatcattaggtgattatgttattgtgggaacatcaaaaagtgtacttacacaaccctaggtagtagagcctact

SEQ ID NO: 54534 - DNA, 2678 bp, Homo sapiens
ggatttttcactcatgcatgattttgtaacatcttgcattggtcatttgaaaatatcagttcactgagttaatacagatctttgagatgttgacacatttcattatacaatatccaaaaatcacattccttaatattaccactcaaatatctcatcagaaaaggctttatgtactgggaagctttcaagcccatgatggcagatgtgagttttacaaaatccgaatttttgcttgaaaacaaggtttttatcattggcatcaatgactattagttgtttttcttaaagtgttaagattatttcattcatttagaagaaaacatctgccaactgcccacatataaataactttacttggttaattttcctttcaggaaaaaattatgttcatgaaaaaagcaattatttgagtttgcaactcaaacaattgcacaagtgcttttccttgtgacaaccactgtatttacgtgtgtagtagaagtgctttatacattttcccatttcatcacacagaatattaaaaagaatgtgtactcaaggtttaataaaattaataattcttacttctccttcaaggacattcttaattgaaactagtatttattttattgagagtacctggctgtgaagagtacatggctgtgaagaacacatggctactagcacagtttggagccactgccttaatttgtgctaaggcgctagcaattttactgaccattgcttttgtatatttggtgcaaatgtcaacatggttaaaaaaataaaaggcaaatacactttagtattctcacaaagacagttttgaccttgtggttccctagtaaggtcttagggagctcctaacatcccctactccccaacattcctccaggatcaagggcttcttccatgagcatgagttctataaaggaagtcaggaacaagcatgggcttggttggactgtacagttcaagaattagggaatttgaaggagtatgggtgaggaatagggaagccattaactgaggttggtaagaaggagaaaggtttttgcaaggagtcttagagctcagaagctcagattatgaggtgatttctctttaaggaaaatcaggagtttctgtaatttgttgagacaaaaatgacactgtccatgtgtttccttatctgtaaagtgggaatataagagtattattattgtgtgaattaatgtataaacagcttagaacagagcttggcacacagtaggtcctatataagtgttattattgtgaaaatggagttttgctctagttatatgatgaattggagcagctgttcttacacttcagtcagcagcagaatgccttggtgggattgttaaaatacggattgctgggccttgcttctggaatttctgactaaggaagtcggagatggggccatgattttgcatttttatcaggttcctgggtgatactgatgctgctcctctgggtagcacactataagaaactgaatcacaggaattcacacaatgaatactataaatatcaatagatacaactcatataagcaaaagctgtttgagattctcaatacttttttttttttttgagacggagtttcactcttgtcacccaggctggagtgcaatggcgcgatctcggctcactgcagcctcctcctcccgggttcaagcgattctcccacgtcagcctctcgagtagctgggattacaggcttgtgccaccatgcccggctaatttttgtatttttagtagagatggtgtttcaccatgttggccaggctggtctcgaactcctgaccttaggtgatccgcccacctcggcctcccaaagtgctattacaggtgtgagccactgtacctggcctctcaatactttttttaaagagtgtaaagggattctaagatgcaaggtttgatgcccttttctttcctagctactcaacaagccaatgcctcttattcatatccatgtatggaaagtgatgtctacttattctttcacttgttttcatttaactttgctcaagaactgaagtttaccccgtgtttttatttttatctgaacaataagctgggactgtaactggttcagtatttatattttttctagcatgtcctattttgctgtgcctaattgctattaaagccagatggctgggttccaaaaacttgtctgatttgccaacagttttactcacctgaacaattttcactggctctaagctccctgacttatatcacaggccatcattgccacttttctgaacttgccagaggtcttagaaatgtagactagttgttaagattgctgatgaagatgtgctaaatgaagagtgttggtagtttgatgattaccaatgatgttgattttaaatcctacattcacttaacaaatatgtgtgtgccaactgtatgcaaggctttgtgctgaatgctgggaaccaaaccgaggaaaaaatatgcatggactctgattgtcagtctgggagacactaaatcaacaggcaattataaaacagtacaatgtcacaatgtcaagggaagggcaggaagataattgggctgaaggggggatctaatccatggggggcagggaaggctttctagggtaagtgatgcctgagctgaaaacttagaggaggctttgaattcgttaggtaaagaaagcaggcaaaaagcatgac

SEQ ID NO: 54535 - DNA, 2258 bp, Homo sapiens
ccaagtggagattttcatctgtaggtagagttcggtttctggaacttaggagacagaactgagccaatcagcaactagagggtagttgaaactctgggcaaggctaattaagaaaggctccactgaatgggaaggcctggggactaagagccggtcctgggtgacaccaggtagatcatggcaagaggtggaggggctggtgaagaggagatttcagaggaggaaatctaggatgtggcagtgtcagacaagttcagaagagttagctctgtgaagagaagcaaagtttccatccatggctcaaattcttccctttccttcaacaaattcaagtttcatgtggttctagatgctcattagggttcttctgaaacgattggatcctccaagacatagaaggttatgactggttataaaaattgccacatttacctctggtataacccaaatagaagctctgcatcataaaatttagagttgaagacagatgctgtaacttaaaaggattgatgctgggccagactgctgaattctgtagaggctttataatggagacacatctttctaggcagatatcacttgtcacttccataaggaaaattccctggagttgatgagtagtagagctgtgcttctgctttataaaatccacttttgatgaaaaattaacattttaattcagaggtgtgtagctatcaccaaagggttatgatgtcatgtaactaagtctcagataccaacattgttcaatattgtataattttttccagagtggtatgtgctccagataactgacctttgaaggtagtaatgtattatttacatgaaactaaaatccagtgcattctaaatggctgtgatttatcatgaccattttgaaattgggtcctgtggccatatgctaatttgactcaaaggaaattctgtgctgtgtgcttggatttcatgcttaaaaaattcagcaatagtttcaatgctcttttaattaaaataagatgctttataacatttcccacatgatgtggaatgtactctgtagctcatatatgaattaaaacccttagaagatttacattttctggtctggcaaccttcatttttctaatttatgtgtcctgtttgtcctgaaggagttgggaagttgaaatttacagccatcccaaatgagagagttgagattcttgattaaatgagagcttgtttgtgtattcaaatggaaaaatgtgggtggacaaaattaaatttgtagtgggttatctcctgaacagttttctctttcctggtaatttcacactgcccaactatgcacatggtaagtatgggagaaaacttttttgtataataaaactttttagcagtaactgactggaccatggttgggcatctattccaagttattctgatcagcacctgcatctgagactttgtaattggctctatcatattcccagtatgccttttgtgtgtggccattttctgctatgtaaataggaaaactgaaaaatcaggtctgcagaaattgaagaatgaatggggagaagcaaagacaagcaacagagagaaagaattcccagtcattcctggtgcgctgcagtctccagtttctgtgagtttccaagacccagctcatccatgcctttggggtctttgaaagatccctctatctttcaggggtctttgaaaaacccctgtttatttcaaccagctcagatggttgcctgcatgtgggagcaatgaaataacctatattgcttagatttctattttctgattagatggtggctaccatgctatgtgtatattcttaaaacaagcccttgtacataaattagataatattggatggttttggttgagctggtctttggcttaaatgttattgacatttttctgaaaaaatataataaatataggacatgtataatctcacacaagtttgaaactatttaatagactcttaaaacaaaggaagggtgtctatgtagatgtgctgattggttccaggtctaggaatccaggccatttgcagtttgatttgtggagaaggaaaagagactacaatctctcagtggtggtaaggaggcaggatggagtggggaccagaaacgcctctgagatacaatgtcccaaggtccagtgtttttatgattgggaggaagactgctctaaaatctttgacatttgaagattattaataataaatgtcctcactaagttcctctgttcataggatagtaatacaaaacaaattgtacccc

SEQ ID NO: 54536 - DNA, 1511 bp, Homo sapiens
aataatagcttccctgcttaggaagtcagaatataggcggtagggagaaaaaactgttaaaaaaaacttcaaagactggaataaactacatttttgtagagctactatattaaaatataagaggaaaaagaagtggaaaagccggggagtggaaatcgcaggcctctgcagaaaggagataaacaagtgcctttgggtgggatcatttgtgattgtaacagaaagacatacaaaaagacaagactatgtccttagaagcagagtggcaacttcaagtttataattactaagaacccctatgtacacagcatttggcatatgcaaaatatattggcagatgcattagtaaaatttaactatcgtaaagcctctgggagcattgacttggtaaagtaacagaatctccattaaagcaaaagtaatgaactgactcagcactcctgagtaaagtgaccagatgtcagaggtaccctgaaggacacagagggcaaatcaggtgtattttctggctacaatcggaagggtggcacagagagaaacaaaaccatgaatacatctttgatttcaggtttaactcaaaggcagtgatatttacctggagagcagaggaaagcattgatgcttccaagccaattctttaaagaggtgtgggtggagagtgtgtgtgcatgcatgtgtgtgtgtgtgtgtgtgtgtgtgtgtgtgtgtatgtacatacacacatatacaattagctccaaggctttaaataaattcaacacaagtatttattcagacctttgttgtgtaaggcctccaccaggtcctgggagggaatacatatgtgtgtgaagccctaagctttgtttaaataaagctaagggtcaaagaagagtgaagagcaccccacctccaccccaagttctctcccccagcctcttccagtcatggctcttgggaaaccctgcagtaggaacagatgaatgtgtgtataagtagttggaaagggaagtagagatgatacttagacaacataaatgagagaagtgtgaagtgtttgcagtcagagtacctattcccaatagcctgcttttcatgctgataaaaccattcaatcttggatgttgagttcaattttttgtcagtgaaaaatctgcccagagtcttaaaaaatgcaagcaagtcatctgtatatagcctcagagcattgtattttcaatgtactgatttgctaggtatatattgaagtggcctttggaccctgagtgttaaatatggagatctgaatgttcttcagttcattttaattgtgacgaaatcaactattgaggaagaacacacttcctgatatagtctgcagccttatagagagccaagtatgtcacctttaacatataattcaagttcatttgttctgattaatttgtggggagttgcaggattggaatttagaatattttaagtgaaattgttggattacggattaaaaaaattacaaaagtcaattatgtacaagttctgggctaggtcct

SEQ ID NO: 54537 - DNA, 2721 bp, Homo sapiens
aacttgcaggctgtcctgatgatcattaaaacagtgattcagtatgaaagtgctttgcaaatgatgagatgtcacacaaatttagccactgtttggtcattttcactttatctttgaaagctcgtgtttatagctaaacatttggttagaagattaaagtctatgaaaagatttggatccagtaggtcacagcttactagaaacagaacagagacttaaaccatgtgcctctgtcttctggagttggacttttaccatgaggttgcttatctggatgaaatctgagggctttacagtctaactttctgagggagtcattcagggaacgttttagtgtcaagccattaaatcacacctcaaaaggttggaagtggcccacatatgagtccatataggtgggtctggaaaggtggggcgagcaggaatctctttccattatgatgatggggtttctaaagtaattattgctttaaaaaaaatctgcctctgccattttccagtcacactgttcttggagcgagatgcatcatcaatacttttcatactaaacgttctctcctattggatttacctggattctaggggtatttttttcacatttctctggagacaagtagtgctgataaagattttataaggtctctcttgctctcaagctcgttttccttaacttttcttgtcccagttaccagtttatttggtccccagaaaccttctaatcttcatctttaatgataaatttatcttttgtagttctcctgtcaaagcttttgtgtctagtggctcattttgcttaattgctggagttttctctggccttttgttatttggtcctgcgtattttcaaagattctgtagaattttcagactgttactctgatgtttacttggtagattgattgctaagttgcattgtcttcagaggaggtttttgaggttgtgtctattataatgtctgcttctacccggagtccattgcacttggagtgcttcttgaagcccctgagcttatgctgtgataaaagcgtgaatgttttactgtgtcaaagcactgtggctcataaggcttcataagctctggcttttatatcagagcatctcatatggttgtgcagattgcatcctggtcaagcatgccaggatgaggggccaagggtgtactgaatgccagcctgtgcttcatttgccaagccttgcatctgatgtaggactgtatcctcacaggggacaccttttcctaatacacacaaaggtatcatgtgggctagcagctgttctgctataacttagctaggtgtctttacaggagaaggtagtggaagaggtggtggtatttctcctcgggaactgagattagcttactcgacgggaatcttgaagtgtcccaagatgaagccattggtgccccactcccccaacagttgtttaaaagttattaaagaaccaattgacatttgctagcattttaaatgctcaggatgacttatgaggctatgtcagttattctttactcagtaggggacttggagctacaggtctgatttcagcctctgtgcagcccccgggccacccttcctgctgaatctaagccccactctctctagaggattatcttggggtttattttggctcctggctttgaatctgaattgctgcccctcaagttatattcaaacaactctattaagataacgttgtctccaggggctccaaccagccagtttcattttccaactagtttggttggtcagtgcccataacaggtccacttgaaattagagctgcgtttttttttttcttttctttttttctttttattattttactttaagttccagaatacacatgcaggacatgcaggtttgctacataggtatatgtgtgccattatgatttgctgcacctatcaacccatcacctaggttttaagccccacatgcattagctaattgtcctgattagagctgcattttctagaagtcaacaacatagtgtcttgaaagccttctttgtcatattgcagttgtgtctgagacctttatgtaccttagtttttttgggttttccttccccatgtgaaccacagttaccctttctctgactagtatgctgaagttatagtacatttctatttagcaggtgtttcctgtggttgccttttgttctaaatctatgattgaaccttatctatattgaaccaagtctaatatctatttgcctggacacctgtactaacataatatgattctttttgtatccacccttatattaatctggtaggatttccataacaaaatactgcaggctgggtggcataaacaacagaaatatatttcttacagttctggaagctggaaatctccaatcaaggtgttcgcatgtttgctttctcctgaggcctctctccttggcttgcagacaacttccttctctatgtgtcctcacatggacatggacttttctctgtgcatatattcctactgtctcttcctcttatttatttttttgagatagggtctcgctctgttgcccaggctggagtccaatggcatgatctcagctcactgcaacctctgcctcccaggttcaagcaattctcctgtctcagcctcccaagtagctggggttacaggcacctgtcaccacacctggctaatttttgtatttttagtagagacaggatctccaactcctgacctcaagtgatccacctgccttagc

SEQ ID NO: 54538 - DNA, 1034 bp, Homo sapiens
tctttttagtgtttctctatccccatctctcttacacacacacgcacagacacagactcacacacacaaatacgcatatatgtgtatgttttcctctaacaaaatataagccccacaagggccaggacttttgtcggatgtgtttgccaatgtatccccagggcaagtatagtgccaggctttcagaaatgctcaagcaataatttgttgttgaatagatctctgggatcttctggttccttggaatttcaccagtggtagcttgaatttcctattcaggcctggacaaacatcctgtaaagaatgccacctaatttgtatctttgaaggatgaatccaataatatgtgggtacagtgaccactttcaagcttttcttctttcttcttttctccccctgcatcaaacaggaacagcatcttctaaaaacaaaactttattcattggtcagcagtttcatgcaaccattgagtgaaatccaatgtggaaaggaaatccaaaactttactgcagtgtaatttgtttcttctgtgttgctttgtgtacagtaaaggtcaataatgcacaggaaagctaggtttaatttctttgatgtgtaaaaattagtgctttgtcatcagttacagtggcaggaggacaaatcactggcacataaagttgttcctgctacataaattacaaatcttgttcggaaaaaaaatactcacatcatcccttgttattttaaaaatgccaacactgataaacagtcagccttggacatgtattaaaatcttcaaattgtactaaaataaatttagccttttaagataacacctcattttaatttcatacatgattaaatccatcaattcaaaggtcttttaagatgtaagttttgaaatcataatagtaccctctaactccctgcgaaaaacttaaacctctttctacttcattaataatgttcttgacagacaaaatttttaaagaaaatcctcagctttgttttgtgtttttgtgtgtttttcttgagaagaggaaattaaattatga

SEQ ID NO: 54539 - DNA, 1278 bp, Homo sapiens
atggccattctgcaaacccaactttgaatagactatcaaaggttggggctggatatggatctgattactcaccctggccccggaggccaccttcaggcagagcagtcctgcagcctttccagaggaggcagcctcctgcccatgtcaaagaccttggaggctagagtatttgcccttctgctctaatcaagatctccttggaaagaaagctcaatcagcaaatctttattgagtaccttccatcagatagattctccagccccaagctggtatggtgaggataactatatctactgtaaaatacctgacctaaagaaacaatgcaacatgtgcatatacaattttaaaagaaaagctgttcaccattttctaaaggaaaaattatatctataatgtatgtattcacatgtttatttttatatatcaacatttatctgctttttctttccatgcctcccctctttccgtcctttcttttcctcctggatacatccattcctgcagcttaattcttattagctaagggttatattgcagatgtatgaattaagagcaaaggctttagaatctggcagatctatgtttgaatcccagctctgccacttcacaaaaagattgttctatttgttattgttactggcacttttattgccatcatttgtagtatagacaataattacttgtgctatttatgtttattagttatttaccatatcaggcactaagggatttgcatgtattttgaatttaatccttgtaacaattatatagtgtaggtagtattatccccattttatggctaaggaaactgccttgagattttaagtaatatgttgcccaaggtcacataataagtatgtaaaggaactgaaactagctttgtgttttgaacctacggagattctctttatcctctgtaaaatggagatactgattcctgccatggtagctagttgggatgattcaatgatatgggatatttcgcatttgcagtttggttccctgcatataacatatgctcacacaggatatggctgttcctgctctgcttctgctacctccttcaaggttgaataatctttctttcttctctcttagctatttcccagcccctcacttaagtttataactatattcttttcatcaacctagaaaaccaaatgaagcctgaagtattgagaactcaggaaatgtttttgaggtcccatgtgattcagtggcaaaggcagagcaggtgcagatgcaaacctctgggctcttagatgtgaaccctctgcc

SEQ ID NO: 54540 - DNA, 1040 bp, Homo sapiens
cgtgagactcaccccacactgacctattattcaacatttcctgatgcttccatacttctctgcctttgaacctgatgatcattctacttataatgtcctttcctcatccttagctttgcctgttgaaaccttcaagattttactccagagccaccttgtctggagagattttatttactttgtgaggaacaaaatgctgctcttttatcttttctcctcctttataacactcatcacctctccccactaagtttgtggacaaggaatgtattctgtttatctatgcattcccagcccagaggaaggtactggcccagagtaaatgctcattaaatattgtgaataaatgggcaaaaggatagaagacacattctttacttagatggagttgagataaacttagagagttagtgctagaatcaacattgccttcttgcaggcaaatgatttacataatctggacatcaagttgcctgtcccctggatgaggtatctcagtctcctatgttaaataatagtaaattgattctttcttcaacacagagtataacaaatacctctaagtattctaagttttatgaaacaaaagatttctggtgctggagattgattttggtagttataagcttctcaggatatctccaaagagacaaggggcctaggtggatagaaatatttcccttaaatcagcctgataaaaagttctccatggtaaggtagcctttgtcttgtattaaaacgcagttttctcaccaagtgactttggcaggttggtgaatcctttaagaaaaagagatctggtctggagttgtggtcccccggagatttagttgctattgtgatcatctgatgacagcagaaaacccagggggatcagcatggtttatttcagactgcagggatgtcagcctgttattataggagtgggagctacctaggcagatggatgcttcctgatttgtggattgggaacacgaattgagcagcagccaatgcagtgacacttgtaatactcttctgaagccctccttttttttttc

SEQ ID NO: 54541 - DNA, 1098 bp, Homo sapiens
agagatgaaatgatgacaaattgggatgagaggcaatgagtgttgtatgggaactacaggatttaagatttgaaaagaggcattttaagagcccatttttttgctttttctactcagcttaggaccccaattattacttactagcctcatttcactggacttcacccattcacacacctgtcacccaaaatactaccaaatattttctttaatgttatttttgcatttaatcctcatgaaggttaataaagtcttctctctctatgtggtatgaaagcataactgatgactttattggtgcagatatattatggctgcttttgacgtttatgttttccgtccagatagatgaatgattccagtgaaagtaaatcaattgcacccagactgtgggtataaaacaccacgctcagggttttccttcttgtctggcagatagtagagggtgtgaaatattgaaatttgacttaatgctgtatgtttcttctgaaaaagagaatttcctttgactatctcctaaggtacatctgtgattgatatttgccctgtcatttagtgccaatccagggaggggatgccccttttgtggggcctgtttgctctccaagggagccttcatggcttccttcggtctagttggagtaacctgttttttcttctagaggattgaattcaattaacagggattacaaattcagttattaggaatttatcagtgatggcaaatggaattttactggtgtattagtccattcttgcattgctatcaagaaatgcctgagagtgggaaatttataaagaaaagaggtttaattggctcactattctgcaggccgtacgggaagcagagtggcttgtggttctgaggaggcctcaggaaacttcaaatcatgttggaaggcaaagggggaacaggcatcttacatcgcaggagcaggaggaagagagagagttgggggtggggtgccacacctttaaacaaccagatctcacgagagaactcactcactatcacaagaacagaaccaaggggatggtactaaactattcagggaggatccatcccgcctacacacacccatttccaatcacctcctc

SEQ ID NO: 54542 - DNA, 1099 bp, Homo sapiens
accacaaagggcatgcactggtatggttggacagtttttaaagcatttatccatcctaaatgggcagtcccaatgcttgattagtagtgccagtgtaatgcctattgttaagtattttgagtagcatcctcattgctaagaacttcatctacagtatatcatttactctttttctttctgcattagtctttatattagatacttatctatgtatttatgtttatttaaataaacttaggggtacaagtgcaattttgttacatggatatattacagtagtggtgaagtctgggaggaaataccatttacttttaacaacaaccatatactttttgtatatataaagcacagatacatgtgcagtatacaaacagatacacagtatatctgtgatattaaaattttatgtgggggagcaattagaaaaaatgtctaaaaagtgtccttagagggacgataatgaaaacatttaagaattactggcaattgatatttttattaaataaatgtgaaaatataggttgagaggttaaataattagtccaagaacataaaattattaggtgtgagagctctgacttatacccaggtttgtgcgataatgaagtgtgtgcttttatccaccttaccaccttgcttccttgcccttcattcagctctctgaacctctgcttccctccatgtgctttactgcttcccatcctcccagatttctctgtaccctcccccggtagtggcctagattctcctaaactgctctgtcccccttctaggatctgagatcccacctctttggtttcattgttagtgaaggaatgcttcaagggaaatttctgctcttgggttggaggaatgagtgtttgcattttaatgcccattcagagacatttctcaaaggactgagtcttttccagtgggacttcaggatctctcacatgccagtgggaagcaatttggaactgtgtgctttgcaaacccgtgcaaatcatagcaggaaggccgatgcctatctctagctaaagccttatgtgctatatatcttcatgtgaatgtctggacaagaatcccctgctcttatgccataacctgggctctacac

SEQ ID NO: 54543 - DNA, 1052 bp, Homo sapiens
cgtggtgcctgccctgtgaagcatctatgcatgagaaacaggagaaaaatacacatacaaaataattagcaataatttgctaataatgtaatctattttctgttcactccttgacttagcatattctgacttcagtcaaccactctacttaaattgttctcttaaaaaacaatgacactcaccagtaacctcttaggtatcaaacttgatgattttcaaaatctgcatttgtagcttcgacctttcttctgggcttcatcctgaatttccccggcctgtcacacatctttacatagaaatcccagcagcacatctttcacacattgaaagtcaaacttctcctaccctttttttttatcgccttttccaccttcaacaatgtattctcctcctctgatcatggctaaacaactactttaattagcaaattctcccattatcacccgcatgtcactagttttagtccatttacgtgacttcctttctattcccactccttcgtgtaaactttctctttcctaaataatacaagttaaggcctcttccacacccaacttctctaatcctttgtctacattttggctagaatcatttttcaaaaccacaaactttatcctgccagttcttttttcacacatcttcagttattcttcagtgcctggagaataaggtcgaaatctttgagctgcttttgtagacctgctcattcttgcctcaacctctctttctagccttgtctcacatagcactaaacccttcactgttctctcctcacatcatggtcatctgtacatccactctctttcctctccctgaaataccctttcttttgactgtttggtaaactcttagtcattctataagttccccaatccaaagtgaacttggaaagtcttccttgagatccacggcaacttgcgtagacttctgttatgattcttatcatacttctttgtgcacaaatttttctcttgctccaatcccttactcttgtctcctctgatgcatttttcaatctcttgctcttgtttattcctttctcaaactctctc

SEQ ID NO: 54544 - DNA, 1049 bp, Homo sapiens
attttaccacttccatattgtgttgcttacttcatggtattagaaatgctgttggctcactatactagaatattatcaaccagtattttcataggaaacaaaaatatagacatacacacatatatacactaaaagaatggaaatctgaaggaaatagagaggaaaatataattttgtctttaaaaaatcccagaagcccttagactcccatgattaggattatattcaacttatacattcttctgtgtcattcttccttcagtaaattaggaacaactaatatgctctgcctcctttctgaataaggaagtataaatggatgttactgaattccctcaagtcctgggcaaatacactatcacaatgtctttggtttgcatgaagatggaggcgctcatttataatgtgaagcctttcaccgttaaagcttcacgtgaacccgaactgacacagaatcaaagctttcatgagagcaagatggaaagagattatgtcaacacaccccatcccaaaatgttgtaaagtgccagacttcttagggtattccatgacactgctagaatgtttctcatattcagtcacgtagatcattcttttactatttgttttcttttagatgagttcaattggagcctgcccgctatggaaaattattgatgcaattacattaatcctgatcaccatggtgatgtatagttataaaattggcttaaaatactgtaaggcaggaaaactaggcaaccttaactcttttagcacaggtggccctctttgcagagcattctgactttcttagtttccaatattctagcagatggcatgggtagttgggcacaatcaattttcttgcattgcctcacatcttccagtgagattttgcggaagaatggtgtgtgcaccacagatcttgggatcattcaaaggattctcaaagctcctcaatggccaatcagcagtgaagagggaaatggtggtaaatgaggtagaagccctctgtgaatgaagtaatgttctggaaggggctatgcatttggattttcattctggta

SEQ ID NO: 54545 - DNA, 1407 bp, Homo sapiens
tatgtttcactactttgttgcctacgtagtttctgaatgaacttgaacttgcaacccctcgtttaaaaacttgttcctgttatgaaactgtgggtgcttatgctaaggacttaatctttctctcttgcgtgggaggaaaggatatctataacagaacaataattgtaaactagaagagtagaaaaaaggatgaaagaaaagggcaatataaaaggcaggaaaagtaggggtataagaaaataaaataaagatcaaatacatttattactatgagagcttctatgcgggaaaaggaaaaacaaagtataataatacaaggcaaccacataattaaataattttttcaaaagactgtcagtggtaacacacacacacacacacacacacacaattaggaaaagctacaaaagagccccaagtctaacttggcaaaattgaaagtatgtgatagttttaaaataaaaattaaaatactttaaactagtttaaaaatatatctctacttcatgtacatctgcactgtttgacatgttataagaagtgctaaattatcttaataatttaagaagaaaagaaaagtaatggtcttccttctctctctccaattctaattccttggaatagtcgtttctaaatagattgcagatatgttcacttttcaacattgcttatataagagaaggcaaggtatttagaatttttcttgatcataacaaaaagacactgaaactcagaggcagcaagaggccccattatgggggcaaagagtagcagtggaaatgaaagtgagttcctgaacaagttgcttccaacagggtaggtgtattttgaagtggcgttgtaagtggcaccctactgcttccatgagtttaaattgtatcaactgaatataaagtataagccaattttaaaatgagaatttgtagaattcatgtgattagattagaggtttttaaaaagtaatatttgaattttgccaggggggtggggtggggtatgtattatgtgttcacgggatgacagcagatatcttcaaggaagtggtttggagtacattaagttctgaacacataaaatgactttttttttttttcctttttggtcttcaggagacttgagaaaacaagtgctgtgtaagttataaacaggatgaatggaatagtgatttcacaggagttagaaaaatactccagtcacaaaagttaaaattagagtaatctgaggcattctcagtactttggataccctgtccacattcagggctactgattatatttccaaagaaacttataaaaccagatgtctagctggcaattggttttgatgaatctccaaatctcagcaatgagaaaatttgacagttgtcagacagcagctagctattacgagtgagccagggaattttct

SEQ ID NO: 54546 - DNA, 1133 bp, Homo sapiens
tgcatcatgtaattgaagaaatagaaatcaccaggttacatggcagacctaaaaaaattcagcaagtctttttgaatgtacttgtgactgtcaacatttacattgtccaaaattttcttgtcaggtgagggcatcaaagaactcttaaacgctttcaaatgtggtgggagcatcttgcttctgtgagaagatttatattctccctaccttctcaattctgtttccctatcttatatgctataaacaaaacctcgctcacgaaaataaaagatgaatgcatgttctgaaagaatacagaatcatgacagctgaaatggtcatggtttcttttaggagatgaaaaaattaaatacacaggtgaaaacattagaatgcaattctctaggttaccatatgcttacaaaaaatcaaaaggagctgcagaaatggaaatttctaatgacagaagaaatcaaacagcagatacagtagagactttagagataaatgggtgtcaatagtggtaagaacacaggttcagaggagatccaatgttccatctaaatcctggttctgtcactgagtgggaatgattacttgatctttctgtgtcctcgtttcatgtgacaatatctatcacatgcagtgttgggtaaaacacttagcataatgcctggcacccagtcaatgtgcaataaatgttggctattatcatcatcaccacctccatcatcatcattctctaataaaagttaagcccttctctctgttgaatacacccatcagttaataccagtggctccttttaaatagcttaaaagcaaccaacattctatagatttcagtggggaagattgtaagtgaaatgggtgttgtgacctttcttgaaaataacccttctctctattagtatataaatgctagtgctgagtacacatactctgaagttgaacttaattaatttggggcagtagcattttcactgttgatgagcttgtatttattttctttggtttacaaagcagctggtgttgtccaaaaatttagaaacccctttccaaaatttaaatgacccccttcattcccttcatttacactgttgttctagaacctgggatgacactctgcagggtgaatggagactggtccctctg

SEQ ID NO: 54547 - DNA, 2386 bp, Homo sapiens
ggccacatgccatgtgctgatcagcaaacgctgttgaaggattttgaaaagactggaaaaaagaaaactggttgtctagttatctgaagaccctgggctgtgtcacatccactatgaatacaccctccaaaatctgagaccttgttaatgagccctgtcttctctcccagattctaactgctcttcagcgttgtgacttagaggggatgccgtaatgcatgtgtgcctggaacccagggaggcagaggtcctctttttcaccctaatgtgaagcatgaagttagaatcatctctgtgctccctaatagagcctcatgcagagctgttatcattctggataagggattcatgggcatttgcatccataccccccaaatagtggttcctgagaaaatttctctgacatgctgagaaaaaataaagaattcataaagttgaaattattgaacttattttgatattaatgtacttttttactctggttgtcccaaaatatctcattgggtatatttacttgacaaaatgaaaagttggcaactggccaggcacggtggctcacatctgtaatcctagcactttgggaggccaaagctggtggatcccctgaggtcaggagttcaagaccagcttggccaacatggtgaaatcccgactctgctaaaagtataaaaataagccaggcatggtggcaggtgcctgtaatcccagctactcaggacgctgaggcaggagaattgcttgaacctgggaggcggaggttgcagtgagccgagatcgcaccactgcactccagcctaggtgacaagagtgaaactctgtctcaaaaaaaaaaaaaaaaaaaaaaaaaagttggcaaccttagaacagttcctgtcatctctctttattgtttcatttctaaaagagtttcatttggttgctacccagttataatgaaactgaaatccacagtggtctgtgaaatccaagtctgtggccagatttgagccacaccctcagttaatgacagggccgggagagggagggaagggtggaaatgaccaggaacaccaggtacagatagaaaatgtccatcctcagtaagacgggtcacctctgtgaggggtacgtgtcctcattcagtccatactcaaaagagatgtatccaaaagctgttgtaagcagctcaggttttgggggcaggggctgaccttttctagtctttgaaagataatgtattactcttgagaaatgtagaattttattgtcagtgtgcttgaattcagcaaacagacccggagatgaacccaagggacaacgggctcaaagaacatagatgataccatggaactttgacctatttcatatgagcattcctgggcctgcatttgggactggctgccttgtttgttttataaattgatcctcatattgattccttacttgatggctgtggaaaagaagtctccttcttgtttgaactcatgtctttgtgagctgcctttatgcttattacataaaagtctccctgattcttgttgatttggcaagagacttccttgctgagaattttgcgggctgtggtatgggtgtaaagtggtttgctgtaatggaacagcttccagaagagaatccggtctccgttttgaaatgccacttcttggaaccagaagaatttattctaggagggagaaaagaattattgataagttcataattattcacaattatttattgagtacccactctataccaggttgtattttagacactagggctatagtaaccactaagcaaaatgcacagaaatgcttgtcttcagtggtcctatgctttattgggacaaaacagatcagaaacaaaataaaactcacaacatataagaacattacatagtatgtgagaaggagacaattctatctggaaagtctagcagagcaagtgtgatcaagagtttacaagaagggattgctgtttaaaccagggaagtcagattaggtgtccttgattaagtgatagttgagtgacagtgacaactttatttatgctttagaaagactactctggctgctttgggaaaagactgctgaaaagcatggagacctgtcaggaacccattgcaaaagtccttgcaggcagcttggagcagggtggtggcagtagaggtggtgagaagaggttagatttgggatgtatttcaaaagcagagccaatgtggatttccaataaactggaccttttaataaagctgagagagactttacagatcatttagaccccttccgaggccaagtaggtagcacaagggagtgaaactagctgcatgacaatagaggctcttagaaacagggtgcattgtcttattacattaaaaaaattaaagccgggcgcggtggctcacgcctgt

SEQ ID NO: 54548 - DNA, 1037 bp, Homo sapiens
ccatgggttgcctcctgcccctgaacgcccccatccctcagtgacctctgagcttccacagtacccaagagtgctccggaacaatggtaagaccactgagctaggaactagctttgttttgtttgtttgtttgtttctatattattatttgttgatgttacagagtatagaaaattggctttttttctttaaaagaagaaactatgttttctttttttaaaacaactcacattgagctttgctatactactttgttacctgaattggtaatggttttctttttttctatgttataatagaatctttatatttaaataaacttaaatactttcaggcgctgtggtctagagctcactgaaagtgttatgtgtacatgagcaggaccctcaagagccaacctgtgttttttgtctcattaacttggaggaaggcatgaggggtcagggcctacaatatcacttggaaacaaggaatataaagaaaatctggcctgtttggtaaaactgtgcttctccatgtcttgcctcttttgatctcttgcctaagttttgttttgaaaggttaacactattcatcttgtcatgactttaaataatcagattacttttctatgcaacaatgctctgtttttcctaagtttcctatttcttcagtgattctggggtgggatggagagtgaatagaaatacaggcatcaactttagtgttttcattgcaattgttttatttgtgcccctcaagttgaacctctctgaatgagtgtgatcatatatctcacatacttggtgttttttcttcagatgttgggattcaaattgtttggaaatttcacatgttgtaaacctaacttagtgacatcatgtgaccatgtataagggaacctttatcattatgttattaggaacctgatctctttgtcattcatctattttttgccctggcttgttgggattggatcaaaccaatggaaatgccggagaactgagttagaaatgcataggatgttaaaagaacagaaatttatgctttaaagtatt

SEQ ID NO: 54549 - DNA, 1039 bp, Homo sapiens
gccaaaaaagtcattgtgcagctctgacagattgaatgaccatgagagagacacagaatgacaacctcctgatagatagatgcagagagattggcagagaggaacagagacagaacagcgagaaacagatacaggaagatacatgcagagtgagaaacagggacagagagacagagggagatgaaaacagacacacatgcccacacacaaagagagaaacaggcagacacacacccccgcgccccctcccccatctggacccgccccaccaacatcctgacagatacaggaaggcagagagaatgagacagatggagacacaggaaagacatgcagaactagactgacagccataggctaagatgtcacagggaacattctactggaaggaggcagccatcagcttggtcttacttgtttcagcctcccaggatcaaatatgtctgaagagtaacaggcctttccatccactctttatttttagccacagaggaaacagtaagagagaagagggcagatgcttctgtttaccaggattttaattggctacctttggagcctgtgggcctaagctatgactattgtctagaagctttgggagaaaggtaaaaccacagtgtaaaatcacagtggaagcttggagctgaaatgattattgtatcttctctaaccttatacccagtaatgatgtgtttgtaaggccagtggtccaattttttctgcagagtgaacaaaccagtggctcccccactacctccatagagatgttttaacacagacacattctaaacagcaaactacatcggacgccagtctcctataaatgctagagagtaggcctcctcctggcctttatttttccatgttcctggatatatgagagtctcaagagggaggtttgatgccaacccctgcccttgaccttgggcaaccttcttcccctttgtgggtggaatgaggtgccatgacttgttgcttttattcacaaagtgcctcacttgtttatatgaagccaccggcctcatggccatgcctcagc

SEQ ID NO: 54550 - DNA, 1027 bp, Homo sapiens
taggtactaaaggagatggagaagaataacctatgaaaccggcttgttttgagcaggaaaggaggagatggatgttctaagtgaccgccataacttgaaaataaagtggttcctggggcctactaaatgtttaaatttcagagaatccaagcttctttttgatgagccttcttcagtattttacaacggcatatcgaaagggtttcttaattaaaatccccagcacgttggaggggcgggctgattgaggctgcagtgcctgcaggcagggtgcccacctccatcagccacgccagccgaaggggcatcctgcagctcctctgtcagagggattcctgccggagcacctcctggcagagagcatgaggcccggccaattcaatgtggcctcgctgccccagcccagccgggacactccccaggacccaattagcagattggaaatcgcatccaagtatgttacaatcaccaagttaaagaggaataacagacatgaaagaatcaagtgggaaaagaacattttggatcccgaaagagcaggctgcttgtcggagttctaacgaaccgaaacaaaataagtagtagctccttaagcctcttttctaacactgctgggattggttagtgtagagaaaagcattgaaattgcaaaagaaaaaaatgcttattgttcctatgttcaatttgttatttaatataacttgttttttaggaatttaataaaaaaaaagggagggcatcattaattttacattctgcaagaaaatgaaaaatgatctgctgattagtgatgtgcaatttgttccttgaacatctccagtaatgtgtgaatgtcacattacataacacttataatgattaaaccagaagatgaaataagataggatagatcttgtgttctttccttgactggtggacaactcatctcattaatctctctttggcttgcagccttaaattgaataagccgtgttactgggggagatttatggccaaaagacttagcagcctcactgaggaaatctta

SEQ ID NO: 54551 - DNA, 1112 bp, Homo sapiens
tgccatgtcaatcattttgtgcttcctggtcaactaaaacctcaggtttttcttaagtaatataaaggaaacatttcccctcatcttttattggagtcatgttttccttttaatctttttaactgaatcctacttaccattttcaattttaatgatactgcttaaccaatctttctaccttactgagagtttttcaaatgctgattttgccaataatgctgttaccatggtgttgtatcttttgcagatttgatcaacagtactggcatcagaaaaacacagatgctttggtaggtgtcatcagggtcctcatctctccctatgctggcattgatctatcaccttatgtgatctttagccccatacaaattctcatatggcattagaagtaactttagaaaatattaaatccatttgtcctctctattgatactatacatgaggaaactgagtcccaaagagcccatggccacattactggttaatagaaacactcatattagaactaaggtccaagtgacaccaaaggcaggtgtcctttcctgtttatcatagctgccagtctttatattattcacaaggtcaatgcaagaaacatttaaacatctcgttggaatcccaacatattgtgataggtttcctattacgtgagggttatgtaccactgtcaattagaagataaagcaaagtggtggccttttttatctcttattctaagatcttcagtaaaattccttctgtttctaaatataaagctttaaaacaggctatattgatgttgcgaaagaactggtacattataagtagaagtgtgtgtgtatgtgtgtgagggaggggtatacacatatgcacgtgctttatatcataattaaagagtggaagaaacaggattctttactggtcaatgaaaacttttcagaggaaggcaaactggtcatttatacaaaaccgtttgtggagcatgtagacttcctttgcactcactaagaaagcactctttttaacgagggactatacatttgttcaatgaaaagaaaatagctctttgtaccttgctaacggaattgctaactattcttcagataggagtctcattgttcccactattcagt

SEQ ID NO: 54552 - DNA, 1039 bp, Homo sapiens
ttacatttctatgcaaacgaagacttggcccacaatcagtctgattggttgcagacagcagttaatcagaggctgaagtgaagtttcataggtcacactcccatgcaagcatctgattggttgcaaaaagcaaccaatcagagatactttccattttcaatctgccacctagaaaaagtggggttttgcaaagggagtggtctctggtccttttgttacctagccagtggaaagttagggtttttctttcaatttagtcctaggaagtcagcgtgaaacggccttaggttccctgcctccagaccctattctcttgcctcattagtgtaacttgaccacctgagtctaccggtacacccctggtgagaatccacttttagctttgtaaagtacttggcataatgcctgatacttgctgagtacatagtgagctgttgcaagtcccttccactaaaaaataagctattgtccttatcagaagaataggatactcttttgttatctatttctcattccatgatataggattctagctttaagtgttgtcaatctcagacaagagttgattatctaaaaaatatggattcttgtaagccttttcattatgtgccatataaaaaatgttgctccaagcaggtttactagtttatcaccattcagatttacaagttctatcaggaacttcaaagcaatttcctagtaaatttcctagtaaaaagtccagtttaacaaatgtttaaatttttctcacttctctttatattttaaatttttctcacttctctttatatttcacaccctaaccctctccctcactttcccattccccaccacattcacctcaaatctacacagaaatcttaaagtgagatgaattaagaaaaaaaaagaaaattgccttttttcttttatgaaaaaacatatttttataataatctgaatctgaaatttttgaaataatttaggacttatatttagaaaaaatcatttaatccctctgtccttccttctttctctccttcattctttcatttcttcc

SEQ ID NO: 54553 - DNA, 1092 bp, Homo sapiens
aagtgtctttaaattatgggaatgatgggactttacctctgttagagtggataggttgggggtcaaagcatggtggtgaggaggggattgagcaattagaaaaggtttcctgtcattggaaatgtctgattggggttttgcaaactgaataggagtgtacaaggaatatagtgagataaggaagggtggagatgcaatggaagagttcaagaaagcagctctgcttgctctcagcagcccagcacactaggacaatttggtcaccaaataattattttccatttccaggtaaaatatgctgaatgacagaatccttcgacccctatgaaagaaaaagagaagaataaaggaacctccttctgtgactgcctttggttgaaagtcattcgttcttctttttgtttttttaatgttttgtagagaaagtctgtgattgctgtgagcttcatagcagcgttccttttcctgctggttgtgcgtcttgtaaatgaagtgaatttcccattgctactaaactgctttggacaacctggtacaaagtggataccattctcctacacatacaggcggccccttcgaactcactatggatacataaatgtgaagacacaagaggtaagatcccagagggttacctagcagttggagagtatccatggtaacagcttttctttaggagccagagggcttccaactcactgaacttactctgtctgccccggagagcttgcttgggtccctgacaacatcttctgtcttattattcttagacatttactgacaaatgtctaaatctgccacccctcctacattaaatcttctgattcactggcttcatatggagtcaaggaagcaattacttgttttcctggtggtttgtggcacaacgtacatatctctccatttagaagctctgattagcagttaccagctggagaactagctggcttgatttcctgtaggtcaactggttggggagagctctttatagaacttcaaaaatgcatttatactccttaaaactctgtaatccttagacctggagctagaaaaggccaagctgattttaaaatttgcagtggctgcagagat

SEQ ID NO: 54554 - DNA, 1106 bp, Homo sapiens
attaggtcaaacatctagtggacactgtggagtgtagggttgcttaggagcaaaatctgattctttagttatcttttaaaaatagatgactctggtccctttggattggcacaagtgaaaatatagctggtttgtgaatctatgacagcctgccctgaaggccccacatatagtaaattatacccagtttaagctctgcttcattttatcaattaatctgttttttttaaaaaaaataatctgttcccaggggaaatacaaaaattaaaataaaaggaacacaggagagatgtggttttgcttatatttcaagctgtttatttttttccctgatgtagatccataaaaaagagcatgtgaaaactgtgatgactattataaaggggttaaatagaaagatcaaaatattcctcccactgtaataatgatgatctaaatataacagagttggtgattggctttaactctttacctttacccagtctccccttcactttctcaatgagtgtaagctaaggttcttttctatgggggaggggaagtcttgagaagcagggaagaaaaatgagtgccaactaactgggtgagtgctgaaattctgaaagtcttcgctggccacggagccccaaatttctcatcaacacgtgtttaagctgatagcaaccatgatttcaaaccaaagcttggatcaggagtgatttagattttgcaacagaccctgccctcgcctccctgctgtgtcattaccgtgtctataatgcaatcccccattttaaaaatgacaatgtggagattccacctatagcattatggcagaattactgtattatcaactggctttggatatggtaaaaagtatatgtcacccatgtatttttccagaaaaaaattaaaaacagaaacgtgcttcacaatatcctaaaaccctattttccccttgaaacaaatgctatttattttaaattattaattatagcagacagaggaggtataaaggactaaggtagtccagggcttggttcaaggtaatcttgctttctcctgttgagatcatggcagatttttgggaaaaaggagaaaacgaacttcaagctaggttctatttg

SEQ ID NO: 54555 - DNA, 1041 bp, Homo sapiens
tactctccaccttccctttattagagaaggtggcccttccttttgaccacaagggtgagcagaaaagtcaggctagtgattggtcaatcaagtgattggttgaggggtgggctcatggcccaagatgagccattctgaagccttctcaaattttattatgtttttctgggacacactggcaggaaaggcccccttttctctggtggtaaagctgttgggatgtgattctctggatgtcagtagctgtgttcccaagacagaatgagacaaagacactgagagaagcagaaacaagttgcaaggctaatgtgaagacccagacaacacttcaggtcctgagctcaattcttgaaggcagcctcccctcccatcccccatggtttgggtgtataagccaatatatttgtcttctttttacttttgctggtttgaactgtttttgtcccttgcaaccaaaaaagtcctagctgatatattgtagttattttacagccaccaccaccaaatgttcagtaactcatctttaaacaaggtgccatctgaaggaggagaggagtagtctttccaaatctgcactctcaaacctgctggggggccaaacacaagtcacatccatcagtcagtgcaggtgtctgcaaggggtgaacgctgtctatctttctgcttaggtgcatattgcttagtaaactagcttatccttttgtggtagaaaaatgaaggtcaatttcccaaggttataatgccagaaaatggctggacaagactgactactacctgaattgctagtcgtactcaactgataaatcatatagtttcattataattgttagatgaaaatttctctattgctgtgaggcatcagcagtcaaactagattgattttcactttacaaatcacattttttattgatgaaaaatccattattatcataggttttaatgtagtgatcggttcctcaggaagatataccgcagttttatttattacagagccttaggtagaaaagtccccatttgccaactatcttgttaacgcacttg

SEQ ID NO: 54556 - DNA, 1062 bp, Homo sapiens
tagccttacaaagccttattcacaaaagaaagatagccattacagaatatttcatttcaaaaataactatatgcttttatatcaaatgttatccaccactgccccccacccccccacaagtttgggaaatagtatgtctggttaaccgagtcatctgactaataggcatttgccaagtatttaataaatggattctttatttattcatttattgacatggagtctcgctctgtcacttaggctggagttcagtggcacgatctcggctcactgcaacctccacctcctcggctcaagcgattctcctgcctcagcctcccgagtagctgggattacaggcacctgccaccatgcccaaaaattttgtattttgtaaaaatacaaaaattacctctagaaataccctgctgtggtgtttcataatatgtgtatttgagtatttgctctgttgtcttcttcaaatatgaacatttatgaatcccaaagtatacctggttcaaatgattttagataagggattgcaggcctgtgtcaaacacagactataaaaatgattaagaatgaataaaatacatgggaagcaaagttctagcaaaaataaaatatctctgaaaaataattgaatataatgactagaaataaataaataaaattgtaatacctcagtggttaggttaaatgacagtcactgtgttaagtattttatgtgccattttcttttagctcttacagagtacatactattttactgatttaactaatttttcaaggcccccaaagtattgattctatgctagtgtctttcattgtcctgtgtggcaaaacaagaacctaagactatcctagtcaacaaattcctttaaatggtttcacagagtgtctgccaattcatgaagtcagtaagttcatggaatcccatttgttgaatttactacatgcaacgcactgtgctaggctctgaaattgtaaaaaagaaaacactttttgcctagggataaataaaattttttcataatgttaaaggctaataaagaaggtagaataacatgtgaaagattattt

SEQ ID NO: 54557 - DNA, 1049 bp, Homo sapiens
tacaaaattattatcccatataaaagaagaggcagttgaggctaggataggtaatacaactcacccaaagtcacacatgctcaaattggcaggactgatatttgtccctggctccaaagccccaggttttagtcatataatcaattacacagaaaggacatccaatatgctgatacattattcttcagactggccttacttcctttgctcgggagtcacctgcctataactctcatatgtgatttaatcttgattgtttttgttgaattggggaacttcacgaatgagaagtagaggagttgagatttttactttctggcatgagctaccgttaaactgattatctcgctgcagtccacatctggaccaagtacaaaagtgaagcctgacttcttactctgtggtgctgataggaataacagccacaacaccaccatttttgccatcttgctgatgaattgacctcatatttctctacctacatttttcaaaatagtgctcttttatgagttactcaagccccattttaaaagcagtgtggttgataagtatgtttcatacctgcttgtactgagcttttttaaccttgtgctcttgaaataatatgagcttttggacactatgtattcagtacagactttcagagtgaaaatgttgattttcccaaattaaagaactaggggatatggtaatatatgctctcaattttgaattaggtggaaattgacatcgtttgtcagaaatatactgaggataaaaatgaggtaaagttttaggtgctgagctgtgtgccaaatagcccttgtgtttctttcttgaacatctacttcaaagaagcagatttgcctttgatatccctgggagccacatgaatatgaactgactccaattgccctcatcatctccagaatttattttttatttttttagggcatgagtctgtggtcaatttgcttatttgcttctccaaaccagcatgatcattataattctccttttcatgaaataacccactctcagcctgttgttaatcctacctagaggttggg

SEQ ID NO: 54558 - DNA, 1088 bp, Homo sapiens
gaaggaaggagccatgagccaggcatgtgggaagttcctaggaaaaagaaaagacaaataatcagattcttccctagagcattcagatggaacacactcctgctgataccttgattttaacccccaaagactcattttatacttgtgatctccataactgtaagataaaagatgttagtggtaatttattacagcagcaatgggaaaccaatgcattaaggaaggcatttttccttttgaatgtcccactataaaatagggctttatccactataaaataggtgttgctcatttatttgttcctttattcattcaacaatcatttattgagtgcctactatgtgtccaccattctaggcacttgggagagagcagtggaccacagagaccaagcaactcctctaatctagtgacaggagactgataataaacttccaaaaaaatacagaaatctacagtgataaatgttatgaattcaagtgaagcagggtaaggcaaccggagtccacatctatttcttacaaatcattcagagcaggttctgtgataaggtgacatttagcaaaaacctcaaggaagtgggagagaaagtcatacagatattcaaaggaagaatatttttaatagaggaaatggcaagaatacattccctgagctaggagcttgattctgagattcaaagagcaagggaaccagtgttgataatgataataattacctcacaaggctggtatgagaattttgggcaacatacatgaaaccccctggtgaatttcaaaacactatgcaagtatttagtcatcattgcatggtccctcggagtgcattttgggggctgccaagggatgtgtagggtgacctttattttgtgtctatataaaagcgaaagggaaatagctattggcctcaggccatggaaattatgcacagaggcctagaaataggagtattttcccaacatggagctgatgattgatgatgattctatgtgtgtccttcacagtggcaaaccttcaaggggcagggacatcattgctgctgtagtccttaaaccctgtggtccagaagggtgctcccaaggtgccaaa

SEQ ID NO: 54559 - DNA, 1110 bp, Homo sapiens
ctctttttagaagtactgccagcacaatgctgtctatgctccaatgcttaacaaaatttttagtgaaatgttgcttacctttttgatatatcttattatcatcctagagcccagagaagtgcattagattaacatggaatcagaatccgatgtaaccagaataacttccctccaccaagactaatgctttgttactgggtctaaaatgttgggctcagttcttgggaagacttacttcccaggaagctcctctgtgtctcttaggctcacacttcaaggaggctgctcattaatttttcaacatgctcaggtatcactgtgaatcctggccagagcaagctggtaccttgactactcttttttcctcttccacttgcaggtagaacaacaactaataacaaatgtatatatgtagctcactatgtgccaggtattcaccatctgtaagtgatttaccagtagtaacttaattgaaccttgtggtgattctattgcattatctttatttcaccaaggaagaagctgaggcacagagatgttagttacattgcctaaagtcacacagctagtaatgatggagctaggaatataactcagacactctggttctgagtaaatgccctaaacccatgctgctggtgctgtgatagctgagtctcagcctcttcctttctcctacccctaaagaatatacagtcttcattctacccacttctctctcagaatctcagaaactaggaaaaaaggaggggtagaaaacacataacagtgcataacttatggtacagactgagacttgaggggaaatattcagagaccactttagatattaggcaatgctagctctataataagtagaaaattccaaattcaagatattctgagccttgaaaatcatgagggaaataaaaatgcccttgaatggctatgctgctttctctattcaaagagctagcttggaacactaaaaggatgttcttattcactaagtgtttttcactgtttgagtctgcagtggagttttagccacaaataaatgtttttcctaaaattgaaatcaatttgtaaaataatgtagaaaatataaagcctcttgctgtttttctcagt

SEQ ID NO: 54560 - DNA, 1052 bp, Homo sapiens
taatttttatttgcaacacggaatagggagaatccttgtatgtgaaaatgaagtagcttcctagtgcaaagctcaacgaggtggccacatttttcatggttggttcctgctgcggtcctgctgctttatcactgagaaaaacagcaagaggctttatattttctacattattttacaaattgatttcaattttaggaaaaacatttatttgtggctaaaactccactgcagactcaaacagtgaaaaacacttagtgaataagaacatccttttagtgttccaagctagctctttgaatagagaaagcagcatagccattcaagggcatttttatttccctcatgattttcaaggctcagaatatcttgaatttggaattttctacttattatagagctagcattgcctaatatctaaagtggtctctgaatatttcccctcaagtctcagtctgtaccataagttatgcactgttatgtgttttctacccctccttttttcctagtttctgagattctgagagagaagtgggtagaatgaagactgtatattctttaggggtaggagaaaggaagaggctgagactcagctatcacagcaccagcagcatgggtttagggcatttactcagaaccagagtgtctgagttatattcctagctccatcattactagctgtgtgactttaggcaatgtaactaacatctctgtgcctcagcttcttccttggtgaaataaagataatgcaatagaatcaccacaaggttcaattaagttactactggtaaatcacttacagatggtgaatacctggcacatagtgagctacatatatacatttgttattagttgttgttctacctgcaagtggaagaggaaaaaagagtagtcaaggtaccagcttgctctggccaggattcacagtgatacctgagcatgttgaaaaattaatgagcagcctccttgaagtgtgagcctaagagacacagaggagcttcctgggaagtaagtcttcccaagaactgagcccaacattttagacccagtaacaa

SEQ ID NO: 54561 - DNA, 1036 bp, Homo sapiens
ataaatgcatgtctccagtgtctggtaagtactcaatacatatttggtagtaaatttgaatgaataaatgagaatgcttgctcttgcaaataggttcttcttaaagaatctacgatatgttcatgtcattagacatgtcagatgtctgtttcattagtgctgcatgagcccatgattataaaagtgtaataaaaattaggcgatgcagcttttctttggtttttcctcttccggtaaatatccagtagcccttgcaatattccattatgtacaagctctgcctcatccctaaccattattactctatggggcaggactattttagcgtctgatgtattccaccaggtgaagcaaacaaattagacggagtacaacagctgcttgatataggatgtcctcatgttttcgttcttctttttaatacacccaagcatcacatttattttttcaacagctgctgcacattgagcagacttcttaattagctaatgtttgcaaggccttttgaagataaaaagccctatataagtgctaagtgttattattactttgacaaaagagttctcttttaccttggctcactgcaaaatgtgtgagctttccttctgtctaactagaagtagtcaaagtataggctgcataaaccacaggagaaagaacttagaaattcagctgtggaccctgaacagaggcaattgagcactctggaatgttccttcctattttaatgtactcttcaccaggcaccaaaagaaaagaatggtgggggtgggaaggggttagaaaacactttttctgtctctagaatgctttgagagaatggaaatacttacagcaccctctttctgaaaaggactttttttatgtgaaacctaacatttatttctcttagcttgattttataaaacaaagcaaacatttagctatcacagattgcatccttgcaaatagatatctatgatctagggacaaaaaatgatgtacctgaaccaaatttatgtgtaagttaccttatcccctttctcattaccaggag

SEQ ID NO: 54562 - DNA, 1036 bp, Homo sapiens
cctaacctcaggtgatctgcccacctcagcctcccaaagtgctgggattacaggcgtgagccaccatgcccggccaaggtgttcatttttcttagagcatttgcatatctcttactcagttttttcccatgtatttgcattttcgttgctattgcatgttagatttcttctactgtggtctgttttttgtattgttttgttttgttttgtttttgctgatgtactgttggcgattttctgtatccatgttgtggctggttaccatttttaattctcctattagttctaatagtttttctctggttgctgtgtttgcaaggagaactactgtgtcatctgtaaataatgattttttttcttctctatttcagtattaatacttcccttcaccctgcctctgggtttctgtgattacatggagtagagcttccagaacagtgtaaaataaatattagtggacattcttattttggttccagtcctagtaagaatatgtctagttaagagcttctagattatgttccaaaccattattccacgagatgttaattgatttcctacaaaaaaaaagagagtcttctaaataatttccttgaactctgaattaaccaaaatgagacaaatctctttagtgaatgggcttttataacctttactatttaatatgcattgacaatctcctagagatggagaaagtatgtgacttttcccaatatatttgtcatagaacactgtttttgaagaacatttactaacatcttataaaacgatacatcagtggtatctttctggtattgttctggtagggtactgttaattgtgatgtttggggtttttggtttcaaaatgatgttctttaccgtgttaagaaaatatcctacttttagcttacttagagtgttatataaatcaaatcttttactatatgctttattctatctggcttttgctgaatataatgttttttatatttactgatgttgtttatttgttttcaatgctggatagtagcccttacacaagtatcataaaaatt

SEQ ID NO: 54563 - DNA, 1034 bp, Homo sapiens
accatgattcgagttgtgtcccataccagcgttcctcttttgctaaaaaaccctgattattttttcaaggaagcgaatactactatttatgttatttggggacctttccgcaatatgaggaaagatggcaatggcatcgtttacaacatgttgaaaaagacagttggtatctatccgaatgcccaaatatacgtgaccacagagaagcgcatgagttactgtgatggagtttttaagaaggaaactgggaaggacaggtgagccctctctgaagcagctttattgtcttttattatcttttatgctaaatcttcgccaattccttttgcaggatataaaatgaacagttatttatttacgctgattgttatatgttttgactattatgattacttgataagccagcctgaggtctcatttattccacctatactacctcctgttctttccattctgattggtttgagtctccaagaaacactggatacttccccaaggtatcttttgatctttttttattttgttccatttgctattgattgagttggatttcagctgaaagaggaagcctaaacatttctgtttcaaaacctagtaatggtaaggaactttaggattatgcattaatctaaactcctctgggaattttgccaaaattttacctgagaccacaaacagaacaggctactgattctccaataagattgtgtagcttcttgcatgcaaataggcactgtgatcctgaacatcataacttggtatctaacttgttcagcagaataccatattgaaattatacgtcccttaaaatcattagcagttgaattattttaaagaaatgaggtataaatactattcattcaattatccaaaaaccaatttgcattttttattacatccatgttttttctgtagcattctgtaaactacacttcgcacttttttcccttgaagcctgctttcccctccccttccttctcctatttcctctgtttgctccatttccagctccctcatctcttctgtaactgaat

SEQ ID NO: 54564 - DNA, 1803 bp, Homo sapiens
aaaacaaaatacccaagtaaaggagaactgaaaactctcataaaacaacctgagcttctctaccaaactttaaattgccctccagaaaatattttcttctttggtaacaaagaaaataaattgccttactttttaaatgccttcatgatgaacataaagaaaagaaaaaattggtagttgtgtctttcaaccaactgcataaatgaagaataaatttgtatatagactaagaggaaaattaatgaaagcatttctggcatattcagatcatgtcactctcctgctcaaaatcctgcaatagtcctccattttccttagaataaaaacacgtgtttacagtgacttccaatcacttctgatgagtctaccatgatagcatttaaaattgaaatccttacctcacatacccagcattcccaattttccttaccttgttctattttatttttttctcttatagcattaccttctaacattctatataatatacttatttattttaatttttagtgttttctatgtatttctcctactgggatatgagttctctaaggccaaggatcattgttttgttcactaatatatctcaagcacctagaagaatatatgttgtgtagtagacactcaatatttgctaaataaatgacctagaggtggaaaaacaattgaataaaggattcaggcaaacttgcaaaaagttatcatgggggtctttaatcgcttaaagaaaaaaatgcatccactcagaaacagtgcaattaagttacaagtttaaggctgttttttctgctgttgttttacaaaaaggtgctagtattgaagctgtcttatccaagagatcatcattgcactcaaggaactggtctgactgatttttattcttcaacacatggaccagttgtttaaacagaattgatttctgatttctttggtatccaggggaaacagcaaaaatgtctcattcttatttggattagtagaacagcggttctcaaacgtgagcttgcatcagaattacaaggggtgctgattaaaacacagattgctgggctcattcctggactttctgggttggtatgcttggattgaggcccaagagtttgcatttctaacagaattccaggcaatgttgctgctggtcctgggatcacacttcaagaactaccgtgataaagaattctaagatatcaagtcacattcaattattttgaacatttggtcctataatctttattctattggcatattgttgcacgaacatctagcactatttttgttatgatatttttcacggcgaggagttttttaacctcctgtgaaagtcctactgcaactctgtcattttattcttcactttcttaagatcttgctcctctgtaattataccagatggtgctgctcagtagcttataagggagtgatgcttcatcattctagacagagagacaaatcactctgttctctgacttttgaatcaagaatcaacatttgtgtgtatgttcaacctgctatttgctttgcaattttgctcattaggtatttattaccctgacagtgtatgagttagtcattttccttctgccgtgtagttcagattagcactgtttgacaactgccatcatcacagcattacctccaataatatgtaatttcttttttgcctatgttatctgggtgaggtagttatctaggaagtatatctacaaacggaagatcacaaacagcattcagttctctgacttatcatgttagaaatggataactagggccatttccttggagtttctagccctgcgattggca

SEQ ID NO: 54565 - DNA, 1685 bp, Homo sapiens
taacagtttaattttgtcaagtcatgtaaattatagtgagagggatgatgagagttctcagctctttggagaagttaattttgttgtcagcacatccacatttcaaaaatcacaaactagaggcagaacttttcagtgccagtgagatttggtgatcagatactgttttcatttctaatgtctgccttctgtatagcgcctatgcaaataggggctttcaaggatgcaaaagtagcaacttcccctattaggagcgtaactagcagctgctgtgtttctcataaaagagaaaacatcctgtttactaacatacaaccatacgccctcacccgcgtacactcacaccaagctctttttttaaggcagagcttttattttggtttgagataggcagcacagaaatgcagtcttttacaaacattccttgagcacatatcccctgggtgctaagtaggtgtcagtcattgttctagatgtggggaatccactgatacttgaaacacattctctaattttactgggaactcgtcggaacttctgacattcattggcaagttctttgcatctggtctcacctccttatttttaatatttataaaccatgttcatcaggatgtcagtagagaagaaatgaaagtagctgagaaaccttgccgagagagaccaaatctcaaagtgaactaaaaatgtcttgaccacaaggatagaaagtgaactaagatatgttcttgaggcagcaaaaataagtattgtgccaaaatccaggctttacctcagtgtcagataatcaatggactagagatttcactgtgttgcccacagccctgttaagaaatcaagaccatgtgctttgtctataatcctggagtcagcccagaagatgagctcataaatatgttagcttaagtaaagtttatgataatatagacgatgaatcatcttcctgttttgaaaagcatatattctataactcaggatttctggagtccctccagaaatctacatgacttttgccccattttctttaggtcttgattcaaatgtcgccttataagagagcccttttttgacaacactctcccacccccaactctcccttttctgcttttcaaactctattttcctttatgttacttgttatggcctgatatgtgtttgctattttctgtcttcccttattagactgtaagcaccatgagggcataacttgttgtttacctctctgccccctcaaatagcatctgacacacataggtgacactacccagttgttgagtgggtaacatgaggttgtttgggattgttagttcattatcctaggcctacacagggtcagcatcaccaatatcgctgtcttccaccttcacatcttgtctcactggaagatcttcagagacaacaacatgcatggagctgtcatctcctatgatagcaatgccttcttgtggaatactgcctgaaagacctgcctgcagctgttttacagatatatatatatatatctgtacatatatatatatatagggagagagagaaagagagagagagaatgccctctaaaataatgatgaaaaataaagtaaatacataagcctagtaacatagttgtttattatcattatcaagtattatatactgtacataattgtatgtgttatacttttatatggctggacatgcagtag

SEQ ID NO: 54566 - DNA, 1008 bp, Homo sapiens
gcttaagtgaccctcccaccttgacatcccagagtgctgggattacaggcgtaagccaccatgcccagcctacttttgtattctcttataatgttgagtgacttaccttttgggagttatagatattagatacaacttgaagtctttttccttcatttgtaccatcaaaagatgttttcggtgttcaatgaaaattgtttcaaaaggaatttggcagtccccaggcttctacaggcggttttgaggatgaaatgtgggggcatctccattctcattatgttgatttctccttgtgacaaaaaccttttgccaccccgcctgcttcccctcttgtgctctgtcttttctctcctctttctttctgctacctgctcactctgttttctctgtatctctttgttctttctcagagctcttgcctctgacacactttttagtgccatcgttttttgagacagcctgatttgatcactgtcttttctctctccctttgaaagctttctctgttctgtgtatttcctagattactggtgatacttgtcattctggttagattttgttcctgttttgatttcatttttccgtaagatttttgtttggttgattttttttaaccttaagaaaaaaagagatttttttacttgcattccacttttctttctgttctgctctgtaacgtgagtgtgcaatatgctctaaagtccaaaaggatagttaacacagtgggtggtggggctatgcataatttctgccatctttcttatagcattctgttttctgaaattgtttcatggtgcatatgtacacataataagaaagaaaaagcaatgaaacgatttctattttgacaaggaaaaaaatcttaatgagagcctggctttgggtcttgcctctagctctccatgaaacctttttcttatctgtcttcaccaccaagcataaccacaatggctggctgagctggagatggacagcagtctgtggggattgtgtaagtgatccaatggt

SEQ ID NO: 54567 - DNA, 1332 bp, Homo sapiens
ttgtacaatggagtgtttaaattcacagtccattgtgaacataggcatggtatttcatgactataaactgtcatgttttaagcactttggtctgtcaggctaactaaatataagcccctgtcctaaagaatcaagctcacatagtatgacaaatcagcattttatttatttgtgctaaaagcatttattgaacagctgtgtactaaaaatcctgcaacaagaagtaacattgaaatttccttaaagagcttcttctactgaggaatgtagacatattaacaaataaatacaaagtaggattataaaaaagtattttagaagaggtagctatttacaggatagagtaaagggagaggttaaagttaaaaagttaaattaaactattttttattgtcatatgaacaaaagtatcttcatgttaaattaaatacaattagctgatatttgtatgcatctgctttttatgagctgtcactagaagatgactttttactgcctttttttttctctgttttttttttttttttttttttttgagacagggtttcactctgtcacccaggctggaatgcagtggcaagatcttggctcactgcaacctctgcctcccagattcaagcaattctcctgcctcagcctcttgagtagctgggactacaggcatgcatcacgaggcccagttaatttttgtatttttagcagagacggggtttcaccatgttggccaggctgatctcaaactcttgacctcaggtgatccacccaccttggcctcccaaagtgctgggattatatgcctgagccaccgtgcctggccaccattttatattttgataattcatatttagtactctcagtcacttagttactcaacatctgagtttctttatctataaaattgacttaaacgtctatgtattcaatattcaaaaagtatattggttaggaatattttaaaatatacaacaaagaggtgactatggaatctaaaatcaatttgagaatacatataaagttaaaggtattataattcttattagcttatatgtggggaaaacaaatgattaaatatatgcatgttatgaaagaaaaatttatgaagtaaatatgtagaagctgcaaatggtgagaataatccagtgtctcctttttgagaaataaggaatattctttttcatttgctagagcaaaggttaaagaaagttttaaagacttgatattcctgtatttggatagatcatagataatcattgtcctgaatgctgagtaaacaattgaatacatctaaaaatgtgacatgcattatgctgagaccctggtagtactctctct

SEQ ID NO: 54568 - DNA, 1009 bp, Homo sapiens
gttcagtgttgctaaaaatttctttaatggaaaagagtggagagatgtcctggaaatagacttaggtgccagatcagaaagggcatatgtgtcagatcaagaatttgtgaccctaatgtttacattttcgaaaagtaagccttgtggcaaaaaatggagttttgtgaaagaatgtagccatggagctcagtgactaactgcttattataacagcccaagttggagatgatggggccagaatggggacatgctgtccatgtcgatgacaacatgaactaggatttgaaagcagagattatgccaagggcaaaatatccactgcaggtgtatcctttcccttttctagaaaatagaactgtattttgtagaatctttttgttcttcatcaaactctgtttttagacttttaccttcaaaccacccaagaacattagagcctcataaactataaatgattaattttatgactcactatttaaagcaaatggaaattttaaacttgtttttatcatgagagtccctgtctggcaataattgggcaaagaaggcaagataaaaaacggatttttcttcaggatctgctaagtagaaacaacaacatagaggctgggcgcagtgactcatgcctgtaatcccagcattttgggaggccaaggtgtgtggatcacctgaggtcaggagttcgagaccagcctggccaacatggcaaaacccagtctctactaaaaatacaaaaattagctgggcatggtggggtgtgcctgtagtcccaaccacttgggaggctgaagcaggagaatcacttgaacttgggaggtggtggttgtggtgagctgagatcatgccactgcactccagcctgggcgacagagtgagactatgtctccaaaaaaaaaaaaaaaaaaaataagagaaagcaacatagatgctgaactttaaggaaatgtgatataatatggacttgctcaacataaactattgaaaaatgtgtgtagttataattattatt

SEQ ID NO: 54569 - DNA, 1608 bp, Homo sapiens
aggtgattgtactaaattttactttgtacacatcctagtggcaatgtatttgtgctgtgatataattcatttcatgatttagtgagtcatgatggaaaaaagtattaggtacttctttttctcaatcaaccaagaacacatcctactttttccatctgttcccggcaacagatgtgttatttgacaagaacccactgatttgtaccctgcctggcatattagactcataccactgaacaacaaggtacctggcttagtgggcaccttggcatagtcccttttaggacccctcctttggttttcataaacagaatgttactgccaatcataatatgtattttgtaatggaatttaagattcagagatttgagtagaaacaacttagctattcctcctccatcagactcctgctggatacagccctcattttctcacacgtaggactgataaggaagatcaaaatggtctcctactgtgtttaaaatctttacttttcactctttaaattactggctttctgtaacttccttctgtgttttctgacatctacagtttcacaattattattcttcaagatttgtcttccttgaagtctccatttttgaagtctgggaggagcaccaaacttggttttattccatcacatttagtgatagacttcttcttctgttttttttgttgttgttgttttgttttgttttttaaagacagggtctcactctgtccaagctgtagtgcagttgtggtggatcatagttcacagcagcctcaatctctttagcttaagccacccttctacctaagcctcccaagtagctgggactataggcatgagccactgtgttatctatggataaacttttcaatgagaagatccaagtatcttggccaaaccaaagccaaaggcagacctctaatgaattcaaacagttctagggacagcttaagataaacagtgtgatcctactcggccttaagagtgaggacgctatcggttcattcagcccagagctaggaggagtctgcttcctgtctgcaagatgctattgcagggtccaaggcaggatttctcagaattgttgactggagcagggaacttgtggccctttgtaattcctaagcatcttcctccttttctaccttgccctcatcaagaatcctaaaccaaaaagtatttggctaaagtgtgaaggagactgtgattctgctttcttgaaatttttcaagttcttaaagcacacaatatgaagctctataaaaattatttatgatttcaaaagaaaataattttaaaattaagatattatgatagaaagtagccttctagtcttgccttaggcatgacaaagaactcaagttcccacctgagagagatggtgagaattgtacttcacataaatactgtttactttcactctctaggaaactctataatgggtgccatttggcattctaataactgttagtgcagaaaatagtgtttccaattatgtgttctcaacacacattttcattagagtagttggaagcaaggtttcaggtaactggaattgacctcttacttctcacagaattagaagtcaagaagttggcacctttctacagatc

SEQ ID NO: 54570 - DNA, 1118 bp, Homo sapiens
ttgtacagaacagtgaaaattgccaggggagtggagaagaaaattagcagtgtctgcctattctggatatttcacatcaatggaatcatacaataagtggactttgagtctagattctttcacttagcatgcatgatttttcaaagtttgtgttttagcaaatatcagtacttcattcatttttatgactgaataatattccattgtatggatataactcattttgtttattcaatcatcagttgatagatgtttgatgatttctcttttggctactgtgagtagcgttgttatgcatattcttgtacaggtgtttacttgaatacctgttttcagttcttttgggaatacttaggagtagaattgatggatacagtaagtctatgtttaatttattgaagatctgtcaaattgctttctacagtgattgaatcattttatattcctactagcaacgttgaaggttcaaatttcttcacattcttgccaacccttgttatttttcatttttttaaatagccatactaatcagtgagaggtagaatctcattgtggtttttgttttcattttcctaatgactaatgacattgagcattttttcaagcgcttgttgaccatttatatatctttagagatatgtcaagtcttttgcccatttttaaattgggtcgtttgtctttgtgccgtggtgtttcaagcataaatctatagacaaaataaaagctacttgttggctgttttattggaaatcacacaacttgggaaagtctcaaggataaattttgctaaattctttgtccactattcactaagagggtcccttaccctttcttttcctttgatcattggttatctggtttcacctgtcaagaaataagctgccctttgattgtggataataggtgagacaccgcagaatcaagttacactgttgcatctgtaaagtttcatcactgtgtgtttccaggagtcaggatttgccatcaaagtcaattgccgaatgactctgactttattattctttatttgcattaacaattgctctaagcagtaacacgattataacccaaaacagcagcctgttatctatcatttatttgatttaatacatagaaat

SEQ ID NO: 54571 - DNA, 1260 bp, Homo sapiens
taaatgaacagcatatgagcaaaggacctggggaacccccaagtgactaacaatcaaaaatagaattttctgcatgtcagatattgagtcattcgctgcatggcccaattaacctttcttctgattccagattttgaacttgtgtccttggagaacaaaatgcttacccattgccttggctgagtcacttctgtgcagttttagatgaaccctgcttgcacattattccattggaaacaagcattttcacagtaggttaaggactgggactaaaagaaaagagaaagctaagatgtccatctgaaaactgtcagtgtcgtctcaatggaaagttatgatgttttacttctctgaaaaagctaaagaaagcaatctggccagttataaatttaatttatgaaaataataccacaggcctaaatcatccaacactatagctattgattcttctttctagttccttggggaacagttgctgtatttgagaaggtagaactacaattgtcttactttgtcatttaaatgtcatattagccaaacactgagcacagctgaagggttgcaaactgactaggaaagaatgggatagtatttttcattttttttttaaatgtaattggtagacagattttcctgttggtgagggctgattttttttcctcattatttctctctccttttattttctccacaatgttgcattttcttggttttctgtgaggcattaggaaaggataaatcatgacgttctgggtctatggtcttttttaatctctcagattattttctttaacagaattgttggaaagttggctgttacctgacagaaaataaaacaaccaatttttcatcgcaagttaaataaacattgaaaaatcagcattctacaaggaccattagcttatgtatcactgtaaaatgttttatgactcttggtataaaggatgctcatataaaaataaattgtgtcataacaaacatttctcccagtcatggtttgtaatagccttaatctcaaataaatctaggttgaacattgtagtctccagaaaaactgaccttcagtttcaaatagttgggttaaatcattgtgatgatgacatagtctcagatataaggagatatgaacttgtatcagctccccagataatcttttatttagaagaggagagatgtctcaatgaactgaaattgctcttgagtgaaccattttatttatatatcttcttattctgactaccagttcacacacagtgccac

SEQ ID NO: 54572 - DNA, 1246 bp, Homo sapiens
gtatacaatattaaaaagttgtaaacttatcaatagtggttatctggatgttggaataatagacaattaattctctattcctgtccatattcttcaattttttttctcctatactgtgcattactaaaataattaggaaaaattttttgcaattattttttcttaaactgtatgggtacccaaatacataatgaatgagctattgcctgaaataatttaaaaagtggcagcatataaattgcaataaaatgaaatacaattttcactgtataaatggaatgaaagtctaaagcagtactcaggtaaggacatttcgttttaatgtaacgccagtgaggagcttgcatttaagtgccaaatattggtatttatgtatatgaaagctcttctttactctcttatattttctttttttctaaaattttttttttgctaaaattagggtgtcatatataccagaatcaatcaattcttccttctctccttcttttctttctttcttccatccccctacctttcaattctgcaaagataggcaagtgagtgagggtgggtctagcttagtgtttgcccatatgtaaaatgttttgagttcataaaatcctgaaaaaattaaagcagcagacagaaaacagaaaagacccccacttagatactgattagcaaatagacacaaacatttcctctaaatacttcagtgcctgtgatttaagtagctacttgggacacattgaagagtctgttgttagctttctgcattcacatgataagaaacaaagaattctttaggcttgacctttgcaaatagaaaatcctgaaaacgagaatgctgtaatttttctttgtgaagctcaaacatatattgaaagagattggcctcgaatctgtcaccttctcatcactaaatatggcagccctgaagttaattaaataatgcaaatgctcaaggcggccttcactcactcctttcgatgcactgataaatggaggattttagttaggggtttgttcttgttcttactcatttttttaccaaaagattttgtctttgcttgtaatacttgaggatctacactcccattatctcaattgaggctaagggactaagggattccctgtccagtgtgtgatgggccagtgtaatcattataagtgatttcaaatcaatataatttggcaatagcaaaaactatgagaatttctcctcaactttttattggttttaggtaaatacttatgaagtaga

SEQ ID NO: 54573 - DNA, 1070 bp, Homo sapiens
tatctaatagtacagaacatagcattgctccaggacctagcacaatgtcttgcctagtgtaggtgtttagtaaatattgaatgaattaaattcagaaccctgagggagaaaagtcacaaatttatcaagtaattcacaaagagacatatccctgacagctaatccagttaaaagtattaaggtaagctgaaaccagaatatgtttcaaatcatttctcttcttataagagttttgttactggctggaacagttgtttcttggtatgctgatcgaatgtgacttgagccagaaagattcacaatgaataacaccaggaggcttatgaatgatgtataaagccaaccagtctaatgacaggtaaggcagaggtgagcagttactttatttcagagcagccaaagtcttggcaatgtaatgcaaccacgggaatagtgagtggttgtgaccagtttgtagtaaacttctagaatgaaacaagctttaaatgttctgatggatatttgatcttttgtattaatggagccattgcttcagatgagcacaaatgaaaatggcccctcttgctcctctagtatttgcccaggggttacaaggatcagctaagtgctatggagggtattaatcactttttacttgcagtgaaactatatttgttttttggtaactagcaattctaatacagtaaaacttcaactactaaataaatatcattagtattatgactttaattgaagaccaaggtgtcaccatcttgaagaaaatggtgaaagtttactttctgttccctattgatacaccagggccaacactgatgacctgttaacaataatgatataatttttttttaatttttcctgaattttctttctaaaatctaggttcggcaacagaataatcaaaggatttattgctttgccattctgtgcctagcactgtgaatctctgtaactgacttgatagaaacatagatcataatatttttgggtggaaatgaatcacagcttatggttgcaaaagattccacatgaagctaatggattgtagacatctgggaatgggaaatgatatg

SEQ ID NO: 54574 - DNA, 1102 bp, Homo sapiens
gtttcattataagtactcggtaaaaattagctgttgtttttggtgcacgtgcgaagacagcaagttgagactacttttgaagcttaattatgaaaattggagagaaaaacgaggccagaggtagatacaggccaggaattaggtgaaaggtgattattttatattctgggggaaaagaagtggctctcggagagtgacagattacaaatgggggaagaaggattaattgatggagtaatagtgctgaaaggcgagtgaggatggaattcagagaagaggtgaatagatggatggataaatcttggatagaaggggcttcttgttctctaaggctgaggctaaagtggaggtaataaggaggaaaggctaagaatgcatgtctttgtgggtggggagtagagagttgaaaggattgaaccctaacagcttactgtctctgtgaaatagaaacaagctcatctgatgggagacaagaggtttcagagtgaggaatagagtagaactcataaatgaaggagaagtcacacagcagtaactcctagagacccgatgacactagccagaatgtatagtctaaccaaaggattgagaagtcaggtatgataagaaattgtgctcacacagtgagacactggcatttgcttccacaggtgggacatttctaggtggtgacaaatctgagatgaaccatttgaaaatttttgtggtctgcagtgtacagcttgaacttaaaaaatatttttaccacaaataaatgattgattatattcatacctttcttgagttattaaattatcttctgtttcctatacatttgcagtgctattgggatggtagactttcagagttgaattatatcctgcctctattccacctaatgcatccttgagaatagttatagatgggaaagtcacattttattgtgcttatcatgttattctttagtagacattccattaatgtagaaacatacatggtgtgatacggattttatcttgtgatgatcagatgaaaagccctcctttcctgcatactcttttgcaatgttatttcatcactcttcccatcaagaggtggagtctacatttcctcctattgaatc

SEQ ID NO: 54575 - DNA, 1052 bp, Homo sapiens
ttcttcataattctggatgtcagaaaatgaacaatgttctaatgcagaaggcaaactttctatgaaggaccagacagtaaatattttagctttgcaggccacatacgatctctatcacatacttctttgttatttcttacaacccttttaaatgtgtaaaaactattcctagctcatacaaaaacaggctattggtgggatttgcctcatagactgtagtttgctgacccctgctctagtataaatttgtcttgtttattactagagtgcttatgccagtaagtattttttaaaagagagagaaaatgcattaagtaaataacatttaagtgattctttttctgattcagacattttctgggatgaaatgagaccattgatcattttatttgatggaatagaactgtttttcattgcagtgcaatgaggttaggtatgattttgaggactggggaccattcagcacattagttctgaaccatatccttgtgctttgcagaatttttttctcttcctcagaggagcagtttgaatacagggctttatggcatcaggcataagctgccattaaaaccttcaactgaaaattgtgctgccctttatgaaaatgagcagctggtcagccggaccatcgcccaccctcagctctactcatgttgtgtacaagtagcttgaatagcccttcatgagcaggtcttctacagacattttcctatcagtgttgggagggaaagccagaccagcagctagtgtttctttcagcctgtgttgtgccttggcatctgactctctgtggacccaggagtgaaatatcttcctggaagtggtgatccaggttagtcttgtctctctgactcatgtcccaagttgcttccatagagatacctgtggcatcttttccccctttactctgttttcctgaatttccctctatttttcactgactacaaagataaagaaaaagaagaaacaattttaaaacatataaagtactttgaaatatttatccttggataactggagactagatcacattcttatcttttcatcca

SEQ ID NO: 54576 - DNA, 1050 bp, Homo sapiens
atctcatctgattctctgctgtttgcctggtcttggactaatttccctttagcccacatgatgatctttaagttaagtctcagcctatttagactcaggctgcctcactcaccttgcagttgccatctttattatattatggcagtcaaaggttattttgtttggacagagaagttactctactgtatggtggactacctgtcctgaacgttcgcaaacatatccttttgttttctggagttcctcctggtttgttttctgatggatttctgttgactcccagattgaaccaatgtttatcctgtgtttggtgtatcaggcttttctgttctggttgatttcctgtagctaatttctagggagacttcaattcctcactgaagtcaagttccttgtcatagaggcccagtatttctaactcccattcagacagaaaatttgtttttattacccacaagagaaaatgatctggctttcctgctctaaagatacccctagtactactattttttccagtcttgtgttttcagatatttttctttaattgaccttctctatggtcagattcgtgactgtattccttcccctagtttattaattcttttttttttttttttttttgagatgaagtctcactctgtctcccaggctggagtgcagtggctcgatcttggctcactgtaagctctgcctcctgggttcatgccattctcctgcctcagcctcctgagtagctgggaccacaggtgcccgccaccacgcccggctaatttttttgtatttttagtagagacggggtttcactgtgttagacaggatggtctcgatctcctgaccttgtgatctgcccaccttggcctcccaaagtgctgggattacaggcgtaacccaccatgctctgccttattaatttctaagagtcttcctagaacactgtaagtatgcttaacctggtattatagagacatgtaacagaactaaatactttccactccacaaaagaagaggctattttgaactacatgtatcttcacagaggttactccagta

SEQ ID NO: 54577 - DNA, 2816 bp, Homo sapiens
tttttaaatacaatgtactgacctgaaagtagtcaagttatctatagctactggttgataaaggcaacagaattgacagctcccacgtctgtaattaaatgtgtgaaactaacaaatggaaataatagagaaagattatttttctttactggtcatgttgtgacatcaatttgttttaaatgatgagaaaagaacttaaaggatttgctttttattatagtgcaaattaatattcaactactgaactgaaatagatttgcataagagttatcactatcaataatcatttgaaattcatttttcccagataaattagaatctccagtgataacaagcaagagttatctcctgcatttttgaaaaaaggttaaaataatagctatttcctataactagatcttgagattggacataaaccttatacgtgcaactttccttatctgattttaagtttcctttaactgtaaacatgagctaatgccacatgaaactaggaaaatacgatggaatttgaaaatgatgttagatagataaaagtaaggaaatcctagatttgaatgacatggaaatgtcacctagttcagtctcctgtaggggtacatagtgcctctagctgctatcatccttaatgatctccaaggaagaaagtagataaagatcctttcatcatcagttgtaggactgccctcaaccctgccccaaatattagatctttgaactctcttttagcagtaaatgttatgtaggtattaatatatatcttaaataacatatatgacagagatgatagaggtaataataataagtaatcactctccttattactctgaaaatattgtatatagcagtaatatcaaccacaatcaaaatgccatatattgagtatttgaatgggctagactctcctctgatcctttttttaaaagcatcattccactagtttccattgctattatccatgaagaaatagagacttagagaagataagtaattggctcatttccacagtttgtaagggacagagttgtaattcaggagcagaccacatacttcaaaccctcctgaccttgcatcatcatacagtaactgtgtatctattgaaaatctctagttaggtcccttctgagctttctgatctttgaattaattattttccatttctaacatttggccatagtgtcattttccagcattagtcacttacaaagatgtaggatgtgctattattttaaatccacattcatcaagaaaataggcctaattggagggaattaaggtagctgcaatttcctgatgattaagcactagaatatgttgctaggagaaactggagaattttcttttttgaaagtctgaaagaaaagtacaaataaggtttcaacaaactctaacttgaaccccagtttcctgatttgctaaatgaatggtttagagtaggtgatctcccttgggtctccccaaccctaacaacccacaagtctgtaactttaagtagcaattggatgttataacctctcaaggtcatttttagacttctatattttgcttcaatgattcttgactctctttggttcagctccacattctggagtttctttcaaatggagatctcataagagctattatttaacagtatcccaaatgtgcaatgtacagaattaaatacaaccatgcatttaagactttaacaatcatagttcatcagcactatgtgttctttctcctatttgattaaggttaaacaacaagatgatgtttcctcattgggtagcattttaaagtgtattgtgtatgtgacagatgagatcttataaatgcattaggcatgcttattttaatatctaagcatatgcaaaagttctagaaatattttacatgcaaatgtctggggctccactagggcccataatagaactccatactctgtgacttcaaagccctagtctcgacaactaatcacttggctatttccaaatcaaatttcttcaaacaaatcaaaggcatttgtcctacccaaaaaccaagttctgtggcaagtttcacatttcaaaatcaagctgcttattgagatattcatgcactgaaaaaggcacacagaatttcctttaggagatgagacacacctttttatgctccaatgaattagaaatttctcaaagagaattttaacaaattttctttacacacacacacacacacacacacacacatgcacttcatcttagcagtaaaagccaagattcagaatttcagcccaagagatctttcattttctgaaaggttatgagcccctgagatttcattcctttcagagtcataattactgtgttgcttctgagttgttaacaataacactgattaaaaggaagacaaaaaaaagaagagatcgttcacatacccgtattaagtggcttcacaaactaggagtatttttaacaccacaacatttgtggtaagtacaacaaagtgtgtaattcactgggaagcagaacagaaaagatgggaatgataatgtcaaataactcactttacccagggctccctgtgggcaaggcactgggccaagtcctccacaggcattgttgcatttaatacaacaatttttaacaatttttaataaaagccctccaatgaggcacttttactgtagcatttttacccatgaggaaactgaggttcagagaagttgaataacttgacaagagtcacccagactcccaagcctctgttcttaattgctcaactatgctactgccttttcttttatttttattattattattatactttaaattctagggcacatgtgcacaatg

SEQ ID NO: 54578 - DNA, 1028 bp, Homo sapiens
tcaaattctttcttctctcaaaccttttatatcctcagtgtgcctgaattgtctacaagccatgtaattagtttttgttatctctttttcaagtcctacaggctggcctgttgcatagatcattttcgtctctgataaccgtgaaagctgagtgttcagccaaaatttccaattaaacatcctgatatgtacataattagatatacacaactgtcctgtggcatcagcagcatatattgttattcctgtttgatgtatgagtaacctaaagtacagacaagtgaagtaacctgcaccatgactagttgggttttctcactccatgtcttcactctttccctgactgagttaacacattgtccttttaagaacggactgaaggtccagcgagtagatgaacagaagtaaccttattggtgttgcacaggcctacaaaattactaagaagtccttacaacaaataaatataacacatatttcatgggaagtaaaataaaatagtagacttaatgatggtttagaataagtagtattaagtaaggaaaatagactgacataaaaaagaaacaaaaaaagactgaaaaatataggtatagtaaaaattaaaagaaaaacattatctattattgaaaattaagcatctgattatgtgataataaaagcttaacgtagtttgcccaggtttgaaagaaaactgattgacagtcgcttatcaccaataatgaaccccacctgtgccatagaaagtgtcttgggacaccaaaccacccgccaacccccatgttgtaacatcacagtagtacaaggatgtagatgcaccaacctaatttgaatgtgaagtagtccgtggtataggacagcatacgtacaagcccaccctgagggaaatactgagcaagaatctaggtgggctgaaaataagagaatgaataaaggaaggagaacagggttaaataaatatgtgagatgaagcatatggtttgagaagttttggggtcccacagatctattgcagggtactactggta

SEQ ID NO: 54579 - DNA, 1048 bp, Homo sapiens
ctgatttcaggatctgtttaacatgtattgatttatctgttaggcccactttgtcattttaacatgcatattaaaaaaagaagaggtattgaattcagccattcagatctttttcaaattggaagcaacttcagaaatctccacaatctgaaaatgttcctgtgtgtagggccatttcctcaggggatatgaacagtttcatgaagatgtcccacacctccagatttgtcctctttttcatcagagctcctttcttatctttgcctgggcccttaggagggctttctgccatgtcagtatcctgtcaatttctacaactctatgaagtttttcacatagtagaatatattgtcaaaatgtcttgatgtcttattacaacctttacccaatctcggcagcaggatttctgaacacactcctggtgcctttttcctgatacatttattatctattgtgagagttaaatggtatctcgaccacatcctgttcttcctagaatccatatcaccttaaacatctagtagtctcatttctgacattctggtggggaaacctatttttaggtaaagttgcttatttttgttggaggaacgtttgattttactaagtctcttaagtttcttgaattaggttttctaatctatttgttcattcacaaatatttattgagtgtatattagagttctccaggggaataggactaataggatgtgtgcatgtgtatatatatatatatatatatatatatatatatatatatacacacacacacacacactttccctactttcttccacttattacccttggctgaagcatgaaaatatatttcatgtgtataaacacacacacacacacacacacacacacacacactttccctactttcttccacttattacccttggctgaagcataaaaatatatttcatgtgtatgcgcacacacacacacacacacacacacacacactttccctactttcttccacttattacccttggccgaagcatgaaaatatatttcatgtgtatgcacacacacacac

SEQ ID NO: 54580 - DNA, 1391 bp, Homo sapiens
gggctttggtttcctcatttgaaacttagcatgttagccacactgattttgctaacatcacttccaaatcaaaattgcaattattctagtagaccatctctttagatctggattaaggatgaggcctacttggaggtgaaggaatcaagtagaaagatgtgaaatggtccctccctccatatggaaaaatctgcctgagatttagacagacactattcaaaactgtaagtccactgagcaccaactgcggtacaaaaagttaagttcccaggtctcatttacagagtagtagctgcttgttagttatcacacgccagtgattcagctggagaagctaaggcagaaggcaattatgtaaccatcacaaaagggtatgggggaagcacttgaacccataccgggcattctggcttctggtcagatgcgagggatggattcaatgtcattttaatctttattcattgtttcaatctgttagaactgttatagtttggagctccatacagaatgcagatttgttcaaatgacttcccaagaacttgtagcaagagcacttggagccatcctggacaggcccatgctgtgcctcacacatgcacagcatcttcaaggggtcatacagaaactgcctccaaacctccccacccacttccactttgccacaaccccaagagaggacacccatctcaaaaaggtttgctttcctgtggagtaagaggtataattaaattgtgtcccagcagtgaaggttccttaatgataatgagccaaaactaattgtattgatttgtttatcaccggcttaggaggcccatcaaacaaatggactgagactatttccatattcttatctgttaggtaaatgagaaacaaatgacctctccctatgtctgcatcctgaagtcactgccctctaaggctgagtgctctatggcttcgggtgggagctttgtccaaagctggggccattctgccctctggcttcttcaaataggtgaagaaagttgaaaattttggtattcattcttctatttttcatttatgtagaaggatttgtttttaacagttacaatttggatccttgccaaaggtgccagatggcctgctttcttcgggagagctggtcatgagtattaataaccctaatttggaattctctgtggaaggggtagccacaagatttggagtgggaggaaatgtagaatcattgataacaagtgaattcagagaaaaagactcttgaatcttggtcaggagtgagacataacggtaggcaggcagctttggggggccacaggagaagcctgatgtacctgcacctacccctcttagtcttggggagccttcccaatctactgctccacaaattaagagaaatagagagaattaaa

SEQ ID NO: 54581 - DNA, 1060 bp, Homo sapiens
gatgctatcactggcaattttatcacaaactacaagtacccattcatagaacatcagtaaaactgttttattaagattcattctgtagggctgtatgttggatctcacaacacaactacttattctgttgctttgtaaataatctttgaaaggcttgtttttacaattttaagcttgaagctttttgtcttactccaagaaataaagactaatctgtgataaatttattttccccttttaatcaatgtcacaggtgaccacaataggtatacaaactcatgttgaccgagattgtttcaggctaatgtgtctttcccaaacaataatctttagttcaaaattaagtaataaagaaagcttctcataatctcagagactttgcaaagacctggtgataattccctttcttttctgaaagataattttagcagagtaacctcatcatttactcaggcatttgtggaatgtatatagatgtacactcaagtattcaagatatattctgaagtaaaaggacagattgtagaatagtatttacagtgaacccatttgtagaaaataaaaaggctacaccagtaaatgttatctataattatatgtaactacatattcataaacccttcctggaataatacattgtgattaatcctaaggtagtggggggaagaccccaggaggaggaggaagactggaatgttttctctttttacccttgttccaatgttgtcagtgatgtattaaatgaaaattggttttaaaatacatgcctttccttttacttcctcccctctccctccccctacaagctatttctcatttggagttttgcttgctattatcttgagccaaattaaaccagtgatctcctgatggaaaaggccagagcctgttcaatgactccagcccctttcctgtccattctcctctggagccatcaccaaagccctggtcacactctgtaatttgtaaatcctgaaattgtggtttgcaaggcaaatgattcagagcaagggctttatcccgggatcttatcctcctagttgcacaaaaacaaacacca

SEQ ID NO: 54582 - DNA, 1206 bp, Homo sapiens
ttacaaactcggctcaaccatcccctcttccagaaggcttccctgactacatcttgttcactttctgggttggttgtcctctatggcatcctcacagttccctatccattctaatgcattgtcactgttggtttattggacattcttccccaggcaaccacaaacttttcagaggaaggaactgggttttttatctctatatggcaagtaccaagcccagaacctggcatgttgctgatatttgtattaggttcctaggctgccatagaaaattcggtggcttaaaacaacagaaatttattctgtcacagttctggagaccagaattcagaaatcaaggtgtcagcaatgttggtttcttctggaggctctgagaggcaatgtgtcccatgcctttctcctaaattctatggctgctgactacacctggcattccttggcataaagcagtgtaactcccatctctgcctccttcttcacatggaatttccctgtgtgtctttttatctgtttcttcttctcttataagaacttgtgattggatttaaggcccaccctaatccagggttatatcatctaataatgatccttaccttaattacatctgcaaaggcctttattccatgtaagacgacattctgaggttctgggtggacatagttttggggagccaccattcaacctgatacaatattgaataagtatctggggaataaataaatgaacagtcaacatggctccaatatctagtgtgaagaattatactttcataccacatgaaagtaatctgtatttaaagtatacaagaaacccaactgatgctcgaggaacctttatatgcttgtgttaaatggtaagactaagttactttgggctttcactgtatagagtcttagatttgaaagaacctaatgtgttctttggccctggaatgtgatagatcatattaaagtgaggttttaatattgtaagatttatatgatttgctatttgagcttttctaaactattaagtagtagtatctattagtgtcaatactaggtattcagttattttaataagaagcatattaataggatcacatgcactgtcatttttttctatcgtacttcagatgtggcctcattcaaggatagagcagtcagaggcttccagtatttctctctcatacggtaatttcacacttgaaactcagcatacacaatg

SEQ ID NO: 54583 - DNA, 1129 bp, Homo sapiens
ggtcagaatcataaaaagatagagaagccatgctaattctgacactttgaaatgtaagagcagttcttgaggtattgaatctacatgaaagggatggaataaactggaaatgatttataccaacgagatttgagttaggggaatgtgttagttttctattgctgctataacaaattatcaccaactttgtggtttaaaacaacacaaagttattttatacagttcgaagttagaagtctaaaatgggttgttagggctgcattccttctggaagatccaagggagaatctatttctttttccagcaaaaaatgcaagactgcctacatccttggctcacggccccactccaccaatttctgcttccattctcacatatcttttcctcacattgctgtttctctatttctcttttaaggacccccatggttacattgggccagaataatccttcaaattcaagatccttaatttaattgcacctatgaagtcctttttggcatgtaaagcaacatattcacaggtttcaagtattagagtggggatatctttagggagctattattctatctaacacagggaaaaaaaggattttctcagtcctttaagtatcagcctgacggtgacagaaagtaagtgtttgttttctgagggctgagactgatcctgtagggcacagttaaaacatagtggttctgccctgaagtgtcatctgctgctgatgaaatcaaaggcttggatggcatagcttttccctgttagagtaagtaatcacagcattaataggtaggacatgatttaacccacagcatactaggagctctggccaacaactttaaaatgggtcttcaccatttggaggcatgattatgagctaaaaatactacgtgtaagatattgtggcctttgatttctacccttcaccaaaaatatcttgaggactttgtgccaggtgggtgctaggaaaaaaaaaaatgagacacagcctttgcagtctagaagccagcagccagttattacacataaaacacaagaacatattatataggaacaatagagtgaggtatggaaccagagagacggaacctagaaggatggtccaagaagtagaaagtgaagacagagtatag

SEQ ID NO: 54584 - DNA, 1036 bp, Homo sapiens
tcaaatcttgctcagaagagagctgacatcctttaactctcatttgaagccctcaagtgtctgacctcagtcctcctctctgacctcacctccaccttctcttttccacccactctcatcagttacaatccagaaagagtggattccgcctcctggcaggcagctgtgctgtttcaggcccatggacctgcctccaccttttaccttcccccactcactaactcctgctgctgctcacatccctagcctgtgtgcggtgcccctcccctttcctcccacagtgacctgagcacagctcgggtatttatgcctctgttctccccggtaggtttaaagattctttagagcaaagatacagaattttcatcttcccttttccagcccttgtgcagtacctggcacataaaagccattcagccaatgtttgttaaattcagctaaactgagcaggaaacgtctcccttgtgtgtggctgtgcctttttgccattcagagagaggcagtacaatcatggtgatttgaggacacttaaaaatggaaagggctccacatcgaaggcctcttgaatatagtgaaaatgaatatcaaaatcaatatgccgttcagtttagggatatgaataaatgatttcaaatgaattcaattttcctctcaacattaagtggtgaaggaaaataaattattggataatgtatttgaagtaatagctctcttctaactgttcctacaatttgttgttacttgtctttggacctctgtgtgtcatgtgatactgtgtgtcatggcgatctgagaaatatttatctctcctcaccttctaaaggtcagagactgtatcttaggatccaagtttggaattatttcctgacattaatctcttcttcctctgtgctcccataacataatttcttctttttaaatggttgttttaaatagaaaaatgtcgtacttgaatattttgatttttatgggggaaaaatttactactatgaaaaaaatagaataaaactatgtgaaagaacgcctccatttctcc

SEQ ID NO: 54585 - DNA, 1095 bp, Homo sapiens
tgttatgactgtttcctcctagttatcttttaactttgttcactgtagctttttccacatggaaattaaaatatatgtatagtaaaatctttcagtcttataaaaattttttctaagtccttttatcattttctttttaaatttgatatctggtgagacagattccaattaattatggcataatttaaaaatttctttgggattcttgcctattttattgttccatataaaccaacaaattatctgtttaaattgattaataatcattaggattttgattgaaattttatctatagatttatatagaatcaatacattaaaatatggactctccccacccaagaacacaatatattgttttatatgttcaaggctttttgaatgtcttatcatacaattttttcatttttaatatagatcttacacatttttggtacctctatgtttatgtgttttaatgtcttattgttctagtcaatatgactttttaagtataattttaatgttttatttttgtcatatagtcaagctgatttttaaaattttatctaacttttatatagtttttcataaacttgtcaattttttatagattttatttattcttgcagagtcgccttttgctgtgattaatcaagccaaccttgattaattaaaccttttaaatttaaaccttttaaaggcttactgtaaattattgctgtgtttattttccacccttattaattatttccttcaactttgttttactttctttgttgtttattaagttgattatttaattattttcaacatttttgctattaattggtacatttttaaggctacttatttttcctttgagtttatctttgcagtagcctattttagtatatattcacagcgactcagtgattttaattttgaattcctcttacagtcaagatttattaaaattgagattttaaatgtatgcaattggagagttttcttgtcgttctttgtttttgcaggaaggaggtgttcatttttactatttatttatttagccagaaagtgtggaccataatttctactgttacaaatgtgtaaaattattttgtggccttatgtagt

SEQ ID NO: 54586 - DNA, 1001 bp, Homo sapiens
gaaaagaaaatgagtaacaatataaatgactttctggaaaatgaggtctattcaaatttcaggaaaaaagttaactctgaagtattaattgatcataatgaggaggccaaacttcagatacacagaggagccatggaacatttcccataggcctgcagcttgtgaagacgtctaggaacactgacatgaagttaaatttaaaagtaaataaaaatagataagactatcagactgtcaacttgaagaacttcaacaaggaatgctatgctctggctttttgcaattcaaatatacagtaggaagaaacataatcccactaaaaaatacaattgccgtcattcttggccactagaaagaaatttcaaaaaggtcagcctctgctcctttcttccctaagaagtgaatcgatgatatagattatctcatgagcccatgaacagatgcccagttgttttggcagaatttcaaccctcgggagagaatcttaatctagtatctttctcactactggtacaagaggcaccaccactttctacaaacttcccaaccctgtttaatcttcacattctggtcttctcctttgacattccacctgaatattacatttttcattaaacaactatatatatgtgtgtgtatatgtatatatatatgtgtatatatgtgtatgtgtgtttgtgtgtgtgtgtgtgtgtgtatatatatatatatatatatatatatatatatatatgaccgttttgcagggactaagacaactcattcagtacagctcctccaaacaccaaatttttattaccaaatgcttcagatggacacctctttaatatgtacctgtcttaaaaatggaagcagactctcaagttccaaacttaagagcaaataccaaaaacaatgacaaactcagtggctgtgcaatacactgaccattcagaaagagaggcttgatctttcttcatcttacattgtcttctgaattcactaccattagattttggaag

SEQ ID NO: 54587 - DNA, 1050 bp, Homo sapiens
tggtaatacactctaaccactaccttttatcccaggtacaggggcggacaaaacttcatacctgattaatcgtagtacttcttaacctaaggcaaacatgtaaaccagcagggctgacctgaggccccctctgacatactaagtaaggatttgatttgaaataaataaaaatagccttgcctaggggttcattatacttgaaaaatgtgagattggggttaaaactgaccacgttcattgccacatgaagaaagtccagctatagtaaaaaagaatgaagccgaacagagctgagctgagctgagagatggaaaagggagagagttctcttagctttgagttttgatcctagcaattgagaccttgatccctatcctttgatttggtcagatagcacagtatcccttccagccatgtgagccaataaatgttttctttttgtttactttaaaatagtttgaactgggtttctgtctcttgaaacttaaaggatccttacaaaacaaatgctataattcacccatttcgtggataagggaattgaggcttagagagattaagtgacttgctcatggtaacataaccagtgatttttcagagccagaacttcataccctatttaatgactccaaatgctatattctagtcaagacaacaaggccagggagctgggagatggagctggtcattaatgaaaggggcagagaagttatagggcaccatcaaattgtggctatcctcgtagctaattcatgcactggttcatcacatatttgttctaaatatgtgatgcacaaagaaaagaaaatctaaggccagttgtttagatagagaaagtgagtgatctgcaggtaccctcaaccctcaagggtggctgtctgctgtcagctgctgttacccagcaaggggtgagaagccacagagccagcctactcgtgtctccaagttgctattccagtgaatgcaatgtatgcagaacatgtcaaactcttgggccgctcagaaaattgattatggagcttgccccttccttaaaaagcaggcttttgt

SEQ ID NO: 54588 - DNA, 1064 bp, Homo sapiens
atgaaacatgcatttacaaatggcatctgaataccgaatgccactacggaccttaggactcttcctcaggcagcttggtcggagtgagatattgccagcattcattctccccttcactctgattccactctgattgagagtgcattgtttaatatcccctacgaacgacaacaacccaaacgtaacatagaaatcgggagtgaaaagggactgtgaagagtcacatactatatgaaacttgcagcttataaagagagaattaagaaagaaccagaaatgtatatatttggtcagaaggaaagagaagtgtgaacttaagggtattaagcagaggaaactgcctaaaatgataaataaaatggttagttcagttgtttctttacatccctggagttataagtatctccatctgaccatgagttaatggtattgggtatatttactgttgtatgattttcagagcttctagcccaaaactggagacaaaagctctatgttctaccaatgctcacagatgaataatgctttttttaaaaatatcaccaattctgctgtcatttcagacctcagagactctgcttattaggataggaggcaagcaaagaaatgaggtgggcatagaggtggcaggggttaatttcatatttatcatgagatcttgcatgatttccctaaaagatatttaatttccactgggcataataacttgcagctgccagaatgtgctgtgtaccagtggcgagttcttgtctttggagacttatgcaagtcattatttaaaaatagagatccgggagttacagctggctaattaatctaccactaaggaaagctaagcgagtgacccacttaactgctttcaggaaccatggctactctgaagcaaacttttgaaaaagtcctgtacaaagaaccaaactgatacatcctcatggcactgtcgtggtcttctcagggaacatgttccttctccatctgctcctcattcccacaaacaaacaccactaattcagacccttatccatacacatgtgaacgtccacagtgtgggttcccagatactt

SEQ ID NO: 54589 - DNA, 1109 bp, Homo sapiens
tgaagtgacacaatccaattagaagattgcagttacacatggtagtggtagaatgagaggaattgctacctaacaggtaatgtcactgtttgtgccttgtttttgccctctgtggggttgtttctgctttggtccagatctcactctgtccttgggcctactttgggattctgccatcttctgaatgctggtaaatgcctaagctgtaaacagcttgcttttctgcagaacagctcatgcctgaaaaagttgataatgatttcaaaatttcttttaattgagtttttaattacaacacagatagcaaatagccctatcacatgtaattttgacaaagataacaagcaatttcatattctttggagaatgacagtgtgggagcctacagttaagtaccgactgccttgtttttagacaggaatatctgacaaccactcactcagggaaggtcgggaactggaacatctggatctcaataaattgttcaatataacaatccaagtgctataacacaagctgctactgggaatgtaaatctgactggctggtttaggatcttgtctttctaattaatagaccacgtattatgaattgggatactgtagagccagttggtgtatgggcatgccttcaccttaaataaatatttttatcttcagatcttatcacatcagaaaaaaatatgcagataaattattccaaaatgcaaagcttaaatttgatatgggtgccgtgtttcttcattacttttcttttattggcatttacttaagagttctagagccatgcccagagttccagaactccagagctaaaattagacaaagaaacttctccatctcagagagcagagaactcgcccacattagctgatctactggcacctcccacagactcacaaaggccatttgcataactcccatgcctcctagtaacatccaaaggctcaagccgatgtatctttttcaaccacagagcagtaattatcagacttttgcatttcaaaaacctggaaaacaaaaattcttcttaattcaagtcctacagagtggtcaacttcttattttgctaagtaaagatcattaatttttttccttttcactcatttg

SEQ ID NO: 54590 - DNA, 1058 bp, Homo sapiens
ttttcctctcaacttaaatgtcccctcttctaaaaggccaccctatgtgtgtttatctgcttgggatgattttggctgcaaataagaggaaactgtatcgatagtggcccaggccagtagatattaattcacttgcttgaagtccataagcacatagttcagctctggtaccatggctcagcaatgcagtcaaggaccaggcagccttctagctctctgcttcatctcataccattggcttccatctttattatttcaatatatatgcttcaccccagcatcacttccatgccccaggcaggatgacatagcaggagttaagggagcataaagtctttcttacgtgaggcgttgttgcttttttcaggaaggagaatagtccccagagactcctaactatctctgattgattagaactgtgtcacgtgcaagatagtctgaaatatcatgattagctttccaacctctatagtaaaggaaggcaagggccaggggtctgtggatatcttttaggcagccaaacttcagtgtctgccatggtatatgcctctccctctcctaccccccatttaccctcagtcatggttccatatttttttctcttcatggcatttaccatgatttgtagttgtacattttaatcccactgggatagatatcttccatagctggctctgccgccactgtatccccagcctttagtgccctgtgcctgatgaatagcaggtacttaataaacatggtttgatttgtagcttagctggctgctagatgaaaagagaagagaagttatttctgaagttatcacacaatcacaacatcctggaaaaacaggattctggttatcaaaatttgatttacacatacatcctttgtatttattataccatgtttcaaatataaagagatgtatatatgaaataaaataacgaacactcaaattcccaccattcagctctatcaaatttacagattttgccataggcccttgaggtctgttgatactgttatattttaagaaacaaaacatctcaaatccaattgatgtccccgtgtcc

SEQ ID NO: 54591 - DNA, 1073 bp, Homo sapiens
ttgatggctactgtcaaaatgatagataataaaaatgattggcaaagatggagaaactggaatcctcatacactgctgatagggaatcaaaatggcacagcagttttgaaacatagtctagcggttccttaaaatgttggacatagaggccacacatgattcagtaatttcactctgagaaaaataaaaacacatccacacaaaaacttttacatgcattttcaaagcagcattatttttacagtcaaagagtggaaggaacctacatgtctgtcaactgattaatggattgaaaaatgtatgaggtccatacaatctaatattattcagcaattaaaaatacagatacatggtacaacatgtatgaatcttggaaacattctaagtgaagcaagctagtcacaaaagaccaaatattatataattctatttatatgaaatgtccagaataggcacatctatggagatagtagtttagttgtttcctggggctgggacaagggagtaggagcaggaataagaaatgaccataaatggggacagtgtttctccttgggctgatgaaaatgttctaaaattagattgtggtgataaatgcacaatgcagtgaatataacaaaatgcactgaactcactttaaatgagtgaattatatggtatgtgagttttatcaaaataaaactcttaaaaaagtcgggggaggatcactaagtgtcacagtggaggacaggatgtaagaagctgagatgatagacaaggatataagcaaagaccatgtttacatagttcaggaaaattaaaagcagggcttgaactaccatagtggcaatgggaatgatatagtgggaacaaatgcaggatgatgtggtggtaactaggcacactttctctctacatcatcaacacccacttgatagccactttcacccacttgagcgctactgtctctgatgggtagaaacctcactttatttgaaaacacccagagccaaacgtctgtccaccatctcctgagttggcctgcctatgtggagaatcatttaaattatttttactatttgaggcaaaatgtg

SEQ ID NO: 54592 - DNA, 1048 bp, Homo sapiens
ctttcctttctttctcttagatcttcagtaatttctctgtactccatgcagcatgtgcagttgcttaattcaatccatcttttctttttaaaaatttttccaatctcataccttcctctatttactatgataaaactcttctatacttcataggaaactacttaaaagaagtatgtaccttcaatgtctttctccctaaattttcacttacttctaactcaaacagttgattctttatactaacacatgaataaacttgccaatgacatcttatgttgctaaggcttatgcgtgcttttattgtgtttgtttttactcatttttctagagcatttgacatatctccttgtcaaagtgttctcttctcttgccgtgggggacaccactctggttgttctttcttcatttcctttcttggatctcctttttcacccagaaatatcgttctctccaaggacttttttcttggtactctcctttaatcgctcaatgatttcatacaggcccatgtccttaggtgccacttctttgttcatattcccagcctgctgagactcaaataccagtgctcttctagatgtctctacttcagtacccttttagacaactaaaacctcaaactgtccaaaattagcccctcctttcctctctcgaaattgctctttgacttattttcctaatgttgctaatggatgaggcttctatccaggcctaaaactagaatctcagttatccaagtgtcttttgcatttaattttacaccagatattatctattctatctcctatctgtgtacgtcttcccattcataatgccttttaattgtcatttcttcagtgaattacaaagatatcttctgaaatattatcccttcttctggtatggcttcctgcaatattcaattccaatgtcatgctcttgattaaaatctttcagtggtcgctcactgtttctagaccttagctggaactcttggaccaaaaaatgtgagctacctctgtatccacctactttttttaaaaaggcaacttccgcacttataagggac

SEQ ID NO: 54593 - DNA, 1026 bp, Homo sapiens
tggctttatattctttacatgaactgtcttttttcctgcctatcctagtaatatcacagcatctaatttattttcttaaccacataacatatcctttcctcttttctaataagagaatatagttaacttaggcaaatgaagcagtgcctgtgacatattaagtgctattaaatgctcaataaatgtttcatgactgaataaactcaaggccaggtaaacataagaatagagaaaaaataagagtgaagctgtgattggtagttttttgtttgtttcatatctataacctcttggtagcttccccaagaatagttaattgtccatgtgaccaggactttatatccttatgtcacctacttctgcttccttcccccaccagtttctgggaagaattttgccagatcaccagatgcacacagttagctactaaagaatctcttgtctgtctctttagcttctccataaatacacacatttcttcatttgtttttaaggcaatgctgtatgtgtaatcatgtgtgaatctttattgaacacttatggaataagccacctgttcttacaaattagctgagttctcaagaaggcccaaattagtgaattagttgatgaaggaaatttgttgcggagacagcaggcagctaagaaatttttcagcttgtcaaaggtattgttagtctcacagcttggcaaggagagaagaagataccattttgaagaattttaggtagtgtcttaataccttacactcactaaggacgaaaatgaaattgcttgtcttatcagttaaagggaagctttgctgatgtcagaccatagcccagaaagttaactaaaagttttgtagaagtagataatcttttcctggtgatcgatgtggtgagattggaagtgagttgccaggggagtcatggggaaataggcttaatcattttatttgtatttgtgctgaaggcagtgctgaacaaacctctgaagtcacttagccatgtcttttccagggggcatgcaaggcgactgctgatt

SEQ ID NO: 54594 - DNA, 1035 bp, Homo sapiens
gatatggctttgatctgccactcgcttgtcagcagagttgattcactcacttggctagttgagaaggtggcccttcctccatgtgtggtcttcctcaagccccatgctaaggcaaagaagttgacctaagctctgtcttccataggtcaaaggtacctgaatagttgagttattttagtagaaactctgaatatggaattgcagtttgaagcagccaaaatattcatttttatagctgagaagagactctaacatgcagaacatgttgtcttggagaagccagtgatgaaatgtgttggtttgagccatagcaacagttcacctttatatgcagaggaaatggaaatccattttaatcatcaatgaaaagataatcattctaaagttcctttccaacatctatcacaaacatactaagtttccttctaaaaataaaacaactgagttttccctccatcttgtgattttcaatggaacctgaaagctggtgtcctatcctcttatgcccttggtggccagtcaaaagagaacaggttttattcattaattacatcattgatttattcaccaaacatgcattgagcactcacgctgtatcagacacaatcgttagtactaaatgtaagaaatcctgagatcctcaaataaaatagcagaatatgggtggatttgagtagactggtttagaagatattgaggaaggtgatttgatggtaactaaatatgagagtagtgagcgcattaagattaactctcaagtttcttatatgaggagttggggagatggtggtaagtccacaaacttgggtaaggcacccaattttacaggagcaacatactgaaggaaatccgtagggaaaaggtgaaatggtgtatttaccaatgatggtatttgggcatcagggtctggaagctcttcttcagatatggaagcccaggcttggtagtgtagtggactttatggtagagaagtagcatcttttctataaagaaccagattttctttttttttaaataagagctcctggttaaaag

SEQ ID NO: 54595 - DNA, 1051 bp, Homo sapiens
cactgcctctttctgcttggaaggtaacctttaccaagagctatagcctcttaatcttttagtggaaatcgctcttgtgaaaacgagccctgatagtatcttggctcactaattcatgccatgccgctcaaaattaaagcattaaaatttcatagatataataccatttataaatcatgtcataaaaacattcattttcttatagaccttgaaaactgggcatgtattcctcctccagctgttgcttaaagttcattacagcacaccagtatttgtcaaaaacaaagctctggtaaagtggggagatatttaggagcaacaccctcagagcatcaaggcactgtcctcccagcattgtgcacatgttcctcccattagtggtcatggaaactgcaagcccacctctgtgtaatcagagattcccggcagaattgtattaatggagcaagtggttctgggagggtagctttatcattctttatgtccttattctgttcacttggagaaagagactatttaccattttccctaaatttatctcctataaaatttcaatatgtttagtggatgaaggcaacagactaattaagtagacggtaaacatttgccacatttcaaaaaatgacaatgacagacgattctttttgccatttacccttaggcagcagatggggacttgataattgtttaagcagcagaaataacttgccctaatttactatctagttttttgtttgtttgtctttgattatgcctgaataaaaaccttttgtccatttgaagtggtggaaattagaatatccattttgaggtgtttctgggatgtacatgccacatatttggcttgcagatgctaatgggtatctaatcacatttgccaaccataaaatccctattggtaaaacacttacatctgcaataatctgccactttcttgaaacatgctaattttcttaaataatgtagaggcctataaggacttctattttatgtaaacaactagatgtagtaaacaatcagttgcaagaggtcattatatcataatctggac

SEQ ID NO: 54596 - DNA, 2638 bp, Homo sapiens
cagttcatgctggaaccagatccacagttgagggcccaggaataatatgaaagaaaacagtatcttcatgtggcagaaagtgaataacatttattttagcattcatttcatctaatcttattgctcttccctatcataaccaacccattccataagcccttccttagaaatacatagctctctaccatctgtcagtaccttaaaatcaatcaaatacccagtggatttttattttacttatttattgcttaaaagaatagctttagattatgcatctcaaagtctgtggcattgagaagtcactggcctggaataccctgccacctgcaaaaatcaactaacctatctcacttcaatccatttcaaatatttagtttctaattagatttcatttgtgaaaagggttctacaaccaaaaatgcttaaaattactgcttctgacgaggccacgggctcatttcaactactttgaaatgattatcatcaaattctgtggactctgttttggtctgtcctaatctcaacccttcttttcagagcatgtggcagaagcagcttcactacagagataaatattcatgtgcattgcattttgctcacaggcactgtataaactatatttagaagtctgaatgttgagatgtactgtgtcaacattgaaatttaattactgtgatggactttaaatccatggaccttcttgcactgcggagtgaatattacctcttgtgtttcttcattctcctttacattcctatagaagagggttgcaatctgcttaactagaacacccacctgcccttctcctccaagtgaatgaaatgaactctcagttttacgactgttttatctttgtgttgtgaaaaagaaatattgtcttgctaaactctttggacacttcccaatatgcactatctctctcctactcctattatcactcattctggtaataaatgataatgttcattgctaggatttgtaaagcactgtcaagttagcccattattttaaactcaggttaaagtaaggattttagatttatgtaagcctggtgcagtttcattaagaaccaaaggcattttaatttttctccctctacccaagggactttacacttcttaatgtgacattaatcagtgttttaatatttcttcaaaatgtatctattctctgcatgctatttaccgtctttgtcaaagtcagtgaacaggaataaaaagtaactacatgatatagaaactatggtcttcttggcccttgtgtaatagccaagtggatgctgttaaaagtgaatctatccatggtgcctttcctatttctgtacaggattttgatttcattttaaatgaatgtcataaaccccaggtctgaaaactaatagaatttttgcatttacctactgatccataacctttaagttagactgtgtgtccatttgcagtcagttcgttggatgatgcaatgctttaacactgaatgaaaagatttctgctatattccagacaccagatatgaaggccagtttgggtggattattcttagaatgactttatattagtcctgatgggtagtacagaataagctgtaggagctagctacagtcccttaaatgagaggagacaaggaaagagacgtgtttgataacatgacaccgactcactttgggaggtggaaggctaattaggagtccagggattggcagaacatattgtctgagtcctggtcagtacacagtgagtgtgtacactgttgctgactggctggtccccatggagacattactgctcgatcagttctcctcagcgcctgtgtgtccagagctgtgactgtggctttgagatgcctggctgacgggcaaagttctctagatgctgagagtccggcgaacatgtggaggaggctgcattctgctgcccgtcctggccctgggcagtgtgatgcagcatatgcttgcacacaacgaatcaggtccaaatcccacttctaggcttactggttgagtgaccttgggaaaattatttaatctctaaattggtctcttcatctgtaacctgatgttggtgtgaggattaaatatgataatccaggaaaagcatcccgtcaagttctgggcacgtaatggctcttgataaatggaatttaaaaggagagcctgtccctcaggcagttcaaatctgatctaatgacttccaatggatcaagagacgtggcatgtgggtggaaaagcctgaaggctgggattggtgagtgggacgctcaggttaccaacaggtgtagacaggtcctgctactggctgtggcagcaccagttctccataaacatccatcggttaggatccaccaggccttgaggagagtaaagagggcactaggggacctatccctgggagacctggcataaatccaaaggagaggaaggtgggaaacagggatgatgaacatacagagcacatgtttcttcttttccatttttaccggcagccagtctgctcctgaccagaccagatctcagcctagatcccattcctctttgtactgcatattcccctaaagacatcctaaaagagaatgatagacccagtgaatgcttagtagccacaggtagtttttttgtttgtttgtttaaatagggcctgtc

SEQ ID NO: 54597 - DNA, 1049 bp, Homo sapiens
ttgcttctcagacactttatctgaaattctttactctactttccccaaagtttgttttcactccaataattaatttttgagtgcctactccttgtgatacttgttggaaaatcaaagataaatgggacccagtctctgctttcaaagcactcacactggcatctagtgggaacacaggcctgtaaacaaatggtttcagtatgatgtaagaagcatactgatgtggcgatcataggaacagggatggcagaggagggagacctactcatttgaaataagccacctactcattaatagaatctctgaggattactacgattcccacagagcccatcacaagtagcatgagaaagaccccagggtggaagggggcccttgtgctgccccttctccccttatttagtcagcatggagcccctggactggctttgaacatggctctgaacagggcttaggggataactttcagtgactgctgaaatccagtcatatgactatgtgattttagtcatggctcgtggaaataaatatgctttttttaggagtataaacgtaaaaaatactaacaaaaaatgaagctatttctacatatccagaactattttttttagagacatagcagtctcatcagtcaatattacaaatatgacattcttttatttccatctgcaaaattgttcatgaataaacagaaaagaagaatacacctcatctacccaactctttaaaggttatagcctgctcttagaaacatgtttgtcccttatctcaatacctatattgactttcaataccttctaaagaaccaaaggtctctaataccctcttgttcctctgttttcagaggatgtgtgttaacaaatttaactgtgtaataagttattcttaattacattcggatattttctcctcctaaaggaaaactaaataacaatagataaatagatggatggatgaatggatgcatagattagctagctagctagctaggtgatagaatagatagatgtagatagataaatacatagacaatagataaagctgctcct

SEQ ID NO: 54598 - DNA, 1007 bp, Homo sapiens
ttctcaggcctggagacatgattagaaccagctggggaaattgcttttgagtagcagtgactgagttttactcaggggatgcagctttaattgatctgtgcagtcccctcatcccatctttttataagctccccaggtgactataatgcgcggccaaggctgggaaccactgcattggaaaatgcagaatttatctctttaattcagacaaacatatgaaatgtggaccttgtgtattaacatgaagcctggaagactgctagaaaactcttcgacctcctgctttagctttgtttcccctttgcactcaagcagaattaattacttcctacctaataacgtagtcatgcctcttttattttacttatcatgtagaattataattattttttcagtgcctgtctctccagttagacagttggtttccgaggccgagatcatgtcttgtttatgtgaaatagcctcagcttttaacacaattctggcacatagtagttgctcaataggtatcctagaaagggaaggtgagcataaatcagaaaaaagatataaagtgtagtttagtattaactgaaaataatttcttcttggataagcactcacttctaactacaggaaatgtaatgtagacaaatttgtattttcttgtattctgatcttcgtcagaaataatggcagctatcaatttttttatttaaagaatttaacccagcatctcatttcgggaaataaagcaacatatattgaggtagggattgctaacaagtgaatggctagttctgttaagccataataaaattgaaataatatcagcctgggacttttctctacatttcctatgtcagaacatttgcagtaactgttgctatcaatggatcatactcttgaccagctgggattgtctgagtttccacacacaaagagatggatgggatgctattagttagtctctttagacctgaattcaattttgattgaacatgtttatacttgtgagcttataatta

SEQ ID NO: 54599 - DNA, 1023 bp, Homo sapiens
gcaggccgggaataccaagattaggttatctgcagattctctggtgaggacctgcttcttagttcacagacagcatcttcttgctgtgcccttccatggtataaggggtaagagagctccctgagatctcttttagaagggcactaatcctattcatgagggctccactctcacagcctaatgacctcccaaagggcccagctccaaacaccatcacgacaacatatgaatttgtgggagatataaacattcagcctatagccataaccagatgtttttgcaaccaagatggtgaattcttcctgagcacgtgccagtcagactccaggagagcagggatcccatgcacttatgtacttccatccatctcacagcctccatcgctttcagaaggttgagctgcccccaggtaccaaagcaaggactggaatatagctgagagatagaaatgttttgcaaaatgttgcttacagattcagaacttaaactgatttcgatctcttgggaaagaaatatgaattctaatctgatttcaatctctctggaacaaaaaaccttttgtatctatctttcttcaatgatgggaaaaagtaaaataccttccaagcctccactaatccttctactgatgtcttctatattcgtgattcagatgtgccttgtagacaagcacagatcttcactgctcacttctgccataaatgcttcacaaattaaaaaaaaaaaaatggtaagcctccgttagacagaaagaaaatgattcttttcactgtgtttaagaggactgattagggcatttcttcagtagtaccaatgtctaccatatgcttcttcctaaacttatataaaaataaatttctgacaaaaatatgtaaaatctaaacatgtctaactaattctcactgcatttctatgcttttcatggaaagagaaaataacgatgaaacttaagagtattgaaatatttatttttcaaaagtaatctactttattaatattatttgcttcttttttcatggttgt

SEQ ID NO: 54600 - DNA, 1061 bp, Homo sapiens
ttagactggttcacaatattagattgaatcccaaggtgctactgataatcatcagctgcttttcttgccaagaatctttgtttaaatgtattctttcattatccatgtgcttttgaaaaaaatgagggaaagaatgcttttaattgaataatctgtattctgtcaggtatttcttctccgtaggaaggtatctgaaaacttactttactttgctgtttttatttatcctgccagtgtagtatattgatgagagaactgaggtccaatagtgttaaaacaagacatgaaatattgattaattcttcttttaaattctctttttacccctgagtataacagatttcagaagctgctgccaataccatgctctccaataaacctccattattggaaggggggtcttgatacccttcaggctttgataaatgattattatgcttttgaaatgttagctttgagtgcctgaggcttgactttcatcagttcaagaaagaaacagtagaactgaagctgcaaagtttgagccaaaggcccccaaaggaaccatttcatgaaaggagttaaccatagatactgtggcttctgaactcgttgtccttgtcccacctgatactttttctgcattcctaattgtacattcccccattgcaggctaagacttgccctttgggtctaggcctactgagtttgctgatttctaaggttaaaaagtaagataatgggtttagatggacttgtaaagaagggagaaggaagtacgatgcttggttggatgaagaaaatcaggggactgtgaatgagcagagtaggaactggagattataggaatctggctgtttagggtcaaggacgccctcagagcaatcaccctaaggcaagaataggccctggggagtcaagaaatccactgccctcttaggacccagatgagcttggaacagaggggaatctgataaaatgtataagagaactgcacaggacagccactgcacaacaaagagttatcctgtccaaaatgttaatagtgctgagattgataaactctaatctagagaaagtgc

SEQ ID NO: 54601 - DNA, 1050 bp, Homo sapiens
ttttgagaagtttttctatatacgtatatatacacgtgtggttctatttaggtggggaaaaaatgaaaaagcagggacaacaggaggaaatgaaggcagagaaatatagtttcctttcctaggattgagacaattctatttttcatatactcgttgctcattaaatagtaaagggttgatttgctgcaagagtagctgagaattcaaaaacatccttgcagaatgattcaaaagacaaaagccaggctcaacttatagaatgttttggaaactggaagtaatgatacatttcacttcagaagcacttgtaggtctttactagtgctaagtattatggtgagctatcattaaagtgtgccatcttggataaaggccttttgcctactctcttctgcaattttgacacctcaatattcacacccataaacattactaagccccagttctatcgttggaaggagttgttattcttttgttgttcccttatgcaatttttaattctatgaatgttaagtttttttgagctaatgatagatagaaatgcccactcaaagaaaaataaacagagacaaatgttaaaattgccatacagactgtttttccccctgttgtttcactttaaaataaaaagaaatccttgattaatcagaatggcttgggacatgaacttaatttatttagttttctaataaatgaagggccaactcttatttgttctagcccctactgatgagaaacatttgaaaacttgcttgctctcctgcctcgttgtagctttctctgatgaagacttctgcagtatattgtatccctcactctatagcagaaggtgtgtgtggaatatgtagactccagtgttttcttaggaggggtgggaaagggctttctttcctctcctctcctctcgtctcctctttctttcctttctttttgcaactaaactgctactctacactttttattgttgttttctttgtctttttctttctacaaacaggaaacaaaaaaaaaaaaaaacaagtttttctcaatttggagactcaattgaat

SEQ ID NO: 54602 - DNA, 1048 bp, Homo sapiens
accgttttagccgggatggtctcgatctcctgacctcgtgatccgcccgcctcggcctcccaaagtggggatttttaatatacttgatatccaagtcggaaacatatccagaatactactataaacaataacaagagaaaatgttggtctgcctctggaatttgttttgtccatattaactatctgatgctgacatatatttctttttttgctgtgtcagacatattaacaaagttgggttagcacataagctgcatagaacaaagaagtcttccttctttcctcccttccttccttattccttactttcctctctcctcttattttctttctgcaaatctcaacactcttgcagttgaatgtcaaatttggataatttttcttttaacaaatcagcttatagttatctatccaactctataagagatccatatttggaaatgatctcaaaatgagagtcatctttggaaataataacttctacttatatgccaggcttattaaagggctgtgtatctcattcagttcccccaatactttatgaggtacataatgttactatcaccatctcatatataaggaaattgaagcactagagagattaaatagcttacccatggtcacacagcttttgacgaaatgagattggaaccaaggcagtttggcccagagtccatacctatctggggaaggctaataaatgtaaccaataaccccccaaatttcagtagcttaagagaataagatttgtttctccctcaaacataaattctacatagatgctcctctccaaccagcttgtttccaagggtgactcagatacaaagacaccttccatcatgtggctttgccctccttgaggtcctttgagtcctctctattcggcctgctaaaagggaaagagcaaaaaggatcttgtgctggaaggttttatgggcaagcctggaagtgatgtatatcactccacccacattctattggccagcctcactcgcgtgccttggtatgggcaatgctgtctaaatgtgtaggaaaagaatttgatgaa

SEQ ID NO: 54603 - DNA, 1050 bp, Homo sapiens
taatggcttggaaagctatttacaatccagtgctaaaagttttacaatcaggtttcagacaactaggtacaatatgcttcacttttattttaaaaatgtatatatttgcattaaaaaagaatggaaggaaatatttattcaacatatatttcttaagcacctactatgcaccaggcaccctgtgcaagttaacactctaggctgtgagagtatacattgcttttatttcttctctttgattatttgtcttttctgtatctctacactaattttctattaattttataatacaaaattaaagtgcttttatttgcttatgtgcttttgagtggtctgtctttggggagcacattttcagcatatatgaatggccctacctgcatactagtttaccacagtattagtagaagaagctacaaatgaagttattcaccccaaatctcattgcccactcaagtaaatgcagggagagatatgacatcagaaatcaacactcctccagcagctaacaagatattctaggcaatttataaactatgaggataagagtagacattttatcattgcccacccatccctggtctctcagcagtttaattgcttgttagaaagacacttagcaaatccttgagcatgagaaagacaacacacagtaaacttcagtataattttcttgtattcattaaatcactgccaacttgaacatgatttcctctgtactgaggtacacttatcatttctaagaacagtaaattttatgtacaggtttgaagagcgaactttacctagagtttattccctggaggtatttctataacgtgctatttgaagattcctctatttcaattttttaaaacctccatctgcagatgtggtcctaggctgtgaaattctcaggattagagtgggacagatgtttcccagtgctgattttttctcactgccactttgtgctttgttatatcagtcagacaatgaaatgcttaattagctctttccttttgccacaggatcattttataaaatggtaaattaagagctttcaaaatg

SEQ ID NO: 54604 - DNA, 1076 bp, Homo sapiens
ttttagggcttttcccaattgcaaagggagcatggttactcctcctgccatgagagggcagcactgagattgtctccagcccaggaagcagtgggcactgtttagtatgggttagcacctaggtttttatgtggaagcattcaagtcaggctgtggtgatatatgttctcagagtctaccatagtatcattttagtgcttttattacaagtcatcaaacactgtatctgagaaacatgaggataaattatggtacattcaaaaactgctgataaatagcaaagaagagaacagggtactttgggaatataaggccttttgcgtgagaaatgttttgtgctagctatgagtgaattttctacaagcagagaagttccatttggtcctctgaactggttaacattttcttgattctttgcttagtgtagcaaataaaattctgtttattctttttgagagttcccaaaatatctttattgatttggattttgctttttcactttattttatagttgattttaagtttttcttgagtgtgttcatcagatagccatataaaatggaacaatgcatttgtaataacaaatattatacatgatatttttttggccagcccagttgcacagtcaactgagaaagtggaagttatcactttcctcttaattccttttacatatttttcctctggatgagaaaatgttactttctcatatccagaaaagtgttataaaatgatacattgagatcatctgattccctctttattgtgattgtttctttaaaagaaaaaaaagcagaaaggggccatgaacttacaaagaaagttttaaagaatacaccaaaaattgttaaaacaataaatgagttcatcaaggctgcagggcacaagatcaatacacaaaaattaattatatttttatatacttgaaataaatgatctgaaaatgaaggaaacaattctgtttacaatagcatctaaaagaataaaatatttaagaataactataacaaaagaagtgtaaaactaatactctgagaactataaaacattactgaaataaattacagaagatctac

SEQ ID NO: 54605 - DNA, 1061 bp, Homo sapiens
tagattagtgggatagaattgagagtctacaaataaatctatatgtctttggtcacccgaatttaacaagggcaccatggttattcaataaagaatattttttaaacaaatggtgctaggatgattgtatatccacatgtaaaacaatgaaattgggcccttacctcacacaatatagaaaaattaactcaaagcagatcaaagatgtaaatctaagatgtatgtacatataaatctattaaactcctagaagaaaactcagggataaatctgcaggacctcagatttgccaacgaattcttaggtgtaattcccaaaacatgagcaacaacaacaacaaaaaattggttttcaccaaaattaaaattttctgtgcttcaaaggatgctatcaagaagtaaaaaaacaacccatggaataagagaaaatattttcaaattatatatcccctttggaacttgtatccagaatatgtaaagacccatacaactcaataataaaacaaattaacccaattttaaaatgggcaaagaatctcaatagacgtatctccatagaaggcatacaaatagacaaagcacacggaaagattctcaacatcattagccatcaaagaaatgcaaatcaaaatcacaaggaaataactcttcacaccccgtaggatggctgtattgaaaaaaatataacaacaacttttgtcaaatgtggaaagaaattagatctctcatacattgctggtgaaaatgtaaaatgatgctgtcactttggaaaatggactggcagttcctcaaattgtgacacatagagttacatgtgtcccagcagttctactcctaggtatatgccaatataaatgaaaatatctagctacaaaaaacttgtacacaaaggcattattcataacagcattattcataacaatcataaggtagaaacctaaatgtctgttaactgttgaatagataaacaaaatgtggcataaaatatggcgtatccatacaattaaatgttatttggccataagaagcaatgaaaatacagcagttagtgatagatgctac

SEQ ID NO: 54606 - DNA, 1051 bp, Homo sapiens
catccacttagacctcacttccttcaggacacctaggttagacctttgcctgtgtgcttccctagcaccttccactcccttcacatagcacctaacacactctgttgggtttctctgaggtatgtaagctctgtaaccgcagggttcctgtctttcttgttcatccttgcatcttcaaagcctgccgcattacctggcccagagcaagtacttaatgatcatttgttaatgaatgaataaatagatttttccattaatcatctaatcagtgaatttacaattctatgcaattctttgatgctctaagaaattgaagttttattttctgaagttatatattagttttatttcctaaggaatttgatttatccttactttaaatcataactacccagtggttattatagctatgctgccatatggtaaaacacatgaagcatctaatattgccttaagaaagctgtttcacagtaaaaactcttcaggcccttctctcggcacttttcattttatgttgaaattattggtgtttgtatctctcttacctgtaagacattaggtgcctcaaaggcagtgaccatgtgttattcaactttgtatcctcacaaccttgtatctagtgcagtgttggaagtcagtaaatgtttatataaatgcttaagataggccagaatccacatcttggctcaaaaactgtataactgccaacacccatctctgtacttacactcccaaagcctcagtttctacatctgtaaaaatggggattctgctgtttaaaggatcatcttgcagggttgttatgaagtattacataaaatataatgtaaataaggaactcagcatagtgactgaaatataggaattatgaataagctaggatggggataaatctaagtttctttgtgaagacatatggtgtgtcaaaatgttaatttttcactgtcacaggctggcaagacacggtcttagatctagtaaaattgttgcaaaaagaaagcaaagaggcaaacttcccaacttttatattaagaatatttgtctgaaatat

SEQ ID NO: 54607 - DNA, 1051 bp, Homo sapiens
aggtaatttatctagtgatcatgtcctgatgaacacaagggccctattgcaggcaaatcaaaagaggtaggactatgtcccaagtgttgcttctcttaccccaaggttgcccaatgcaatagttttcattctggtacatgcaaacatgtttcctctaaggtgcaatgccagaaacctagaggaaaatgtgtcttggttttatctgagaaaactggcaacaattcctttggaattgattccttttctttttattattttaaagagagaatagatggttattataccacttacgcagctaacagtttgtaggtcaagatgacctagagccaagaatgtgatattcattatgatacagcatgaaaaagagaaagttctgtttgtaaaggatttttttatgaagtcacaggcccaagggagatgagtacagaaagctatttagggtaccaagaataaattggatggccccctctctattcccttttttaatccccctaattatttattctgcaacttctcccccaacaagtatgtaagccacattagggccgggatttttgtttaatgtggcatccccagtgctggtatgtactctgtattaaaaatatattaatgaatgagtgaatgaatgaatgaatttcatctgaagaatgagccttccagacgaattccttgttaaaataagccagcacattgtctataaagcagcttccttgattaaggggcaaggtctcaggttaacgtgagataagagtttctgatttcagcatccagccaaatgatactgttctttggaacgcactctcttcttccctccactagtttttcttccctagcatttgttttggatctgtagttacagcattttctgctcagaattcaactgagggaaaaaaaaatgtgttttgagtaatactcactaaggtgaaaatctgaccatattttgagaaataaggggtttggaggctcaggacagaccatcccactgctgtcttagggacattgggctgctggagcctggcccaaagaaggtcttctgggaaatcaggactga

SEQ ID NO: 54608 - DNA, 1108 bp, Homo sapiens
acaacaatttcactgaatttgaagagaacattgccacctggtcatttgaggctgtttatgtcactaaaccaacaggccaaaaatagggagttgcttcactggttggagtgattgatctcaattatcaaagggatattgagttgctgctacacactggggagaaggaggattatgtggaatccaggggattatctggggtgcccattagcacttcttataacaaccaaaaaaaataaaaaggcagatgactaaggactttacccttctgaaggaaggtttaggtccctctgctggataaagaattgacccgctgaacttctggccaagggcaaaagaaatataagccagaggtatcaactatggccttgtgcccagctactgaaatgaggactgtagtggctttgtgtattttctctttggctattatatgtttatgtgtgtaggctgtttctcctttttccatttttgtttttacacaaactagtggtgcttaaccatacataatagtctttaggcaagaaaataatcaatgaaactatgatagaatttgaggagtaatgactatagctgccaatggatacagtgatggttaggactatgcatctctttattttgtgaagggtgagaatttcttcacttgtgagaatagcaatatcttgttaggtggaaacacagagttgcttcattgtacagaactcacatgagtgaagggtaaatatggaaaatgagtagctaaaggaatgtactgttcccagttatcaactcattgtctcaacccccaatccacttattaccattctatgataatggagctgacccctttaagaatttcttctttacagtgaacatgttgctaagctttgtcaatagacagtgctggaggatcacagaaaaaaggagcttttcttcttgtttcaggtgatcttctcctgcagggggagggagagagagagagagagagtacgtgtgtgtgcacacattctgtgttttctgcagtgcccagtggccggcagcacagagcaccttcctgtggacaactttatagtgggagggctaccagcaaagcatcttcacttgaatggctgcctcaggcaactggttccagcca

SEQ ID NO: 54609 - DNA, 1457 bp, Homo sapiens
aaattgacttagatggactttgatcccagggagtgtgcagggagataaatgataaagataaatataatagtgaataggagtaacaatagaaggagttatagttcaggtactatgggaactcaaagaaaataacatatcaggtgggagagtctggaggaggcatttgagttagtgagttttgaataggcacaatgaataggttaaggagcattctacctcaagggaaaaacatgacccaaggcactggcacttaaacaagtgtgtgttgaatagctgaatggaattgggtagcgtttgttcttccactgatttactcactatgatatatgaatgcctcctgaatggcaagcaccatggcaggttggtgctgggaatataataagatgaccgtcatgaaactacagtctaatagagatagataaaaccgacaaattaatgaatatataaatccaaagtgagaaagactgttaggctactgagtaacttgagtgaggatagatggtatgattaggtagtcagggaaggactctttgaggaaacaaaatataagctgaaactgatctttgttaggagccagtttaccctgtaggatatttaccctgtctgaagtctttaccattgttgctatcccaatgtgtttaatttgactaactagtccccattcaaacacaaccagtgaaatttatctttttcatcaatgtttgctttattgattgctgaattatttacctgttataaaatttatcatgttattcttgttttgcagaaaccgaagctgaaagactggcatcctcctgggggctttattctgggattatgggcacttattatcatggttttcttcaaaacttatggaattaagcatatgaagttcattttttagacttgatgatgaatgaagaatgcatggaggactgcaaacttggataataatttatgtcattatatatttttaaaaatgtgtttctcttgtatgaattggaaataagtataaggaaactaaatttgaatcaactattaattttataacttaaagaaaaataattgttaatgcaactgcttaatggcactaaatatattccagttttgtattttgtgtattataaaagcgaatgagacagagatcagaatacattgactgtttttgaaaatagtaatttccccttatccccttttcatttggaaaagaaacaattgtgaagacattaaattctcactaacagaagtaactttggttaattattttttgtatatcctcccaatcttttgacttatgcacatattttttcccaatatggagatcatatggaatgtactattttgtaatgtcttttttcattttacaatgtattatcaaccttttccctctcaaaaatacattgtgaatgactgcatagtattcactttatgaatatttaattcatttcacagtcttctattgttggaccacttacatt

SEQ ID NO: 54610 - DNA, 2019 bp, Homo sapiens
tggtccaaacagatataacagcacggggaaactgagagactcctggaggtgcaagtcccaatggggtttggccagtagttaaatataactaaaacagtagactgttaaatagagaaagggttgctggagatgaggcttgagtttggttggagccaggttttgaagacctttaagtgctatgaaagaaacaccctcttttggacagagaattctgaaacatttttgtctcagagaaagacaggatctgagaacattaagtgatgctagctcattttattgcatagttacttaatgtagtctgaatacttctatagtcatttaaaatttttcaatggtagtgtttcaaagattattgataaatactgattatttcaaaaaaaatctatgcattttactatatttcatatttgacatatttaaatatttgctatatttcaaaatagtatttgccttagctctgtgtttttaaattatcttttccagctataaggaagaccagatggatgagaaactaatggaacctctgaaatatgctgaacaacttcctgtagctcagataatacaccaggtttgcatttcattttattcttttgaaagaaacaagatttttaatcgctgagaagtaattgcttttgttaggtttttcagaatcaatgtgctatagctgaaaggcattctgggctgtctatccctatttagactacccctattacagttgaaagtcccattcaaagcacaatattaaaaggctacttgctgtttaacactagaattcttacttacataaaatatgggataaaataaggattatcttttgtgcattatttaattataaaatttaatttcagaaaactttcattttgacccattgtgtatagtacttagtgacaaggaaaaagagctgcaaaaatatcattgagagtaattttttggagtcactaaaaagagaaaacaatcttgccctgcatcctttaccctgcccaatcatcaacccttgcaaagtataattctgcatgtcatgtgggcaatttgttcatttccaattataatgattttatcatccgttctacataactgtaatcattgagaaggcagtgttgtaagcatgtaagcttagactttgtactataatttgacagcatataacctctgccctgctgtgccagaatctaataattttaaatgttctgttgactagagttatagcctttagacctagcagagatttcagaaacttacatattatagtaaatatttaaagcccttaaatggcagagtttctcagaattgttatgaatgttgattgttattgtgagtttttccatatgcctttttccatcaaaataatttttatttagctgatatgtattgattagaagtgccagttagaactttattaaaagaaacagaggcttttactttaaaatgttggctatatatatttttcattgacattaaaatttaatattgcaattctgtgagaaattacaaaaaatgatcagaaatttacacctttgggaagctcgtctgtgcttggtaatcaggtccagtttatatgtcaggaattccctagtgttgtcagagcttaaatgacctaacagtctgcgaatgtcacatttaaaattctgtcttcatgcctgactctcagcataaatgaattaaacagcagagcaggcagcaagtcaatatgttcttaacagtaagagtgagcgatgaaacagtttgtggtttgctcagaattggtaaatagaatctgcccagaacagttcacctagaataaaatctgaaagaggaaacaagaattaacctttaagatggttgaccagatgaaatgtcagtaatatttttatagcatggatgaaccaataaactacctggtttatgtaacagctgcatttgactgttatacactgtgtgaattccaagataaaaaatttttgaccctggtgaaaattttagattgtgatttttttggcagtacaagagactttgttaattttaacactgaattacaaacat

SEQ ID NO: 54611 - DNA, 1030 bp, Homo sapiens
tttccaaagattgtaagaagaaattaatttgatttctctattatttccttttagtttcaagtgcttctttgagctgtcattttcaaaacaggttatactaactattgggctaccttcctatttttggtatgtgtagagaatttcttcctaatgattttggattactctagatgatgtgtctttaattatttattgatattcttaatttttagtttgtttctagcatagcacagtgtctctgctttcttgttcgttttgttggctttatttccagtgtttggaaagatgctttggccttctacctgaaataaactatgtaattttatgtttatttatttgtgatggggtctcactatgtaacccaggctggtatctaattcctaggctcaaatgatccttcctcctcaatctcccacgtagctgggactataggaacatgccatcatacctggctgtatgttattttatacgtgaattgtctgatctcagtgtggcactatagaatataaactttactctttctgagttagagagaaccttctgtgtggacacagtaaataattttacagtgttattttaggagtacttggatagcacagaagagaaagatttttcaggcactggataaacatgaaagagaaaaaggatacagaaagcacagggggattgtaaagactaacttcataggcttcataatttgccaggagtattttatttatgcagaggatttggacagtattttaattgtcttttcatttgagatggtagtatgactctattggagtcaaaatcctattataaagtaagcaaataccatgtgttgtcttctacaaaatctctatttaaaaaaatagtaaagcaaaataaggaatgcacagctttttccatgtagaaattattcccttattaagttatttaagtagattttcttagtgaaggaccttggaaagagatcatggaaaaagaacattcttttaggggggcttctgaaatgactcaaaatgttaagtaaaaggaacacttggatgac

SEQ ID NO: 54612 - DNA, 1301 bp, Homo sapiens
actatttcttataaaaatttaagtggtgatgatgaaaggaaataggaacttaatgcatttctggtggcagtataaattgatacagtcattttggatagcaatttacttgtttctagcaaaatttaaaatgtacataacttatgacccagcaagtccacttctaaataattattctaatgtataggttgggcaactttttctgtaaagggccagatagtaaatatttatttatttatttatttatttttattttttatttttccttttaattacatttattttaatgctgaatttactcccgtgccataagtttttgtttcttcagtttcttctgggatatctttttcttctgggcaacctcctcttctggtttaggaacaatctgttccttttccgtaaggatcatctcaatgtggcagggagagctcatgtatgggttaatccgaccatgagctctgtaggtccggcggcgcatcttaggtgctttgttcacttggatatgctcaatgaccagagaatctacatctaaacccttaagttcagcattactctctgtgtttttaagcatgtgcagcaaaaattcagcactctttttgggccaccgaccttgtgtccagccccactgcttggcctgcgcacacctgccaactccaccattgtaacgtcggaatggtacacactgtttctgtaaagtgacatctttcagatacttcgtggctttttgtatatgcatacccttgatggcctgagcagtttcacgagtgttcttaaagtgaacacgaagattggaacctcttgatttgcatgatttcgtggggttctccgggtcaagtgagtagcgaaccattttcacagattacctcaggctgcttagggaaagagctagatagtaaatatttaaagcatttgtaggtcataggccatatggtctcagttgtaaatatgcagctctgctgttatagtgcaacactgaaattcaaattttgtgtaattttcactagtcatgaaatgttatttttctttagacttattttttctaaccattcaaaaacataaaagccattcttagctaacaggacatacagaaacaggtgacaggtcacatttgagctcacatttgaatgaaaaaagctagtggctgaattacactgtataatttattaatgaaatgatttgtagatattctatatatatttcatgtgtatataaatatgtgtgtaaaagcaaaataaaatgactggaacaatatacattaactcctgatagatttagtagagttcagagtaagtgctcaatgattt

SEQ ID NO: 54613 - DNA, 1085 bp, Homo sapiens
aggttcatttttttttccatatggacatccaaatattccagtaacatttgttgaaaaaattacagatggtctccaacttacttacaatggttcgacttatcatttttgacttcatagtgggtttatcatggtattaaattcattttcaatttacagtattttttatttacaatgagtttattgggacataactccatcataagttgagcagcatctgtatttattcctcattgaattatgttgatccctttgtcaaaaaatcatgttttgggggtctatttctggactttattttgttgcattgtaatatttctatctttataccactattacattcttgattattgtagttttatagaaactcctgaaattatataagtcctccaaattttttttttcattttcaaggttgttttcagtgttctaggttctttgcattttcatataagtttatgaatcagcttgtaggtttcttaaagtaaaaaaagaaaaagaataaaagcctactgggattttgattgggattgaattaactttatattgggctgtatcacagcttaacagtattgagtcctcacaatccgtgagtatatctctacagttatttagatctcatgtaatttctctatattgttttattgtagatatttcctacacattttattaaatttattcctaaacattttgtatgttatttttaaaacattacatttgtttgttgctcaaatgcagaagtattacaattgattttatattgactgtttttctgagatcttattgatttggggtcaacccaattccaatcaaaaccccagcaggctttttatttttttatttttcggtagagattgacaagctgattccaaaatttatatggaaatgtaaaggacctactatagtatatattacattattgaacatatggattctagtctatttataatatttactaggaaattaaatcaaaagttaaatttacatattcaatagtaacatctctttgagattcgggtaaaattgattgtgaagaatatgaaactatgatcacatgattcgcttaaaattgctgatagtaaattgataca

SEQ ID NO: 54614 - DNA, 1050 bp, Homo sapiens
attctagtagaacactgcactgtgatggatacagacaaagaaaaagagcaattctgttttcatcgtgttgagtatgagttctcagagttaagggttcacaatacactttgaagcatataattcaagaaagtgagtatgccttttcccacagtggccagctacctttttattactgtcctaatgtctgtatagttttcttaaaattccaagcattatgataggaatgaaactttaatctttaaggtctttagaacacatagcttctttaggttgggagagttttaaaaatacactatagtttagtgaattatgtgattggatttaataaatgtggtatgtgtgtggatgcatgcatttattattatatattttttcagtttcaggtatgtcccaaaagtctgtgtgtgtctactcctggacatcgcactgatctttttcagagggatcctaaaaatgtactgataactgatttctttggaagtgtacggaaagtggaaattacaacagagactattaaattgcaacaggattcagaaatcatggaaagcaggtattcatcttaaaccattatttgaatagaatactagtctcacagtttgtacatttttttgaaacattgtattaagaggcaaaagttggtgtttgtaaataaaattacacatttatacccagtcttcactttatgtaggctgtatgcttttcagatttatatgtaaaaactatcaatattagtggaaactaagatcatcgttaggattatgttggagctccaaaagacaatcttgctagtggttcagtttgatacttgccacaaaggcctaaaacttttcccataactggctatcccagcgccataattttctgttaggcctcctggtaacattagggaaaggaatgagaagtgtaaaccaggtactgccttggggagtgaattgtatgtgagtgagcagtgagtgagtacagacatttgtaagagagaggaagttgggagacattggttcactttgggtatgtgaattttagaaatacttataatttgttttattttct

SEQ ID NO: 54615 - DNA, 1054 bp, Homo sapiens
agattatatatgttgatgtttattaaatcttgatatgaatttgaatattaaaacttgtgataatgctactttaactgtaaaaaaattatagtcacctaagttccaattacttcaatttgaaagttctcatttttggattgtacattttataatttatgtaaggcatgacatgctatctcgaaagtttaaatatatgtaccttgcacattgaatatctaatgatcgtttaaaaaatacttctattgattatacaggaaagattaaggaaactaatttttttattgctcttaattgctatttagtttttaataaacattcctcactaatacctcatcttaccctaccacctttatttttaagatttaatgatgactattgtaatcttattcaataagaatgattgattttctggcagtttactggggcagtgacttaacctatctctagctcaattgtataataatacctattttctattagagtatatgtgtatagtaaagtttgctgagtatcagctgtattcacagcactatgttagttgctttaggagtagcaaaatttgaagacctggtgttagccccttaaaaatttatagtgtcattggtgacagttgaagagcacatttataaaacattacttgttatgtgaaatgtctggatcctccaggtaattttctttcctttgtgaacatataactcttgccatgtacctttattatacttttagtattgcactgtaattgtttatatttgtgatgtttcctcaaggctttgagcttcttgaatgcgaggtgtaaggaccatgttatattcatcttacactccacagaacttaattacagtacctggtttatttgtagatgctcattgaatatctactaaatgaatgaaaggacatgataacaatgcaatttatatggttcctttaaatatagtgagattagtcataactttttcttggaaaagtaagtacaggtttgaaggaagagaagaagtatagcatactctagggaaataaaatacccgcagacacatggaagttggaataatggatg

SEQ ID NO: 54616 - DNA, 2438 bp, Homo sapiens
tcttcttttctctgtaaaacaaaataacatccctcattgtccgtattgggcatcacctttctctgatctgcttttctttgcagttcctccttagtcctttctcagtgttcattcaacactttgattttgttagactctaggctatatgagggcagggactattgcatctccagcataatatcaggcacattgtaggcactcaatatatatttatagtactcatcacgttccaatgtagttgtatgtttgtctgtgttccacttagagtttatgctctttgagtatagttactaagtcatacttctttttctgaacctagctcaatttctatgacagcatgggtgccaaataagtgcttgttgaatggaatattcatttagattctgaattatatggcatagacaaggaagagggaaaagagctggggcagccaccttgggcacaataagactcgctgtggtttccttggacaaatttatacctttaacttttctgaggtcaaatttctgttgggaattctgctgaaaacttttagctaatgaaatgactaagatatgatttaaacatcttacaaaagtattgtagaaatattagtgtatgatttacagcatgatccttgtcaaagatgttatcatttttctttcagctacaatgagctactgtttattattgatacttgccaaggagcatccatgtatgaacgattttattctcctaacataatggctctagctagtagtcaagtgggagaagattcactctcggtatgtgcattttccccatttgtaaactgtgtctttggaatgtgcagctatttctgaaaccaattaaatgctttatgaatgtatctgttctttcttagactaatacattagaaggaaattttggttacatttaaaacattttgttataatgatactgttagaaatactttttttccccctttccatagcatcaacctgatcctgcaattggagtccatcttatggatagatacacattttatgtcttggaatttttggaagaaattaacccagctagccaaactaatatgaatgaccttgtaagtattcacttgatttgattatagcacataggtatgctaaccttaatgtgaaaagaagtgtattattccctgcactcctagaggatcttgttttatgtgttgaattatagcttttaaaactatttgatatctaccttttacctgtatattagtatttctctgtctctctacaagaggcctgatgttttcctttatttactcattttcttttccttaccagaaatgtactttttttagattcaacttttgaaattctacatattcttcaggggccacctcagattgtgtctccttcaggaagtctccccgaattcttccctgtgggaatttcttgttttttttcagagcctccatagacctttatttctccttggtaacatttaccacagtcttttattgaccttactaattgaatgtaagtctttctcactgaatgggaaactcctggaaaagagagaccttttcttacatatttttgtgggccctacaatttatagtatagtcatttgacaaggcttgttgaatttaatttagatttttttcctgaatttttttgtgctgattcttttcattaaatctactttgaagttgctgttgaaagtaggcataacaaaaagcttgaaacaacaattctagactggataatttactatgtgtcaatgactttcattcttttctccattaatttatagtctgtttattctttcataaatgtttcttgagtgtttgctaagtgccaagcacaggctgttcctaatgaaagaggcagatgccgttcctgctttcatgggacttagaatgaaggtgagactgagtagacagggctctgtcctctagcacttcagccaagcagctttgcattgatctctttaattatatataaatcttttaggtaaattctcagattctgaagcccactgctataggctgtgaaatttgatagaactactgtattagttcattttcatactgctatgaagaaatacctgggcctgggtaatttataaagaaaaagaagattaatggactcacagttccacatggctgaggaggcttcataatcatggcagaaggtgaaggaggagcaaaggcacatcttacatggtggcaggcaagagagcgtgtgcaggggaattacactttatacaaccatcagatctcatgagaactcactatcatgagaatagcatgagagtaactgccccacatgattaaattacctcccaccaagtccctcccatgacatgtgggaattatgggagctacaattcaagatgagatttgagtgaggacacagccaaattatatcattctgcctctggcccctcccagagctcctattctcgtatttcaaaaccaatcgtgccttccc

SEQ ID NO: 54617 - DNA, 1045 bp, Homo sapiens
tgtttgcctggtatttgaaacattttgtgaatggaaactcatttctgatataataatggagccagtggaagagcataaatataggtttctgtaattgaatattagaaaccctattaaagatattatatctgctattttatatagtctatcattctctttttaattggcatagtagaaaattcaatttgtttgttttcatagtatacattttagagtataaaataacaagcgatgtcaaaatgtaatgaatgaagtaaatgtatatatctagatatatgcagtttgcattaaaaaatctattgatcttttttactctttatacaagggcatggtggaaatggtttcttaaaatttcaagattctgaagaaattaccaacatagaactcgcggatgcttttgaacaaatgtggcagaaaagacggtaattagcaaattacttcttttcataagctatattcatacctaattttcacatggttcgtagatttgtaatttttattttttaagatttttaacttattttgacaatttctttgactcttttaaatttacatttgttatttcctctgaactgggttgtttttaaaagaaaaactgagagttattctataacatgaaatagttaaccttttaagattccatctcttgttatttagcatcttttttagaggaaataagtgtccctccaaccaagttagctattattatggagattatgaacatctgtttatttttcaacttgtacctattctttctagctcattctttggcccctaatgttatagacgtatttcttctatggaaaaaaaaatcgctgaaattatgattagcataaaatttgtaacaactcacattaaggatgattgttagtaacccttgctaagcatctctttagttggaagctgtcatgcatatgactgtaagtgaaaaaacttttaacttgattactttcaataaacacttataggctatcttccattcctatggcagaaagtggaatatgatgcttattctgccttcaaagtgtttacaatctaatggaaa

SEQ ID NO: 54618 - DNA, 1056 bp, Homo sapiens
ggtctcgatctcctgacctcgtgatccgcccgcctcagcctcccaaagtgctgggattacaggcgtgagccactgtgcctggccagaaatattcatttttatattgccatttggaggtcaattcagtcttgtttaacaaaggaatatatgattgatatttatttaatgtaaattaatgatctcaagttttaaaaaagagaagatgtattttctgttttaagaggaatgactcactattctgtgaaaatgaatcagtaacagctgaagatctgatctttgaacgtgacagggttggaacactttcaaagtagaaatctagccaattttcaagaaaaataatgtttcagttttgaactttaatgtatttggaacatatgtagcagaacattttcttcttgctgtctcctgccaaactaattacgtatgccacattaatttttcccttatgcttgggaaactcaagatatggtagaatggagaatttcctgattgttactcaccagttttaatggtagagtgaagatgagaagtatcaaagagagattttatttccttctaaagaaattatatgcaaaaattaaaacatttcattcacttaaaattatttactgagtacatactgtatgtcaggccctagtatgtagtatgagtgatacagtggtgaacaggacagatatagcccctgccctcagagagcttatatcctaatgggggtggtggtgataggagatgatggggatttcagattcatagatgtcctgaagaaaataaaacacacaataagatagagtaccatagctaaggctggaattatatgaagatctgggaggagtgaagtctaaatttggtcagtagccacttaagtgggaaaggcttggcatattctaagaacagaaaggccagtgtggaggtagcatagagaatgtgggtggtagaggctgaagttggagagacagagaccagattatatgagccttttagatgatgtaaggagttgcagtttctctctaaatgcaatggggatgcatggaactgcaggtgaacaaaaataaaaat

SEQ ID NO: 54619 - DNA, 1001 bp, Homo sapiens
gttctatcagaaagagtgtcacattctgcagtaaatgcaggaaaaggacatcggggcatgcatgctggggatctgccatcccaggcctaaaagaaacaatatcaagtggaaataagaacagcctcagagctgtacttccctaggtgctgatgctccatgccccatctcctaccttctccttgggctttgttaaatgtgccaagagattttctttttacaatctataggttacaaatgttttgatggactggatcttcagctattctgcaagtcttcctaggtccctgtctaggagtatttgcaatatgtcatctgtagagctgggaaactgaatcatcttagtgctgcacttggccctttcctcctacagccacacaatagaatgcagctctttagagacgctgtgataatcaaatagattcaaagcattggttgtgtatgggagatagtgtagtgcaaaggatcatggtttggaatttggaagcctgcgactgactcttcaccctgccacttgctacatgtgtaacctaatgactgaacatctgaacccctgttttctcatctgtgggaataaataaatcatgttaatatttatttccctaggccgctgtgatgcttaactgagagaatgaaggtacaaatgtattgtaaactatcaagacctcgttattagagattggtgtagtagctaatgctgatatttttaaaatgtttaacagtttcttatgcaaaatacagcagtaaaatttatactgcagtgtcgaacacattcagcacagcttcagactcctggctgtgcgtgaaaactccaagaggataccactggtttatgtcacttgagactccagacattgaacagtaattagggaacatgacagtaatttgatttaaagtctgcagccacagagttcaggctccatccctctctccatcattctccctgagtgcaaatccagagggagggcaagtaggtcgaagcagactctgatggtgtttactta

SEQ ID NO: 54620 - DNA, 1059 bp, Homo sapiens
tcccaacactttgggaagccgaggcaggtagattgcttgagcccaggagtttgagaccagcctgggcaacatggcaaaaccctgtctttacttaaaatacaaacaaatgggcatggtggcacgtggctgtagtctcagctactcgggaggctgagtttgggggaatcacctgaacttgggacgttgaggctgcagtaagccgagatggtgccatggcataatagcctgggggagaacgctgtctcaaaaaaaaaaaaaaaaaaaagcaaggtaatggaaaggacactggagtgaaaattctgggtcttagtcccagttgtggaagtgaagcactcagtaagtgttgacaaagaactacctttcattgcacattaggagctagtaaatgattcgtgtgtcttactaacttttgtttaatcctcagttcctctatgaggttcattactattatgttctccattgtatacatgagaaaactggaggtgcagagagtatgttaaatatgttagctctcaataataattactgtgtgtgggactggagataccaagccgtgtccttatggaggttataatctaatgcagaagaccagcaataagtaagtaaataaaaactattacttcaattcaggcagggataaatgctttgaagataagtaatgctcagagaaaaataataatgggagaatggggaatagtctgccattttagatggaataagcaaagaaatcctctattggccagggtaaattcaaatagaaaccagaatagagcaagggaatttgctgcatgaataatctgtaggaaggggcagaaggatagcagtagcacacgggccctgagccagtagaccgtggcttgttctggcaacattaagatggccagagtagcttaagccaaatgagcaagaggagagtagtagttgatggcgtcgaagagggcacaagccagctcagatgtggccttgaaaacacatcattgtaaaggagtttagattgtgttctgatgtcttctacatacacacaggtctttcgctagacagagacctctaaggtctttt

SEQ ID NO: 54621 - DNA, 1561 bp, Homo sapiens
ctagtcctcttcaacacatagcaatggtatcattgttaattatgtgcacagtttggaaagattctctgctttcccagaaatgacactcacagcatgagagcttcctgagtgttctcgtcaagtacagctctgcaccgttgtggctctagatcactgttcagcagctgaacattcctggtgagcaaaggtttccctggtgaatttttcaccactgcgttttaggtggtgatcttaaatgggtgagatggaacgagagcacacattaaagagagagtaaattccaaaggtttcaaagaacttggtcataaatatgataatgagaagacaaagtatttatattaaaacagtttagtagccttcagttttgtgaaaatagttttcagcacagaaactgacttctttagacaaagttttaaccaatgatggtgtttgcttctaggatatacactttaaaagaactcactgtcccagtggtggtcattgatggcctttagtaaattggagctgcttaatcatattgatatctaatttcttttaaccacaatgaattgtccttaattaccaacagtgaagcactacaggaggcaactgtggcattgcttccttaaccagctcatggtgtgtgaatgttataaaattgtcactcagatatattttttaaatgtaatgttatataagatgatcatgtgatgtgtacaaactatggtgaaaagtgccagtggtagtaactgtgtaaagtttctaattcacaacattaattcctttaaaatacacagccttctgcctctgtatttggagttgtcagtacaactcatcaaagaaaactgcctaatataaaaatcatatatatggtaataatttccctcttttgtagtctgcacaagatccataaaagattgtatttttattactatttaaacaagtgattaaatttagtctgcacagtgagcaagggttcacatgcattcttttatactgctggattttgttgtgcatcatttaaaacattttgtatgtttcttcttatctgtgtatacagtatgttcttgaatgatgttcatttgtcaggagaactgtgagaaataaactatgtggatactgtctgtttatattatagaatgcttgttgtgacttccttttggttagattttggatttttttttttaccagtgttaaaaccagaaattggtattttttaaaatggtttgcttcacatatttaagagttttctttctgtcatttatgaagaataaggaatgtattatggaaaagagggtgatcttaagcaaccctgtaaaaaatggtaaagatttttactcagtgtgtgctgaaacactaaattaaactagcttacaaaaaggaaacacggaccatggttaaagaaaaaggcaattattaatgctcaggtgtgaaaactaaagttgaaaattttttttctagttgtgtctcatgaagataagcccccatgtatttaaacagatggcttttgaaaaatcaccttgtttcctggaaattactattaactataggaaaagatagtataaatattctaagattgatt

SEQ ID NO: 54622 - DNA, 1044 bp, Homo sapiens
atgagttgtactgacaactccaaatacagaggcagaaggctgtgtattttaaaggaattaatgttgtgaattagaaactttacacagttactaccactggcacttttcaccatagtttgtacacatcacatgatcatcttatataacattacatttaaaaaatatatctgagtgacaattttataacattcacacaccatgagctggttaaggaagcaatgccacagttgcctcctgtagtgcttcactgttggtaattaaggacaattcattgtggttaaaagaaattagatatcaatatgattaagcagctccaatttactaaaggccatcaatgaccaccactgggacagtgagttcttttaaagtgtatatcctagaagcaaacaccatcattggttaaaactttgtctaaagaagtcagtttctgtgctgaaaactattttcacaaaactgaaggctactaaactgttttaatataaatactttgtcttctcattatcatatttatgaccaagttctttgaaacctttggaatttactctctctttaatgtgtgctctcgttccatctcacccatttaagatcaccacctaaaacgcagtggtgaaaaattcaccagggaaacctttgctcaccaggaatgttcagctgctgaacagtgatctagagccacaacggtgcagagctgtacttgacgagaacactcaggaagctctcatgctgtgagtgtcatttctgggaaagcagagaatctttccaaactgtgcacataattaacaatgataccattgctatgtgttgaagaggactagtaaatgatgttctcttccatgtcatctgtttgctggaaagtagtttgggtcaaggtaattgtaactggtgccctgagacacacagtagtctctgtctaagaatgtctctgacctataaataggttctaattggtgatcttccttgtgaatatctgtttcatgtagactgtaaagaaaaaaagacacacatcattacatggtagtggatgcattttagtctgtgtattac

SEQ ID NO: 54623 - DNA, 1035 bp, Homo sapiens
acttgcttcacttctcctaattttgctgcaaaacccagccatggcttgtttgccattctgtcagccactatagttgaccagatgatcaaagaaactagaaatgatagatcctttgatttccaaaagtgcacagaacacactgaggactgtcacaatgccaccacgctgagaaagagctagatctgcctttttgacatgatgggcattggttattaggagtctttaggctttgggagagcgattcaataagagataaaagtttagacagaatttcattgttgcctgggtttatgttagccaagagaacctgctaaaacaattctgtatcaattaccaacagtgaagcactacaggaggcagctgtggcattgcttccttaaccagtatttggatagttttaactatggtattaactctctgtttctcaaccatagtcatcatacagtggtctgaggtacctttcaagtagatgattacaaataacaaaacacccaagttggagatgatttacttttaaaaatttttaaataaatttaagctgattgaagattatcccttccaatgttcctctcactcacccatatcttgatattgagtggatggaattttacctagtttgctagaaattgtctctaacacataaccatttgtgtgttatattactgtcctgtgcatggagagagaagagaagatgtctgtgtgcacatcatgtgtttccttgtggaaaataaaaaagatcgtggaacagtataacttaatacattttctctctgaatctgttatagtgtgataactgtggcatagaacccatccagggtgttcggtggcattgccaggattgtcctccagaaatgtctttggatttctgtgattcttgttcagactggtaagtgttttcttcattgtcagtcttcaacttagacaagaaaagagcttctcagccattagtgaatttgatttccaaacatagaaaatattaatacccacacttagtgaattaaattttgttgttctaggcaattaatttttttctgt

SEQ ID NO: 54624 - DNA, 1044 bp, Homo sapiens
atacatttatatagtttttactgtttatgtctcttacagtccattctaaatagtcgtctttgtaactcagttcatcttgttgagtaggagagaaatgttctactttgatcattgggagtacagagcaaaaaacaagagcagaggttggtttgcttgttattaagaaagtgtcatgtttacaggagcaaatgtaaaaatctgttagattggagaagaggaacttccttaaatgagggagaagtagattacaagtcactcaagtaaccgtgaaaatataaagatgggattgggtttgcaatagtgtgtgacagaggtggtaatcatggccgtgcttcccttttacctgcattgaagtagtctgctacaattcagaattactgttgtgttaaaaaaaaaaaaaaaaaaaagtccaaaagcattagtggaaaatactgctaataacagcactaattttctatgagtactaagagatattttaaaaatgaaaaatatcagtagaaaaatattctgtatcagtattacttacacttaattcattttaattaccaaaccaacatttttttttttttttttttttgataggatgacgaaagtattcctatcatgtataggaatttacctgaatataaagaactattacagtttaaaaagttaaagaagcagaaacttcagcaaatgcaagctgaaagtggatttgtgcaacatgtgggctttaaggtaagttctatttaattttaggattcatttcattttatttatttatttatttagagacagagtctcactctgttgcccaggctggagtgcagtggcgtgatctcagcttactgcaacctctgcctcccgggttcaagcgattctcgtgtctcagccacccaagtagctgggattacaggtgtgtgccactatacccagctaatttttgtatttttaatagagatgggggtttcaccatgttggccaggctgcagtattcatttaattttaaaagggtgataagagatactttaaagtggtttctgtagtgttaaactccagaattgc

SEQ ID NO: 54625 - DNA, 1452 bp, Homo sapiens
ggtaaggggcaaaggagggggtggatactagaggaccgatttgaaagcgattgtagaaagtattaagaaatgacaggatttgttacattcgatataagacagagtgaataactgaggataggccaggtgtggtatgcctgtaatcccagcactttgggaggctgaggcaggcagatcacgaggtcaggagatcgagaccatcccggctaacacggtgaaaccccgtctgtactaaaaatacaaaaaaattagctgggtgtggtgacgggcacctgtagtcccagctacttgggaggctggggcaggagaatggtgtgaacccagaaggcagagtttgcagtgagccaagatcgcgccactgcgctccagcctgggtgacagagtgaaactctgtctcaaaaaaagaaaaaaaagaaaaactgaggataacacttagatttctgacttgggctgctttgtgtaagcttttgtttacttgatataaaataaacatagcacttaatacctaatgtagcaggaggaatgggtggggtagggcttgtctggtccgggattgggaatttacagagcatggatcagagaattggggatgcttttaggaaataagtgagcacgggatcagtcataaggtagcaaagaaaagaaatggaacctgggtggcagagcacaaatgaattgggagaataggaagcagaatagtgattagaaatttcaatgaggttaaaaaaataagctgattatttggggtgagaatatgagagaagtaggaataacagtggaggtaggaaatctaagcttaatatttgggatgtaaaacacttatagttgaaggcaaggtccaaggtatggctgttggagtgggagactctgagaaggaatgaagatgaagattatttcagtagaatcagtgtaagattagaggccagaaatagcgagttgggcatctgtgataatcttgaagttgtctaggatgatgaaccacagtgttgtcagcaattttaaatagacaaattttgcatgttaatactttgagtagaaagctacttgtcaatttgggaggtgggggatggtcccgaacatatgtatctaaaagttcggaatcataaatagactttataccttgaaggccagtttattaagggatacttcaacttaatacatttattttattttttaattttgagacggagtctcactctgtctcccaggctggagtgcagtggcacagtcttggctcactgcaacctccgcctcccaggtgcaagcaattctcctgcctcagcttcccgagtagctggtattacaggtgcgtgccaccatgcccaactaatttttgtatttttagtagagacaggcttttgccatgttggctaggctggtcttgaactcctgacctaaagtgatccgtccacctcggcctcccaaagtgctgggattacaggtataagccac

SEQ ID NO: 54626 - DNA, 1056 bp, Homo sapiens
aaattttttttttgttgtttttttgtttttttttttagtgtgagtgtattttatgtgtggcccaagacaattcttccaatgtagcccggggaagccaaagattggacaaccctggcatagaataagcagtcaatcaatgttagataagtattttcagatattcataatgttatagaaattttccttttactttttactggatagttttatgtctggcataggccacttcatcctgtctgatcttctataagatgatcataagaattcagtgcagccagcatttgactgccaagagtatgataaatgctggggatacaaatataagctagatattaaacatgtggtccattttaccgttgttggggtatttcccctacatttaaaaaaaattttttaaagctagttatgctttaaaaacgcagaaaacagaaaaagcaacaacataagagtatgctaaaggatagagtgaaattcttctgatagacttgttggaagtaacatttgtatttttatatttttgattcttgtaatgatttttcactgaaccaattaaaaatttgttttcttacttagtcttcaacaagcagacgacagcaccctcttaataagcatctctttaagccttccactttcatgacttcacatgaaccgccagtgtatatggatgaagatgatgaccgatcttgttttcatagccacatgaacactgctgttgaagatgcatcagtaagttatacacatcaagttgttatatacatcaaggtatagaagagagtaggattttctaattatttccactcttcagagaatgttggtttcttttaatgaacaagtcaaatgtatagtttttaagtaatgtacttttgtgaggaaaatttcaaacatatacaaaaatagaatagtataatgaaccttaacaattatcaacatgaagctaccttattttaatctctactccctacccacctcaactctgctctggattattttggagcaagtcccagatattacacaatataattatcatgtttataaaaggtaatttgttatacagtg

SEQ ID NO: 54627 - DNA, 1068 bp, Homo sapiens
ctagaaatttttcctaccatgaggatttctaattacgtaacccccaaaggtgggagagagtattacattttgaaatgaaatgtgaatgtatttatttagaaatccaatatttaaaattaaatacatattttcttaaatttggtcttgggtatggcttagaaaaagctggaacagctactcatcaaataccctcctgaagaagtagaatctcgacgctggcagaagatagcagatgaattgggcaacaggacagcaaaacaggtaattgaggagatgactgcagattgctggtatgcttttggtagttttttaataaaggagaataatgcagctgacattgggcgatctgccataacactttcagctacagagtgctgtagtatgtggtgtttttttaaaaaaattgtatatattttcgttgatttcagaaacaacttgagatacttctgctttggatcattacgaaatattaaaaaatgaacatataatggacttaatttctcttgaatgcttactaaatatactaattgtatactttttggttatactgagcaaacagatttgtttcattgccttagtgtttcctggttgtctttctaaaaatgtatcttgcagtttactccttcatattcccatctatattaatagatgtgtttttatactacaaatgtaagtgttcacaagttgaaatatgtgtttagctttagaatcaaatttaaatttacttgaataatttttgtttggcctagattttaaaatatatgtgtatttggtggcagtttattgttaattctagattcatgatgagtattgaattcttagcattcattagatactcatgtacgttttaatttttaaaaacgactcaggtattgtatgtcatctcattgtgttaagagacttgtcatgtttccttaggttgccagccgagtacagaagtatttcataaagctaactaaagctggcattccagtaccaggcagaacaccaaacttatatatatactccaaaaaggtaaaagaaaatacatgaaagtaaactgtagattaaatttattaaagtaagaat

SEQ ID NO: 54628 - DNA, 1068 bp, Homo sapiens
ttaacagttctgtatgtggtcttatttttcagtaggtttacctgctagaccaaaaagtcctttagatcctaagaaggatggagagtccctttcatattctatgttgcctttgagtgatggtccagaaggctcaagcagtcgtcctcaggtaagcagtgtgaaatattggagtaggagaatttgaattttagacaaaacaatttaacattttgctggtttgtgttcttaaaattaaagcagtctttcactggaagataaaggagataagaactttgaaattaagagaaacttaggttggagtcctaacttactagccgtgaaccttcagacatcatttacgttgaagtctctaagctgcagtttccttttgtataaaatgtagttgatattacctatcttgtagggttgttggtgagggttaaataggtagtatatgcaatgtgcctagtacagtatccgacacatagtatttactctaaaaatagtagttcctttgtgtgtagtgaaatgtgaccaggatttgagtcctggccttgccactcttagttagatgaacctcagtggacatgttacttttcaattctgagcccacatttcctttcccttttttaaaaaatgaagttacagtactattatgtatttcacaggattgctgagagtataaaaccaaacaaaataaaataatgtgaaggcattttgtaaacagttaaaaaaaaagcatatacattaaaaaacaaatttactcaaatattttgaaattaatttaaaaattccacaatttgcgtgttatttggctatatcaaaggataggtgttgttattttctctctgacaaaagccttgtcttatgtgcagatgataagaggacgcttgtgtgatgataccaaacctgaaacatttaaccagttgtggactgttgaagaacaggtaataaatatttcaaaatcgtgtaggcttaaaaaaacaagtaaacagttaacatcagagtcagtattatgaggccaggtccagtggctcacgcctgtaatcccagcactttgggaggctgatatgggtggatcacttgaag

SEQ ID NO: 54629 - DNA, 1130 bp, Homo sapiens
gccgagatcacaccactgcccactccagtctgggcaacagagcgagactctgtctcaaaaaaaaaaaaaaaaaaaaaagggtcaaagttggagttgatttttaaacattcattgtggagaatttaaaacataaaaaactagatggactagtatggtggaccctcatacacccatcctccatccccagcaacacaaccaatccagccgtatttgtacttcatctagttcctccgtggtataattgtagctcctctattacacttagactccatgcctggtttatcttgataattactaatgcttttagtataatgctttgttttctaagtagataattgttgaattaatgaaaaattgaatcttgccttggatttatgcctggatcagcttctgtagtttgcttgtgtaggtgggtgagcaggattgaaaatagatttgtctatatttactgttttttagatgtcaccccagttttgtttaaataatttcttccatatctgctcatggatatatatggtaatcttactggtgcagtgtctgagtatgctgggaaataattccaattatctgggatagaagacttgaatttactattttcttagagtcttcattattttgagcttgaagactttaccaatgtttatcataggccttccaatctgataatcattttgtcttaactaaatggaagcagaattgaagaactgtactttatttgccatctttgttggaatttttttttaagtcagatttattgtggaaaaatttacatactgtaaaattgtggtaatttgttggcttcaaattagaggcccttcttcccagtgtctgtttgctccaaacctaacaaaaagacggctgccaatgtaattgactgtagcacctttttcaagcttgtttttttgtaaccctatttttacttgtgccttattagttgttactgtacctacagcatttactgaagttttaatagattcacagttgtttttaaagtgataccgaagtgtgtaactcctgcttaaaacagggatagaggcaatataagtctttggttgtattcagctggtgggataggaattctgaaggtgaagtatgacagttaagagtattatatagagaggacagcttct

SEQ ID NO: 54630 - DNA, 1342 bp, Homo sapiens
aagccaggagtttgagacgagcctgggcaacaaagcgagaccctgtccctacaaaaaaaaccaaaccaaaccaaaccccagagaacaaaattcgctgggaatggtggcatacctgtggccctagctactcgggaggctgaggcgagaggatcactttagcccaggagtttgaggccgcagtgagctatgattgcaccactgcccttcaacctgggtgagcgtgagactccatcaaataaataaataaataaataaataaataaataaataaataaataaaatcaacctccagattgctaattccttgatgttctcttcagatgtcaggatttttacctgtatactctttcatataaatgtttttatattcatgaatataaataattcaagaggacttgggtattgaaaagtagtaaaaataacttagataaggacttgaaggggcatttatactttggccaaatatataaagctaaaatgtctttctgtttgagatgtaaaagtaaaaacagttctggttgggtgtgggggctcacgcctataatcccaacactttgggaggccaaggtgggaggaaagcttgagaccaggagtttgagatcagcctgggcgacacagcaagaccctttctctacaaaaaatttaaaaagtagctgggcatggtggtacacacctgtcccagctacgtgggaggctgaagtgagaggattgcttgagctcgagaggtagaggctgcattgagccatgatctgacgttgcccacctgccagggtaacacagcgactccctgtctcaaaaggcgaaaataagaaaaccctaattctttgacacaagtaagttcactgttgttagcattgtgtaagatttagatttagacataaataacaaataattttaatagatttaatacaaagctatccttacggaaaaggtataactatgattttatccaggcaaaaatatgtgtaattttttttttgagttattctattctcttgcttggttcagtgagtagcaaaagtaaaagtaggatatttattggaattaaagagtttcaggtttttagtgcttgaatttcttttaaatatctgtctgaacatctatggtgattgggtgctatcctaccatcttttattagttttgactgagacaaggtttttcttcatattgtgtctttatcacaatttgctcctggtttgaccctttatactctataaaacaagtctatttttttttttcctgcatagctgtttgttaagtaaaaatggaagtggtattctagtggaggttttcatttcttgactaaatattctcagggtctttaaccattcctcacattgca

SEQ ID NO: 54631 - DNA, 1038 bp, Homo sapiens
tctttgagagaatcatgtctgtctggttggttgatgtatcggtggtgaaatttcaagcattatactgctttgaaaatgtcagagaaaaatttagcatgcttttcatagtagaaaaatttaaataccattatttgactttcaagattctgaattttatatagtgttagtgattttttaacatttaaattttcgaaagaaaaatatgcgatatcatcattcatatggttaatttaactcagctatgtggagacatataagaggagtctcatgtttacagatgagttgtccgagtttgttacctagtggtaaaatcatgtttttacatggtcatataagaaatgtaagttcagtttttaataataccagactcccaaagagaagtcattgtgttataaaataaatttaggtttggtattatcagaatgttttatatgattgtaaatacaattttacaatctagagttttgccagtaggcattagaagcctacagagtggttaagaatttgattgtggttgtctttactgaattgaaggacttgaaagaaaatgtgtgtccttgcctttttatgtgtgtctgttctattaaagattttcagtagaggatagtactcaactttcttggttaaaaactcataattttgagtagatgctacaattaatttaaaatgacatgtgctgtgtctttgcagttactatgaaatgatagcctacatatagtttaacatacatgtagtttgggctatatttgaggtatgttgtttgttacagtattagtttttaactagaagttactaacttgcctctgttatatgaaacttttatgtatttgtaatactagaataagaggtaaacattttagattttacagtggattgtttcatagaataggtaatctaaaattctggagtagggaaatatcaagggaatcttgatctgactggttgtcaggggtttttttctagatgattgtgaaatttttattctgttagctataatatagttgcatttagctttctattttaagagagaaaactcaa

SEQ ID NO: 54632 - DNA, 1003 bp, Homo sapiens
tatatttgtacccaagtataatttaaccttttcttttttttcttttttttttgagacagggtctcactctgtcacccaggctggagtgcagtggtgccatctcagctcactgcaacctctgcctcccaggttcaagtgattctcctgcctcagcctcctgagtagctgggattacagacgtgccaccacacccggctagtttttgtattttttttttttttagtagagacagagtttcatcatgttgaccaggctggtctcgaactcctgacctcaagtgatccgcccccctcagcctcccaaagtgctgggattacaggtgtgagccaccatgcctggcttaaccttttctttttgatttaggttcatctttttgacagaggttatgaagtaatacttttctggcatcattgccagaataggtctgtttttttcctgtgataaattattttgggctacttggttttttatgttcttataatctgtttcttttctatgttcttttctaagttctgtgactttttattgttttcttcatttttgttggctttcatgagtcaccttcctttagtaactaagactttccttctaattgactgcttttagttttctctgaaattggatatcagaataacacttgtcagaattatgtctcatgattctttagtgattgatacattgaggagtttatctttgaatgaatatgtgttagtgtgtgggatgtttgattgtgttttcttgtttgtatgctttccggtttaggggctgtgtttcatgtaagttaccagatctaaattctgaacagagaaacaataattatttccttatatatatggtaagaaagactcacttagcaataaaccccatctaaaacaattatttatctacaattttgacactaattgaagcttagcttttagttgcagaaacttaattttggtaattttttatagaagtgtacagaaaacccaacttttttccttctatactcactctgtctcag

SEQ ID NO: 54633 - DNA, 1001 bp, Homo sapiens
aaataggatcaaacttctatcttttaattactagtttgaactatacttggttacctcatccagtgaggacttacttcatgggcttttgggtttctatgttgagaaccctcatggagcagatcttggggactcagttgtcaggaattctttaccctgaggttaggttctgtaattgtagtcatgattatctgatttttatttgttacagaatcagcattataggtaagtactttgctttatttattgaatgaaatactttcatgttcattattttaaagaacatcttatttgtgaagaataaactggtgaaataaaactatggctgtagcttgatttcaaatagaggatttgaataatatgaaaagaatactctggggtattttagaatgcggtaggtatattaaagtcaaagattactaaggaaaactcatgcttggtgtaccttctcaactcaccagaaaaggctgtagaataatagccggatttacccctctggtctggcacaaagattaatgggaagagagaggtagctttctaaaacaggggtccccaaccagtccatggcctgttaggaactgggctgcacaccaggaggtgaacagcacctcctgtcagatcaacagtgaaattagattctcataggagcacgaactctattgtgaaccatgcatgtgagggatctaggttgcacgctccttatgagaatctaatgcctgatgatctgtcactgtctcttatcacccccagatgagatcgtctagttgcaggaaaacaagcttagggctcccactgattctacattatggtgagttgtataattatttcattagatattacaatggaataataaggataatagaaataaagtacacagtaaatgtaatgtgcttgaatcatcctgaaacaaccccatcacccagtctgtggaaaaaattgtccttcatgaaaccagttcccagtgccaaaaaggttggggactgctgctctaaaatatgtaattt

SEQ ID NO: 54634 - DNA, 1100 bp, Homo sapiens
cacctgtctaattttttgtaattttaattgagacaggggttcgccatgttgtccaggctgatcttgaactcctgggttcgagcgatctgcccgccttggcctcccaaagtgctgggattacaggcatgaaccacctaacctggctaggatcgcacttttgagacttttctcttttttcttttttttcaaaggaagcaaatcagaaatgagatggagtatcatgattagcatctcagagctaatttaaggaaaattgggagagggtgtttgatcatgtcagatctaatctctttcagtaaagtctctttcctcccccataccttcattgtctagagccaagagttggttggatataatgttggctctttttaatccaagttgccatcgctaaaagtagcatcatgacacctgtctggtgctttcaagtctcaagtaaatttctggcagtttgaaaatgatgttaaaaagcacttgggttttaaaaaaaggcacttgaaggagatggtttattctcctcctgtacacacatatgtacataccttgtcaaatgttacttctcttccttattctccctgtgctagaaacgttctccaggtaattgctttttgaaaccgaggttgagcattgcccagcctaaatatgaatatctctaccagtagggaatgaatacttcttgatagccagttttaaaagtaagttgttaatagaaaatactgagcatggcataattctttgtctagagccaggaggacataactctgtgttattctagttgaaacttttcctctaacctaacagtgatcaacagccttctatcctagtgttcagcttacagtttatctgtcttgtgtgcaaagatatcccatataaggtcatccgatcacttgtaaatgtttgcgaaagtattgtgtagaatcctagtcttagatgtgatttatagtaaattaggcattagaccagggaaacaaatctgtggatgttctgggtactagcttgatgcctctctagatgccatccctcttctctagcgcataaatccacagtgtgcttttatatatttatttttccaaatggagaaccccactgtgagaaagggacca

SEQ ID NO: 54635 - DNA, 3316 bp, Homo sapiens
atgagtggatcatgatgaccgtattgtagggacttgccatagtatggctgcttcccgatctactcgtgttacaagatcaacagtggggttaaacggcttggatgaatctttttgtggtagaactttaaggaatcgtagcattgcgcatcctgaagaaatctcttctaattctcaagtacgatcaagatcaccaaagaagagaccagagcctgtgccaattcagaaaggaaataataatgggagaaccactgatttaaaacagcagagtacccgagaatcatgggtaagccctaggaaaagaggactttcttcttcagaaaaggataacatagaaaggcaggctatagaaaattgtgagagaaggcaaacagaacctgtttcaccagttttaaaaagaattaagcgttgtcttagatctgaagcaccaaacagttcagaagaagattctcctataaaatcagacaaggagtcagtagaacagaggagtacagtagtggacaatgatgcagattttcaagggactaaacgagcttgtcgatgtcttatactggatgattgtgagaaaagggaaattaaaaaggtgaatgtcagtgaggaagggccacttaattctgcagtagttgaagaaatcacaggctatttggctgtcaatggtgttgatgacagtgattcagctgttataaactgtgatgactgtcagcctgatgggaacactaaacaaaatagcattggttcctatgtgttacaggaaaaatcagtagctgaaaatggggatacggatacccaaacttcaatgttccttgatagtaggaaggaggacagttatatagaccataaggtgccttgcacagattcacaagtgcaggtcaagttggaggaccacaaaatagtaactgcctgcttgcctgtggaacatgttaatcagctgactactgagccagctacagggcccttttctgaaactcagtcatctttaagggattctgaggaggaagtagatgtggtgggagatagcagtgcctcaaaagagcagtgtaaagaaaacaccaataacgaactggacacaagtcttgagagtatgccagcctccggagaacctgaaccatctcctgttctagactgtgtttcagctcaaatgatgtctttatcagaacctcaagaacatcgttatactctgagaacctcaccacgaagggcagcccctaccagaggtagtcccactaaaaacagttctccttacagagaaaatggacaatttgaggagaataatcttagtcctaatgaaacaaatgcaactgttagtgataatgtaagtcaatctcctacaaatcctggtgaaatttctcaaaatgaaaaagggatatgttgtgactctcaaaataatggaagtgaaggagtaagtaaaccaccctcagaggcaagactcaatattggacatttgccatctgccaaagagagtgccagtcagcacattacagaagaggaagatgatgatcctgatgtttattactttgaatcagatcatgtggcactgaaacacaacaaagagtatgtgtaaatatggtaaccatgaattctgctttgtttattattccccaagtttttcagtatctattcgtagtgtttttattacagccaaaattaatgttttcactaaaattttaggtttaatatgattttctcaactcttagaaaaactccaaaaaaagacttaaactcaactttacacgtgtgttctatgacaacatggtctttccagttctgatatttcatgtctcaattagaaaagacatggttggtagtgtttttgtttttttaatatgttttatatcatttttagttaatttatacaatggaaacacattgagttaccacagtatgctttgatttatagttctagatagcataggacaattaatgagtgcttagacatcatccagatatgtgaagtctggcaggcttgacatctacttttatcttacttacatttaattcccaattaaaattttttattaaaaaatgtgctttatgcatcatctttgactttgacttagagaagtggatattactattaacactatgacagtatattgtaattagcatattagcaagggttagtctactggatagtttacataaaacatttgacatagcttttcctgatactaaatataaaggaagactatcttaaaatattatcagctctcaacctttgctaagtcactgttgtaaataaagaattctgtatccaaatttttcacaatatttcttgcctagatttcctataaagtattcagggccataacacaaaagatttggagcttactatgtctagataatcctgaaaagaactagaacacacagtgctcatcataaatatcatgattagcaacaataaaagacagacttatgtaataagttaattacctttattgctacagggtaggcttttgaattaatatcacaaccagattatatagactgtacataaatactttgatttgaggaacatttctagtggttttgttgtgacaattgccagaccctggtatgtgtcagatcaaagtatcaaatcctggttgtgggacataatattttttttgccatgcattgtagatagtgtagatttgtatatggtaatacagtggtctttcagcataggccccttctgaaaagttttcttctgctttcttttgaaatactatcttaatattgtatttgatagttcatgtcatctgagcattttacaattttgtgaaaatgttaggagtctcgagtatttggaatatttgaagtccagttttagatagcaaaacaactcataaatgaagttttttttgtattagaaataagttgagttctgctgttcatatatactgtcagtttttttgtttgtttgtttgtttttgtttttcgttttttgagacagcatcgcacttgttgcccaggcttgagtacacaggtgcaatcatggctcactgcaaccttgacttccctgggctcaagcaatcctcccatctcagcctcccaagtagctgggactacaggcacatgccaccactcctggctaatatttttttgtattttgtagaggcaggttttcaccatggtgcccaggctcgtcttaatctcctgggctcgattgatcctcccacctcagcctcccagagtattgagtataggcatgagccactgcacctggcctagtatcagtttttaaaagtagacctgtttatctgcagtgcagggaaggagagcgtatgtcttaggaaaataccaaaaactaaagaaatgtgaatttttataaaatgatata

SEQ ID NO: 54636 - DNA, 1029 bp, Homo sapiens
atttaatatttaaaaataagtaatcttaaccctttagagtgccagatttggatacatgaaacaagtaagttgcttttcatgtatttcagtttgtgttcttttctttttatttttttttgagacagagtctcgctctgttgcccaggctagagtgcagtggcgcgatctcggctcactgcaacctttgcctcctgggttcaagcgattctcctgcctcagcctcccgagtagctgggattacaggcatgtgccaccatgccctactagtttttgtatttttagtagagacggggtttcaccatgttggccaggctggtcacgaactcctgacctcaagtaatccgtctgccttggcctcccaaagtaccgggattacaggcatgagccactgcccctggccagtttgtgttcttttaaaacatcatttgaagtttaacttaaatgttttacaattaaaagtggaaaattatgggacactcagtgtttgttacccatgaaagaaacagattgtaatcttcatgataatatattagcaaacgataattaaatgtcagctgttcttttaatgaatcccccaaacaatgaaagtttactactgtaagaaatgtgtttctaagttctgatttgtgtcttgtacttattgttcacttggttgctatgaaattctgtagaacatataaccatgctttaattccagggctagttttgtgattcttataagatttaaaaaaattgttaattaaaaatttaaaagtatgccatactttgagacaacactaaactcaggcaacttaaatattttacagggtactttctcacttaattcacttgtcagcaggcaggaacagggagattatttcctgtagtgtttcttttttatatgtggtagcatgttgctgtgtcttctataattcttccaaactttccactgttagatagttctagttgaagcaaggagaaattgtgtttgatttttaggggtaggagtcagaatggcatttggaggtttacatgagaagggagactgtt

SEQ ID NO: 54637 - DNA, 3322 bp, Homo sapiens
gttcatcatcttctttaatccttttttttcattattttattttaaagaaaaatttaggaggttctagtattcttcatggctgaagctgagagagtctgaaaccctgatgcttaagctccattctagatcatagctccaactccttcaggatataaggaaaagagattatatttccacaatgatagatctttggttgtacaggtaagttatttagttttgcagtagtgaagacagctatagtttgacttcttcttcttttttttttttgagatggggagacttgttatttttccatacatcctctgggtggcaacttgtagtttggctggctgtttataggagtatggagctgcagggaatgggttaggaatgaaatatttccctccctttttttttcaatggggtataaatgaagtgactgattatgttggaattttttactcaggaggcattgtgaaattccttgacttccttttcctgatcgtcttttaaagtgtgtgttcatttacttttgtctatctgtctgtctgtctgtctgactgtccgcttatctgcctgcctacctacctacctacctacctaccgaccatctgtcatatatcagtttctcttaatgggaaagaaataagaagtctctttatgtaaaacaatgcataatagagttcccagacttcaaagaggtgactatttaagaaccttaagttgaattgcatgggtgggttaccagccaggttttactcttctacttttaacattatagatatggtggtaattgcactgctgaggtattgtcttaaaataattatatgacaaacatggcctcaacgttattaaatagtttatgtttagacaactagaaaaagaatcatattggttacactttccagttgcatttgctcttttttccttttactttggtttgtctatgtgaatatattctggtatcatgaccagtttactaaaaatttttcacttaataaaactaaatattatgataataaatatcagctaaaccattggtgtgatggaagattgccagctgctcaattcccaaaataaactgtaccactttggtgattatagtaggaacaaaagcttataggcaaggtctttgaaatatctttttgaaatttctttctcttaagtaaatagctggagaagtgtgtcattaggtgggccttttttgtttaataattattatctgttttagttcttatgcgtacagttctacaggtatgatcataggagctggaaatttatgacctgaaatgtagctgataatgcttcaaagagtgtttttcagaatcctatagttatatttgggtaacagtagattcaaatttatgagagggcaattcagcagcaaatatgtgggtaggatatgtgaaattataggtaggattgagggcttaatatgaatggacaagttgaaattcggttgactagtccttctcagatatggcctccaagaggatgagaatttatgaaggtggggaagagagggagggagtctggttaattctagttactgaccacactcttttttctctgaattctagaaagtgcaaccattcattatttggtagataacatataggaaaaactccagtgtagttgttagttagattgcgttttgcccatatgaatatgttaattaatggcttcccttatttctaaaactagattgattgcatttctaatttcagatggatgctggctaaggtttttaccatatacctcttattttgttagccaacagggttatttcctgagataatttgtaaataagttcatttttattccttaacaatatttggcagaaatataattttgtactctaagcttctttattgtattcttaagaaacattttgcaatgcagctaaaatgaggaaaacaactgctttagtctataatattttgctaagcttggcaaaacaatgttgagacttggttgagataatacagactttttattttttattttctaacagaaagggtctcactattgtccaggcagttctcaaactcctgggctcaagtgatcctcttgcctcagcctcctgagtatctgtgactgtaggtgcccccacttccctgcccctgcacctggctaatctagacatttttggtccctttttattaactgaattttgcactcagtttattagataattatagaaagtgtgtacctttatatatgcctatccaaaatagaaaagatatgaagaaaaaggttagaacagaaaaaaatgatcagagggaagattagcaaaattttgtttaactctgatcttaataattttaaccagtttattacctcaagtgcacatcacatgttaatttcaggtaagattttttatagtcttccatttggtgcttccttggtcttatttataaatttttttattattaggatccagtaagaaattaaagggtattttataaatagttctaatttagtttgaaacttgatgactattatcttattagaattctgtctgggttcactagcctaaggcagtgcttctcaaaccctaatacatacatgaatcacctaggagcctaattcgttggtaggtctggggcggagcctcgtattctgcatttctaacaagcttccaggagatgcccgtgattgagctgcaagagcctgaggtaccacaaggatccttgttataaaacaagttctctttcaatacagcccaatagcacagaatttgacaatcctagcactagggctttgttctagttattgagtgaaataaaagcatttttagggtacagaagaaatggaaagaaccttaatcttttatattaatcagtgttttcatattttatttaacttttgtattaatcagtgttttcatattttaatcagtggaatggtgaaaaattaagataggccttactatacgtgattttttttttttttttttttttttcaagacagggccttgctcccatcacccaggctgaagggcagtcacatcactacacccttgacttcccaggctcaagtgatcctcccactcagcctccctagtacctgggactacaggcaggcttcactacacctggataaattttttgtatttttagtagagacagggtttcgccatgttgcccagtttggtctcgaattcctgggctcaagtgatccacctacctcggtttcccaaagtcctgggattacaggcctgagccaccatgaccagcttataggtgatattttatagtaaagaatatatgtataaaaaaaaggtttttagtactactaataataggttcatttcatccaaaatagtctctctttgagaagt

SEQ ID NO: 54638 - DNA, 1518 bp, Homo sapiens
gagtaattgtagacttaaggaaaatgacatatgtctatattggtggtaagaaaaggaacctgaggagctcttcaatttgtaagggtttaagtatggaattaaatttagaatgtttgtatgtgggtactccctgagaagaacttggaagtgttagccaatcatcttagtttgttgaagacacatatttcacagctaaatgtaaggaattacttgtgaagtttagtagaaaatgaagtgtgctatataagtgtttggaaatattaccaattttattcacaaatttgtaaacggtaacacatctatagtgactatattatggtttctcttcacagatatcaagttattctagtacaaccatataaataaataatacctgaagtctcagtgtaacatggacaattaacagtgatgacagataaatacagacgcatggggatcaaatactaggcaaaacgctttttaaaaggtaagaaataatgtaatcttaattaaggccatgtggggtttagttagaagtaattgattgaagtttctttttcagtgtatcaggcttttaagaaacactgcaggatcctgtctatcttaatgctgatagagctcagctgtaagtatcagttctgtgaaaataacagttgcagatgttcttgcctgctaaatatcgtagtggataatcttcctatagtgaactctattcaaatagagtagttatgtggttgattagaacttgatagagtgctactagggcacattccagtatgctcagagatatactttaagttgtagatgttctttgcttttgatgattgctactaccatcacacactgtaaaacgtaatgttttgccatgtttgtgaaaggcttcagtgtttggtacaaaggagttgtcacttggagtctgttataagaagagtgggttttcaagtcaagggttactttatgtaggatcatgttttcgctgagcttctccccatgttaacttagaacatttcttaatgtactgtagtattaaatggttattagacaattttcctaccttgtgctttttaaagcatttccagggcatgtttgggagaggtggcatctatagatattagatattactatccctattctctttctagctgactagagcagtaacctatttttattatgcagtaagtctgcctagtaattacaagattttgtaattatatcagtctttaagttgtaatgctttccccaaaatgtatcactattataatatctagttttatgcttataataaagcgacagtttctgtcataaacatctgctggtcgttttcttagtcctcttccttgttttcagatgggcactcatagtaacccatttagcagattgtacattctctctttttttttttttttttgagactgagttttgctcttgttgcccaggctggagtgcaatggggtgatcttggctcactgcaacctctgcctcccaggttcaagcgattctcctgcctcagcctcctgagtagctaggattacaggcgca

SEQ ID NO: 54639 - DNA, 1137 bp, Homo sapiens
tgaggtcaggatttgagaccagcctggccaacatggcaaaaccccatctctactaaaagtacaaaaattaaatgggcgtggtggcaggcgcctgtaatcccagctactcaggaggctgaggcaggagaatcacttgaatccaggaggcagaggctgcattgagtcgagatcgcaccgttgcactccagcctgggcaacaagagcaaaacgccgtctcaaaaagaaaaaaaaaaaaaagaaagttatttctgtctttgaccatatctttatgctttttacaactgacgttgaatgtctctttcttataaaatcatttaaaatcatagtatagtgcctatatgtgatactttcacttacaacaagtgaagaatcaggtaataaatatgactctgttgtatgaccttccttttgaattttttccaagctcttataaaactaaaaaataatttgcctgagaatttagggattgtgcttaactttgaacttcattgttttattttaatagtaagttgtgtggcttataccctggttatatcactagggctgtatcttctagtgagatttacgtagtcttttgaagtgattacatgtgtgctgtgaatctgagatcacgtaatctatttaacacagtagtaccagtgttaagactgcaagaagtaggaaaagtaattcttttcagtgaagattggttttgggtttgctttggaatgcttgaatagtcaatgaattttattagtacatgaaaacaagcaaagctctgttccaagggaataaataagatggctttaggaataggacttggatagtttgttttctattttgtatgctttttaaaagacaaaatgctgttttttaaacttctagaagtaagtaactgtagttaaataattcaaatgaaaaaattactgtgtattgtcataattcaaagcagtgtttctgctgcaaaaagcatataacagttttgcagaatgcttgagtttgaaatgtatattgaatgaggtgaagaacacaatacaggggctacaagagttttggctagtttaatttccttgcttttttgttacaagagatgtcatgacaatttttaaacttaaaaaatacttagatcggttttttctttttttttttctttgttac

SEQ ID NO: 54640 - DNA, 1107 bp, Homo sapiens
tttaagcgattctcatgcctcagcctcctgagtaggtggcaccacaggtgtgcaccaccatgccctgctaatttttgtatttttagtagggatgggttttcgccatgttggctaggccggttttgaacccctggcctcaagtgatctgcctgccttggcctcccaaagtgctgggagtatagatgtgagctgctgcagccagccttattatgtccttatggtagaaacactatgtaatgtataatgtgttgccatgtatttttttccgattcttattcactgatatgtcagtagcttgaaattggctgtggtggaagtatatataccacaaacattagtaaccctataaactaggaactacatactacttacccttcagttattacatgttttctggcatacccttgcctatggatgtctttccctgttttactgatcaatactcagctcaagatttaaggaggtcccctgcagattatctgagatcttgcctctcctttctgctctctcctctgtggtactatgttctgggagactgtagctaccttggcctcccctaaactcctcacttcattatcttaactccagaaaaccactgagcttgcttgggacaccttcctttctctgcagcttagaaattctccagtaagtaaactggggacaattgtaggctttacctcatttattttttctctttcattgatcactgtcctgtgttgtcttgtttcttttgtcagaaataattttcatactttttttggtccagatttttagttgtttcaggtgggagcataagtttcatccctgttactctatgttggcaagaagcataagtctcttggaagaattttaggtaggagaatgacatatcattctgtagagcatgcatttttaaaggataagacttaacgaaagcagagctgggcgccataactcatgtctgtaatcccagcactttgtgaggctgaggtgggaggatcacttgagcccaggagttcaggactagcctgggcaacatggtgtgaaaccctgtctctacaaaaaatacaaaaattagctgggcgtagtggcatgcaccagtagtctcaactacttgggaggctgagg

SEQ ID NO: 54641 - DNA, 1311 bp, Homo sapiens
cacttaatggaccattcacaatctatgtaatgtatgaagaggaaatggggagaagagaaagagaagataagagaaacttgatatctatagttccatgatgatactgacaacctcagagttcttgtctgtggtggttatttggattctggaaaactactgtgtgtttctgttgtcttgatctgaatgcctctcaagaatgacactttcttttaagagctttatctctacaagctatgtgttttaagaactctggggatgaataatcacacagtgtgctgacttaggatatcgttgtgcataaggctgtttttttttttttgtaacacaaaaatatctgaagaatatgtttggcatagtttgatacagtttttggttttgattaattaaataattcactaataataaagatcagagcttctgataaattcttgtttttgctggtagtttaatctcctaaaagttgaagagaattgctgatatgaaattgattcttaccaacaaggaagaacacttagatatagaattaaccattatcgaacatctgttttgggcaaatggactgtgtttatagtcacttttttgtggtgtggtaaaaagaacatggacttggaatcagatagactttgatttaaatcctggctctagcactgagagcactgtaactttttttttttttttttttgagacagggtcttgctctgtcacgcaggctggaatgcagtggtgcgatcatatgagctctataattttaagcaagttacttatttctaagctttgttttccttattataaatagatatggtactttctacttatatagagagtatataatgtacttgatataaaatagatgctcagtaagtgctctttgttattgatgtggaaacagaggctcagagaagtttgtcacacagctagtaactgacaaatatctgactccaaagcccatgcttttccatgcctcccagctagaaattgaaatgatgggaatcaaaagacagtgatcattctatgctgtcttggagtttaccttaggtagcaattcccagaaaagcaggtttcagaaagttcagaaaagaaactggtaatgaccacagatagtttaagcaatcaatactgataggctcttaaaaatgaaacctgttatttaaattacaaaaaaaattccattggggaagaaaaacgtgagtaatctaaagaaattaatatgacttcctcataagtaaattttttcaaaagaaaaacatatcaaggatacccattagccaggtgtagcggctcacacctgtaatcccagcactttgggaggct

SEQ ID NO: 54642 - DNA, 1054 bp, Homo sapiens
ttttgagcctaggatttatacagtatgtattgtttttgtgtttggccttttttgctcaatgttatgtttgtgagattcagctgttttattgtgtcttcatcctgttctgatacgagtaacctgagaaatcctataactcaacctgatttgtaccttgagatctcaacacttagacatttttctcatggcattcatggttttcaagaactcctaggaggggacatcaaataaaagccttctttgttttaaactctgtggtagacctttttttgtgttttaatgaccttttttgtgttttattgctatttgggtaaatagtagattttaaaatttatgtcactgatggcttatgcagtacctcagctgcttttttttttttttcctacttaaaaattttgttttaaaaactatggtacaggattcctggccagctaatggctttttggacttttatgacttggtagcttgcttttcattctttgaattcctcaagcagtgattcccattctaatttttatgataccatgtagtatcttcagttatttcaaagcatgttgtgagcctccccaccaagaaaaagattccaatttaagtttaagccactttactttcaaaatacttaacatttatgaacagtacaacttttatatttatgaacagtacaacattgtggtgtgtagattataaaatcaaataggctggtaaaaaattgggaatcagctaagagacttacctgcttattaacccctttcaagctagcttcaagtgtaaagtgcaacttttatttgtgtgtgtgtgacacagtctcactctgtcacccaggatggagtgcagtggcgcgatctcagctcactgcgacctccagctcctgagttcaagcaattttcgtgcctcagactcccgagtagctggaattacagccgcctgccaccatgcctggctaatttttgtatttttagtagaggcggggtttctccacgttgtccaggctggtttcgaacccctgacctcaggtgatctgccctcctcagcctcccaaagtgcagggatcaca

SEQ ID NO: 54643 - DNA, 1063 bp, Homo sapiens
ctaatgtctcagaagtgaatttacagtatacctttgttttttcgtattcttaagtagtatttggattttatttagtagttgcagtactaaataaggagtggggagttaattacaaaacgaatcaggtgactagttaatttattcatagtttgttttttaaaactacaaaagtgtttttttttcctatacataatacagagaggtatatagtatagagtaacacagtgcttgtttcacggtaccacaaagttccattcctcagtcttaaatctctgtaaccagcctttgtggttgctgtgtatcattccagatatttccatattttggtttagtttttgtttcttaaatgaaggggagaaagtgttgttttaatggggtaccaacacaatattggcaatcagtaaacattttttaactaaattaaatttttatttagtgatatatgcctgtttgtcaagacttacgtatgcatacttacgcagattttttttgtttgtactgatttttttggtagtataatcttgtgaaaatatcacaagtaacttatttttgcagtaaagttgatttattgtgcttggtagctttgcacagaaagaaagtacatgtaaaacaagatttaaataaattaatgttttatcacttgagttttatatttttatctttaatgtgtgttatgtatttaactttatatattatatattctaaactgtaacctaactatataggagtttttcagacgttttaaaagtttatcactgtgattaaaatgatagtttgaccatgcaacttagtgatctcaattggagagtggtagacattagtagttagtacaaacaaaggtatatatacttgaagttgctaagcggctatcattttgtaagtgttgtttttgtaatttccccccgccaaacctaccagtaataatatttatcagaccagtcacataagagaattgtccactctttgggcaatgtggttttttgttgtaacagtgcaagtagaaatgttgaggaatagaagtgagtgttgagaggtatgatgttggaaagaggaaaaggggaca

SEQ ID NO: 54644 - DNA, 2080 bp, Homo sapiens
cttttacttgtgagtgatttgtcactgttagaaatatgttatcattagtcatctatagtacttttttattcaactgaagaatgtaatccatacattaactagggcaagtaatgaaaagcagccactttttttttatctgaggaaaggtcttaaggctgttgttaagagcaaagcaaaagcatctctgactttttaagacaagccatatgtttcagcttataacaatatgggctggtagtctgcagattcatgttccagaagttctcaattatcccgagaagattcatgctggggggtacattatgaacgcttttgcaatatgaatatataggtttgtaaacattatttcttctacgtaattttaaggagcagattctggccagatttctgaagaaacatggaattttctgcagtctatttatggtggagggcctgaagttatcctgcgacctccggttgttcatgttgatccagatatacttcaagcagaagaaaaaattgaagtagaaactcggtctttgtaatttttaggatgtagagagttctaatgaggaatcattttcatgtgccctgacatgtacacatgcgaaaacattcctaaaagcgtgtttatttgctttattttttttcatcatttatcccatttatttcttcttagtgggcattatggaagaatatattaaaatgtgtaatataccacaggttggtatatttagttttaaatacttaccataaagtctttcagtgtaatttttttttgagacagagtcttgctttgtcacccaggctggagtgctgtggtgttacctcagctcactgcagcctccacctcctgggttcaagcgattctcctgcctcagcctctcgagtagctgggattacaggcacctgccaccatgcccggctaatttttgtattttagtagagatggggtttcaccatgttggccaggctagtctcaaactcctgacctcaggtgatccacccacctcggcctcccaaagtgctgggattacaggtgtgagccacagcgcctggcccagtgtaatatttttgaaagaggagggacaattgtgaaatcagtaggttatctttaatctttacactacatgcagatccatagtatcctttgtagtgttgtaaatacttttgctttgaaaactttttcattgtcctaaatcaccctgactctgaccagtctttcagttctccaaaagcccaatttaattgtatagttttgtcatggcttcatataataaagagcctattttaagttgaaagtagtagtcagaaaattgttaatttcctaaagctcaggaaactagggtgtcactttttttgcactgcagcatatacactaactagcttattaaaatttacaaaatgtctttttgaatgtatcaaggatatatttagtttgagtggaatttgtcagcagatatcagtaacttattgccgcttatattgtacaatgttaaacttcaattcctgtaacctggttagtattaatgtcagtgactaaaaaacttagagttagttttagggcactttttattttgagagcatgaagtgtggaatgtgtcactacgattgttgataaagctgaggccacttgcaacttgattttttaaatgaaatagataaagtctttttgaataatatagtatgcactgctatttgcttgattatgtaatgtcaaaagtttaactatattccaagtacaaaaacatactggattacattgaggatgttgaatagcattcatgatggctttgttttggtttggggcagctgtcaccagctaaagcaatgttgttaaaattagctcaataaaaatgtctttaaaatgtaaaacttgaatgttgaatttatttgatagatgttaaaggtaaaaggtgcaaagtttgttaatattaataccttcttgctgttcctattttattttatttatctattcttttgagacagagtctcaccctttcccaggctggaatgcagtgtcacagtcttggctcactgcaacctccgcctcccaggttcaagtgattctcctgcctcagcctcccaagtagctgggatt

SEQ ID NO: 54645 - DNA, 1062 bp, Homo sapiens
aggtcaggagtttgagactagcctggccaacatggtgaaaccccatctctactaaaatacaaaaattagccgggcatggtggcaggtgcctgtaatcccagctactcgagaggctgaggcaggagaatcgcttgaacccaggaggtggaggctgcagtgagctgaggtaacaccacagcactccagcctgggtgacaaagcaagactctgtctcaaaaaaaaattacactgaaagactttatggtaagtatttaaaactaaatataccaacctgtggtatattacacattttaatatattcttccataatgcccactaagaagaaataaatgggataaatgatgaaaaaaaataaagcaaataaacacgcttttaggaatgttttcgcatgtgtacatgtcagggcacatgaaaatgattcctcattagaactctctacatcctaaaaattacaaagaccgagtttctacttcaattttttcttctgcttgaagtatatctggatcaacatgaacaaccggaggtcgcaggataacttcaggccctccaccataaatagactgcagaaaattccatgtttcttcagaaatctggccagaatctgctccttaaaattacgtagaagaaataatgtttacaaacctatatattcatattgcaaaagcgttcataatgtaccccccagcatgaatcttctcgggataattgagaacttctggaacatgaatctgcagactaccagcccatattgttataagctgaaacatatggcttgtcttaaaaagtcagagatgcttttgctttgctcttaacaacagccttaagacctttcctcagataaaaaaaaagtggctgcttttcattacttgccctagttaatgtatggattacattcttcagttgaataaaaaagtactatagatgactaatgataacatatttctaacagtgacaaatcactcacaagtaaaagcttaaatacgagtcaaacttaccttgcctaagcatcacattaccacatttagtgactgcaatcttagtattgtcaataggacctggagg

SEQ ID NO: 54646 - DNA, 1051 bp, Homo sapiens
caggagcagtggctcatgcctataatcccagtactttgtggggccaagacagcaaatcacatgaggtcaggagttcgagaccagcatggccaacatggcaaaaccctgtctctactaaaaatacaaaaattagcctagcgtggtggggcatgcctgtagttccagctacttgggaagctgaggcaggagaattgcttgaacctaggaggcagaggttgctgtgagccgagattgcaccactgcactccagcctgggcgacagagcaagattttgtctcatacacacacacacacacacacacacacacacacaaagggagaacataactcaacagaactgtagtgaactgcctgaggtcattcaccattatgcacctagaacacttgaaatctattacaactctttcatctaatcattttattaatatcatataactctgataattgtcaggtcttcatctttatcctagatcaatttgaaaagcatcacttttttacccgaataaaaatttccaattcagtttttcttcttttttcaattttctccgcctcaatttggcaagtatgacaaatgtacagatggttgacagctggtcctccaccatacctaaagcatgaaaaatttaagaattaatgttctaggaagtttgtttctaacatttaagtcagtggccaaatacccagtaaaaataaatcctcttaataaaattctcaaagtaatataaaaatcaaaaatcatataaggacttgttattatgtttattaaggtcagtgactttatcagtttattgcttaacctgctttatctatatttcaactttcccttatttctgctccaaaatgttagagccaacaacaaactaaaagaagtggtttcaaaaagtatcatacaacatataaatcttagttacacatcacagtcatagtcaagttttcatcagatgaaggcctcccctggcctctcaagtaagaagcattcaatgtatgaattatttttaatatttaattaaagaaaacataattagtaggaaaactgtggtggaaaatgttt

SEQ ID NO: 54647 - DNA, 1025 bp, Homo sapiens
gacggggtttcaccacattggccaggttggtctcgcaactcctgacctttattttaaaacattttccaccacagttttcctactaattatgttttctttaattaaatattaaaaataattcatacattgaatgcttcttacttgagaggccaggggaggccttcatctgatgaaaacttgactatgactgtgatgtgtaactaagatttatatgttgtatgatactttttgaaaccacttcttttagtttgttgttggctctaacattttggagcagaaataagggaaagttgaaatatagataaagcaggttaagcaataaactgataaagtcactgaccttaataaacataataacaagtccttatatgatttttgatttttatattactttgagaattttattaagaggatttatttttactgggtatttggccactgacttaaatgttagaaacaaacttcctagaacattaattcttaaatttttcatgctttaggtatggtggaggaccagctgtcaaccatctgtacatttgtcatacttgccaaattgaggcggagaaaattgaaaaaagaagaaaaactgaattggaaatttttattcgggtaaaaaagtgatgcttttcaaattgatctaggataaagatgaagacctgacaattatcagagttatatgatattaataaaatgattagatgaaagagttgtaatagatttcaagtgttctaggtgcataatggtgaatgacctcaggcagttcactacagttctgttgagttatgttctccctttgtgtgtgtgtgtgtgtgtgtgtgtgtgtgtgtatgagacaaaatcttgctctgtcgcccaggctggagtgcagtggtgcaatctcggctcacagcaacctctgcctcctaggttcaagcaattctcctgcctcagcttcccaagtagctggaactacaggcatgccccaccacgctaggctaatttttgtatttttagtagagacagggttttgccatgttggccatgct

SEQ ID NO: 54648 - DNA, 1927 bp, Homo sapiens
cagtgaaaggctgtatatgtagaatgattctttgttcagaaaatgctaaatcatttacttgaagagcaaagggatatattttgttttagaaagattaattttagtgccgggcacagtggctcaggcctgtaatcccagcactttgggaggccaaggcgggtggatcacgaggtcaggagttcaagaccagcctggccaagatggtgaaaccctgtctctactaaaaatacaaaaattagtcaggtgtggtggcaggtgcctgtaatcccagctactggggaggctgaggcaggagaatcgcttgaacccggcgggtgggggttgcagtgagcctagattgcgccactgcactccagcctcggcaacagagtgagacgccatctgaaaaaaaaagaaaaagaaagattaggtttaatttaaaaattaggcattgatggtctgaattaagtaccaaattttctcccaaagtagctaataatgaaagtattactataaaaatatttgtttttttttagcatcttataaaagaagatgctagcttctgaaacagaagcagattaattatttagcttgatcttattaacaaacatttgaatgcttactgtgttccagtagttatgtggatacctgtaggtaagatacagtttcatccctatgagtatataatgtatttggtggataatacaaagtatatttctcttgaaattcccaagacctaataaagatagtgttaatatgtgtgttaagtctaataagaagaaaaatccatctactagtaatgtagtaaaatgcatattgaatttaactaatcattgtccttaataggaagagcagcgaagaggcacaaaaagagaggagaaggatatcaaatttattgaacataatggaaccaagcctccttcagttttatatttctcgacagtggcttaataaatttaagacctttgccgaacctggccctatttcaaataatgactttctttgtattcatggaggtaagaactcctgtaatgcaaaccggtagtagaagtttgctgtaaaataatttgcaaattaggagagccaagaattttcctctcccacttatttcccatttccccacctgcattcaaacttaatgtgttttaattccatatggtttcagaaattcacccttcctttttaattgtaggtaatctctagcttctttattgaacatatatttactgagtacatgctttctaaactttttgctagtgcctaaggacactaaaaatcctttttcttctgtgaaagctctaatttcatagtagagtaagatacataaacagctgtttacattacagtgagctcctctattatacatcatttttcctacctgaggcattcctgtgctggtgattttatctatcgactatattggtggttcttaaccccattgtctaaatgaatagctggcttttttcccaagtatggaaatgtatctgggatttaagaaaaaaaagcctcataattaaatataactttggcccttgtgagattggctgtgttaatgtttatttctacaataaataggacctttgtgtgatgccaattaaacttcaaggttgaagatgggatattcatggtaattatgtttgtagtgaaaccagaagggatagggatacctgtattggacatagaaattttaaggtgtatgttcatcttgaggaaacacaatcaccaaaaatgctttataattaccgttcttgggagagagagtgtaagaataatgattgagctgggtgcagtggctcacacctgtaatctcattgtctcaggaggctgaggcaggaggactccttgagccctagagtttgaggttgcagtgagccatggtcatgctgctgcactccagcctgggtgacagagtgagaccttgactcaaaaaaatggccagacacaatgg

SEQ ID NO: 54649 - DNA, 1951 bp, Homo sapiens
ctattgatgagcatacatgcatttattgtgtttacatcaacacaaatttgattctaggtgtagaattttttttggaagtagcagcatcctgtttaaaggatggtgacccatcattggacaggcacatattatccttcgtcatctattttggttacatataaaggtgagaagttgctcagcaacaagaattggtaacacctgcatattctcccaggctgatgaaatttgtatactgggaatctgttgatattcacaggtacaaagctgtgaatgtatctcttacatttggtcatatatggtttgtaaatatttttccatgtttaggatgggactcagatactaaaggtagtatcaaattcatagacaataacaaagcatacattaaaatcatcatgaattttttaataacacttcttcaaagtttctttgagcttttcttaagtacagttttactttagtgcaatgatgaatatgaaataacatctcaaaaacaaaaagaagatttcaattattgtgttagaatctcaagtcaaatctaagaactttcaatcgggtcgttttaatgtaggttattttggtactaaatatttaagtggaattatcaggcatgtttttagctatttaaaattagatgccagattttgtctcacccttttaaaaaaatattttaaaactaccatcaaaggtcaattttcaaaaataaatacaatagtgcttaagagtttggacctcaagatgcagtggctggatttggggtgtttaatgctgcagtgtctgtgattgtaatggggatgctaatactactgcacaggacttacgtgaagatacctggtacagagcaagtgtgttttgttttttgtttttgtttttttttttgctattatgactatgaaagcagttcaatttgcgtgtttttttttgttttttgttttttttgcttatttaaacatgctttgatctttagagtctaaaatctaaccttggaaatgttttactgcattatgttcatcccatttttaaaacacaaaacaattttaggtgtctgtaaccctcgagacctttcaagatctgtccttgccaattcctggcaaggaagaccttgctaagctgcattcatcaagtcatccaacttctatagtcaaagcaggatcatgtggcgaagcatatgctccacaagggtggatagcttttttcatggaatatgtgaagaggtatgtatttattttctttgtattacatgattgttaaacctgctgtttctgctgtactggcagaacacttccttttttttctatcaatgatgtttcaggtttgttgtctcatgtgtccctagctggttttggggtccagtagtaaccttgcaagattgtcttgctgccttctttgccagagatgaactaaaaggtaagaaatataatatctatggctaaatttttgtaggtaaatctaaaatactagtgggactaaataataaagtgtattcataaaagctcagttttaagacagcttaatagtacattcacatattggcattcggttagtgtctaccttgataatataaatataacaagaaaaatcacatcctgaaggaattcatgtgaattcctgtagtataagacaaatgataagtgaaatgttttaaagctgttctgagatccatagaagggcaaactcaaccaaaataatggacttatttgtgtgtctgtaattgtgaactactccatatcatttaaggtcattcactatttttgtgtgtctagcaccttgcttggacatatgacaggcagtcagtaagttttgttcaatgaataaatggaaaagatattatttgaggtaggtcttcaatgttggcaggagttaagggaggggaaggtaaacagtaacctgattcatgagcatagattaaaaaaatggaaccttgtttttctgtgctgggaggtcagcatggggc

SEQ ID NO: 54650 - DNA, 1031 bp, Homo sapiens
agaatatatcactgatgtccattcgaatgacctgtctacaccacagatccttccatcaaatgaaggtgttaatccacgtttatcggcaagccctcctaaatcaggcaatttgtggccaggattggcaccaccacacaaaaaaggtaaaacgtttctcttattcagtctcttttgctttgggtcttagtttaaaatgatggttttggtacttgataatttaaagtgttaattatgaaatatgatttgatcttttaaaattgatagcataattttacatagacatgattaaaaattttgtgtgttggtactctgcttttaaaattttacatacagttgaattcactttttcttgtatagagctttatgaattttaacacttgcagcatagattcttgttaccaccaccacaaacagaatacagaacagctctaacaccccaaagaattcctgcatagtactactttgtaatcagatcatttctctattcctatgttctggcacccttgatcctcttttcttattgttttgccttttcctagaatgtcatataaatgaaatcatatagtatgtagtcttttgatttttttaaatcttttcatatgtagtcttttgaaacaggtttgcctctcaggataatgcatttgaaattcagatatgttactgcgtgtctgaatagtttgttccttttactaccaagtaatgtttctttttttttgttttgttttgagatggagtctcactgtcgcccaggctggagtacagtggtgcaatcttggcccactgcaacctctgcctgccaggttcaagcagttctcctgcctcagcctcccgagtagctgggactacaggtgcacgccaccatgcctggctaattttttgtatttttagtagagatgggccatgctggtctcgaactcctgaccttgtgatctccccacctctgcctcccaaagtgttagaattacaggcatgagccaccatgcccggcctaatatctcattttttatgggtataccactgtttatttacct

SEQ ID NO: 54651 - DNA, 1164 bp, Homo sapiens
gtcatgccacaacactccagcttggacaacagaatgagaccccatctcaaaaaaagaaaacttttatttacataactttttggaagttaatgcatctcatttatctagtgccttatgctctccaaactggtatttgctcaatatagtgctgtaccttcatatataagtttgtaatgacattttgtatattttcccttacgtttctatatacacatgtaatgaagtggttaacattatgttgctgatatattaggatgctcaagaattccttcgatgtttaatggatttgcttcatgaagaattgaaagagcaagtcatggaagtagaagaagatccgcaaaccataaccactgaggagacaatggaagaagacaagagccagtcggatgtagattttcagtcttgtgaatcttgtagcaacagtgatagagcagaaaatgaaaatggctctagatgcttttctgaagataataatgaaacaacaatgttaattcaggatgatgaaaacaattcagaaatgtcaaaggattggcaaaaagagaagatgtgcaataagattaataaagtaaattctgaaggcgaatttgataaagatagagactctatatctgaaacagtcgacttaaacaaccaggaaactgtcaaagtgcaaatacacagcagagcttcaggtgacaatttagtagtttgttcatgaaaatgatagtatttcatttgtagacatgggtgtttaaataattgttactttgggtatttctaattagaattatagtttagcagtatttgcatgtgagtattagtcataaaattatagaacccgaggataaaaggaattttttgggtcatttaattatataagaaattaatcctccttttgaagtaaacatttcatcagatgtcttttgtgtagtcatgcagtaatctaaaaaattgggctccccagaattttctcttttattttaagcaaattatgttgcgatcctggaaaaaagcaaataacccaaattgcaattttctaattatatacactagtagatttagattgttgtcattggagtcacatcagatgtgttttagtgtagaagttgaattaactatagtgagccctgctgtgatagattatgccatgatactagtcagtgttcctttgagaaagagcatgtg

SEQ ID NO: 54652 - DNA, 1253 bp, Homo sapiens
cttgaaagttaaatttttatcctgtttagtttgggcatttcatataaatctgaaatttagatgacatggttgactttatataaatttgaccatcattggaatatggttgaaaattttagatcgcccaggggaaaaaagtatatagggaaatgtcataggatcaagtcccgaggaatccttacgtttacatgtctgaggccaaaaagagcaatagagagggaaaaggagtttcaagagctaaagaggaaaagtaggaaaatgcattacaatagtcctgagaatgtttgttcaagagtgagggcatagttgtctgtggcaaatgttactgagtggggactgaaaagtgtatctggcagcatggaggactcttgatatgctggggccaaatctgatttgaatggattgagctctttatgaaggaatgaaagtgaagctgtaagagggatcaaagaaagaaataacggctaaaggaatgtatgtgttgtcagttaattgaatgactagaaataatcagtattagctttgactccactctaacatttttctctttttaaaattagcccacctttgacacagttttttcttgattgtggaggactagctcgaacagataagaaacctgccatttgtaaaagttatctcaaactaatgacagagctgtggcataaaagcaggtatgtaacttaatatactcttcttctttattaaacttttaaatgaatattataaatatttaaaggttgcaggtccatttatggagccggaaaaaagtagaagagagatagattagagacagctttgtttcaggcatgttacatttgaagctgaatgtaaggtgtcatagaagtttagaagcagatgaaggtgtcatagaagtctacaagtatttggatatagtatatagtgttggaatgttaaagctgctattactggaactttagagttttgcattcaggagcagccattctcacaatgataaaatcagaccctaaatactatatgaatattttcctgcttatgtttatttgttctaaagtttagcattaggatcatagtttgctgtaatatgttaataattttgttttagaactattcaggaaacttgcatttttgaaaagtcatggggtgaagcataatcatttaattgagggaggatagcagtaaaatatcacttaaaatatcaaggataaggtgttctgatgtgcctgtgaaacataatattaggcagttttgaatgatttttttgaaacata

SEQ ID NO: 54653 - DNA, 1204 bp, Homo sapiens
tggtgtgtgcctgtaatcccagctactcgagaggctgaggcaggagaattgtgtaaaccctggaggtggaggttgcaatgagcctaggtcatgccattgcactctagcccaggtgacagtgtgagactccgtcaaaaaaaaaaaaaaaaaaaaaaaagaagagacatttactctgaaacttgaggaatgagtatcggttggttgtttgaaaggatggggagagcattcctagcagaatgctccttgtaagcagccttgggatgggaaagagcttgacacatttgaggaactggaagaaaatctgtgtgacggggtacagtaatcatagggctgaatgacatgggtctaggttatgtagaccacattaaagatgtaggtctttattctcatagtagtacgataccattgaagtgtttgtgtagtagggtagctaataatctctcttatatttttaaaatattactgtggttgctatgtggacagtgaattggagggggaagagagtggaatttgaaagaccagctaggagactatgataatgatttaggcaagaagtagtggtagtttacatcatctagggtggtaggaaaagagtgaaggaattggagataaacacttttaggaggatgattgattgataggatgtgggtagagtaactagagaaagggagaggagattcaaagtttaacagtacaaacctgtgataagagaactgtaggttgatactattgttatttttatacagataagaaaaccagacacagaagtttaaataactttgccgatataaccagctagtaagtactagcagaattctggtttttttttttttttttaagttagagacagggtcttactctgtcacccaggctggagtgtagtggagcgatcatggctcactgaagccttgaactcctgggttcaagggttcttcctgcctcagcctgccaagtagctacgaccacaggtgcatgccagtgctcccagataatgttttaaaatttttgtagagatgggttttcgctatgttgcccaggctggtcttgaactcctgtccttgagtcatgtcctgccttggcctcccaaagtattggaattacaggcatgaccaaccatgcctggcagggacaaaattctgagtctgagatttttacgtgtatgtttgtttttgtagatgttttgtttattactgcacaatactgc

SEQ ID NO: 54654 - DNA, 1844 bp, Homo sapiens
agatgaaaggaggaaatacaatgttgaattgggataagttaagtctaatatttctttgctcaagtttggaaacctgaggcccttcagtggccagccttaatgcagtttttgtaatgcatcgagacaagaccttataatggtcgtagtgtgtgactgtgaaagagaaggagaaaacatgtgaaaaacgaaaaaaaaaaagctcacagcctcaaactgctgcacataccctgtacagttagtttgcagtcagagtagggagccggcctgggtccccgcacctgggcctggctcccgtggccccgcccctggggcgggctcccatcgaggctccgcccccacctcccctatcgccggagacgcctgcggcggccccggagacaccggaaggagccgcggctgctgcgggaagtggccagttcaggaggcggaccccccgagggcagcgctgcggggccgttttccggccctcctgacgcgacactgcccctctccgagagctgagaaggaaaagaggagcttgcggaggtgcggctgcaggccgttgttggtcgagctggcgggtcccgcgggccaggccgtggaggtgagcgcggcgctgctgggaggggcgcggggcccaagggcgtttcgctcgcgtccggggtccggtctctgttctcgcttccgcgcgctggggttgcggccgctgcagcagcctctttttcttggtcctgggtggcggcgggttcgcgggcgggaagaaggccttggcccctcggtgctctgcgttgcagagataatctagtggtcgccctgtcaacggtcggtggaggatgggaaccggtcgttgatttgaggaagggtcctcaggggttcttccctggaagcgggaggtgcaggtgagcccgagaagcgggggctctgctcccttcctcggtctccccactcaggcttgccagtccctctcagtgggtgactgaaagccctgcagcgcgccggctcctgggttctggtttcgcttttcggcgctgttgagggggccggccccgttgtttgttgttgtgaacggaaaaaccgaggtgtcatcgtccctggaatttttcttcgaccaatgtttgatcttgactgagaggttaccccttaccttctgtccatctgcagcctttgtttggatgaaagatccatagtgtgtggtttcccagacctttacttatatttctcgtatacaaaacgctcttcatttgaatatttacagggttttacgttgagctcttggacgatgagattttcctgggtgttttgcactcaagtaccgttggagtttacattctcatagaatcagtattaggcctggaaaattgagccagagggtgaaattctggcaggagcatagacttaaattgaaggtgaattttaccgtaacgatctctaggccttttgcttaataactatgtggatgtagagaatttttaagtttaatcagattatttttcctttaagaaaaacgtgttacaaaaagtaacaaggccgtcctagttccgtttttcctactgtcttatttggaaaggtctgaccaagtcacattatcgtcataggctatttgatttgagcataatacaaatattgttagtgaattcatactattataaataagagagaaaataggaatcttaaagacaatgctagttttatgaaaaaataatagaaatagttacacaatgctaggagctttgtattatttcattactttggcaggattgaaagaaaggtcagggctgggcacggtggctcacgcctgtaatcccagcactctgggaggccgacgatcacgaggtcaggagatcgagaccatcctgggtaatacg

SEQ ID NO: 54655 - DNA, 1057 bp, Homo sapiens
ccacgccagagggaggcctgcaaaggaagcgcggaattgggatgggctcgccactgctctgagccagaggaagggtctggacggccgagctggagggacccccttttctggtgttcttggcaaagaaaaaggaagacagcagaggagagctccgcgaggggctgctgtggggtcgggggagagcgcgctggaggtagggcagctggtgaggtctcaggttcggcttggatgcgggtggttttgagcagggagtggcttttggatgtgaaagattactctgctttgcaggtgctttaagagaataatttagcacgggagtattgtggtgtcaggtccttctgtaaagttgttaaattatctattttccagagggaagactcagcttgtttttgcacaggactttgaaacctttattattgttgttttattgttgttgttattgcagctaaacatgtttgctctgttcaaagtgtcagagttaggttatatagatttgtgcttcacgtcaattttctttttgatacttcagactttccttcctgttggattataaagtcaaagttgcaggatagaattttaagatgtctaagaaactgtttatgacacttatttttaattccccagtagttggaatgtagaggagcaagtaatatcacacaggacaatatttttggttatgttttatagattccgtctataaatttgaataatcatgaaacccccttcatgtttatttttattatgcttctgaaagcaaatgaaatgactagttttttgtttttttttctttagtttttcaatgaataatgattaggtttggaatcaacttcctcagtaatattaaatgaaaaagaatgaggtagttagaatgcaaaaatagaggtttgtcataatattttttcttttttcttttttttttttttttgaggcggagtctggctctgtcgcccaggctggagtgcaatggcgtgatctctgctcactgcaacctccgcccctagggttctagaagttctcctacctcagccttccgagtagctgggattacaggcgcccg

SEQ ID NO: 54656 - DNA, 1019 bp, Homo sapiens
actaatgtcagtcttagaagaatggatagatgagtagaagaggcagaagtataactaatttcaatgcaatgagatttgggtaaggtttagatgtaattcagaaaaggaaatgcctgtattttgttaaatttacagtttaacaaaattgtaaatttaacatagtcaccagtatttttatactggttacaatagaccattcaaataccatcctaatttattaggtgaatattctattcttcatttcagaagcagattttagcagtgttgaaaaaagattatataagattatataaagatttagattttaataatgatgtacatgtaataatttacacaagtgagtgatgcatgttttaaaattagaagctttctgggtgaatatattataaactctgaaatttttacctgaaatttatcattggcgttattgatatttttaatattagtatgtttatttgataggttcaagttgttccagtagcagacagaatttgacattatctttaagttctaccaaagacaaaggatctcaagtttgtaactatgctaatggaggacttttcagtaaatattcaggttctgcacagagtttggcctctgtaagtacagaaaaaatattaatttttaaaatttttgtttatatgtcttctgtgatctattagtttaagtgtcatatacttatagttcttagtatggaaatactcttaagaaatcgtctgaatgtgctttctttaggcaagtaaaatacctttttgctgactattagtcaatttggttctaggtttctttgaataagtgatgtggtctcatggggtcctgtgaaaatagtgttgatgtggaagtattgcttcaaaattagatgttcttgttttcacttatttgtgggagctaaaaattaaaacaattgaacttatggagatagagagtagaatgatggttaccagaggctgggaaaggtaacggggggtggaggggaagtggaatggttaatgggtaaaaaaatataggcagatagaata

SEQ ID NO: 54657 - DNA, 1111 bp, Homo sapiens
tttcctcaattgaaagttgaagcccttgttgactagaagtagataaggtgaatttcatgataatagtgtaacaagtctttagaatcactgtactgtacttgcctaactgaactagtcattcctcttttgttaaatcttacaatttaacaaaaatataaatttaacatagttgccagtatttttatactgattacagtagaacattcaaataccaccctaattaattaggtgaatattttactcttcatttcagaagcagcataatctgtaggctatatgttgtaacttgttgctcctaggctacaaacctgtaccacatgctactgaactgaataatgtaggcaattgaaacacaatggtatttgtgtatctaaacatatctgaacatagaaaaagtacagtaaaaatacaattttgtaatcttacggtagggttgactgttgtatatgtggtccgtcgttgacccagatgttgttatgtcgaaagtgtctgtagttagtttgagatgccagcagaagagccaaatggagtcacctaaaaggcaaatgaaaatgtgggcttagatttctcaaaactgaactggaattaggacagaactggagttaggaatttgagaatcatctgcatagaggtgattgaaatgatttgctcagtggaccttgctaggagagggcatttacaaagatgatagtggcttttttattttaggtatcatttagcagagagtcagcattgtaaaacattctaaaagaaaaataagctagctagcttaaatcacagtaggtatagataaaatttataagtgaatgcttaaaagaataaatgatataaacataactgcctgatttctgatggaaataagtgatttacattcaaaatactactcttcttgtgtatttttgagcaaacaggcttagaatagagtcgtgatttctaagtttgattgattatcatcagaattatttcttcatgtggaaattacatggattgtcttaccactaataggatttataaaaataatttgtaaatatgaaagatcacaacatactatcatgagagagatttgaagtaacttctatccatcttaattttaggtccagagtgtcaattc

SEQ ID NO: 54658 - DNA, 1230 bp, Homo sapiens
aaagtgctgggattacaggcgtgagccacctcacccagccacctttctctcttttttttttttttttttattatactctaagttttagggtacatgtgcacattgtgcaggttagttacatatgtatacatgtgccattctcttataaggacacttttgattagatttagggcccaccagataaagtaggataatctccctgtgttgggattcttaattacatctagaaagatgtaagatgttacctttatttataaggtaacatttacatgttctaggaattaggacctgatatctttgggtgaccattattcagcctactacactatcttaacctaacctgttgactgttatataatgaatctatcagaactcactttactaaatatgttttttctagctatcatttgtattatatccagaaaaaaattttaaatagaaagaggctttctgtgtttcacatctcagtatttcttgacttgaccatgaacatgtctatggagcctcactggagccctgaagaagaaccaaatgaacctgttgttgaatcagaagattcaaatgcttttccctgttctctgttctgtttcaggctatcctccttttagtggaaatgcatactaaataaaaaacaaaaccagtaaacttgatgtggccttggccagtgagcaatgaagggttgatggctctgtgtagaaggactgagtgcctcagaatgcattcctactctctagaatagttagactatctcatctccagtgccatcacagtgggtattcctatggggaaagaaggtctccagagagttaaattcacatatttctagattactctgtgtctaggaaacttaacattcacagcttctgttaatattacaagtttatggctggatatggtgtcatgtacctgtagtcttacctacttgggaggctgaggcaggaggatcacttgaacctaggagttcaaggttacagtgagctaattgtgccactgcactacagcctgggtgacagagcccgttttcttaaaacaacaacaacaacaacaacaacaacaaaaacctcagaatattaaaaattcaaattgaagaaatgtagagtaaaactagagacgccacaggggggtctttgtgttacaggattaagattgcaaggagccctgtggaccacctggtatcatcacccatctgtttcaattctctttataaaattgaagaccttaaaaaaagat

SEQ ID NO: 54659 - DNA, 1036 bp, Homo sapiens
acagcaataagaatgtgctagagtttacacatctgttcacttttgctccaatatgctcttttgacttaatgtcaagctttgggttgatgtgggtagggtagtgtcaaactgctttgagaggaatgggaccagttctgctgcctaagaaggtctgtctggatgtttataggcagcacctctgaagtggcctaaattcaccctgatctgatagttttcctgcttagaaagtgtgccttggccagatcagtatcccacatgggagtgttccctaggttgtagctgtgattgtttccagatgaccagattgtttttctgaaaatgagcatatttttagtcatgtcgattagctgttcttctacatcacattgttactctttctgatgatgattctagggttaacattggaaccatctcaaaataattacaaagttttagatgggtttacaatgtcttctaaacaatgtaatctaaaaataattgagtcagatgctaacgagatactgcaggcataagtgctgtttttctgacaactgattgtgaaaccttaaaacctgcatacctcttcttacagtgaggagtatgcaaaatctggaaagatattctattttttttatataggtagataggatcgccatttatttcctatttagatatactgacattcatccatatgaaaatatgcaggtcattagcttactataatttacttttgacttaatggggcataaataaaactttcatagtacaaaaaaaaaaaaaaaacatttatgcacataaaaaccaattatatcactatctattctcctttctccaagttatgcaactctaatttcttcatccttttctcacactatcccttctatacacttattattttggctgaacatatgaacacaggaataattattttattttattttttttagttttttttggtctctttttttagagatggggtcttacaatgttccccaggttggtcttgtacttctgtgctcaagggatcctcccacttcagcctctcaagtagctggga

SEQ ID NO: 54660 - DNA, 1111 bp, Homo sapiens
acagtcatgagccaccgcgccgggccatcttcagctttactttgttcttctgagaacttataaacccggtagctttttgtaaactggtttcttctatcttcccattagttttccttttaatttacagggatattttgaaacatagttgtgtggctataaaaaatagctattactgtggaacttctgatgaattcattatattcttttagaaaaattctgagcaccatatacatttgtgttatatttttaaagaaatgaaaacatattggccattttgtctctgatttttggttaactggaaccataggctgagaatgtattgggaaactaagattctgtcatgaaatgatgtatgattctttagtgtcaaaattagactgtgacatcagtgataatgtatgaaaacatttcaggccccaataattttattttggcattgattttgctcagttaaaattgttctgttcttaatttttaggtatggaattgtttgaagaggcattgcgtcgatgggaacaagctctgacctttcgcaatagacaggctgaagatgaagcctgtggttccattaaactgggtgcaggagatgccattgctgaagaaaatgtagatgtaagggtgattgatttgagtggtcttcataatattagaagaatcaaactttttttttgtttttttggtagaggtagggtctcactgttgttacccaggctgagtcttgaactcctgggctcaagcgatcttcccgccttgtcctctgagtaattaggactatagggatgcaccaccatgccaggctaattttaaattttttgtaaagatggtgtctcactatgttgcccaggctggtctcgaactcctggcctcaggcagcactttcactttggcctcccagagtgctggggattataggcatgagccaaggtgctgacccaaagtattttttaatgttgattcagtgtatttgctttatgtgcatttaatagaactgtttttttcttcttccttgggacaatgtggggtatttcttattagtctttttctatccaggtagttgttaaatgccagatttaccattcatcaagtttattgactttcccaggatatgcaa

SEQ ID NO: 54661 - DNA, 1113 bp, Homo sapiens
cattatgttcattaaaatcacataaaggtgtagagctagactagtccttattgattatttagttaagctagtggttctcaaacttgagaatgcataagaatcacctagaggacttgttaaaacacagatttggaggccctaccccatgggtttctcattgactaggactggggtggatcctaagaatttgcatttctaccaagttcttgggtgataatgaagctgctggctcaaggaccttactttgagaactgccaatctagtctaactccttaattttataggtaaagaaactgaatcactaagaactaaggtaattttgccaaagacacagctagaacccaggcctcttgacttctgctgctgtactctttccaccatctctcagttgtttttttatattactcactttctttgccttttatttaaaagtgggaaaaatatttagaattttaacattagaatttaatttgttctgtgtactttttctctccttgtaggatattattagtactgaatttatccataaactcgaagctctgctgcaaagagcctatcgtctccaagaggagtttgaagctacccttggggcatctgatcctaattcccttgctgatgatattggtaagatggatatttcatatggcttttatgaaatgtttacttttcttttatatccttggaatcatctgcataagtgtctgtcttatgtaataataggttacttaaaaaaaaataaactagccaagagaaaaaatttttatcatatttcttttttctttcagttttaattttcaaatgaactaatgcccttaagatacaaattcaagtacttatcataggcaggctgtgacattattttaaaatatattgtgggtgaaaaaatctagttaagagtgttggagggagaaaagaataaaaatacacaaatgggacagactcagcacttcagaaatatgcatataatattacttaaaatactttaaagaattatgtatgttgggacccactttaatcgcaggatagctgttgatgtaaatagtcagtacatacatcgttatgggtcattacctttgtttcctactttaaagagaaaagagttttaaagatact

SEQ ID NO: 54662 - DNA, 1086 bp, Homo sapiens
atgaacttggcaacaagaggaaatacctcagcctaacatcttacatcaaatgtcagccccaagttgaagctctgagaccttgtcctctcccattcctgcagaatcattgtggttggaggataaactccctgagggtttatttttagggaatgatatgaattgccagcttaagttgtatactcagacatctaaatatacagagtacacattgtacaacatatgagaaatttggcttagtaatttcctcccatgtgtaaggctcataatcttatttttaaagggtttagtaataacacaaaatgaaatctaactggtattatacaagttaaagtaggttcagagaagaaagcaatataatgaaaattgttggggtcccagaaacatgagaaatttctggtgcttgcctttgcctgttttgtgttgaagttatgtcttaacagcttggatttctatgtccaggaccatcactgcccatataaggcctttatgtgatttagacaaagggccatccatgtaagccccttgggaggggacctttgtgccaagaagaaggtccactttccttcaggaagatgcaggtctagtatttgggctggatttctgccccgacttattcctgtggcaggggacctttgtgtaacatacagaatgaccagttgtacctcgtggccctgctcaagtctctgtaactgcagacctaatcttaatgacttcttgctccagtttgggttaatctagtcacttctttcttctttaaacaaaaggggggagggtgtagaaaatgctgttactcttctaaagtgtttgaatggttcccattccctttccttgtgttactcactttgcattggcagctgtacttcccagttaggaatcacagttgttgtgttggtcaatcatagtatataaaaattttgataaatagggaatgccagagacaactattgtggaaatcttcttttgggtaatatcaggctgttttgtacatacattatttcacatgggtgaaactttatacgtcatcacaaatcaagaactttgacaagttctccttttttctttttttttattattcccaccacctca

SEQ ID NO: 54663 - DNA, 1952 bp, Homo sapiens
agtataagtttagttaatttagggctggctattagaaacataagaaataagccaggtgtggtggctcacagctgtaatcccagcactttgggaggtcaagccgggtggatcacttgaggtcaggagattgagaccagcctggtcaacatggtgaaaccccatctctactgaaaatacagaaattagccaggcgtggtggtgcacacctctaattccggctacttgggaggcggaggcacaagaatcgcttcaacctgggaggtggaggttgcagtgaaccaagatcgctccactgcactccagcctgggcaacagagcgagactctgtttcagaaaaaagaaaaaaaagaaaaaaagaaagaaacgtaagaaatttaacagggttctgaaaacaagttaaagtcataggcaaaatgaaccagagtaagtatatgataggctctctagagattttcatgtcctggggacggtccatttataataataaattttagtttacatgaacaaatatgtaagtgtttgttatgtgttcaataatctcccgagaactgtacgaaccaccaggaaaaacaaaaagggaaaagaaagaaagtaaagtccctccactcaagttatattacaaatgggaatattgaggaacagagaagataagaaacttactcaaggttacacagctaataagtaacagagtcagtattggaattcagctctagaacccatggttttaacgcttttgctatactgccttacataggagcaaaaaatcagataaattttggaggatgtttacaggggataatacttgaactgagtattaaaaaaaatgtgcttatgggtagcatagggcaagggagcagaaggagagtaggatatatgtagagtagaaacaggaggaaccagaggcttgaataaagaatgcgtttggtaatgatagtaatagaaaaaattattttatactcacgatggaccaagtactgtgcctccacaaatctcatttaacttttgcaacaactctaggaaattaatattgctatcctcagtttacgtaggtggtaagtagcaaatcttaggatcaggatccaggtgctggctggctgaatcagaaaccacgcttttacccattacattactgtatgacaagtggggatatggtcaacataccctcagataaagcagtaagtttttttcttttttttaaaataattgatagaaaagaacattggataggtaggataatcagagataatggaaagctttggaaaccaatagaggagccatttgattagaaaatggctttttttcccaagttacaaaaactcaatatacataattaggctattcttctctaatgattacatatgtcaagtaaaatagtctgtgaaagcacttagtattacttggacacgtaatagtgactcaaaaactataagctgaatctgagtcttctaaagaacttgtaagctctttgcactgtagtgaaaatatgaacaacaaatgctctaacagcaatgtccaatagaaatataatgtgagccacaaatgtaattttaaaatttctaatagccacattaaaggctcgaaagaaacagataaaattaattttaataatatattttcttaaacccagtatgttttaataagatgttttctcttttttgttgctaagtcttcagaatctattatgtattttatacttactgcacatctcatttcatgtgtttaatagacacatgtaactaggagctactgtattggacaccagggctccgtagtttatagcatagcatctggtatcagatgacctgagtttgaatactaccattctctttcttagatgtgtaagtatgtagcagctacttggcctctctgttccttagattcctgatacataaaatgagaaaactaatagtatctacctcatcaaagggttattgtggggattgaaaataagg

SEQ ID NO: 54664 - DNA, 1025 bp, Homo sapiens
tggatattttatgttaataatatagttgatttgaatgaacctacaatgaacctacaagttcttctaatttgggcaagaccacttgcaaataaattgctctgtttcaaactagctgtgatatatgctgacttcatcatgtatagtagataatccaactctggttataatgtactaaaaagcccttttaataaaaaattaagcttaattcctttttaaattaaaaatgaatatttgctttgtaacattgtctcccctacttgtcagagtttcagattcagttaaacaatggatacttactgttttctttttgacactagtagtctaaataaagactgggggaaaaatcaaaatcaaactatggaatgtgaaataccacaatgatgtggaatatcactttctgaacttttcaccttttacttttaagataaagatacagatatcaccatgaagggtaatgtggaagactttggcctgcgagacaccttgagcatcgcatccacggattcctttgcttccgcagcagaggtaggacatatgtgttcctaatgaggatttctgtttcttttttggtggaaacaacagtcttgtcattatactgtaattcagtttggtcactatttatttagcacgtaccatgtggtaggtgccaggatacaaaaatgaataaatctaacatgaaaataagctcctacaggagcttacactctctttaaggagatggacctgtaaacacatggtttagatgggcactttcatatactgtagattatgggtgaggcatataaattagtatgttaatggaaagcaatttttcaacttatatcaagagtcttaaagatgttcaatttctttagttcagaaatcatacttctagatttttgttctaagaaggtgatcagattcaaagattatatatatataaatattcactgttggccaggtgcagtggcttacaactgtattcccagtactttaggaggctgaggtggaaggattgcttgagctctggagtttgagaccagctt

SEQ ID NO: 54665 - DNA, 1963 bp, Homo sapiens
tctttttaacaactctattgaagtaaaatcaattcagattttattagctataaaatcctcttgaatggtttttatggtttaatcaaatttattgtattttgatgttagcaaaatcctattttctttcctttatagtttatcttcttatatcagtgtattctgctttttggttttctgggtttttgttttgttttgtttttgaggcaggtctggctttgccagctaggctggagtgcagtgatacaatcacagctcactacaacttcaacctcctgtgctcaagtgatcttcccacctcaatctcctgggtagctaggaccacaggtgcatgcctccacacctgactaatttttttagatttttgtagagacagggtcttaccatgttacccaggctggtttcaaacttctgggttcaaatgatcctcccaaagtgttgcaattacaggcatgagccactgcacctagcctgtattctgttctaacccaccgtgctcttagcttgcagaacacagagaagtacggcatacctacagcctggagtccctttgtcactgcccattttacgaggaagccatgcatttagttgaagaaggaaaaatttactccagagtactgaggtaccatttcagttttgtttatgtttatgaaggatattaaggtgtttgtgtggtacttactaaaaatgtttatgaaaataggagaaaatatgtttttaggtccaagtaaagaaaaaattatttttacatgttctgtcagtattgaaaaaacatgttttatattaaggtcctgaggttaagccttgtttgaatccaaatttatagtaggcttgatcttgaatgtagtttaacaattgtctcccctgtttattacatagaactgaaatgttggagtgcctaggagacagtgattttcttgccaaacttcactgtattcgacaggcttttcaggtatttttttaacattaagtgacttcacccagccactcatccccaccctcatgctgtagagtccagtgcaaataaacaggacagctctgtgctcttgattatccctattcctaatgacaaatataaagtccactaaacttatttttcctccctgctacttgccttcatttgtttccatatttcattatcctctcccatggcttcccaggcccacgacactttgtcaaaacaggatattttgatacttcaggagtgtaaaaatggctgcttaaaataaaaacactctttcttattaattagtgtgtatttgagatttaatttcagtcaattataaaattgattttctaaaaagaaaataacaagaatatatttgttttcttatgttttggggctataggaaatttatttgagactgtaatatgattttgaacagaatttaaattcaaatttaactccctttaatctttttttgactataggtttcaagagttctttttattttagtaaattaggactttctctgtgagctgcctgttgaaatagcaccacatgcaatgcattaactgttttaggattatttgtgctattaagttgaatgtccattcacattcattataggtctcttttttctttggggatgaatattttttcaggtaattctttcagaatcagctaacaggatattcctcgctgagagcggaaggaaaattttatcagctttaattgtgaaagcacgaaaggtaaacttgttctgttggcaagatttttaccatttacaaaagttgtttttaccctttgaactgaagattaagacattaaatttttgatagaagaaaaatttttgtggatagttgaaaagggcattaagttatgctcgggttgaactatgtataaagtccacactatttcaaccaagttgtttctcataaattatttccagtttgccataaactctgtaaatgtcatggtgagaattatcattagatctgctgctataaccatcactgttattat

SEQ ID NO: 54666 - DNA, 1244 bp, Homo sapiens
gcttgtgacattttactgacattctttatcttggcttctgcaaaatgttgcaatagcaaagtagtaaaccagataaatttggcatacctttaaaatgtattttagttcagttacctagtagaattaagatctaccagacttatttgaagagtaactttctttgtagcttgttataaagttgagtttagggttaaaatgtgttttcttcttcagaatccaaagaagtttgaagatgtttttgatgaaatgatctattttttagagcagaccgatcactggggtagtactgaaatggaacttgctgctagaggggtaaattcaaattttttgtgatatttatttttcttagttatttgcatgtaattttatatgagttgagactactgtttcattgtccttgttaaataaagccaattgtatggttgtgggacatctttttttctgacgaagtcataaaccacactccttgtacgttggggcagtagttgtaaattgttttctaagaagccttttttgctgttgttggctccttgcttccttccctcctgtcctccttcccttgttccctctcttccttctctccaaaagtcattggcaggcccctagcaggacaggaatggtggcccatgcaaggacagctttgggtagtacaacagcagcagctcagtagggctggggaattggctgtatacacaagactgaacaaataagtatactgagaaaaatcagagccagcttttccctgtgagagaagggaggtataaaatgctgggattggaattggagctgtcagtgtgagttcacagtttataatatatatgtagatacagatatagaaataaatatcggtccaggcatggtggctcacgcctgtaatcccagcactttgggaggctgaggcgggcggatcacctgaggtcaggagtttgagaccaacctagccaacatggaaaaaccttgtctctactgaaaatacaaaaattagctgggtatagtggctcacgcctgtaatcccaactactcgggaggccaaggaacgagaattgcttgaacctgggaggtggaggcggcagtgagccaagatcgtgccactgtactccagcctgggtgacagaacgagactctgtctcaaaaaatatatagatatagatattggtcaggcatggtggctcacgcctgtaatcccagcactttgggaggctgaggcgggcggatcacctgaggtcaggagttcgagaccaacc

SEQ ID NO: 54667 - DNA, 1054 bp, Homo sapiens
acacagttcataattggatatttgcaggattattttgttgctgttttccccactatactctaggcgtctaatttgcttactctagaagtttgagcacttggtacagcatgtagtatgtagagtgtgtatgtatgaatgaatgaaagagcaagatgttcatgatctggtggggaagacaggcacatataccagtaactaaataacaaggcagaatgagcatcctggatgttataatagaagcgtgaacaaaggactcctagaatagagaggaggagagattattttcacttgagatctaggaaggagcagcgataatgtgaattcgtaatttctagtggcgagctttcatatttatctctccttttattttttatttttgaataagctgattaaaaaaaacccctgctgttataaaaccataaagccctggctcagattttatttcagctctatgtaataataatttctgtttcaactcataatttaatgcaggtgaaaaatctaaatttttatgatgttgttctggattttatattaatggactcctttgaagatttggaaaacccacccacatccatacagaatgtagtaaataatcgatggctaaactcatccttcaaagaaacagtaagtggtggttaacctttctcagccttttaagtttgattaaaaagtgaggctgggcgcagtagctcacgcctgtaatcccagcactttgggaggccaaggcaggcggatcacctgaggtcaggagtttgagaccagcctggccaacatggtgaaaccccatctctactaaaaatacaaaaaaaaaaaaaattagctgggcatggtagcgggcacctgtaatcccagctactcgggaggctgaggcaggagaattgcttgaacctgggaggtgcagtgagctgagattgagccattgcattccagcctgggcaacaaaagcaaaactccgtctcataaacaaacaaacaaacaaaaaagtggttggccaggcgcggttgctcacacctgtaatctcagcactttgggaggctgaggcaagtggatc

SEQ ID NO: 54668 - DNA, 1027 bp, Homo sapiens
gtgagccaagatggtgccactgcactccagcctgggcgacagagtgagactccgtctcagaaaaaaaaaaagaaaagaaaatgaggtttagaagattgtcttggagactgtaaaatagaaaataacccccgccccccaggagacagaatcttaaggtgtagttttctgtagtcagtgctgtataacaaatcccacagtgtgttatttaacaagggaaattcaaaaagttataaatatagagtttcctaaaacacagctatattgactaatacttcacaggaagaggcaattacacaattaaatgcttaaataatatagggttccttaattaaaagttaggattctagtaagagtaatttagcttaatcattttactagtttttttttggtcagttaatataattaagtgattgagttgggcttttaaatagctaaaactttgatagtcttaataatcccataaaacttatacaactaaggaacactgtagcattcttgttgttgcttcgttgcaaagctaatatgattgcccttttttttttgagacagagtcttactttgtcacccaggctggagtacagtggcattatcttggctcactgcaccatccaattcctgggctcaaatgatcctcccacctcagtctcctgagtagctaggactataggtacacaccaccatgcctggctaacttttgtattttttgtagagacaaggtttcaccatgttgcccaggctggtctcgaactcctaagggtcaagtgatccacctgccttggcctcccaaaagtgttgggattataggcatgagccaccatgcctggctggattgcttttttatgaagcatttttatgaggtaaaaacaacttttaagggcggggtgtggcagctcacgcctgtaatcccagcactttgggaggcaaagtagggaggattgcttgagcccaggagttcaagaccagcctgagcaacatagtgagacctgtttctactaaaaatagaaaaaattagccaggaggggtggcg

SEQ ID NO: 54669 - DNA, 1477 bp, Homo sapiens
ttacaggcacttcttatagattatctttttttaaatgtttccccaccttttcatggtatcacataggttatcttttttgatcatcatgtcatccctgagtagtaagtagggtgggtggtattagccctatttcacagaaaaagaaaatgagcccccaaaaaggaaaggttaaatcacttgtgcaaggtcccttttctaatgagatatgaaactagcactggaagtcaggtcttctgagtcctgattcagtgctcattataatattagaagctttctcaatgtaacttaattttggtctaataaatgccaatttatgttcattttccagaatcaagttcttttatttctcaaagacatttttgactttgagaaggtgcgctattcaagtacagagactttagctgaagacctcatgcagttactcattcgccgcactgagcttttaatggcctatcttgaagcagatgccctgaggcatacaagtagttgtctaagcagtcatggtcatgttatgtccactgggctactggaagccaaagtacaataagtaccataagaatcatacaatttgagtgtgctatgaaatattttaaggtaactattgattttgtaacatatattacaaagttaacagaattgatgcatgtggattcagggaggaaaaaaaaatctactaaaaaatgagcaactgtactgtatttatacagaagttctgtcattgaattcctgtgtagtgtagtcatagtggctttttgcattcattaggtaataattgaagtcatgaaatgtatattttacagaaatatcgcttgaattgaagccaatatttgggagttaattggtttgtcttcttgaagctgtcattctcaaaagctctgtttttatgctttgcacctttaaaatgtacactttagccaaggtctttgtggcccacacatgcaagaatatattacttctaatgtcaatatatttaactttgcctagaaacatatttttaattataaagttattcatttgtttaatcaagtttaggcagtaatgatgtttaatatgtactgcatacattattgcttgtgcatttgcttatgtatttgaatcaaagaaattgtaatcactgaatattgttatagaacatttaaatgggccacttgcagtggctcatgcctgtaatacattgggaggctgaggcaggaggacagtttgaggccaggaggttgagactagcctggacaacataaggagatgcctgtctctacaaaaacataaaaataaattagctggtatcaagcagagttccatggaaatattaaaatttttttaaaaaataaaaataggctgggtgtggtggttcatgcctgtaatcctagcactttgggaggccaaggtgggcggatcacctgaggtcaggtgttcgagaccagcctccccaatatggtgaaaccccgtctctactaaaaatacaaaaattagccaggtg

SEQ ID NO: 54670 - DNA, 1047 bp, Homo sapiens
agaactttctttttatacattagagcattttcccctggaatgagtattgattaaaaagataacatttattaattaataaaggcaatttaaaatttagtgttatttgaagactgtcaacatctgaaggtatgaaacttggtacagtgaaataatttctcctttctccttccttttagttattcccacagaaaactcagcccagtgggaatttgtcatattatgcccatgttttaaaaatattcatagtttgaatcttattgacattttaaagaagagttttttcctccctggaatgtaaaacaaaaatattttttaatgatgtggaagtatatatttcatgttcattatgataaatctacaaacaaatgaattgtttttatgggtggagttcttctataagagtatattaaatgctttcagagttgtattaattttgtttctaaataatataccacttatttggagtgactaactcagtatgtaagtagatgagatttgttgattttgcccctaaaacgggctttagtcattttaggagtgagttgcacaaaaggacctaaaatgcattgttttttgccttcttttaagagatggggtctcgctctattgcccaggctggagtgcagtgtgctatcatacatagctcactgcagtctccaactcctcataccagaggcatgtgtcaccatgtcttactcctaaaatgcatttttaaaaagcgaatttttagattaaagtgcctagtttctgattaataaatagaagatgaaaaaagtgggcgggaaaagcataatcttttaagatttgtaattttctgtatgtgccacatttatgtaaattaactataaaatatggaattcaggatcatgctgttttgcatgtactttataggttatatagcatgaaacatacaaattatcactgttctttagtatatagctccttgccttttcttacatagatgcttaatttaacaattacctatttatagttcttattattgacgggaatatgattagaagtaccaaaactaaaaattccattatg

SEQ ID NO: 54671 - DNA, 1069 bp, Homo sapiens
tctttggccttcacacacacatgtgtgcgtgcacgtgcatttcattaccatgtagacaagacagttattgcttatagtaatttacccatttgagggctaagtgttttaagctgtggttttataagcaaagctgtaagtaaatgtaatttattttagaaagatattatttgaaatcaattttgaagaattgcactatttgataatgctgctactacatgagataactctggggaattaattttatgagataagatgaatggctttctagaaggtgttgctttttgttttttctttttcttttttacatttcatcttagaaaaagttgcttatattcagcaggttggtttgtcaaattcagtgtttgagtttgtttctggtcagttcagtagctgctactttagcaagatgtggcctttcacaaaagaggtaagagtgaccaaatagaattttaggacaataagtataggaaatatctctttatcgtaagataagaaacttgaactttttaaaggaaatgtcctcttgaaaagaacatttctgactgcatgcagaagggtacttaagacatatataacaggccaggagcagtggctcacgcctgtaatcccagcactttgggaggcccaagtgggcagataacctgaggtcaggagtttgagaccagcctgaccaacatggtgaaaccccatctctactaaaaatacaaaaattagccaggcatggtggcgcatgcctgtaatcccagctactcgagaggctgaggcaggagaatcgcttgaacccgggaggcggaggttgcagttagccgagatcgtgccattgcactccagcctgggcaacaagagtaaaactctgtctcaaaaaaaaaaaaaaaaaaaaaaaaaaagacatatgtaacggtttccatttgccttaaaattgggttaaatagcaaaagcaatgtctttaaaaatgattagtttagagccttttagggtaaaccctgtttaaacacttaatcatggaattgcccttgccaccatgagctctaccatccacttccatatgtaaattataagagggacttca

SEQ ID NO: 54672 - DNA, 1907 bp, Homo sapiens
atttcattttttgtattttaatttccctacatttttgttcaactaagagtgcttatttcttcttgaaggttaacattatgtttattaagtatcaaaatggaattatcttttaaaaaagaagacaagttttccatactgtcacagtaagctccaaagaactttgtctttctcataaagtaatattctttatttgcatccatttactatgattccgttaatttgttgaattaaatgcctttataaaaatatttacaaatgttttcttgccttaaaatgtaacattttctacttaaatttaatttccaagagagtgattatttgcattacaaaggaattcttaataattcctgtaagcctaggaaataggaatgccaaagtaacatttaatgtacttctctataacttttcataatcagaaattttaaattatgtttatataacccatttacttttattttaatgtgaatatatattcagaaattatttgatgtaaatttcaaaatgattataggaattaagctgaattctaatttttttgcttagatttagaaatatgtatgtgaaatttaagaatttatataatctgtgattagtggaaataagaacatccctactttgttcctaatgagtatattatgttattgttttgtttagtttgtgaacaaccatgtattagctttacttagctgatgtcagtaaatgtttctgtctcctaaatgtaaggactgtactcattaatttgtgtaaaagtaaaacactacagtagcagaaaaaattgcactggctctttagccaaaataagcactgtaacatggatgtattactattactgccaaataaaaaagtgatggtacgtcttgctgatgtattgaatattttaaacaatgttaatatataattatgaagtcacacttgtctcatcagatcctgtatgagaatattcagtctccataagacccatatatatggcatagagaacaggacaactgcagaagcattataatcaaatataaaactttatcattaaaataaaaaataaaaggccgggtgcggtggctcatgcctgtaatcccagcactttaggaggccgaggcgggtggatcatctgaggtcaggagttcgagaccagcctggccaacatggtgaaaccccgtctctactaaaaatacaaaaattatctgggcatggtggtgggcacctgtaatcccagctacttgggaggctgaggcaggagaatcgcttgaacctgggaggcagaggtcgcagtgagccaagagtgcaccattgcactccagcctgggcaacaagagcgaaactctgtctcaaaaaaataaaaaatgaaaacaaagattaaaaatttattgtttctccatgtactgatatggggaaaaagacagttttgtgatgaataaagtgaaaatacttgtattttaatttaagtgtttggatgataatgccatcaagcataatataaacttatattgatatattgatgtatatgcatcattactattcatatatgacctgaacctctcttctcatcaattcttcaaaaggcttcagatatatggccgggtgcagtggctcatgcctgtaatcccagcatgttgggaggccgagcaaggcagatcacttgaggtcaggagtttgagaccagcctggccaacatggcgaaaccctgtccctattaaaaatacaaaaattagccaggcatggtggcgcacacctgtaatcccaggttcttggaaggctgaggcaggagaattgcttgaacccaggaggtggaggttgtagtgagctgagatcacgccactgcactccagcctgggcaacagagtgagactcagtctcaaaaccaaaaaacaaaagggttcagatatatttagtcaaggagaggggtgccacct

SEQ ID NO: 54673 - DNA, 1577 bp, Homo sapiens
gggacctggtgggagataatttgaatcatggggatgggggtggtttcccccatcctgttctcatggtagtgaataagtctcatgagatctgatggttttatcagaggtttccgcttttgcatcttcctcattttctcttgccaccgctacgtaagaagtacctttcacctcccgccatgattctgaggactcctcagccaagtggaactgtaagtccaattaaacctcttttctttcccagtcttgtgtatgtctttatcagcagcatgaaaacagactaatataccagcatttaaaagtattgttattagaagaccagcactttgttaggtactcatggatagtttatatgtgaaattgccttacatctttgtaaaattctctaacttgtaaagaaaaataaggaatgtagacggggtgaggaatgtggatagagcggtaagattgtatatgatacaaatcatctcactattctaccttaaaataggcatattctgcccatgtccttctaggcatctgatgttaaatatttttcctgcagatcttttcaggttagctgccttttttttttttttttttctttgagataggtcttgccctgtcacccaggctggagtccagtggcatgatcttggctcactgcaacttccacctttcaggctcaagcgaacctcctacctcagccttctgaatagctgggactacaggcacttgccaccatgcccagctaatttttgtatttttttgtagagacaggattttgccatgttgcccgggctgatgtcgaagcgatccacccagcttggcctcccaaagtgctgagattacagaggtgagccaccattcccagacggttagctgctttttaataggtttatgttacattaaaatattttaattaggcaacatactgattagttttactttgcacagttagtttcagaaacaaatacgaacttaatcttcagtgatacctgttcagccctttttgctaattcacgctgtattttcctcttttctaacatatcctgctcaattctgcgttttcgttcctcctccgttctcttcctttgttcctcttgtctttgtttctccatttcagcaaatctacccttcacagttcctaaaaatatatgaaaaaaaagtttgatacttggttatgtttctattttgcaatttaatttactatttacccctcaagcttcttacctgttaattttggaacataagccttttctactttagaagatacatcttcctcatcatcagaagcaagcatttctttaatctagatggttaaataaattaatgtgagcacatgtccaaaaattagactaaatcacattatatgcagagtttaaattaggttacaaatacagaaaagtattttagttatagttaatgtgaaatgtggttaatgtgaataaatacaatttaaatgaaaaaatgcaaacaaatattttcacgagaataaagtaaaataaaataacctcctgctttctcctgttccattctctctctctaatatattgttcttttcttctttgtttttcgtctctagatctcctttgatttct

SEQ ID NO: 54674 - DNA, 1022 bp, Homo sapiens
atgttgcccaggctggtcttgaactcctgggttcaagtgatcctcctgcctcctaaagttctggaattacaggcgtgagccgccacaacacctggctaaaaatgttttaatattcaattttatctatagaaatttggcttatttgagaagttttatttaacctgagtacatctttatatggaatttctccaaatttgaatattttatcatagaagacattaaaaaggaaggggatttaggtcaagtatattaagggcattgaaactcctgtgtgatagtggctaattctgtgccttttgattaataattcattcctttttctgatgaacctcaattcttagtaatgaattgtttatttggttaggtaaatgaagatgaggaaaaccaagacacagcaaaaatttttaaagggtaccgccctggtaaactcaaactcagttttgaagaaatggaaaggcaaagaagagaagatgaaaaaaggaaagcagaagaagaagccagaaggagaatagaggaagaaaagaaggcgtttgctgaagcaaggagaaatatggtaagacagaagctaactggagaatgctattagaattcacctttgagaatatgttaatagaatcattagactttagagaataccctattatttctggaaactgtgccaagagtagaaatggcaaatatgttttaaagtctcccatggaataacaccagttggttgaaggtatttgcttcaatttagtgttcagaagattctgctttaaattgccatgcttggcacaaaggatggaatattatctcccttctctgggaaggcatgttttccagaactaagtatccaaggaagaagaagaagtagggagtttcctccctcaacttttctttcttcctctccattctttcgccacctccttcccatactccctttctccctccttcattcctttatttccttcctttccttctttcagttttcatcccacctactatatattaaatgacctgagtcatttaatcagaattat

SEQ ID NO: 54675 - DNA, 1033 bp, Homo sapiens
acactggttctactgactcaactaaaacatatgccaaaaaatatattattttagttgtatctttttttgtagagatggggtttcactttgttacccaggctagcctaggactcctggatcatgtgatcctccctccttggcctcccaaagtgctgggattataggcgtgagccaccacgcccagccaaaaaatatttttgaacatttttgctagagtgaaccatttgacattcactataggttttaacactgataaaggtgattttgaaacaatgctagtctttcaaagtctaagatctacatgtgttttgctatttacttcccagattactgtatataccaatgattaattttaagtactaaaacttatttcaaagccaatgttacttctgttaaatttattatcattactgtaccataactatgttaaatataaaggtaatatacctcatgaaaattttcagcttctcgctctttaatttcaaggtcaattgctctccttcttgctcgctcttcttctatttttttctgtatttctttttcagacaactgtccaattttttcaaacttgctttttaggtttttagcttgaatagagccactcctttttaatttgatcagttcttcatattctctgctcaatccaaaggtttcattttcttcctcttccttcaaaaaaaattaataagtttgttgctgctgtttttgagagagtctcactatgttgccaaggctggccttgaattcctgtgtttaagcaatcctcctgcctcagcttcccaaggagctgggactacaggcacatgccaccatgtgtgactcaaaaaaaaaagattgaatatcagcatattagtttgtacaagaaaccatccaaaagatgtgcactatttcttatttgaaaccaaaaatacagtttaacctcttctctaaatgcagggtccaaatttactaactcaaaatggtgctacaaatttaaggcattattgaaaacattctacttaaaatgctattctcattaggaaatatggctaaa

SEQ ID NO: 54676 - DNA, 1865 bp, Homo sapiens
ttactgcataataggcgataaatctgatgcttatttggaaaagaagtaggcattctttagatgagctgtgctttgaagactgttatgaaaaggaataagaagtcagcatagtggcactcctggtttccttttttggccccgccacagaaaagatggatgtagtaagaaagttggagtgaaagagaaagttccagggagaggggaggggagctagtagtcatcagctaaaaaagagaagaagaaaagtgattttaaggaaaaaaaaattaatagaataaaagataaaaagagtgattaattcttactttcaatggtaagaatacaggtactagctgcagatcctttattgttgactgctttacacatatactctcctccatcttctgggaaagtttctggtaagtaaaggcagtaagtttctcccctttcaatatattgatagtcttctccatcctgcagtatttctccttcaaaccaccatgtaatttctggtttgggttctcctgttactttaaccgtaaatctgactggctcactgtctacaactgatgtgtttttaagaggcttcttgaaccatggagctcctgatctggtttgctcttcatcttcagcagtggagccattcatgatgctaccttcttcctcctcctcctcttctcttttctgtattaaaataaatgcattcaggttggcatttatagtattttcagggcagcgatttagtaacaattttgaaatgaaatttttttttttaagtaaagaacatacaagtgtgcctactacaaagtgtacttaacagtacattccagtgacttgaaagaaaaccattaaaacatttttttaacctacctaattataaaactatgggttttaagagggcatctttggaaaataaaggatacataagcctggtaccttttgtagtgctgcatcaatttccctttgttcaaactgcatgcgtagtaacttttgttcttcaattcttctttgttcttcttcttctcttgccttagccatttgttcaaatctagctttcatattcactttgtgagtaaatggagcctcgctttttcttgcaggcctaacatcaacatcatcttcctgcaagaaagtgggccaagattaacaattgcttgccttctaaaaacaaagaagcgttactagttctaaaggtgtttagaagcacaaaatgattaacatgtttataatgcatatttttgctacactgcagacactcagattttttctaactctccagttcaggaaaagtgatagatacatttatgaagcattctcttagttatagactttttctccaaatgtaaagatcacaatatcactgggatcctagcctgtttgtcctaccaactctgcttggttttgatagcacttaactgaaaaaggtcagaatgctatacattctaaataattgttaaaagtactcccttgattcctgtaagtccataccattccctactgcataataaatgttttctcacttaatgattttccttctttacccttcttagaactatgtccctaatgaattccctccaaataatgtattgatggtgaaatggcaggggaagggtgtttacaagtagaaaaacaggtagagacaactgttgaaagaggcaatggctgaaacatggggaaatcactaagtaaaatatgtttgagtcatctgaggggtgaattggaagggcgaaatgctaataagggagtgatttaagagcagagtctcaactgtcaaatagtgtgtctaggaaaataataatttggtaatgataaggtctagagcagttttggtggagtggggttaatgtgggtagttaattcatggtttctaaagtacttcagttgtt

SEQ ID NO: 54677 - DNA, 6460 bp, Homo sapiens
acatacagactatatttaaatttccatagttgtcaggaatatgtcttttgtcgtctgtgtgttttgtttaattcagagtacattcaagattcatgcgttgcatttcattgctatatttctttaatctcttaattcagcaaagtcaccttatttggaaaaagacctgattgtgaaagctgagttttatgtgttttcattgatcttgttctttattccttgtcaggttacttttaataacattgtgttgtaattggaataaattattaatacttttaacatcttattatgtgtgtgtgtacatacactttataggttactaatcaggaaaaagtcttggctaggtcttaatacagtctttaaatcattgcctttaagtgggcttaaagtttttcaaaaatgttctttttgtaattctggaatcgaattaagattatgcctaaatctttaccttccttagctaaagcagtgtggatttggggttgattctgtttttttactaataatgacgctctagaactaaaagttaacgattaattataaggcaaaaagaaaagagcgttctttttttttttctaattgcagagtagtttcctgacactactaaatgaatattttaaataaaacaggagtaattctgaccctctgtgcttttgtcttataacctgtacttacagtggatgtaattttatattaaagtttaggggtttttttttttggtcaacaagggcaaacacaagattattcaaaggcttgggagaaatattacaagaagcaaggtattgtttttattagaaatgagatgttgggcttataattgtggttacagcaacaaagttcttttttttcaaaggtcaggcagttcctgctccgactggggctcctccaggtggtcagccagattatagtgcagcctgggctgagtattatagacaacaagcagcctattatgcccagacaagtccccagggaatgccacagcatcctccagcacctcaggtataatgtaattgctaatttgttgatttctactccagtctgttttctgcatgtttactgtttgtctgtttgggagtgtttgccttttaaatttttatctggcaaagtataataactatttaaatgaagtactacggtgtattgtttgggtttttttgttttttataatgctttccagcatctgagtggtgaatatttctgcaatgcctttgattttaaaaataaattttcttcccccagggatttgcaaatcatgcaagaagccaccaccatttatattaaccactttttctttcttaaaggattcactcctgaattagctccatttcaaggattttctttaactttttgtgtatttcttatgtatctcttctgcacagggccaataataagaagtggacaatacagtatttgcttcattgtgtgggggaaaaaaacctttgttaaatatatggatgcagacgacttgatgaagatcttaattttgtttttggtttaaaatagtgtttccttttttttttttttttttgaaaatgtacaaaatatctatcactactgataggaggttaatatttctgtgtagaaatgaaaattggtttgtttttagtatttagtgtagatgtacacattccagcaaatgtatttgcaattatgtggttgatgctttgtgatataaatgtactttttcaatgtatactttcacttttaaaatgcctgttttgtgctttacaataaatgatatgaaacctcctgtgtcggtaagttggatatgtgggtatttaaaggattcataatttcttagcaatgataaattaagatacatatacacaaatatataagctttccccatgaaatattgagtttttaaacactggcatgtttttccccccttgcagtatagtggtagattggaggatcttttccatttattgtattggctctttcagcacaagtaatcctgatatcttcattttttttccttctgtttgattaaaaactgcatgtgtgtacaatgatcttttggcatacttccattgcattaacagtgaaatttccttttatacatgaccactgtttcagacctgtactgctgctataacagttaacctttctgttcttaatttgataatacttgatttccaagactgtttcggcataactaattttaaacagttttcagatagtgaatatgagtagtctaataagaacagtttttttccatgtgaagcaactctttcaatgtatataatgttagtgtgtttctttctaaatttaggatagaaaagtgaatagtgtgcaaaaagtatagctacattgcatctgccattgaaacataaatggggtatggaaacgttcaagctttttttttttctttatgcagtatagataagctttgttttgtaaatgcacaagtccaatcattgaatcaacttaatttttttatgtacttgaagtcattttattactctttaacactcatgctgaagttctgatattttgttgaaatccattgttttactctttgcatatttgttggctctttgcatattaatatattagactacatgcaaatacagtctgtcttgccattgtctgttgaagtgcaggtttgatccagccagtatagaactagctctgtaggggtgaggaggactgtgctgtgtatcatccttgattgtgttccttcaaggagcattgcactgtaagtacatcagaatgacaaattgatgaactgcaacagtatctttttgtcaatgttccacataatgcaaatgccatacgttgtgtgaatattatgttggaatacagtgctgatatcttggaaaaccataactgcctcttaatttaacatagaataatacatagttctgtattttttttaaagtgagcttaatgggtaagtattttttatatgctttagctatagctaaagaaaactgatacttaacaaagttgaatagtattattcactggtgctcctaaaatattgtttttcagtgtaaaatatgcatatcttctatatttaatatgaaagtcttgaaatgtatcagacagaaggggatttcagtttgcaaataatgagcaatgtagcaattttaacacatttcataaatatatattttgtcattggtggagagcaccatttgttgttttgaatatactttaaaggaagaggtacaaggacataaatgttgagattacctacaggatggaaatagcagtacagttcattgtagatattttgaaatgtttttgattgttttatataacctagagtgacttcccttacccttatttagatctgcatatatagttctagtatgaagtttaatagttaaggagttagctatttgttatctttaagagtagggtattgacgtgaacaattgcagtattttgcatgatactgttttatagatgaccttttaggaaagtggtgcatttattaattgaactgaagaagtagttcagttgaattcagtatcataattcacaaattggaggctgttgattttgattcatttaaggtttaaaatctttattaattgcaaacagtgcaattatttatacttcacagtgccttcccagaccttccaccttaggttctgctgcaaaaagcaccaggtaagcacaacctaaggacatatataaataaatatttcaatacattaatgttgtccctgtgaggtttttgtggttgtgtattcaaaggcaatctgctactgcttccccaaaatgtattttgttattttatgctaccatcttagtggaaagtctgtaagttgttaaagcaactgtttacatttctgggtaatgttttttattttacttttttttttttattaagacaagaaaatgatgagtagattgctgcagtaattgaactacatccaaatctttttgtattttttccccaaatatagaagtgttaatattaagaaaggacaattacacagttttcaagatttaggaaatcacttgtttagaaacttcaacagccttcacaatctgttttatatgatggacagaaaatttctttgccctccaaaattataatttctttatttttttcttattcttaaactataataattcagtaaggatattatgggttagaattttattatgatttttttcttagacaaaagttatatgctgaagaaggaaaaagttataaggcagtatgttttgataaaaggcatgtgcatcagtgaaatgttaactgtatagcaaataacctttcataatctgtagcaatcagtatttttctgatttaataatattttaataactgacgctgcatttaatttttttgccagtttaaaatgtttgtgtgtttttatagatgattttaactggtacatattttgagttaagttgaatgtatgaaagcagcatcttatcagttttgtttattcgatttctaaaatgtgctgatccttttaaaactcctgcttatctctgcaacaaagaaaaatattcaaaaatactgccttcattttcacacacagtgctgaagatgctgcaagcaccaaatcatagctcataaaatcaggtcctgagatagttacccataaagaggaatcctttgagtgtatgccattggtgagccgatgagcatggaccatagaagggctcaatgtagaaggtaaaattggcaaatcataattgagaaatatgaaatgtattcccatacataatatggtatagggtgtaatgtacctgcttttgatcacttttcattttaaagtgctattcacttgatcttaaatgttccatgaactgttaaatttcttaagttacatagttactacaccacatttatgtgtatgttatgttttaatagtcaatgataggtatgtacaattgataatataaaggggctcattgaaacttgagagcctgttgagttttggttagttgtagattgcatttttataaaaaaaaatacagatagattgatgataatagatattggggcattgtttctgtctcatgagaattcttttattcattaccataagccttcactgatactataagcattattttaaatgacgctgatcttaagtctgaaataaatggaaagcagaaaaggtgagccagttgatttgaatgcattggatattagtgttagaaacaatgtatagtttagattgaaactgaactgacttatttagcacttaaacaaaaatttgacaatgtttttagttttttttaagacagcttagtgtggtgatacttagaattctatggtttgatgtttcttttagaaatgagaagtatagttttattttttaatataaaaaatggttttaatactaaaactagtaatttgatactagttgtttataaacattgtaaaatatatcttttaaacaaattatcttggtagttaattcataagggtgggtttgggtaggaatagcagagtactttcagagggaaaggggagtcattcagaagtgatagcattttatttgtttgaatactctgccagtaaaatcagctgtacttagaaagttatctgttgtgtagaataatgatgtagagtttactaatcagtgaggatgtcttgtttttattttctgcaaactctgcctcactttaaaatgcattataacaatacctaattaaagataattttggctctgaaagttaccttattttttgttgagttagtgacttcatttttcttgccacaatataagcttttgagggatttttttaaattggtgcttttaataagcaaataaatcccagggttttattttcttcagtgatacccctatagaaactcttaaatgtatttgcgcatatatatatatatattttcttatgcatgctcgatgcattttcgtcctgagaaaaatgttctctacagaaactacccgtgtgtaaaaagaagattggcttaaaatggctactgtgatgggaacagtgtcttagggagatgcagcttggacttgaggtaaattgaatactttacaactgtggtttagagtttgctttaatgacattgtatgtaaaaggtcacatgattgctgtaattttgtattcattatggtttcctcaataaatgtacattgatgactattataaaggagtgctttgtgttttttatacatatattacatggtaaaattttctacttgactgggtttttttttatgtttactgtgagaaaaaatgattttaaaaagttttaatgataaaagggtaacatctggttgcacaagtcttaaaatacagaaagacttttaaatacagaagttactttatttgggttcacgttgtaaaataaaattgtcttccagaaaattaaaatataaaacaacttaatagaacgtaatagctaattatttacaaactcattttaaagactagaattttaaatcgaaggttgtgccactttttccctaagtctgatacacttagatcttgaagccttcgactatgttga

SEQ ID NO: 54678 - DNA, 1473 bp, Homo sapiens
ctttaggaaccatttggaacctgatactatacttctggacaaatcactatatttcagctgcttttgctcttagtcatttaaaattattacataccacagctagatgtcacaaatgaaagctaaattggtaagcttggttatccttcactagcagaaaaagaacctataggtggtagagttttgtcataagagaacggtctacttgggattttcaatgttttctttgccaaagaatgtttctcattctccacagaaagaaaaatttccagaaaggtgatgattttaatcttctagatgtaaaattacatatacctgatgataaagttgttttgcacaactggtttctttttaaagaaaaattgtttttcctcttagaatggcttcctaggagagtcatgttccgtctctttctgaggctttaacagattatgtttttgtgacctagcttaggcagatctacagtagctacaattcggcaaaaagaaacttttaacttaaaaacagcatactctgattaaggttggttacataatttattttctgaactgggatcctttttagaatgaatagggatgctattaataatcatgccctgacagcattgtggtcaggacctgtaatcaacttaactttaattaaatagcatcaccattttaaaagacttgagcatgagccacgtgcggtggcacacacttgtagtcccagctgcttgggaggctaaggtggaaggattccttgaacacaggagattgaggccagccttggcatcatagtgagacctggtcacgtgtttgggttaaaaatcactaacttcaacttctattttctcaatgggtaatgtcccctagatagggtccctagttattattaagtaggtaaaaataaaggcttgttaatggatttaggtaattatggaggaatgagtttggcttctgtgctttattttaccatattgattatttgtaatatggccattaatacatttactgtttagtcttttttgttttactttttatgttttactcaaaatgagtgggtgggtggaattctaatttttattgttaagggaagacattttaccttgtctttaattttttatttttttttaccatttccctgccagttagagatactatactatactgtcttgaatcctctgtaggaaaacatggcatagaaataattaaataataattagatgttaaataataatgctgtatgactaaagaacctccttaccccaccttttctgttgttgttctgtagtaccacaataatcacttgttaattttatttatttatttatttgagagggagtctcactctcgcccaggctggagtgcggtggcgcaatctcagctcactgcaacctccgcctcccaggttcaagcgattctccggcctcatactcccaagtagctgggattacaggcgcctgctaccacatccggctgattttttgtatatttagta

SEQ ID NO: 54679 - DNA, 1983 bp, Homo sapiens
tgtgttgtggctggagcttgggtgttgaagagatacaaccaaagggagagatgaggctgaaatggaaaggataagccaggggcttcaggctgttaaagatgttgaatgataggctgtacttaagctttgaacatcctgaagattgcagagaatgaagaatttcaagtaggatgacatcaagtttataacattcaatgtgaaataggatgaaatgtggctaatcttttttaagatttttatattttctcttcattgaaaataaggacaaagttcattgttctaaaataattttctttcttatacaggttagtccctagaaatgtttttctttagtcatcttctagatagagctgtttgtgcttgaggcgaaaccaatttagaaaaaaacaagggcacaggatggtttgagacagagcattggatttggagccaaaagacctttattcatatcccagttatgccactcagtagtttttaacctaggaaagtcacttagtctctgagacttggttttctttaataaaagctgatggtgacaacaaaaataatagaaaatttaagttttcatatactttttttaatgttctagttaattttgggggctgtatatttgccagagagctgggcgggggggtggtgtgtgtgtgtgtgagagagaattacagacttcacatgcaaaccttgaactttcatttattttagctaaggcaggaacggatccaaattcagcagcttgggctgcttattacgctcactattatcaacagcaagcacagccaccaccagcagcccctgcaggtgcaccaactacaactcaaactaatggacaaggtaactacagaacttattgtatgtgaaagccaaaagttgtgcttggaattatatatgaagtacatcactgtataatacctaaaatttctgacattatttaattataatttaagcagacttttccttttttaaattgttactttgaaatagtttcaaactttcataaaagttgtaagaagaatacccggagcacccagatagcccagctgttaatgttttattcccttgtttactctgttaccatctatatcatacatgtgtatctgtatttattttaaatatccattataattagttctgaaggaagctaattatatccagcataattagttctgaaagaaatcactgaagactaaactgtagacatgatgtcctgttgggtacttcttcaaaaatacataaccatcatacagccctccaaatcagtaagtcaacattgatatattaagttctttatatcattatggatttctgatttttgcagtaggttatatttttaaagtatttttataattttgataatcagattatcctggatttggccagtcagggagtatattcagggtggtgcctatatccttttgaaatacctgtcattcttttaagcacttccatactgtctggcacagtaagattgttattttgtgctttctgggctccagccctcgagtcagctatttcttcaaggagctcttattccttttagtagagtatggtagttagaaacgagacttgagtatgcttgttgctactgaggtgtaattgcttctagcttctttcaacaggcagaactaggaaatatatttacatacatgcatacctacatacacacaccaaaaaacacataaacatcgatatatgtatatatttttaaaaactatgttcatatcaccacatccgtttcagcattttggggttttcaagccttttccttttttgtacttgtttacaaacgtgagaaacctggtgtcctcagtgtatttccttatttgacatgcatttacttatatgttcaacataaccagtcttcaaacaggttggttttcttttctgtccaccacctctgtacccccagtaccttctatctttggcactgttagggatgccaccaccacatagtacttccctcctaccctcactgtcacattgcag

SEQ ID NO: 54680 - DNA, 1685 bp, Homo sapiens
aggggctgggcactgaggctcacgtctgtaatcccacctattcagaagtctgaggctgaggcttgagaccagcctgggcaatatggcaagacccatctctaaaaaaatttgttttaaattagccgggcagggtggtatgtgcctgtacttgaggctgaggtgggaggattgcttgagcctagaagttctagattgtattgagctgtgggcacaccattgcactcccctgggcaacagaatgggatcccatctcttaaaaaattatgtatatatgtaacagtctatataaatatatatatataacagtccaacagagtgttaagtattggggcattaaacttccaaattgtcaaataagatatctgttctagtactcctcatatgacaacttcatgtgagtaaaaatcaggcctgtatttaataactgcatgctaaagcccaaatacgtttaattattttctatattcagatttatttttatcctattatattctggcatctttccataccctgtagtttgctttccatcttggtcaaagagtcattctttgaaaccaattaacatttatttatgatccttttttctcacctgctacctaccttttaggcctctttcactcgtgtagtttcaaggaaaatatactcaattatggaatactttctacacataatacatttatcccaaaaaaacttgaagtaatttatgtaaatgaaattgcttgattaacttcataggaagtgtgctgtttggaatatgatgacacagcatgacagttaccaagcatgacttgagttgtgctaggatataggtgtgcaaagttggggttgtgttctatagcaaaagaatgcactcccagcgtaagcaacactgatggaaggggctcacagggtacaggatataatactcttaacaactaatttttggagaatgaaagggcttttctttccctcttgttggctgattgggatggtataattaatgggattgaagagtttgagtaggttaaaaggcagattcatattgggtaacttggatctgccaggattgtatttttgagcactactgggtggttagcatgattgaggaaaaatgatgggaataagaagtggaagtggtctttgtatcacaagttgaatttctcacttggagtagtagtgaagtcactactgtaagagctggtcagtgaatgtggttgcagcatggcctttgggcaagaagtaacccatttaactaaaaccagctggttggccccactcagatttatcaaagggttactgggtccctgggggtggatattgcttatattagacttagaatagcatactgttttaatattatatgaactaaaatgtttctttaaaaaaagagtggtctgttaatggatttatgtagtggtcaagaatttagacttcagagtcaaataaacctatatcagtcctagtcctacagtttactaattgtgagatgtcaagcaagtttttgaactcctctaagcctctgttttcttatctataaattaataaatgaatgaatcgggttgagtgaatatttagtaaattcttagtacatactagttatttgtaactgtgagactggttttttggtatggttttcacatttgggagtagaaataccacttcctaaagtctgttttatctcaaattctctatccaggcatagtgta

SEQ ID NO: 54681 - DNA, 1060 bp, Homo sapiens
tttgtgctattaaacatcatgatacatgaaaggccaaaaaggatataaattattgatctgaatgggattttagtgacagaaataggttgtgaggtggattttagtttcatagtgaaacaactagctattaacgttatcagtgaaatgttcagaagacgatgatacaggacccaagcggtttgggaatatattgtcaagacggttgtctcatgttaggcaagtagatatagagagaagagctgaagataaggacctgatttctgtgagtaagatggaaaaagatagtaaaagtaagaatgataaaaggaaagggaactactgctgtccgcaaacaagctaaaggaaatttaattgctaatttaaatttaatttaatttaaattgcatttaattgctactgctattgattttagtgaattttacatgtctcattattatggcagatgaaatagtttttgcaaaatgaatgaggaaaggaaggaaaacctaaaatttgttatttgtgactataagagggtagaaatggatgattatttggccgtagagttgtttaaccattactgtgtttttctgatttttctatgtcatccttttttttgtagggcccagtaaatcctttagggccacctgtaccccatgggccccatggtgtcccaggcccccatggacctcctgggcctccagggcctggaactccaatgggaccatacaaccctgcaccttataatcctggaccaccaggcccggctcctcagtaagtattgggtttagttctgggctttccccaaagattctagttttgggactgttttttatgctgatttttcttttcagtggtcctccagccccatatgctccccagggatggggaaatgcatatccacactggcagcagcaggctcctcctgatccaggtagaagatgcttattatttgtgtgttatctgtattattttccactcctgttacattattaaattttctagtgttgattctacatttgtatgcatcaccttcactcactttactctttcaacagtgttaggcactgcctctacccca

SEQ ID NO: 54682 - DNA, 1588 bp, Homo sapiens
caggacctccagaccgatgtcaacatgctgcagaaattattacagaccttcttcgaagtgttcaggtttgatagaaagttaacattttcattttttgtttttatggaaaagtattttccttcatgaaatctgaagttacctctatatcagagtctgcttgatgatgctttattaatggagaaagtttaaattgctttaaggtaaagatcttggagcaggaagaactactaccttaagtgctaccttatttactcttgtattttaaaaaatgttattacttattagggccagttcatctctacatttctgattcaggtatatgagagctgggaaaaataaacttaataattttatcatgaaacaaaagtatttctgtgctgactcttcgttcttgtctttccctctctataggctggtaatcctggtggacctggacctggtggtcgaggaagaggtagaggtcaaggcaactggaacatgggaccacctggtggactacaggaatttaattttattgtgccaactgggaaaactggattaataataggaaaaggcaatgtattttaaactcttaatgttttaacacattattcatttttctggacactttctgttgctgtcgtaaacaagtggcaatgctttttctctgaccgtattttagtagaaaagaattcttatgttaatatgtaacaagtaaaacataaatgagggatctcatgtatatttagagaaagagcaggattttaatcttactagcttctagagaaagcgaactaagagataattattagcataagaaatgtcttttgacccaaaaagtggtttgagtgtttttgtttgtgcattttggtttttcccgactcatattttaaaaatttgaatgtttataagtgtattagtttatatttacactgcttttaaaagcagttaattcaaatattttattataatcacattaagtttatgtttaaacatactaagtaaatgtaaatgtattttaagagaagcatgaaatgcttcctaaaatttgattttcagtgtagaatattaaatgaaaaatcttaatacaatattgtcaattaggatactgaccaaaccatatttttaatggcccatttaattgtgaccattttcttctaaatagctcctagtacacccttgaaacctttagagaaattactgtcttttgattttaggaggtgaaaccataaaaagcataagccagcagtctggtgcaagaatagaacttcagagaaatcctccaccaaatgcagatcctaatatgaagttatttacaattcgtggcactccacaacagatagactatgctcggcaactcatagaagaaaagattggtgtgagtatactttaaacttttaatttttagtgtagacccttagactgtagttaaattaagacgtttattcaaatacatcaaaggaaaatgtatcattactagtcagcatttatagatttcatgatatgtataatagatacaacgtgaagattttccagcaatgaaaataacctaattaaatgtgtagttacaggttttgagaacaaccttacatttgggtgtggctagata

SEQ ID NO: 54683 - DNA, 1423 bp, Homo sapiens
attgtagcatatgagtaagcaaaatggtagtttaaaaatgtaaataaatcatttagttcttggaagaatcagtttaattctgagataactttagcattagagttctttcttggaaattttggactattcttaaaaataaaaattgtatatctagaaaatttttttgcataatctctcaatctttgacccttgatggcattttctttcagttaaaagtaaaagcattgttaaagttagcatcaaggcacctaatcctgaactgggataggaggagtacttggttatattgttttatatttctctatttgaataagcttgggtatgctacagcttactatttaaatattaatttgttaacaggtcagcaaaacggttactggaccagattgttgaaaaaggaagaccagctcctggcttccatcatggcgatggaccgggaaatgcagttcaagaaatcatgattccagctagcaaggcaggattagtcattggaaaagggggagaaactattaaacagcttcaggtattgttatttttgtgaaatggctacttttgatctgttttgatgcccatttttgtccacttcttttgttaatatatattatttctatgattgtaacaggaacgggctggagttaaaatggttatgattcaagacgggccgcagaacactggtgctgacaaacctcttaggattacaggagacccatataaagttcaagtaaacttaactttatactttataaagaaagagtgggttgaatggggttgggcaaaatatgcatgaataattaaaatgttttgagacatgctttctaaattagctaactttttctgctttagcaagccaaggaaatggtgttagagttaattcgtgatcaaggcggtttcagagaagttcggaatgagtatgggtcaagaataggaggaaatgaagggatagatgtaagtaaaaatacccattcagaaatggttgtatgctaattcataaatataatagtgttttctgttttgtgttaagtagctctaacattgttatccttttatttcacctttatactttagaatacagaattctatatatcttgttaccctatttactataaatatagaattatatgtacttttatgatttgaggcagattttcaggaaatggcgcttttttaaaatacttttttttactttaaaccctgagaagctagctttcttaatacttagtcttttttacataaggtccccattccaagatttgctgttggcattgtaataggaagaaatggagagatgatcaaaaaaatacaaaatgatgctggtgttcgcattcagtttaagccaggtgagtacatataataatcttgtaagtgttggcagcagtgagttttgacatacatttattgtttaattaattttgtttctttgttt

SEQ ID NO: 54684 - DNA, 4122 bp, Homo sapiens
ttgaactataattttaatttttcaagtaaattttcttatgtgatactaaatatttcacatatacatgtatcaggaagtaaatgggggtaatttagtaatgaatagtatataatagtttatgatggtatttttcttttttttttttagattgcagcaaaaattggaggtgatgcagggacatcactgaattcaaatgactatggttatgggggacaaaaaagacctttagaagatggaggtaagttatactctaagtattttaaattgtttttcagagtgtttagttgaagtgattctcggtatttttctgttattttattgagatattaacttttattataaggttgttaaaattgtaagctgtatattggcctaaaaggggggaaagaaaactagacaaggtaagtaaaatttgaaagaaattttttaaaaaattttttaaaaaaggaagttttgtcttaatagaaaacaatttattttccctcttttaggattgtgccagattgaaagtttgcacagacgtcttgttaataatattaaaaaacatataaattgcttagaagacacttcactggttttactcatacgtgaatggattttaatatgctgtattttcgtcatttttctatttccaattgcaccttaaaggttgaaattcctatagtttgctactctagtgtgttgcaggttataccattttttttttaatgttctttactttcagtacttttgtgtttcacgtttagctttaaacctgtggattaaaacagtggatttacagtgctatgtatttttaaaaatcgtaatcgttgaagcttctgaacttagaagtctgcatgtattttttgttttaggtttgatatatgagttttgatacattttctttttacccttttttttaaagggaggattctcactgaggctatagaatgtatttgtagcttttgaccaggagaacttggtttccttttatttaagtgtctttcatatttatagtgaggtttttaatgtagaaaaaaaatgagctaatgatgcttcagatgttgtatgtaatgtattctttttattttatgtgtagatggctcttggacaagtccgagcagtacaacacactgggagggaatgccctctccttttaaaggcaggaatttttatttattacctgtgttcagtatgtaaacgtgaaataaaccagtggattcttaaatggacacaaatatttcttggattatgtgtctgcgcatattttatttttgctgcacaacattctgatgtttaatcatttaagtttgaaggggggaggagaatgtagtactttgagctataggttgtctgttccaaggtatgcattgtattcatctgtgtaatggatttaggtgaaggtagtcatgtagttgctttgagattttatttttttgctaaagttttatgcagtgaaatgtttgtttataaataatagaacagtttaggttgagattgccttgtaatgttgtggggggtttttttgtttttttttttttgggcatagctttgtggtcactgtcagatacactttaatatgtcagatttttgtagtttgataggcttttctccccccagtcttcagttcctgaggtggaagcatcattagcctttagcatgtgatattttgctagtaatggacctaaagtacgttgtcttgtgtcattctaatgtgcttaacatacattaaggtcagtgatttcttaagaatcagataactattttaatgtctgtgcatcttttgaacgtgaagagaatgaagtatcgtttcttttttagattactgagttggggttgaattttggcagttttggttcaaatgataaaccataccttcagatatttcaataaatgtttatattgttatttattcttgtttgggaggggagaagctttgtacttaattggcaaaaaattaaaagacacttaattttgcagatcaaccagatgctaagaaagttgctcctcaaaatgactgtaagtattccttttaaactgggtcaaaagctaaagtaacaatttcaatgttaagattttgttcatattattgggtatctttgaagttagttggtttatgagtattttggatcagctagcctgaatttctttgtaaatatatacctttttctcctattttacaatctgtcccattaattgtggccgggtatatgtaaagattggttgctgaattattttacatatttaacaactccaattcttgatctatacttgtacaacttgaaaaaggaaattattttgttctgtgccattgctaatataatgtcttccctttcattggctctcttgcccctgtcaatgccaatataaatattgtgtaaaaaatttgactctcttcaaggtgttgtctgtgcattagggagagatttttgaatgtttgatgtgattgtgttgttaaatatataagtaaatttaaattttgaatttttgttttatttttatttaattttttgatagcttttggaacacagttaccaccgatgcatcagcagcaaaggtatagtcacaagattttcaaaaagtactctgcaagttttggttgagctgtatgtaaaaacacaaccacattggtgtatattgaatatgtgtctgtgtattttttggtgtacctagttcatatcactccccttgggaaggtaccataaagtgatgatttttcttttgagtgagaaaaatttgtgatttggagagataggtggaattaaccacattttagaagaacaggggtgaattagagtaactgttaagatgacattctctaaactccacttcaacttctttacagttaatgccttcagactgttccattcatcatcccttcttcacttgatgtgtcatcttaaatttcttaatttaactactcaagtaataagatcatattttttgacatgagtctgagcctagaaccttagtttaagccattgggagacattagacttccatttttattaatagattatcttttatttgtaaacaaagtatctttcattgaaggaaaatggtgctttctgttatttcttagcagatctgtaatgacagaagaatacaaagttccagatggaatggttggattcagtaagtaacttgatttttaaagttttgaaaacatgatcaaaacatactttagaatctttcaaccaaaaaaaaaatttttttttttctaactagtaattggcagaggaggtgaacagatctcacgcatacaacaggaatctggatgcaaaatacagatagctcctggtaatgttacattctcatggtattttcagtgtgactagaaaactagcttttttttttttttaagccttctagtaacaataatgctacttttaatcttttgacctgaagttatctgtttgttttaaattgtagacagtggtggccttccagaaaggtcctgtatgttaactggaacacctgaatctgtccagtaagtttgaaaaatcttaaaaatctacttaagtaacaacagcagaactctttgaattttgtctcttctctttgttactgctttattttacactgtggtttcgctgccaccttccctcaaagtcctccaactcctttgaagtttatgcctcatgcctttctcaggtggggttcatcatctgaatcattaaacacagaaaatggttaaaacaactccatatctactccagtctctacttgtaaagccacgtgtagcctggagaagaatgcacagtcaggtcgactggtgacacttaaaactcagacattaagctcaagtggactgttgtgttgcctgcatttccctagttccattcacttttccactcctctcccaggctctttaatactgtatttccccacctccaaatcttcagcatctaaccccacgctctcccacttaagcttatttactgagaaaatggaagcaaatgataagaagcttttctttttccctaccactaaacctaccagccttcatttttcctctgttcacatagtactcaggtaattgctttccttttgtgttcgagtgcctaaagccagccctttcttcctactgaaggttcagcttgcagttgtactttcttctgcattgttagttctccctcatta

SEQ ID NO: 54685 - DNA, 1154 bp, Homo sapiens
aacacttttctctaatgtctttgtaacagttctcagtttttgaaatgctgttactgtttctttagtgtgaactgtcaactttcattttttcttttcttttcttttcttttctttttttcttttttgagacagagtctcgctctgtcacccagactggagtgcagtggtgcgatcttggctcactgcgacctctgcctcccgggttcaagtgattctcctgcctgagcctcccgagtagctggaattacaggtgcgcaccactgtgcctggctaattttttttttttttttttgtatttttagtagaggtggtgtttcaccatgtcagtcaggctggtcttgaactcctgaactcatgatcccccccgccctgcctcggcctcccaaagtgctgggattacaggcatgagccaccacgcctggcctcagctttcattttcatttggttagtttttgaactattcagtgggtaaagttgtataaataagtgtcttttctctgtatagaagtgtcttggagttcaaggagtgctgctttgcaaactcatagagtatttataaaagctaactgcagaaggtattcataggctaaaccgtttcctattcttggtagcaccattttctctggcctgaaatactttccttctactattagtgcctgtcgatacccagcagtgtatttactttcctgaggaacaattcaaatgctaagtgctttaagacctaagggtggaaaagcagtgttttcaggcattattaggaaaataagatttaaattagacacccagaaacaaaaacaggtttgtaattggtaaagtgaaagatggttaaagaaggttagattgaccaaagcgagaatttaccttttttttttttttttttttgagacagagtctcatgccgttgcccaggctggagtgcagtggcgtgatcttggctcaccgtaacctccacttcctgggttcaagcagttctcccacctgagcctcccgagtagctgggtgacatgcgccaccacgctcagctaatttctttgtatttttagtagagactgggtttctccatgttggtcaggctggtctcgaactcctgacctcagtgatctgcccgccttggcctcccaaaatgctgggattacaggcatgagccactgtgt

SEQ ID NO: 54686 - DNA, 1821 bp, Homo sapiens
ctggcgccctccgggcggcagcgctctcgagacactgttgcttcgccgtcacgcccgtcgttgtcacgcccttccccgcggacaccgagaatgacccatagcggaaaattctaccgcactacctccctgaggcagcgaccggtaagaaacaaccttttcttcaggcttcccaccacccaaacacagtcgcagtcaactggccactatcacccaccaccctgcaggaacaattacccagcctcaccccaagaacgcgcggagaggaggtgccaaaagaaattctgttctcgcgaagtcttaaacttaatcctcgcgacgtctctgttcctgtcgttctttctcagccctaacccacaccagcgcgttgcctcggaaacatcgcgagattttgttccttcagtctccgcccctttacggcacgatggtcgcgcaagaatgtaatagagcttcgacggccgccattttctttctttcttagctgttagctgagaggaagtctctgaacaggcggcagcggctcttatagtgcaaccatggcagactattcaacagtgcctcccccctcttctggctcagctggtggcggtggtggcggcggtggtggtggaggagttaacgacgctttcaaagatgcactgcagagagcccggcaggtaagtgtggaccgcgcggcggaatcccgaaagctcacggtaattggccgctgactgagtaggccgctacccttaagcgcatgaggaagaggaaagaggtgttcttccgggctgaaatgtgaagagacacgtttccccatgttggtaataacgattagagaccagaacccagttttgtgttcttggtgcctaatccacttagaaccccgacgcgtgctacgcaaagaaggcctgaagtctttctcccgcttctgcggcactcgcgtgtctccagtgagctagtttagataaagatcctcttccaggggataaagcgcagttagtttcacacaatttaatggaaggttctggtaatgagtttgggaaagaactagggtctgtcctggagccatagcaagggaagggatttatcattaaagtagcctttacagctcatttccgttctctctcgcaattaaaaccgctttcagtaccattcaccgtcacacctctacaaggaagggacttgaaagcagcctttttctgggcgggatttacgtgtcagtctgttccaccagtccgccccccttatttctcaaaatggcctcaggcccattataccagaggtttcaatttgaatctgcctctcagttcagagtcgtaaactgaccagacctctttgtattacgtagtgcgtgcatttgccctgaaggcaccactttcccagacgaaagctgttaaaatagtgcgtgtattccaggaaaataaaagataccttaatttgaactttacattcttagatagtcccctaatatatttaacatttcaaaatgtatggtgttggtatagatttgcatgtaagcaaaagaatcctattctctgtgacactatgcatattgtactaggtgctgggcattttttactagttttaagctaatgataattagaaaccagtgttgtgctgtgttttcgttgcattaggagttcacttagttaactttttaccgggacagttgaaggaacattgagtcaaaattagaattcataaaatccgttgtaacacatctaatgtgaacgcattataaacatgtacctgtacttttttataaccagaaatactaggagtagtcaacaaaaggtcatcattaatattagttctgcggttttttccacgtaatttaagaaattc

SEQ ID NO: 54687 - DNA, 1053 bp, Homo sapiens
aagttgaattctttattccacttatcattttcctacaaagctacatatgattatgaatgtggagggcctttgaggccagatggcactgaagggtagtttcacacaaacttttcttagaatatcagtcttggaaagaccttgaaggtaatctcgcccatttgtttcattttatattggaggaaaccataacacagattgctgagtgccttctacaaagtgccaagattaattgcagagccaagactagatttctaatccagtgctctttattttgtgaactgtcttctatatgaagcatcggtgtttgggttggaggttttctgcttcttaggtacaagaggaagaagaatctgtacagaaccaaaaacatcttaatttttgtaatcaggatgtctacctttactgacaacatttactgacaacatttccttctgaaaataggttattgaaagatcaaggatctttgccagtgaaatccttaactggaagtgggtgggtacaagatagaaaactcatttggtataacaattttgttgttttttagtggaaccttgcttctctgttctgacatttccatgtctctatttatagtagtgatctctttggaatttgccttctgattccatttgttcctttatgttgcttcatattaactgatattctcacttcatttaaaaaaaatttgaagggacatgtacttaagaaaaaggaattaatttttttataagaaatatctggaggtactatttttctatggtttatcataatcattgtttatgccaggttatctaattgtagcaataatataaatactattttttcaagcaagaatgttagttttaaaaaatttatgtgcatattaagctttagacaccttttatccaggacagatattacctttagattcttaacaaccttgctccttaactatgcactttgatataaatgaagattgagaggttttagttagagcttttaagtggtaaacggtcaagggcaggagctatcttatttacctttgagatgacaataatgcctggcatctagtaggtc

SEQ ID NO: 54688 - DNA, 1103 bp, Homo sapiens
agatgaaggggttattaataaggttacaggaatgttcacagtagaacttgtctttacacttaaaaagtactcttcttatattctatactttcattagtagcacaactgtgcacacctttgtcaatccagaaatgggcagtctgaaatccttcctcttctctacatccagctgatgggcaaattatacagatgctatttcttactacttaatcctacctgttggtctggttatatcatagtcatcctactttaggttcttgttatttctcatctctttgtgattcattcattcagtaaaagtttattgaacagcaatatattgtaaacgccttgttctagaaataaaacaggaccccgctggttacaatccagtggatgaggcataaacacacagatggttatgtaaggtgatgtgtaatacagtggagatatggggggaagtgtaggagctcaaggtccggggaatctaacccaagtttgggcttcacagaagcccatctacagggtgagtctcaaagcagaagtaagctaggtgaagggctcctggagtagggaagagggaaatacacctacacacatgccctatttgctttatatataacaaatatcccttcaaaggtattaactttggtgcctgtgtactcattaatgttaccgttgttcaaaaacaattttttaactgattatggttaatgcagaagattctcagtaatgatattattatacagttgattctcattatttgtcagttctgtatttatgaatttgcctactcaccgaaatgtatttgtaaccccaaaagcaatacttgaaatgctttcaaggtcatttttagacatacgcatgttcagagtggcaaaatatttaagaactagctgagctttgcacagaggctcacatctgtaatcccaccaccttgggaggctgaggcagaaggattgcttgaggccaggagttcaagaccagcctgggcaacatagtgcaacccctcccaccatctctacacacacaaaaaatgaactagctgaggttgaacaagtcagtggtctgccctcatgtttcagctctcatacttttaaacaagtctccttttcatggtccat

SEQ ID NO: 54689 - DNA, 1130 bp, Homo sapiens
ttaacatagggtgtttaatgactgtgatgattttcacctagtatggagtacataaatatatagttgtgacattctgtgttgaaatattggcatgttaacccatttgtcctgtttaattaggaaataaagacggtagagctagtcggaaaatgaatagttaatcgtggaggaggagaaaacatagctcagtactttgactagaggcagctgggaaagtgacgtcctgtagcatttgctgttctagaaagtacagagacacgtagtgaaaatgggaggatctagaaggaggctgtctcctgtgtagtgtatatttatctgtaagtgagccgttggggaaggattgaatacagagacgctgtctgcttgctgccttaagacagctagctgaattgctgattaacttttaaaatacccagcttggtttatttttcttagaatctgttgctaagactggggacgctgttttcttttacaaagggaaatctaagttaatttcaaggcattcgaaatggggaaagactattattgcattttgggaattgagaaaggagcttcagatgaagatattaaaaaggcttaccgaaaacaagccctcaaatttcatccggacaagaacaaatctcctcaggcagaggaaaaatttaaagaggtcgcagaagcttatgaagtattgagtgatcctaaaaagagagaaatatatgatcagtttggggaggaaggtaagtattctctgtatatctttctgtctcttcagctctgtctcttttttttttttctctctctctgccagcctttttcccctctctctcagcttgttaaggttatccttaaattggattctcagtcatatcaaaagtagaaggacaaatgtataataacaaggtttcatctctgatcatatgaatgagtattgcagagccatgaatgaaatgtccttgtttgccttttttattttagcattttgtattatacatattttatcattagacttacaatgttaacaatgtatattttaaaataaaccttgaattcccatacctattagtaaattgtgtcaaaagtcttatgaaacctgtttcgttttctaatgaattttctgccagaaccaataaagagtctttagtcattta

SEQ ID NO: 54690 - DNA, 1066 bp, Homo sapiens
tgttgggattacaggcatgagcctctgcgcccggccttattttatttttcttacttacccgtggaacaaagaatcaggaataaatattagagatgctgatttggccggaagcagtggctcacacttgtaatttcagcactttgggaggccaaggcaggcagatcacctgaggttgggagttcgagaccagcctgaccaacatgaagaaacctcgtctctactaaaaatacaaaattagccgggcgtggtggcacatgcctgtaatcccagctactcgggaggctgaggcaggagaattgtttgaacctgggaggcggaggttgcggtgagccaagattgcgccattgcactccagcctgggcaaacaagagcgaaactctgtctcaaaaacacaaacaaacaaaaatgctgatttggaggaagaatttgaaaacttaacaatttaacttaggatgtaatcatcaagagttttatagctgttctgtatttagtaaagtggcatttctggccaatattaatacattttaatgtaagttagccaaaatttattagcaatacagtttttgaaagtttaacttttaagagttgcaagcttttttctaatcatgcttatctcttcaattagggttgaaaggaggagcaggaggtactgatggacaaggaggtaccttccggtacacctttcatggcgatcctcatgctacatttgctgcatttttcggagggtccaacccctttgaaattttctttggaagacgaatgggtggtggtagagattctgaagaaatggaaatagatggtgatccttttagtgcctttggtttcagcatgaatggatatccaagagacaggaattctgtggggccatcccgcctcaaacaagatcctccagttattcatgaacttagagtatcacttgaagagatatatagtggttgtaccaaacggatgaagatttctcgaaaaaggctaaacgctgatggaaggagttacagatctgaggacaaaattcttaccattgagattaaaaaagggtggaaagaaggcaccaaaattacttttccaa

SEQ ID NO: 54691 - DNA, 1025 bp, Homo sapiens
aaggccagagggaatggagtctctgctgatatggcccaggctgcagatgcctccaggagagaggagagggttggaggttggatctagagatgtaaatagaaacggtggcatatcagcccacctagtctctcatttttctgagttcctaatacacatctattgtaaaaaactttatttacaacaaagttttgtttgtatatatactgacttttttcatatacggtaaattatgaaatccagcaagataagtccttgatgatagaaaccatgttccatattcctctttggtatcctgtccagattctcccatagtattatatatataatagatatcagtaaatataattggataacattgattaacctttgttactacttaagataaattaaaaacaattaattaaaagtattaggtcttcaatttatatctaggcttagagttcaacccacattatcaatctacaatatttccactcagcatttggtattcccaacaaccttaaagtatcaactataaagtcaagtatgagtcattaaaaattctatgattgtctgccaaaagcaatattatttataagacattgtcttgtttataagaaattgtcttgtttataagaagctataaatgaatcataagataaatttactaacttgtttttcccagcaaatatagcctctaattacaacatgtaacattaggagttctgaagaaacacacactgatcacctccctctatgccccactctccattatgtatgtatccagtaagcaaatacttgggagaaaataaacacaggatttgttaaaccatatgcagttttcccagggactaaagatagcatgttttatagttgcatggcaacaatgaacaactgaaggtggcaaatgggggaggaaataactcttagctgaaattcaaataaattttattatgagtaattggaaatacagaaatggaaaatggaaagaggaaaaggaggtggggtgatagagggggaagaataaatttaataataagaatatg

SEQ ID NO: 54692 - DNA, 1040 bp, Homo sapiens
gggctctgttacctcttcagaatcgttgttccttctgctccagccagactggtctccttgaatgctggagccttaagacttttgcattggtttttgcctccgccagaacctcttcctacagaatgcccttccttaagtctgttcaaatgtcatcttcttggtgaggctagcactgatcatctctaggtgcaacactccctgttcccttctctgcttaatttttctccgtagcatactatcctatgtatatttaacttattttgtttatggtctgcccccttgccccaatagaagctccacaaaggcaaggatttttgtctttgtttactgatgtggccctcaagggcctagactttgcctgaaacatattatagttggagtttaaaaaatagttgttgaataaaaggatcctcaccaattcagtagttaaaacctagtgtctttagcataaagctttagtattgattacaatactaatatcttatgtaggtgttaattttttttatgttctgctatgaggaaagagactagcctttaggtgggggtagtgaggaacatcactcatatctttaaaattttttgaaaataaatgtatatatttaaggtatacaacacgatgttttgatataaatagtgaaataattattacagtcaagctaattaatatatccatcttagaaactatgaaatttgaggctctgtttgcaagcatagtcacttcctaaatgagttacagcatatgaggagctgcttcctgaggcttcccagaagctgcttccttttctcaacttgctgacactagcactgagctcttttgaaagtcaatattctgtatttatgtggtacttctagaagacatgaaatgttctgcagactttatcatttcccagcagtgcaaataactggcaagtggaactgttatctttctggttcacaaatgggaaactaggacgaatagagaaaatagggttttactgatttgcatatagcaccccctgccctggaaaaacaagttacaaaaatctacaaaaaatgaaaga

SEQ ID NO: 54693 - DNA, 1051 bp, Homo sapiens
cactgagagtgataaaaggaccaaaaacagagcagtgaggggaacatcagcatttaaggggcagaaagagaaggaggagccagcactgaggaatggccagacatggaggacctggccttctgggtagcctttatccaagtactcaagatcaagtcacttgtcccacgagcagatgttccattgcactttcccaagttggctgtggggctctgagggaggaataaaggccattagaaaatgtaccctcagaatcttctgtgctggtcagaatttaaattactgtttttcaaccagtaggtttcaaccagtgtgtttagaacacaaagtagaatagagttgaaaatattgtgctttgtacattgcaaatattgtttcagttacaaataaatatgtgtatttcagttttattatctttgtgtatatttatgggtcatgatataacgtatgtattttttactgtgggtcacagaaaaaaacatttgaaagccactggcttaaatgactcccttgttgaaagtttgtagttgaatgggaaatctttcccatacttaacatggttccccctggtcagctggttactgattcaaattttccttgttctagccatgagctgatggcagcattcccagtccttatcaagtatcggctggaatgtctgtagtggtattttttagggcatggctcacttcctttctccttttgccaatgaaaaggagcatggctttacaatgagctcaaccttgcagagtttgccctgtaaacctagattttcccaaggccatgaaaatccctcttccatttaaatgactctaagaccagacaagaccaactcatttgttttcctataaggtcttttaaatgcagaaaaagaacaaatccataaagctttgatttggttttacttaaatgagtctcgacttcatttatcctgcaaatttccaatttgtgattcttgcgtgccctttatggaaagaggtttgaggaaggaggcctgaaatatttctgtaagagttttcaaaagcaggaagaaaattggaagaagaaacttacc

SEQ ID NO: 54694 - DNA, 1067 bp, Homo sapiens
aagttatctgttattattactattattataaaggtgtatccttttctttaaggaataattttagaaacaagataaacccactgaaacaggaaaagcaatgtggatgaattggtgatcaacaagtatttgttgagaactctggcactgtttggattctggaaagacagatggcaatatcacatctcatatcaactaaggaaatatgtcagtacatcataatagtagctgccattcgcttttcctaggactttctaagtaggaaatcatttagtccttacaaccaacctaaaaggtgaagcagtttgcccaaggttacagctagtgagcgagggaggcacacttctaaaccaagcagtcagcctccagagccagctctctaacagctgttacagtgagtcaacatgcttgctgtcctcagggaacttacagtttacataaagaggcagatacattaagaatcaagtaattctactaacaataatagctaccatttgttgaatgaaatatagtatagcagtgaagagcatagactgtgagctcagttacttaggtttgattcctatctttgctgcttttaaactgtgtgatttggggtgttatttaacccctctataagcctgtttacttacccataaagtattttgaggatgaaatgagttaatgtatgtatgtgcttagaacagtgttatgtaattgcaacccattgtgactaggactactgctattatggcctgacttaataatcctcatgccattcctatgagggtttttcagctaggtaaactgaggcttgggcagttaattcattaagactgcccagtggcaggcgtaagtgtgggcatagcactccagtcctgtttgctctcgaggcttgtgctctgaacattatgtgttactgcttcttcagaacataatgcagaccatgatgcatgctatagtgcagatttaaagagtgaagtttatctgagcgctgacttgtccatgattgggaggggttctaaggcttagagagtgatagggattgagaggtagtaagattggaaagaaactccctcaacaaagaaagc

SEQ ID NO: 54695 - DNA, 1047 bp, Homo sapiens
gataaaaaaggaattattagactacaaaggagttggcattagtgttcttgaaatgagtcacaggccatcagattttgccaagattattaacgatacagagaatcttgtgcgggaattgctagccgttccagacagctgtaaggtgatttttgtgcaaggaagtgggtctggccagttcggtgctgtccccttaaacctgattggcttgaaagcaggaagatgtgcggactatgtggtgacagggacttggtcagctaaggccgcagaagaagccaagaagtttgggactataaatatcattcaccctaaacttgggagttatacaaaaattccagatccaagcacctggaacctcaacccggatgcctcctatgtgtattattgcgcaaatgaggtggtgcatggtgtggagtttgactttataccctatgtcaagggagcagtactggtttgtgacatgtcctcaaacttcctgtccaagccagtggatgtccaagtttggtgtgatttttgctggtgcccagacgaatgttggctttgctggggtcactgtggtgattgtctgtgatgacctgctggggtttgccctctgagagtgccccttggtcctagaatacgaggtacaggctggaaacagctccttgtacaacacgcctccatgtttcagcatctatgtcatgggcttggtcctggagtggattaaaaacaatggaggtgccgcggccatggagaagcttagctccatcaaatctcaaatgatttatgagattattgataattctcaaggattctacgtatgtccggtggagccccaaaatagaagcaagatgaatattccattctgcatttgcaatgccaaaggagatgatgctttagaaaaaagactttttgataaagctcttgaacttaatatgttgcccttgaaagggtataggtctgtgggaggcatccgggcctctctgtataatgctgtcactattgaagatgttcagaagctggccgccttcatgaaaaattttttggagatgcatcagctatgaacacatc

SEQ ID NO: 54696 - DNA, 1035 bp, Homo sapiens
ccaataaagttttatacagaatcataaaagttacaacagataacactggagccactctgctccaagtgggtgtggtaagagatagaggaaatcctctctcctcatggacttcttttcattttgtatcctggcatggctctttagaaaactccagggttttgaaagagtgtgaaaatcactaaattagaacattctgtaggtattttaagattttatttagattattatgtggatcataaattaaggtgatcacagcagcattgttttaagaatggaaacttaaaggtgtatgcaagagaaatctgtttctacagattttccttatgtatgtgtatacagatgtaacacataaggttgatagcagaagtagggtattaacagtttttatgaaatttagacattaccccttttagaccaatttattttacatttaaaattgtactgaattgtgcatgaaatattctatgtatttccatgtctttattttatttgataaatatgaatgccattagctccaatctcagaaacaaatcactgctcttttaagcctccgtcttttttgtcttctatgtaacactttacaataataggctaatcattctcaactcctttggtatttattgcaaagacattaattctgatgtgctcatttagtattaatgtgaatgtcataagtacttcagtaggaataggatctctactggaattcagcattaattagccaggtcattacttcaaagtgttactctttccttttaaaacagctccacttcagcatactccttcctgcaaagtacatccaggctctttctattagaaggggtacttacaagtatttgaatctattgagataaagttgtgaaagtgaacaggatacaatagacaaggtgtggtaattactagacaactgattaatagaaagctgatgttttaattgagcttctgtggttcctacaataacttgaattgaataagggacttgattgtattttaaatctctctggagcataaagaagcaatagcattaaataaaag

SEQ ID NO: 54697 - DNA, 1035 bp, Homo sapiens
cgtgagtcccaaattcttgaatgattaaggatttgagtcagtggacattctgcacttggagtgagcaagataaactccaggctgatgatgtcaactaatttgggaatgagtgagtgacatttcaaaaaacagaaggttgagaaggtgttcaagaatttccaggtcttgaaggctagaaaaagccaacagatttctgccttgcagtccaaagctcattacaaggttgtatgttggagtgctttgctttaggcaactttcaagtaaatcaagaaatgagccctctcccatgtttgctgcactttctagttctcactaaattttacttttgacctctgagacatttgcaacggcaccaggatgtggttacaaattggattagtattaccaagcagatccttttgacatgctggaagacctaatccatcagttacctactgaagccaaatggatgacgtttgtaactccttggggtaggttttgagatacacaacaggaggacaaaacagaaacttttgaaaatatggaaaagaaactattcaaaacaaaggaaaggaagaatgctcgaataaatgctgggagacctagattctggctctgcaaccacaaaatagttttggaagccttacaaagttacttgacctttttcagtttcagatttctcacctgcagatgtcttctgtagcttatcacctgcaaatggtctcctagtaactactgacatgccaaatagttgggatcaattctctccctcaaattgcacacaagattgaagtcaccatattcttcaatactctcattagataaatacatttcagagaatactataaataagcaatcctcctggaatctggcaccattgagaagaacctagccaccagtggttttaggagagagctaagggagaaagcataacatgtaaacaagatcacgggatgagaaattcacacaacctgtagagggcactaaggtactttttagagaaagaatcagactaatgggcatgagaggtacctgttaccccaagtgagaagcaaa

SEQ ID NO: 54698 - DNA, 1072 bp, Homo sapiens
gcctctatttttaaaatagagactaaacacacaattttgcacatatgtgttgggaattcaacacatctttttctgttgaatagaactgatgagaataagaaaattgtggaaatacactcttaaaactttagaatcttattattgttcaaatcaagatgtgttagataagtgcctcatcagtgaggatgatcgtggtgaagaaggaagagaaagaaatggaggaggagggggagcgggccgcagaagaggcaaagacaaaacactggtcattcgggaatcagtaaaagttaatcctcacaatggtctgcaagtccctaaatggtctatctgcaccacggcccggtcctccagacacattcttctctgacctgtcccccttcactccccttttgcttcctccattccagtcatttttgccttcttgctgttccttgaatgcaccagacacaatcccgccttagagatttcagtgaagctattctttctgcctcaaatatttttcctccagatgtttattgggatgatttcctcacctcttttgagtttttgctcaaaggtcatgttctcagcttaagacctaccattacctcctctctaacaccattacccttcctccacagcacacactctcaacatccttacgctgctctactctttcttttctacttggctcatttcaccttctaacacatatattcattatgcttattatttattgtctctctccgtttatctgagctgccctcccccactagaatttaagctcaagatagtgggattttagtgattttgttcaccgatataactcccagacctggaacagtgcatgacctataataggtgctaaatacatattactgtaagatttctcttttttatatattattttctctcgctataatttttttctttcaattttttgttttgttttgttttgttctgtttttttttgttgttgttgtttttgttttttttttttcagagggagtcttgctcagccacccaggctggagtgcagtggtgcgatcttgtctcactgcaaccacaatctcccgggttcaagcgattctcc

SEQ ID NO: 54699 - DNA, 1258 bp, Homo sapiens
aaaaagaacccaagagttacttgtatcaagtgggcttaggtttaatttacaagaattagtagataaaacacacttgtatatgagccaggtgtggtggatcacatctgtaatcctgacactttgagaggccaagatgggtggatcacttgaagccaggagttcgagaccagcctgggcaacatggtgaaacccagtctctacttaaaatacaaaaattagccaggtgtggtggcacgcagctgtaactctagctacttgggtggctaaggcacgagaatcacttgaacccaggaggcagaggttgtagtgagccatgattgcaccactgcactctaacctgggtgacagagcgagaactctgcctcaaaaaaaaaaaaaaatcacttgtacatgtatttgcttacttatttagttctcctctccatcccgcctcctctttctcaatgtaaacctctcaagagagcagagggctttggtgatctcttctcagagtcttgaccagagcctgagatctcgaagccacctttccaggtgctcaatagtaattttaaatttccaaaaagagaataaaaggaggaagagaaggaagggtgaaggaatagaacagagaaatgggcaagtaatattggggagaagaatgaggaatgggtgcatagaaggaaagtcagctaatgaaagaattcttagtctcaaacaggcaatggagaagagtagcagagttgggcttttccaagtatgttttttggaacactggccctgagagatgctatgaagaaaaacataggggctaaatgagatgagtaagggatacttaaacctctttctcttaaatatccacaatcagcatgagcatattaaagactctgagaggcatttctaaagaacacacacacaagcctagttaattttgtttcatccaatatttcccaaacttatttgagtatagtgctctttttccctgtgatgtttattaatgagatctaaagactttagcaaagtataacagatatggacatgaaactagcaaagaaaatacctgtgctttcattatgctgtgaagctggttctggagcgagagtctcaccttcccttcccggatgcctcatgcatggagagcatctgcagctgggttctgaggcagtcagggcaacagctctcaggctgattctaccctctgacccacccttcacccagagaaaggaagatggactgaacagtgaaccttcctgaagcagaaacactgagagataactaggag

SEQ ID NO: 54700 - DNA, 1052 bp, Homo sapiens
ccaattcaaattcaacaaagagtttacctagtcaatgtgtacttgttagttagacaaaaaaaaaaaagcataccttttaaagtatgctttcttaggcccacaaactggacattcactaggtgtatggtacgctgaattttaagttaatatgttcataattacttcagaaatgtgtatgattaatctcttaaatcttgccacagaaaaaattttcagttttccatgtattgaaacatgtgtggactgattatatacagtgcattcaaacagaaatgtctgtttcttcaaaattccacgcaattgtctaaaaataattatttctaagaatataaaacaatattttacaaacaataagttcaaaagatcagttgaaatgagcaatcatttaaaatattaaatatttattccccaccccctttgatacattcgttatttttgagaagaacatctagaaatctagaaatccttttctttagtagcttcagcagaagctccttctgaacatttcagttgtttttcagctgtgctaagtggaagaaagggcccttggaaccaggtcaacatggtttcgaatcctctttctactacctactagccgtggaagctgggtcaaattatttcacttctcaatattctcttcagaaattgaagattataattcctacctggaaggcttttgtgaagattaaaggaataactattcctttacctcacaggtatacaagctcctatgaaaagcactttgcaggatatctgacctggaaatgtgcttagggttggaataccatcctattccttttgggtcagtgcagtgcttcccaacttgaaaaacaacaagcccggtgcagtggttcatgcctgtaatcccagcactttgggaggctgaggcgggtggatcacttgaggtcaggagttcgagaccaaccaatcaaactggccaacatggtgaaaccccaaatctactaaaaattcaaaaattagccagatgtggtggcatgtgcctataatcccagctactcgggaggttgaggcaggagaattgcttgaaccag

SEQ ID NO: 54701 - DNA, 1039 bp, Homo sapiens
gaagcagagacactatttagggacccatggctctgactttgtctgctcttccccatcctgcctgcaggaggttttcttctttgtgccaatttggttctacaagtgggagagcctatatgtgcaaacatttccttgcatggaagtgcctaggccgtgaaatataaatgcttccagagtaacaagtttgagtttttaaaattgtgtctttcaatgctggcagtagtgtccctggcaattgtgtgacccagaggaaccagaggaaaagaaaaatcaagccaagatatgctttatctgcatgcacctgcttctgatacccatggtcacctggatccaagttctatatccttggctaaatacactgggaaatcgcaggtgtgtatgtgatatcttcctcccatctgtaaccaacctgaaatgctatcagtcctgtgataacaaggaaattctgatgtagagatgttggttggcttaaggtgcgtaacagtaaaagaagtatttaaagctgcatttttgaaactccttttaaagcctagattctgtttagctacagatctcatttcaacctttttttttagctgaaaaaccttttcctctaaaaacagttctacatattaatgaggaacaagtatatctgcactgattaaagcaagatagggggcagaattaaacttcagctacacccttgtcactacggcaggtcctgcagcacctccacaaagctcaatgttgtagtcttaagagtagagatgggaaaacattgacctacaaaatgctgccaccctcagacccactccatgttattcaccttggtaaataattccttcaacaaacatactgtgtagctattgagtgccagactctaggaatacaaagataaataaatataaatagtgtctggcatcaagcagctcatagacagagggaggaggaaaagagaaaataaataaataagtaaaacaaaaacagccactgatatttagcttttctgtatcaatgctcacaactgtaagagatagaaatatttaaccctttaacaaat

SEQ ID NO: 54702 - DNA, 1918 bp, Homo sapiens
aaagcgcagccagatgtggtcgggccgccgccgggactggctacgattgggagcggcggggctgctgctgccagggcggcctcgtgggtcgggagggtgcaggggccggggacccggcgggccacggggagggcagagagcctcccggagccgcagtgagagggcagcagcgggccgcgttgggcctgcgggagaagttacggagtgtatgctgctggagtggctgtggggcagggagcctcgggagcttggtttgtgggatgggggtgccactggggagtggcgacgagagaaaggcgtgggaggagcgcgagggaaggggagacccccgcgctgcccgagcgtgggctccttgattggctggggcgaccctcaggcagagggggcgagggcgagccaaaccatggaagcgccccagcagtgtggaggtgcgcctgcgagacttctgcgcttgggacccgtaaagtttgttcctttcgccagactgcggggtgggggtgaggggagaatactggaagctttacttaatgctaaagtgtcgctgagtggaggctttttttccccccctccaatcctctgttcactctgtgctctcaaagaatagttgggagggacaagtcctgcggtatctatcatagcctttctctttttagggactcctcctcctcatcttttctccctctccccgccctccattccgttcttcccgatacaaactgttgtctcagattccgaccgagggaatgttttcctcctgtttcttgaaaggtgtcaggctgcttagcagcttctcccaagcagcctgggagcgtctgagctgcagctaccaaccatatggttcccgttacaaaggccaggttctaaggcactctcttccccaccccgccctcaattctttgattttattctgcattctttcagtacgtgcacttctcttcccctttccagaggcatagatttaacggacgtagttgattcattcatttctctgtcactatttatgtgtggaacgggtcccaccgagtttgctctttgctcaacgaagttgcacaatgaagaaagtcacatcctttggtaaataattacctgttaggttgtctcttgctaagtcaggtttgatcttgggcaaaccttagaaaataggcactaaagaggcaatatgcatccagagcagaaaaatagaatagttttggtactcatctgtggcaacattccaacttgtgatgggactgttttgacctaactaagggtactttgtaactttaaattttgtatcttcgtaatacttgagaaaccctttaaaagaaaatttacttctgtccaggtgtgttatggaacgttttgttgtctctccctccacccttccataaatttatgcataatagaaagaatactacagaacaaatgttctgttgtttagtttcttcagacattccgattctctccttttgttgtttgcctctaaaagaggtgccatttcacatcattctgcacaaattgtttgaattaatgcaagtgtgaattcttaccgtttgaaggggactattagcatatcaaaggtttcttagctttagctcaattgagaaaacttcagcctgtcttccttttgcttccaagcggaggcccaaagggcaatgagaattgtaaagggtaaaaatagggaggtggattcaggctgtgtttctgaacttttactgttttgtagttatgtgggccaaaaacattgtctattgctgtggagcccttgcaaatggcaagacaattattttctattgataaatggtttgttcctagaaaaagagtgaccttttgttttatgatagtcactgttgcctgtcttttggggtcccttcagtgtaagagagagtgagaaagcctttccttctaacttaatgcttttttaggaactacactttgt

SEQ ID NO: 54703 - DNA, 2615 bp, Homo sapiens
atgtcatgaaggtcaagaggtaactagaaatctacaaaccatagtaataaaatgttattgctttattttctatcaaaatatttatttgacctcacttttgtgaatattcaaataacactcagtttattgacagttgtaggtggaattctaagatgtaggttaaacatacttgtacctacctaaaagaaatctgttttcattttaacaatccataccgcttgcccaatgctgatatttaagaacatagattaagggttacttagattaagaatgaaagatagctttggaaatggaggaatttagtttcacataaggtgctatttttacaaaagtttcttcaaagactgtagcacttttgcctcttactgtttcaccatatctgattttgagtcttgaagggagagatgcgcatttgatgtctgtctgcttttctgcagaaaagatttatgtaaaaaataagtgcaattatttttaaggtaatatattttgcaaataaaatgcatcgttacaaaaaaatggttcttcaagattatttgcaaaaatgcctagctaaaaacttttcaaattgatagatttcgataaagcattaaaaatagcaagtttagctactaagagctgaaaaggagttgaagttctgtgaatgttttggtcatatcagttcctatggattaaatatgagttaatgtaacctaaatggataacttttgttgctatttttaacaaagattagaatatttatatttccaagatagattaaaatcataggctagtttacttctgtcttacataagactaattattctatagccccacccaaatattcatctcttcaaataattcttgattgaaggttgaaaggttgaaaagtatttaatcactcagattattgtaattaggcttgatgctgtcacaaaaataaattgagactattctctaaaatctttttgctgcctaagatgctctcaaagattggccaggtagtgattatattttttaatgctttaagaaaaagcttaaggaaatagtttctttaacacagagatgaacagttaattattggaattagggaattataatccttgacttagtgtggtaatttctaaaggagtaacaagggtctgtcaaccctaaattttactcaggactttaatttggtattttgagtgtagtatataggttttgttaagcatgttaagtatagaaattttcttaatgttttgattgttttgatgtaagtatttttgtgtgtgtgtgtgagtcacggtgtcatgagaaaagggagatcctaatcaaaaatatttaacatttttttcctgagatcatatatctgctgcactaagtaggcaataatttgtagatattttttgatatattcttatccaacagttttttaaaagcttattttattattattatttttttacaaaaaacctcctatatttgacaaataaacattatctaaaggaaaaaaaaagtagatggaataaaggaaccaagcgcttaacatctgcaagtaaagtgcagcttatagcaaaatactattgattggtttggaagtagaaagcaagtttaaatacaatttgtttaattacaacgaaaatgcagttttatgaagtaatatagtttgtcttcacagataattttatgcattgtctggtagtaagtaaaatcccatcacacttatataagtttgttcaattaccagaatgactaaaagaaaaaaaatcaatttaggttgaaaaacaacagaaattagattaccttggtttgtaggaactcgccagcagtgtctacattgcttaataatatcaaaagttaccatgttcacagtgtaaggatattggcgccagttttgatatgcatacatttgttttcttggtgacttttgttagatgcagagttttttctttctgcttttcatttttgttttgtttttatgaaagctattgcatgacatacgagaaactacttccactggcatattctcatttattttagaggtttgtttttaagtagttgcttttccatattccttggatttattatcagttgatattttagattagtgaaatatcaggtgtaatcttaagaatcaaaagaaacctactccattataagatataaataggttattatcagcgaccaaaatacattttggcaattcttactactgattctagaattacattgaattctaaatcccaaattcctgtggcaataaagtagcatgggattcatcgtagcagatagctgggcacctgttttattaccaccttgattaattctggcacccagatttacggaagtgcaggaacaagcacaaccgctactcaaagccaccggctgtttttaggtcatgaagtcaacttcctggaatttctagggaaaatagttgaaaggggaggacaaatgtcactttaaatagagatgtttaaatcagatttctgcctgagggtaaagtttaggtctgttttagcccagatgtaatgtctccctctacagagcacagcattaatcacgacctgacaagaaaacgtatgctgagcaaaacgtggcccctgttggttttgtcattgatttttccaatctgtgaggagtacattataatcattaaa

SEQ ID NO: 54704 - DNA, 1111 bp, Homo sapiens
tacttgtggaaaggaatatggcagaagagcacattgtgtaaacaaatctaaaacaaattctgaaaacatattacagaagggtaaagagcattttgcaacccagatcagtttttttttaattgaaatgaaaatagatttttcataaatactctccaggtgtaaattttagaattattcagaataagaagaaaatacagttagcactgcattcatttaaaattgatcttttatctttgattttaaattgatcctaagatgctacctttgtttactttgtgttcagaaaatgaatcagataaatgagccgggcagctttttttttttggagtggtctatcatttcaggctggtgctgtgtaagcaaggtaatgttttctttttccttgaaatacactgtctgagtatgtcttgggtgactttgtgaaaagtttgtgtatcctgtctgctcaagttgccatcttaaccaggatggagggcaagaataatcatgttgaaccacagattttcaagagcaattattttaatcaggtaattggtaaggaagagagaaaaatgctggatagtagagtagtatttctataaaatggtgacttgcatttttactaaggtaactgcccacgtttcaaatatttttgctaaaccttgttattacctgcagagggagcttttatatgcgatgaaataatcaaagcagtataaattgacatttccctttgaaagttatgttttattaaaatattttttatttttgtttgaaaaaattgttctaaagaaagtaaggcattttgagatgagccaaattatagtgcaacttaatgtactaaaggccttgtgtttatcatttcctttattcatagattacaaatgtgccttatcatttcctttattcacagattacaaatgtgccttattatatttttgattaaaaataacttaaaatataataaagataccagatccattttgagattataattttttatttatgattgtctaaagctcagggagaatgactgcagaactgtcttgtttaaatgcatagtagttgttacaagagagatcccagctttttaggtaattttccagatatgtaacatattattaaatgacca

SEQ ID NO: 54705 - DNA, 1045 bp, Homo sapiens
ttgtactgaaaagttaatcaaattaattgttctcataaaagtattattggtattttattagggatgtttatgacaaggaaatagattggtaactggttttcggtttaaagtaaccatgatcttggtaaattatcaaagaaaattttatcacatattcttgaattaataataaaaaaatacgaatttatgataaaacattctctgctcctttgtatatacattatttaagcatagatgtgtatatattaattgttcttgcatctgtgtgagcagactggtttttaaaataataagctattatgaatagtatatattatgaagaatagtccttcaagtgagagtattatgtattaagagggtagatttgaaataatattttaaatataaattttataagaatgggagtcaaatatttgaacatgttaaacattttaagtggaagttaccaaagaatatgataaaccctaaataagattagaaaatttatatatgtgtatgaagagtctagaatgcaaaattataaacctgcatgttttaataactgtattggaaaaaaatattttaaattgctcttgttattcccaggatttagaaattaatatttttattttaggaacaaaaataaacaatattagtgtcattttgcctgttgtatgtttcaaagccatttcttttgcctatttaataaagattttctcaaattgaaatcttaacaaaggtataaaaaatactttttattatctacactgaatgtagtagattttgtggtgttcaggtaatgttgttaattcaaagctgtgctaaagagaaatgttaaaatcttagaatatcaagtttgttattttaaaatgagaataaatcataaaattttatacattttcttcaaaaatttaaacacagtagcattacctttatttaaaaataaacacaacatctaaggaaatccctaaaattcagaacaaaaacactcatgctttctactcatgggtaactttgtctctaatatttgtgtgttatacattttaataggaatatgattgctaaa

SEQ ID NO: 54706 - DNA, 1073 bp, Homo sapiens
acagaaaagcggctcttgttagtaaattctgtctcataatgattataattttatgatgcaaataagatctgagactgattttgtaaagctaacttcagttttcatttagagttgacatgtatttagtacatagaatttaggcttacctaaaacattaatgtttcattttacacagcattagtgcataataacaaggatgggtgactttggtagttctcatgcttagctggctcttttcttttcctgttctcttcatgttataactgttttgggcttaatagccagtgtttgcagtagttcactgtccatgagtagaaaccaaaaataaagctttagatagaactccttatggtggctttgctcctggtggaatatcaacattagttaaccagttttagaaaattgtagtttaattttcttttgcccttattaatttgaaatgtgttatactctctttcagtgatgcttattaataaacattttattttttctacatttgttaaataagcctcatcacataataaggctaggtgtgatttcctggtaatgtaatgtaaatatgtgacttaaaattagttagcggtgttgtccttttaagtaattttgcggacagttttaggcgcgggatatttaatgcagctaataaatggaagcaggttactgtctgaaagactgcagctgactgtacattgcacgtagtgtataaaacgttgagggctgttgggatatacacagctgaagcatattcctggaagttactgctcagctttggaaggtttgatagtaatgatgcattaacggactttttacatgacagggtaataggatacttagatcaaaaaaaatgacagaggtttggtagacaatggtttgtggtttataggaacaagattaggatgaaattgtttgaatcttatttgaaggataaggaaaaagcagaggtgggagtaggttgtacgttagaagtggtttggatttttgaaagtcatagtcatttatagtttaagtagaaatctgttgtatcttgttttactaagaaatgaactattacgtagcaagcattaccaggagct

SEQ ID NO: 54707 - DNA, 1045 bp, Homo sapiens
ggctaatgtttgctgtgattcctcacacgacctcagaaagaagtaaaacacttggacagaacccagcaaatgacctggtctcatgtgatcctagaagccgagaaatactaagtcatactcctgaagtttttgtacactctgcagtttggagaactggatccataggggctatgaatacctagcagtcagggaaataagtttgatttggtgattaggaatgtggcattttcagaatccctttgtatatggcattattttgccatgtacaaattttggcaatttgactgtcaaaaaggcagtcaacctttttgggcttttgactgttttcagaatgtaagattcagatatccagtgtataggagcagcttccatagtggacatagaatcaaaatatgttttatattcaggagagagagagaggaacggagagagagaattgttttgttatgtagaaagaccatagagtaagtgatggatttgtttgtttttcagatatgaagatcaatgatgcagactgatggttttgatgaagctgggcatttataactagattcattaaggaatacaaagaaaatacttaaagggatcaataatggtgtcttctggttgcagaatgcgaagtctgtggtttatcattgtaatcagcttcttaccaaatacagaaggtaagatccagtttacattttgttttttaaatccaggagaacttgaactatacaatcttcttaatatggaagtgcctagaatatttgtttattattttaaaaataggtgttaaaattatttcctgaatattgaattgtttattaggtggttgagttcttttgataacacagatatgatatagaaagtgctagatatgtgaatttatattttacgtgcatttatgaaatataaccattctaaataatcccgagggaactaaatgaaagctctgttttggtatacattttacatttattcactacatttattttagtaaagtggaaagtattttgtggaaattttcatctttagttacatttgcttaagtgtgtgcataatt

SEQ ID NO: 54708 - DNA, 1073 bp, Homo sapiens
tgttaggtttgaatgtttttatacatttaaaaaagattccaggtgtggaccaatggctcattagtccacataatgaaaaaatttctaatcaagttagagatcactttgcttgcacagtagcttaactcagtggggggctagcaaacagagagttttttcatgagatactgcagctttattttcagtgtcatctatcaggtcaggattcatatctgctgttaggagaaatttcatttttggctcatcaggccagggggtattgcttctgaagcacttccctcctacgggtaaaaagaacctgggacgaacccatactgctaactgctaattgtaagagtatacatagttaatacacactgttagaacattgatctagtattgcatgggtttgtcttagaaagtcttacatgacatcatagtcctttattgccagaaagcagataatgctctgtgaacatctatagagaaagccaatcaacattaggtaagaaggcataggaaggcagatatgaatttaaccttcagctattgagtttcttttgggcccttacatgattgtaaccttttaacatcttacacagtttagttctttttatacttctttttataccagtttctaggttcttgcaggtaaactcagataagttttcctgagtgatttcttccctttttcctcatttattgagtgattaaattgagctgcatgcttagggttcaaaaatacacaaggaaaaataatgcataaggcacggttctttttttgtttattttattttttattttcccgtaagttatttgggcacaggtggtatttgattacataagttctttagtggtgatttttgagattctggtgcacccatcacccgagcagtatacactgcaccatatatgttgtcttttatcccttgtcccactcctactgttccccccaagtccccagaatccattgtgttattcttatgcctttgtgtcctcatagcttagctcctacatatcagtgagaacatgggatgtttggttttctcttcctgagttacttcacttagaataatagtctccagtctcatcca

SEQ ID NO: 54709 - DNA, 1029 bp, Homo sapiens
gcaaaagctaattatacaaaggtttaattgttatatctatctatctctattttgaatcaagtcttacccattaaaatttacctgtttgtgtaagaatcaagtcttacccattaaagtttacctgtttctgtaaaataggattaatattttacatattctctaagcctttcctacaacgtattttggggaaaattatatttagaatttccaaataaaaatgattttatacagaccaaacttgcaaaatattttgtaaatatttcttataattgattttatttctagagaactaatctcagattcttgaaaagtcagttttatcgagagactggtatgctttgattcttttggccagtttttataagcatagtacccactgtggaatcatgtatcagtaagtagaaagtaaattgaatttttgtgtcctagagaattaaattatgctgtataatggagccttggcaagcataagttagacacatgaaggcttgctcaagtgacaagttacaaataatagtacttcttcagcaaattcagtaatgcagatttcaggttgaatcctttatgcagtgaatatgtaattagattttattagtcaaaattttacttaattacctcaaattatattgttgcttatccttatttcaaagaaaaatgttctgccaggtataaatatgagacatgccagaaacagctttatgtatttattttatataaatcaagaaaatataacagttgtagaaatagtttcttgccagtttttactgtacttttaagttccctaagtacattttataatgacttgagttaatgttctctctctaaaaagtgtgtgtctgtagggtcttttcagtatttgggtagaagaaaaaaaggcagatttaggggttaaatatgaaatagtgaaaactgtttctggcatatagatatttccttcagaatggtctgaatttggtggaatgattagtaactttattctccaaggttaaatttaagaaagattaatgtaattcagactactgtgttcat

SEQ ID NO: 54710 - DNA, 1017 bp, Homo sapiens
gccataattcttgctttgagggcttatttttcttaaaagtgttttttttcttctgattttgaatgtatatatcttcatgagaaaagagaaaattaaaaaaattaagataaaacttttagaaggttcataattctgtgactttcttatgcggcagcacatttcttttctgtttttccacctatacacatacttcatatggataaagccaaattatgtataaatacaaaattaggttattcatctacatatactcttatattcatattttcacttttaattatcagaaacagtattactatgccattacatatttagataatgaatgctaacagatgcatagtaatttatttaattatacaaatttaatacaaattatttaatcctccttttctacttgccagccatttgtacttaatttctttcaagtataagtaaaatacatatctatataattatttttccttcacaactggttatttcccgaggatagaattctataattctgataattgtactggagatatagacatctttcaaattggcttttttgaagagttaaacctatgtgcacacattgatgaccagtatataaatccatgcactttaccagcaatgatctgaaattttaaaaagatttaacactttgatttgtaaaaaagggtatctgattataaattaaatttgtaatttgggggatacttctggggacaaaaacattttttgtagatttatttattggttagttgtcattttgatatgaactttttgtacactgcttttgccagcttttctgtttgtattgctaatacttttcttatttttttttttacaatttattgataatccccttttttcatttttattataaaaacctatttttgccttttagtttaatttacactgtttaaaatttttaatgaaaacttcaaatagaagagagaaattcgtagtataacactaatcgcaggtttaacaattgtcaagatattgttacatttgcattattgcactctttct

SEQ ID NO: 54711 - DNA, 1030 bp, Homo sapiens
tgaatccgtcaggaattaacgtttttataaggggaaatctaaggtctttgatcacttaatttaaaatcaagtgaactaacattaaaccaaccagtaagaattaaattttaaccaacacagtagttgaagtttggaacatagccaaattaaaaatggatgatggatgatagttgaaaaaacaaaaaagaaaaagaatagaagtaaacactgtttatatctacatagattgaattgtgaatgaaagtgtgactgttctgaatccagtaatatatcagtgttcttctctccttaaatgatttttgtatcccatgtatttaataaagtttatttttaagagtttttatgttgttaaacagccgagagaagcaaaagcatgactgtagagatagattaaaatgtcccaccatgaagatgaagttctacattttaggaattttggagtttcaagaaacataaagaatttcctggaaaaaaaagaagggattcgtatgaagcctggttaagttttgcacagggatttaatctaaaaaaaggatccaagtaaaattcttattttgttgcatatttacagggtgcgtcttactattcctgtacccatctctttgtatctaattgttgtgtgtttgtgtgtatgtattaatcattaattagttctcttttcccttactgattcttctttttctctttgtagtactaaaatctaagccaggtgttagatatgcctatatgaagttcaagctttggttagagacaatatagtaggttaatacaagtcagagacttccttattttagttacacattacaatagaaagcctgttggattttaagaggctacttttatatggtagaatgctgtgatgaggcgatgttgacaggctttttaaaaagttggtaagtaaagtgaaggagacaggtgctgtaggttgagtttatttccttgtttaaggaaagtgttttgttgtttttttttttttacagttttcttgtttggttgcttttggtagatatgttgaatacctgaacatttc

SEQ ID NO: 54712 - DNA, 1032 bp, Homo sapiens
gtgagtgatgaatgtcaggagtcaaggtggatcaagaattcaccaagataagaaatacaagataaatggatttgatggctaatttgtgagcttagtttaatgaagttactgccattaacaatataattaatactagtaatatgccaaaacttagccatgcttatttgtagggcatacttaattacagaattaaaaaaaaaattagggccttaatattccatgatttataacaagcatttaatgtgaggcttgctttgatcattaaataataaacatgtttaatcattaaataataaacatgagtaaagtttgggaaacttttgttatagatacatagaaataactagattttaatgtctctctcattttgtacttttaatttaaatctaaaaacaatgactgcacttgtcagtcctttactggatattaatcactgtagtaggtgctttttattcattgtcctggataatgtttccaacagctctgtgaggtttatgttgttttgttacattttagccaaggaaacttatgcacagttaggtgacttaggcagggttaaatgaataatgaagtgatgagattgattcattcccaggtatgcctgacacagaattcatgatgctttcaatttgcataataatggaaatccatttttatttttagatttgggatatttctagatgtatatactgtggtatttgtggtttaatcatgcataattttagcaacgcatatatatgtaaaaaggaaatgactttaaaggtttataaatgtataagcactgttcacacttgagctaggtctactgcagacagccaattgagaaagtggaagatgttccattcaacatatgcttttgtctttgatgccggacatcttacttaactctctattataattgcgttgactagatattttggcattgcgtagtcacctcagtagaaaagcctttatcagcccacagacggttctttttggtggcaactttcacatatcagcttcttctctcaaatcagcatccattgacagctt

SEQ ID NO: 54713 - DNA, 1049 bp, Homo sapiens
ctgtcttgcaagcttttgaggcacccaaaccacagccattgttggaacttggttgcttggttgtggcatttctctgttgcctcctaaatactgcataatattgcccaaggaatgtcaggctttatgatggtcccagaaaggatcctttttcagaaacagaaaaaaactctctaaaattatagttggcaatctctttgctccattatcctacacccctaacttgaggactctttgccctaaatagcagtggctccctcctgtgattattcttaagttgctgagagtgggttgtagtgagctgatgaaaagatggcagatgatgggaaaccttaggatcttgctgctatttaaatttgatttagtataaagtgagatttaagtgttttatggctaattaaggggtgaactcaagaaaccaggtatcatatattgagtgcaagctacagaataaaagagcatgttttctcacaaagatacgtagttgatttgtacatatttagctgcagaaagagattaaagtcaatacatctgacccaaacttactgaattatgtgtcaccagttttacaacaccctagatagactcttgtaattccttagtaccaagagttgaattaatctgaagagcagtagatactttctttttcagcaattttaagtgtttattggaacaacattaaaaataattacaattttctgatattaagtggtaatctattgtggaggaagagctaaaaatcctagaatttaatttttcttcacggacactaaaattatgaaaaccacgttaaaattttagcatttcaggtattttaattttatactttattatggatatatttagcatagatatgggccaacaatcttatggcaacagtcataactgttctagtaagtttcaatatatttcatggcttaattctgtatatccatctattataagagactcagtgtgagcctcagaattgtcaagcaagaagttttttttaaatggggaattaagtgccaagtcatgtgtctgaagtcagcatatatatcagttggcaaata

SEQ ID NO: 54714 - DNA, 2033 bp, Homo sapiens
aacattgaaatcagtcagacttggagatgggagaagtgatgtcaaggattgcttactcttcggtttctggtttgtgcaacctggatgaatgttggtgttgttgactgagatagaagaggaccaaattattgttaagatatacttataaatcacttgggtccttttcgaggtcttttttttctttccttttcaccttcgaagtttctttttagttattttcaaagactgtcgagaatataaaaatttagacctattacctgatcaaagttctgattttaaaaaacacgcttaaaaaaagagactggaaggcccttgctacgttactttaaactacagtataaagatacacagatcagtttattttcttaatggaggctgtaatcttgctgttcctttcttcaggaaatccacttaatattggccacctgttagtattagatcaccatgtataatgacttccagccattgtaaacataactaagtagacacataaaaacatcatgataggaaagtactaatatatgtgtatagtttgaatactttagtctcttcacagtttataaataattacagtttctcactgttctgaaaatgaaaggtgaatgtcagtcacattgatcatcaaaactgttgattaaatgtatgtaaaaaaaaaatataatttgtgactcagaattgagtaatatacattatatgttcagatgcatactttatttaggtagacgtgttaagttttttttaattaaaattttttagatttaagttgagtcttcaatgcggccaagtgtaattttgaattcctttgtattcacttaagtattcagatctctttatgagaatttgttagctatttgatctacattgtaaaatatgtttaatggctgtgcatcttaaacagtagtgctatatatcatgtcaaaatttaaaaagtaggaaatgcacattttccttacaaaacaacaataacaaaataacacttaaagacttagcttgttactgccaattattcgggttaagtttgtacatattagcgtatgtatctgcagataaaacttacacattttcatgagagtttttacaaaaggagaataaagtgtcattattttattataattttttgataatctaacttttgttgaaatagatgatttgcaaacaaaacaccttttatttactcctaattacataaattgaaatacctgattctctaaattttatttcccacatctacagtcccgacacccagaacgaccagtgatcctcctccgttcatacatttaaatgttctaaaatcaaaactaaatattcctgtttattctttcttggagcattttgatacatgggaaaaaaatatgaaacttaataaggtcacacttgaaattgcaaggatcaattttaaaataaaaccaaggtagatatggaaacttttagtcagtttcacattaaaacttcacattttgagtaatacccatagtgataatctaattctgacatagttgaaaatgatgggcctaggaagttattttcaaaatacaggaatatacactacattctaagttgtcagagcttaaaatgaaattattttttgcagacaaaaagtattatgaaactaccaagcttttgttttttgttggcactaatagtgttgaaataaaatgaattttacctgtattttattcatttatgtgttagcatagttaaaacaaccaaaaacatatttatttttcatggttctctatttttctgttcatgaaaattttagtgtttatagtggttggtattatttgtataaaactactttttgaaaactttgtactctttacctaaagcatttgtagatgttaatctttcctttttttttttgaagattttttttttctttttttattattatactttaagttctagggtacatgtgcacaatgtgcaggtttgttacatatgtatacatgtgccatgttggtgtgctgcacccattacctcgtcatttacattaggtatgtctcctaatgctatccctcccccctcccccc

SEQ ID NO: 54715 - DNA, 1097 bp, Homo sapiens
tctttctgtctgtcttgtcttgtcttgtttgtcttgtcttgtcttgtcttgtcttgtcctgtcctgtcctgtcctgtcctgtcctgtcctgtcatgtcttgcctcttcgcttctcttctcttctctttttctttttttttctgagatggagtcttgctctgtaccccaggctagagtacagtggcaccatctcagcttactgcaacctctgcctcctgggttcaagtgattctcctgcttcagcctctctagtagctgtgattataggcacacaccactgtgcccggctaatttttgcatttttattagagattggggtctcaccacattggccaggctggtctcaaacttctggtcttaggtgatccacccacctcagcctcccaatgtgctgggattactggtatgagccatcgaacctgaccttcttttttaagttttaatttgcttgtgctgccagaggaaaaatggctggattgcctgtgttttaaactcttaacttctataggctgcacactctttctccccaaaatccctgcagcaagtgaccttgtcaaacaaaagtgtggaataatgggaggcagcccagtgatggtgggtcgtttataagtagctgtttgctactgtcagaacaaaggcaaatcagagttgcattaaagggatatgacagagtgaacaactgctggcccacttccctaataatacttgtcttctagtgttggattgaaaactgagtggctggagtagttattcgtatgggtttgggatgaaaaatatataggaaaataaagatctatttctgtcatttaacaaaatacagaatttaggaagcaaaatttgattaaagcagctttataatgcttttgagtgacagaaacattatgagtatgttatgttctattacattgttaatagcattgttcattgttatataggatttttaactgtgatatatttgaatctgtttaatattgcaccatattgtgaccagattcttgatgtacttgtgtaaatttggaacaacaattaaatcttactctttaaaatactagttaagtgtagcactcttcttacatgtccataatggaaaaacactt

SEQ ID NO: 54716 - DNA, 1020 bp, Homo sapiens
agtgaccagctctagaggaacctgatacgaatgtgaccccatactgagtttaagtaaataaaacagaaataatgaatatatagaatcatgacccttcctgctgatgaagaaaatcattttgatttttgatatagagtgatagaatgaaaactatattggtaatattgcttatattatatagtagttgaagtgagtagagataaattcataattgagtgatctgtaaaagagtgttccagaataacatatggcaaaatgaactgaaggaggacttttgaaaacaaatagaattatgttggaaaacaagtgtctttaatggattagttaaggaagtaaaaataattaatataaagcaagggaaacagtgtatggagttagagacataaaattgccaatttatttattgattttgttttataatagttattatttgaaaaacgaccaatacgaataaatagaagtaaggaggggaaagtgaaggaaaactgtttttagctggtatcatctatttggcaatgtctttactgttatgcttataatacttgatttataaatgttaactgtaacatattcatgtaaatatttgtgtttattttatatatgactcttttaacctgatgtttcatctctattttcagaggaatttaaaaaaaatgtttaactttagacattagcgattactggttcagaaacaagtcttctaatgataaattaattcattagtaaaaacttcccataaacacagctgctaaggcctgccaaattggcaccttggttccacgtcttatccagggcttgacaagaatatactactgcttacttagttaattactgctcacagatagaaaaggaaaggcctttaattcagcatttgtatcgtcgcatggccctgttcagtcaagctgagtgcatgttacatgattgcctgagaggaacagaaaagctagtttctcagtctctaaccagaatgcatgataaggcttggtgtcaaaaagggcaagatggggatcacagcaatta

SEQ ID NO: 54717 - DNA, 1407 bp, Homo sapiens
ttttatagaaaatttatttttggaaaaacagttcatccatctacctttcagcatgtcaaggttaactcaacagccaagtgccagccgtgggagatactgggaagaaacttggactaagttgggggtcggggagaatttggaacaaacagcaagaaggtaattaagagttgggagaggtggggattaggaaaaatgtatgcaatatataggaatattttgcttgagcaaaatatctcttattgaatcaatgtgttggggcacacatcacgcaggggaaatgtatcttagctgtgataagggaactgtggtgtagggtgcagagatacacggcagtctttgaaaaaactggcccatctccatgttcacctaggtctacagtctggtagctctgaaccagtaagattatagaaatcttgatatcttctctttggttctcagggtgagaaattgtatatttttagattgttcccacaaaggggacagaatttctgttattctcctgggccgagtgcctttttgttcatctactcaccttaacccaagtcccgtttcttggtacctcagggttggcagccatcttcattagctctcttattactgaacctagttggtttagatgaactggtcactgttagtccaaaaagggtttccagttcttgtttttgttttttatttccccccatgcatgtatatagaagtataattttagtcttttacatacttttctgggaacccattcccaaatcactaaatattattatagtattatttctaatatttatttttactgtatttatattatttaacgttatattgttttttattctattacattgttttatgatgttttgcatcatattccattttgtcaatatagttttaaaatacttctttactttggaccttcagtttgtctcaacatttttattcataaattttatctaaatcttagtcaagttttttggttattgttagagtatgttgttcttgcaaatgggatttggtaaagctcttctcagaaagactgtaccgcctcataatttcagaaatatatgatgctgtctgttttaaaacagccatacaaacaaatccttggtaatttgataggagaaaatgtcaccatattttaaatttttgatgcctttttgtccttgccaattaaattgagcattacatgtttatttcctacttaaatttatttcattttccctttccatttcttacctactttgaaattgatactctttatttgtaagcacttttatgtagagtatttaaccttgagttactcgtttagacagctgatctttttttgctccactacacggcttttcaatatagaatgcttcagtttgaggtagatcgatttatctgtcttttggtggtttttatttcatgaatccgaat

SEQ ID NO: 54718 - DNA, 1050 bp, Homo sapiens
ttaaagtaccaaggaaggggctattagagtagtgcaccagggcatggcaacaatggctctcaagcaggattcctatgagccttttttcctgcaactccttgtaatttgtcagaatctgtgtatccagaagttggaactgctctgtttcctctgcattgttggtacctgtagggaacaagtatgaaagactacaatgggctgtagtgtgtaggggcagagcttataccattggttctgctaccgtgctgttccttagttcccttgatgttcagcttgcagttaaatacaagaaaggatataattttaactctgcagaaaagtagtattacttcttttttaaggtaacattttgtaactttacaatgttaaaataaactccctgctttcccctttccccaaatgttgtgttgacaagattggaaaatagtttgtgttctttaataaaaaccttatcatttcattaaaaattgaacaaacctcaatagcaaacacaaaaatggtaacactgaaaccaaccacgaaatcaaagtcattacattgtcatttaaggaatgactttataaccttcatacgaattttgggaattggtttctgtccaactcatagtatcacagttaatagactacttctgtaagtcagctctttgcttcaggaagagcttttacaactggatggactttctgtagtttctggaagtggtagagttgtctccaacttgtattgttagtttcttttggttattccagcattgtctaaaggaggaattcaaatgtgttaaggacacagatacataatgaatgaagcaataaattagtgctattttctgtttggtggtgttttttttaaattattttcagtttgcatctattgtgttttgaggtagagttcacagagtgggttccttgctgcattttgttttatttattcttctattttgcaatttttaattggtccaagagcattcattgagaaaagtaatagcacaatagtcacagcattcactagagtatttttgtttcttttgtgtgtatcatattacccacttgatta

SEQ ID NO: 54719 - DNA, 1040 bp, Homo sapiens
gttatatgatcttaaattgttggaacactttcttttgcaacagtttcatatttctgtaagcatttgttgggtatttcatgctcaccccacttatatacaaattacaacattttctaggccagtgtgcttattctggaaaatgacattgcattcttttattttctgaattatttgcataagaacaatttcaaaggtgacagtagtaggtcttttttactttccacgtgtcgtagtttaggtttgtaacataatacagacaggtgaaaggaattacgtataagtaagcacaaaaaagtagatgttttagggtttgattgataaaggcatttctaaagtggatctaattaagtaattaaaacaaaaggatcttctacaaatttacacgaaataggtttttaacattctgccttgtggtataaaaaagccttattacgcatccttgattttaaaaattgtgcttagttggctccatgaatatgcagagatgagtgaaaaagttggactatcagtgacaacttatcttttaggtttacttttaacactattttcatctaagttaagatgaaattgaaataagctttctggatgcttctaaatttcacttcagcctggttgaaatcatgtcccctcctccttaagtatttttctcatttccattttaggaagaaattttgctaacatatataaacaggagtaataaagagatttcatatgccagcactggtaatagactatggcttgagttaatgtttcagcacggcgtagagtcacagcctcactctcatagaggtccctgataatcaaaaagcatggtgcttcctgggaccctcaaacagcatgagcagtagcaaacatgacagtatttagttcaaagtaattaagaaaaacagtacaagaaaagttgaattctttatagtacagcgtagtaagaacacttttatgggaatgtgtgattttacagaaatgttttaaggaacagagttaatggagactttgttagaaaagcaaatgttcctcaacaagcacttaaagtttatcac

SEQ ID NO: 54720 - DNA, 1056 bp, Homo sapiens
atgactggaaaccattctgaaacttaacagggaaatcttggaaatgaagaaaccataaactttctgtgcattcttaactaactgggaagctaaacacatgtacagaggagacatgagaggacttggcagcaagtaaataactgagtctgacttgtaaactacttgaacttttaatactctttctaacatacaatcacatcagcaaagagtggagacttaataatgggcctatggtttttgtgcaaagtctctgcccagtcattggctgaccactaagccatgcagacagaggtgatatctaggagccgaggctaaaaaataaaaataagaattcaagcgaattaaaataaaacagtgagcaaaggtataagcagccacacactgtgagggcagagattctgcatattaaatacagctgaggtattaaaaagaaaccacgacagcagcagcaattctcaggggaaagaaatctgaaaccggagttgctaatggtgtattatttaaaatgtatagttttcaacaacaaaacatttataagatacataaagaaacagaaaagttgatccataaaatagaaattgcctcagatgtggacccagtgttagatttagcatataaggattttaaaccagctattacaaatacgttcaaaaatcaaagtaaaactatcttggagaattaagaggaaatatgatgacaatgacaacaaatacgtagtcagagaaaaaaaaactatttttcaaaggccttagagacattctttgcacatcttagttattataccagtgtgctataagtaaattaatattttgttgtacaaattacagatagtgtagcttcatctgacccagagattgtgattcagtaggtctgggatagagcttcaagatttgtctttataaaaagtttactaggtgattctgatgtaaccatatttgggaatcaattatgtagacttggcaaaggattaaaacatatatatatatatttttttttttgatgatttcttcccgtgagtcagtattctagatcattaatgtgatacaaataaaggaa

SEQ ID NO: 54721 - DNA, 1127 bp, Homo sapiens
caattaatatgtatacattaaataagaaagtaaggccagtgggtgtagcagagccttcattccattgcacaaatgaaaattctttcttgattagtagttatattttctgtttgtaaaacttgtcaccgtttataaaatccatgattaaatttgtcattattatttggatttactaaaaaagccatttagtttctgattatacagaaagtaatttgttagggtattttgtaaagatgaagagtccaaataaagatgaataaaaaataattttctgacatattgtagagaaccaaaaaattatttaataaatgcctgaattttatgacatctcttgacgatagacatgaatcatattacttgaaaatgctttactaaaataatttatcttataaatgagttacagtttaattttctttcttttttattttaaggtttcagcagagcagctttaccatttgggctggtgaggcgagaattatcctgtgaaggttattctatagatctgcgatgcccgggcagtgatgtcatcatgattgagagcgctaactatggtcggacggatgacaagatttgtgatgctgacccatttcagatggagaatacagactgctacctccccgatgccttcaaaattatgactcaaaggtaaatattcatgtgttaatgtcccatttgagctattgtatccaaattagaaaaattattacagttattccaaagcgaatggatatagaccacatcccagcctatttattaaactgagttgggtttttacctactaatgttgatatctacactttatattttcatcaacattcaaatatgtaaatcattctaatatagctgacatgtatcagaatatgtaatacgtatctttttgtgttatataaacatgaaataaaaagcaagaataattgaaatgtaatcttagtttttaaggcttcgaaaatttgaaatactttttgtaacatcaagaatgttgaagtgcctgggtctttggcattagttgctacttaactttttttttttaaattaataaactttgttttttagagcagttttaggttcttattaaaatcaagtagaaagtacagagatttctcatatgatccatatccacacacaga

SEQ ID NO: 54722 - DNA, 1024 bp, Homo sapiens
ctattaagtgtgtattgctgtcttattgatgttgtaatttgtaattccctaatgacatgaaatgtttaacatttttgatatacttattgtatacttaactgtcatctgtacatcttttttttctttcttttttttttttttaagacagagtctcactctgttgcccaggctggagtacagcggcgtgatctctgctcactgcagtctttgtctcctgggttcaagcaattctcatgcctcaacctcctgagtagctgggattacaggtgcaagccaccaagcccggctaattttttgtatttttagtagagacagggttttaccatgttggccaggctggtctcaaactcccaacctcaggaaatccacctgcctcagcctctcaaagtgctaggattacagatgtgagttgccatgcatggccttgtatatcttttttgtatctgtttaatcttagcccatttttaaaattgaggggtttttttttagtatttagttttaagagttctttgtatattttgggataacagtccttcatcatatatctctttctcaaatattttctcccagtttttggcttgttttttcattccttccagttaagagttatcatttatatagttaagacttaaaacatagaaacaggcaaacagaattaaataacaagttcaacttaagaaagcataaaactaagtatagaattccttgtatccttcaacgaattataggtaaaatatctttttaccagattaaacactttctggcttttcttcctagcagatttggctttactcagtaggttagagaagtcatagagaaggctgtcaatatgacagatgtgttaagccaagatgcaaagtatgtttttgaatattaagtgagaatttctgccatcttcaaatagtatacagatagttaaggtaaacatattctgattaggttctattctttctagttcaaaccattgcttgtttttttttttaccttatatgttgcccaagatggttataaggaagagaccagt

SEQ ID NO: 54723 - DNA, 1617 bp, Homo sapiens
tcattcttttttattcccttctacacaaaatatcctatgagtttgtttataaatgacatcaaatattttactgccaaaatattttagaagttgcaagaggaagaaaaattactttaaaattaaagtaataattagaaatgtttatttgactgaaaattaagtttagtgaagaaatacagtatgtgaacatgaaagttgggaaagatccataattcgttttgtgtaatgaatagcagtgttttcttccctcttgattaaaaaaaaaaaaaaagtaagcacttacagaacatagagtcattttaataaaaaatgggaaatgtttctgagtcagttaaatactttgacaaagatgcgttttttaaagccacacttccaaagtcttgttattttatttctatactttcagtttgatttgtataggaagttctgtcggcatttgttgccatgctgtaatcaaaatgaggtctgtaaaagtggaaattatattagttatcaattcaaatagaaaatcgtttgttgtatattcagagatttataatactgactaaatgacatttcatcaaacatctcaggagtcagaaaaaaaatctttatggcataattttcttcttttcaaaatgatatctaaaccaagggcgtaatctttaaggtgaatttaaaatagccgcaacacaaatctagtttactcaattctgccctctaaaactccttttagttgcaggttcttttgcattatttcaaactctaatcctctgagcgggtaattaacagaccagaaaagccatttgtggaaaagaagagccataagggtgaaaatatttcttcactgaatgatctttaagaagtaaataattacaaacggaaaggatttgggatgaccaatctaaaactgaggataattagaaggaatagagtatgaaaatcgaaatgcttggcatgtacaacaattctcatatcacaacaagactaattaaatatttagaaaccaaaatcccctcacaattcgaagaaaaataacccacgacaaaagggtctgtaactttgcagataattggcaagggttataggaaggaaaaacatcacagattggctccaaggctctgcaaggtcatgtcttattacgctgtgtcttttatatagtctggtaacaagtttcttgctaatttaatctaactagggcatcccatagcgatttcccatttcccttgttaaaaatgtgatagtttctgcaagtgcaaactgcagtaggttaacgtttttataaataattgctcttaagtgatacaggttgtaatattttttgaattattaaaagtgaaggctttgaaaatttagacacagaagcattatttttttaagtattacaaaattttatggtttttattcccatttaaatttttttgtttcattaagtagttagacctgatgaccctgtgaatgaaacagtctcagtggcatgctttgtaaataaatacttcttattttgctaataaaagcaagcacatttatgttgaatgtgcatttctgcaaacaacagattttgtactggattaataaggctctgagtgagtcaagcctaatttgcattaaactgaccccaaggtccggtaaaaactg

SEQ ID NO: 54724 - DNA, 1757 bp, Homo sapiens
tctagactacacaaattattaaataaataatgagcaatagctatgtgacaaatgggaacattgttacagaacacctcttttttgccacatgaattacacaccgtttagcttcctaatgttatgtttacctagcaattagttaagctcacaaatcatcattaataaatatttaaagaaagcaagacccactttccctagctgtatagaatagaaatttagatgataaaatagcatttcattataaaataaaaaaaactttttgaaaagatttgatttaacattcaactccatttttctcttgcatttgtgaggatgattgtaaccttgtatcttgaagcataattctttgtattccctctccattcacttgattattttgcctgagcaaatctatttgcattggtgcctacctatttatgttctaaagttatatgctgtgtgtataaaattttgttctaaatttggactaaaaaagacagtggctagagtactaagtcagttggaatttgctagtgtatatggagaagtgattagtagctaaatacttatcccgccttccttttaaataggtaatctatttcataagggtttgttattggcattgatgatacaagactatatccaaattgacagggttctctgagaatcaggtacggctgattgaggcataattggatgtctggtgtttattttctattaaccatgtttatttatgagcagaaatagccagataatcattaatcattatttaattttttcaaaaacaccagattcttatgtgctaggcatataatcacctccaataagaatttgtaagttggcagcttcttttttcttttattattttctcttaaactcccactttctagtagtttctaaatttttaaaacttgtgtacctgaacagaatgtaatttacttattaacatataatttatttttacttagttattgaggctcaagaatgcatgtaattcctattctattaattaaagaacagattcatattgcaatagttcgtctgtagatattctgtttgtttagcatatacaattcacctaaggatgtggtttaagctcttccaggaaatcctgtgtatgttttgtttatacttggcactatgaaaaggagtgtcattacatgataccttggtaccttggaagcattgatttcacctccaaaaagtgagcacttttaactgagacagacagaaagtaactcaggaaaaaaaaaaagtcttaccattgctagtattttgtaattgaagtttaatgaataaatagccactaaaatatttaaattgatgaagcaatcttcatcgaagatgcagactcaataaaggattgaactaattctttaattagtaattgtataatttcaaatttaagcaaactttaattttttagtttctgtcatgatatactgagcttttctgttgaatgctggaatatttgttcaaggcggtagattttgcatttttaatcttccttagaactgtggtgaataatggcccctggcaggagataatgaaattttcttaatttatattttcaagaagaagcttcaattgaaaatggcatcctgtggcctggagacatagctctagtgcaagtttcaggggagctgcaataataatgcagtgccatcggtgacggggaacgatgggacagtgaagaagtaatttaaggaagaaaagaaaatgcaccaaagctttattgtagcatatctaatgatctgctgaagattcccaatggtttt

SEQ ID NO: 54725 - DNA, 1062 bp, Homo sapiens
gataaacagtatgctatattatttttcgatacaatttattctgagagtataagtaatgtgtgcattgtgctctctttcacatagagttttaaaagattaaggaaagggaacatattaatagtttgttttcattaatatttcattagtaatgaggcactatgtctcaaaaataaaaagataatctttcttgaaaatactgctgttaatctgtgcatgatatttttaagtaatttccatatactagtatgtaaattaatgataatacacttttataaaatgcctttttatgctttacacatttttttgagaacatttatcttaatttcaaaaaatactgtggatgccttaaaagttaatattgagacctgagaacattgattacatctggaagataaaatatactgtttgtaatactttcaccttcttgccatttgcaaattgggatggttaagtgatgcattagctatttcttaaaatcttttttgaaatatatgttgtgcacaagcctgggcaatatcaccaactttaaatacttactctaatttttgtaatcagcaaatatattggtaggaagtaaattaataaactattaatcttcaaaattatttgttacacttcagcttttacagatgcatatttggcttcattccagaattgaaccattgaaaccctcacccccacacctgtagggtagaaagactacagggatgagtttttaaaccatgagtaaaattcagtgttttgggccagacacggtggctcatgcctgtaatccctgcactttgggaggccaaggcgggtggatcacctgaggtcaggagtttgaaaccagcctgcccaacatgatgagacctcgtctctactggaaaaaaaataaaaataaaaaaataaaaattagccaggcggcgtggcacattcctgtagtcccagctactcaggaggctgaggcaggagaattgcttgaccccgggaggccaaggttgcagtgagccaagatcgtgccactgcactctagcctgggcaacagagcgaggctttgtctcaaaaaaaccaaaaaacaaa

SEQ ID NO: 54726 - DNA, 1977 bp, Homo sapiens
caaaatgtaatggaaaccagaatgcttatatacttcctgcagaacataccatgacattgagaaacatacagtaaaagatctctaagcctgtactagttatattcattcatccaattacttctggtggaaaaaatctgggcaattttcaatgtattctttatttttgaaaaattatatatatatataaatggccaaatcctttgagttactttctccttcaccttaatagcaaagtctttcatgttcatgttcttggtccatttcaactttgagtacaattccctctctctcccaccagttgctagtttgttgatatgagaggagccttttgtgagaagggaaggttgataaactaaatgaagagtttactcacactagaaattgttatttggaggagtttttgtaatcatatttaaataccattcaaaacctaacagtttggttgagtagttataaaatgtatactgtgggagtatctgaaagggatatctaacacacagttgtttatctttcttcatttctgagaggtgtaagggtgtgataaaaggaagatcactgtaggtatgaataaatacaaagaaggaaatgaaaggacttttgtttttaatgggaccaagttagtgatttgaggatttctggcagatcaagaaactaaaaaatcagtgaactgtcttgttgctgcaaaagtttaaaaaagaagaaaaatgaaacatcagaattatatttattagttgggaacattagttattgacctattgagaaactgtaaacctacctcttgtcttgaattttaggatgtgaaataggttctgtgattcatgttaaaataattcgtttacactaagtggtgaaccactggtaaatttcttcagatgagtgaaccaaattaagagaaatacagaataatgacaggaaaacatatgttacagaagattgtgacactataccatttacattatttacgttcttgaaaattacagtatatggtatatttctaaaaaaacactgctatactctattataatcatgataaaagttacttatactttatttaggtcttgtttgaagttcattgtagtatactttgaattataaaatttacctatttaatcctgtagttttcaggctttgctgctcttcaaagagaaagtctagttttgagttgaaatggcaccaaagtatacgactgttcctacccatctttaacatgattcaccttctactgccctttagttagtggtgctagaaactgggatgcttttcaaaattctttatagtgctattttatacttcagtattttatgtactatcgaatatgtggtattccaactgttacataaatgttataatgttcttgttctgcttgatttgccttcttaatgtatgtgctatcagaaaatacaataaaaaccctgaaaacattccattcattaggttataatcaaatcaaattataaaagaaatagttcttgcctttacaaaagttatgaaaagaccttttggacaaattcatagaatgtacatatcattttatctggaattctaacctatttctaatattcttggtgaattactgacattgcaaaaacaagaaaataattccttataacaataattagaacattctaggcatcatgttagtacaacattctttttaatgttatattttagggagtactggtgttgaaccgaggtacatagtcatctcattaattatataggcacattgatctatgaatagaaagagtaacaataatgcttagacattacatatgtgccaaagcatttttctaaatcctttaaatgcactttatcatttatgtggaccatagcatataaggtgagctctactagcttagtttctggtattccagaaagtatgtacaatgaagaaattcacacccaactggatttagaggataaaattaaaatcctggctccttgttttgtgttgtcaaaaacttcctgctgagaaat

SEQ ID NO: 54727 - DNA, 1031 bp, Homo sapiens
gtcatgttagttcatgggcgtttgaattatatgttttttatcagcaattttgctgatttgagacagtttttgtacactttcctcctttaaaaaaaaaggatttgccaaataatgaaactgctctttccagaacctcaaaagctaggtcattagttctgacagatttatatgttcaaactatcaatatttctaaaaccaaagggccaaattctgatagatctgctgtgtccgatatggtagtaatacattctgacacatgctgtgaaggcactctccatcttttctctgacacagttttgacaaattggctttttgtgttatcagttaaaggccaaacacagattatcttttcatccctgctctgtgttcatgtgttactgtgaaatggatgctttttatgttttcagtattttctgtaccatttgtaggattggaagcctactgagtacactgatctttatatcatttctcctgtgtagtgttggtggcttacgtaatcattctcctgtgccactagaggaacattgtattcttttgacctaaccaaaattttgttccataaagtcactttcacttgaatttagcatggtttctgtcttcaaattagagaagaaatacagcatccattcccaaacagtggaatcagtcagagctgccaagaattatctttctggagccagttcctgtaacctagtctatagaccaagaacagtgttaagcaaatattattttcagactcataagctatttcttgtgctgtttaagaaaggaaaatgtggatatcttctggaacatctaacttgcaaaattttactttttcagttccccagaagtattgtacgttgtgcactaaacttgcaaatagctatactcagagaagtatttgttccttttagtttttgtcttttaatttaaaaaaatcagtaattaatttgctgttacctttctagacatttgcacgaggcagaaataagtctatgggttttttttaatcactctttgctaaagaataaaagtaattataattccta

SEQ ID NO: 54728 - DNA, 1032 bp, Homo sapiens
cattgtattcattccttatactttcttttagtttaagcctttagctttcactttctccttgatttagtagtgtttttatgttttgtaacatttgcatacctcttttacacgttacttagttgataaaattgtcaccatcagataacatttattatgtgttttttaccacttggctttataccaatttctatccccagtaaatcctccaggatcttatatattccaattaagtcctattataaagcaatttaagaaggttttcaagacttctgaaaattttaaaagaaatttgctcaacagagaacattagaaatgctgttactttgtttactttagtatgtttataaacaggcgcatgcattatatgtgatgcttgtactttcccagttaatatccatgtcaaaagtgtacatatacagggtatccattgtcattgccagactgttaggaattgcatatatttatatttgaaagaagtcataaagatcttggaggataaagcagagtaatcagattggaattttgcatcctgcaagcaggatttggttttgatttttgtaccttatatttcaaagtatcattgtaaaactactataatattagccacaaattttatttagtatgaaaaatagccattattgattaaatcattattaatgaataaacatgtttattcaatgaaatagtgtgtcacttcacatacagagtatgtaggctgtgtagttagtttgggttaatttcttgtcttgcatatccatgtagtcctccactgatgttcgtgggtcatatacttgtatgtttggtctaaagaaaagtaaatgtattgttaattcatacggctcttaagacaagttgtagtatatatttggcatgtgatagagaatactgattatattaattttattgtatttttgtactcttctactgatagaattttggctggtttcacagatgtctgtccttttgattttcataaatataataacgtagggacttttttgttgtaaagagcaatgttttccttatgtgatt

SEQ ID NO: 54729 - DNA, 1004 bp, Homo sapiens
cttcaaaatcactactggtgatggggggatattgatatattcctaaagaggaggcttttttaatggttaaaattaatttatctaggaatagaaaataatagaaaaacaattgaaacatactgggatgcataattatatatttcttcttagtaaatatctatgaaaaacatgtaaccacatcagaattaaatttgatctaaactccaaaattaagttgtgatttttataaatgtatttttctattgttatgcttatctaaagttagtttaataattgagttcacataagataaatggggatgatatacctatgcatgcatttatgtctatagcatacatataggaagtaaaacttggtaagaatgctgagtgactttggaaaggcaagagtatgtataccatgcattagtgaagagtttcattatttattcaggtacactaagtgaagcaacatgccaacatatttgtattgcctccttaatctcctaaaatgattgatccatgttcttttatgtaactttagaatctttctcctgctaggttttcctgttgtgtgtttctctttatccaaagtagtacagctcttaattcttcctatatttagcatctgttacgaattcagtcttagactaatagtcaatttattttaatcttttttcttttttccttgcaccttttttatttttcttcctgatgcttaaaatagaagtggagcaaaaaggtaaataacatacagtctgaaccccagctccctgttatgtgccttatggatgttaacctcctccctcccctctccccacaacactcctgtattaaaataatcagcaggatctcataaatgccacctcataaggaagtcaactgtttacaatgaaattgtatgactgctaaacctggtgatggggtaaaaattctgaagtcggcgagggggatctgccctttctctgtttcttttttaccctttatctctttttctgacacccttggatattttcttataattaa

SEQ ID NO: 54730 - DNA, 1512 bp, Homo sapiens
tgttcctcaaattgaagcacctttgttttcagtctaacttatgtaaaagttctaaataagtcttcacattcggttttctgttttatttgccttatttcatggttttgcttttaggggctcataggtgaagtagggggttgaaaggtataatgtttgtaataaaatgaaatatatactgttgtgcaaaagctcaaacttttaaaacatgggttaacagattataagatgaaaacatagcaaaaatttaaattgtcagaccacttataaatgatcttaaacttaggcttttgttagtgaaaataaacataaacttcagttactttgtaccctgatacactgattatgctaactttagaaaagaagggtagtatttgtatgaagtatacattttggtaaaattgaatgctaataatatgaatttttcccttttgatttgtgatcactgaaacttgtttgcctgtgtaattttttaacttggcttaatttttgtctttctctgtaactgttagtttttgtgtgtcctgggaccttgaaagcaattgtggactcaccatgtatatatgaagctgaacaaaaggcgggtgcttggtgcaaggaccctcttcaggctgcagataaaatttatttcatgccctggactccctatcgtaccgatactttaatagaatatgcttctttagaagatttccaaaatagtcgccaaacaacaacatataaacttccaaatcgagtagatggtactggatttgtggtgtatgatggtgctgtcttctttaacaaagaaagaacgaggaatattgtgaaatttgacttgaggactagaattaagagtggcgaggccataattaactatgccaactaccatgatacctcaccatacagatggggaggaaagactgatatcgacctagcagttgatgaaaatggtttatgggtcatttacgccactgaacagaacaatggaatgatagttattagccagctgaatccatacactcttcgatttgaagcaacgtgggagactgtatacgacaaacgtgccgcatcaaatgcttttatgatatgcggagtcctctatgtggttaggtcagtttatcaagacaatgaaagtgaaacaggcaagaactcaattgattacatttataatacccgattaaaccgaggagaatatgtagatgttcccttccccaaccagtatcagtatattgctgcagtggattacaatccaagagataaccaactttacgtgtggaacaataacttcattttacgatattctctggagtttggtccacctgatcctgcccaaggtaagcgtgtttacttgctaatgcttatgtcattttgtgaaaagcatttttctttttaaagacttcttaatttttttttcctattttcttccccttttcatagttaaaggacaaaggacaatgttgtggtacattttagccttattatggttcgttttctttttctcaatttcttcattttaatgttggcttcaagaaattg

SEQ ID NO: 54731 - DNA, 1119 bp, Homo sapiens
gccattttgtttatatatagcatagaattcatacttccggaaataccttttcactgataaagaatgctgtataaaagatgatcagtgtttttagacagtgaacaggggcaagttgaataggtgctcgtttttgctttaccaagctacagaaactctagagttcatttcgtgaacagtgggtgagggtgaattcttggacctcagtgaggagaatattacccttagcataaatgtctgttgtcttcaaaccctttcatggaggaaaaccctggtaatcaatagaagttcttagtacataaccagagtaaactgaaccattctgtatgtgttagttaaaatcttcatgggtacttattaagcatgtttattagcatcatttcttaggtattttgtttctactcaaatgataaatggtaggtagaatcctaagtcagtgcatgagtgcatgatacggcatccggataaatagagctctataaaaaagggtttggattagagtcataattctattgtgagttgtgttttctattattatttataggatattcttgagttttgaaccttttgccatgtttcattatggaacttctcattgtttgttattctagtcttatgctttctttccaaattgttattcttttagagatttacacagaacaccatgtcagttaaatgttcccagataactgcaaggttacttgttggataccgtatttttctagagtctatgaaaatctgtaactaggcaagtaagatcatagcatttaagagtatgggaaagtgaccttaaacaaattacttatcttcatcgttcagtttccttatctgtaaaaggaagataattatagtacctacttcatggagttgtggtaaggattaaataagatgatctgattatccatgaatggtgattggcatagcacctagcacataaatgctaaatcaacgtacacttttatcattaccagatgccctatttgggccatttccacctgtggaaataaataataatttttagaaatatatctgcatttctagccttcacatgaggaaaaaaagttgcttttcttctggtattgctaaacttaaaccttccaaaattccagaaattctatgtgt

SEQ ID NO: 54732 - DNA, 1028 bp, Homo sapiens
atacctacctttttcaaggtaacgatgccgaagcctgagatgtttccttaataaaacagcgcaagcatgccaagcttatcttctgtttggatctaatcaggcatgctgatcatgctcaggcaagaacggctgctgggtggaaagatgtcacagtatttattttcttgcaatatgtaaagtgggtgactttaaatttttttatcatcctaattacatataatcatcacagttttgttaatgctttgaatttgattgcttatagaatgtgagtttatacaatagaatttttctaaattaaactgtcccacatttcctgttaaacagtatgtgatgaaattatacttaaactgtactatcacatatttcattgagaaataaacttaagagtcatacagcaaacactatagtaaagcctaaactacctactttctcttagccatcagtataaataaattggaacagatgaaaagatgtattcttacgagcgatattgtcagtaattctcatttccttggtttgtgggcagacagatgggtagggttttgtgtgtgtgtgtgcatgcacacattccatgtgtgcatgactgtatgtgagtgcaagtgtgtgtttgagattaatatactcatcttttttccatagtgcctaccacagctgtgacaataacttcttcagctgagctgttcaaaaccataatatcaaccacaagcactacttcacagaaaggccccatgagcacaactgtagctggatcacaggaaggaagcaaagggacaaaaccacctccagcagtttctacaaccaaaattccacctataacaaatatttttcccctgccagagagattctgtgaagcattagactccaaggggataaagtggcctcagacacaaaggggaatgatggttgaacgaccatgccctaagggaacaagaggtattttctataaactaccatgcatacatttttcaatttagtaagtaggttctgtattacagtgaagtgattttattcaaagaaagcgatgttta

SEQ ID NO: 54733 - DNA, 1081 bp, Homo sapiens
ctttaaaaggcattagtaattttaatattgcagtgtaatgcaatgccattttttctcctccttcatctacctttatgacgaataaacatcagataataaccctcagtatcatgctgattacatactgacttaaattctggatcattggaataaataagactttaaaataacaattttaaatggtagcagtgaaatgagagaactggctgaaatttttgagaaaggattttttttcctttttatttcttttaaatgcctggttcagaattgtgtgtgtgtgtgtgttgataatctaagagccttgaaacttctaagacgaagggaaagtcatcagtctcaattagttggagaatttaacattcgcaaatttttttcaccacaataaagatactcaaggagaactagaagctgtaaacagaaaaaaaaatttaaatgagataatacaaattgttttttcagatcagaagcggagaaaatgctgctagtcttgccaatgaactggctaaacataccaaagggccagtgtttgctggggatgtaagttcttcagtgagattgatggagcagttggtggacatccttgatgcacagctgcaggaactgaaacctagtgaaaaagattcagctggacggagttataacaaggtagagagaactcttctgttattttgaattagacacttggtatggcagctctttcttgtcttatagcagttgagagccaaatctttggccccgggacatatacttagaagcaaaatttctaatttggttcatttttccaaggaagaattacagttgagaaaagagcaatgtgccctgccctcccaaaagagtgtaaatgatgttaattacctgagagagatcttagttggtggcaaactttatctatctgattgtggtcaatactgtaagtttataatgcattatctgcacttggagagattatatgttatacagttgatatactttatatgctaatacatggaactcttatagttgcagcaaaattttgacacatataggaatattagccactgacatatttctttcaatggcagcttttggaagaaggacaagt

SEQ ID NO: 54734 - DNA, 1172 bp, Homo sapiens
gatcattgttgatgaattaaagtatatgctcaagtgttttttagctggacagagaattggaagagtgaaaatgttcacagataaattatgaactttaatgccaccttgttttttttttatttcaaatgattataagtagacagtgtctataaggaataattttggttactattttagttgagatttcaaaaaataatatagtttaattttcaagcatacatattaatctattccaaagacatcagtatttttggtttagaatattcaagttttgagatcataaataggatgactttagtagttttgactctacctgtaagagtaatgtctcagattaagagctgacacaggtggttgtcaactatcaacaattgaggtgtgattaaataaatagaaacaatccaccttctacacttactgtttgtaatcaaatagcagtctgttaatcttcagtcagtcctgttttaaaatggtccagttatattttaaaatggaccagatatatgttgtctaggtgttcttccatcttgaagtaagagtaaatcatcatgacagataaatattacaattgtcactcatcagctactgaaaatcactttggttctaaaagcggtcaaaactaatgatagttttctaatggatacaggcaattgttgacacagtggacaaccttctgagacccgaagctttggaatcatggaaacatatgaattcttctgaacaagcacatactgcaacaatgttactcgatacattggaagaaggagcttttgtcctagctgacaatcttttagaaccaacaagggtctcaatgcccacagaaaatattggtaagtgaatctactgtcaagtttaattttgatttaggatattcatatgtaagaggatgatgtttccattctgtatctgttatttcccagtgctgtacttctttttttgtcaaattatttttgtctgttaccaagagaaattattgaccacacttactaaaattcatgcaaaagccaaactctatcctgtgttttacaagttggttttatgtgtgtgtgtttttccagttgaaaaatcattaacaaaaaagtgtaagagtgcctaaataccagaatgtagattttttaagtaatgaaagtacttgctatgaaactgtggcaaatgcttaatcgttttatata

SEQ ID NO: 54735 - DNA, 1045 bp, Homo sapiens
tcatttgcctccttagttaactcttaaagaatccttttttccccacctcctttatcttttccctcatccagtcctggaagttgccgtactcagtacagaaggacagatccaagactttaaatttcctctgggcatcaaaggagcaggcagctcaatccaactgtccgcaaataccgtcaaacagaacagcaggaatggtaaggtggaagtcttttaaaaattgacagtttttgttgttgttcaaaaacctattaattctaaaatgtatttgagtccttatataacaaaaaaacggcttaccatttaaaagcagatataaaacagtgccttaggacttcatcattttattcttattttatcttagtttattaacaagcatgttttttgtacatcatgtgactatttttaccttcctagggcttgcaaagttggtgttcatcatttaccggagcctgggacagttccttagtacagaaaatgcaaccattaaactgggtgctgattttattggtcgtaatagcaccattgcagtgaactctcacgtcatttcagtttcaatcaataaagagtccagccgagtatacctgactgatcctgtgctttttaccctgccacacattgatgtaagttaatgtatgctaatgaagtaatggaaggttataaaagcagaaagaaaggaaagcaaaactgaggtgctggggatggggagagaactggggagatgggagggaggaaagacaagacctttccatttgaattttaaatgttggactaggtcagagacacaagtttatttaagtctgtgaacataaaattaaatgagcttggttcagtgattattagaacttaagtgtattcttaatgaaagctaattcagtaatcaacaggaaaatgtaaatgactctaatttgttttcaaatgaaaattaacccttaccttacttagcagcaggatagctgagtattaactcttaggactctgcctttctgtgtggcaaaatttttttcattagtttactgatcacgtttgacacagctgttaccaa

SEQ ID NO: 54736 - DNA, 1048 bp, Homo sapiens
aagcattagtttactctgaataatgtatttttgaaataatagtgatttctcttagtgagtattttataattttggagtgggctatttttattcatgagttttcttttgtgttttttgttcttttcccccgtagattgcatgcccaatatttgcaggacttctacactttttctttttggcagcttttgcttggatgtgcctagaaggtgtgcagctctacctaatgttagttgaagtttttgaaagtgaatattcaaggaaaaaatattactatgttgctggttacttgtttcctgccacagtggttggagtttcagctgctattgactataagagctatggaacagaaaaagcgtaagtaattgcaagcgacctgagtgtttttcaagtgaataattttttaaagcctgttagctgtcagtgagggtccctgacagattaaaatagcatctgaaagctttattggtaagagaatgggcataccgtgcacaaattacaatcaagtcttttgcaattttctgggttcagaggatttgtactctggcaaggcagattccaaattatggactttctttttaacacaaaagattgacctgaaacaaattgaaaaagtaaataactttttggccttagaaagatattaagtaaaaattcttctgaacttaaagcttctgacaggtttaactactcagtgttaagctaatgcttcattagctctctttgtgcagctgaccctctatagctaactctcattctgaattgtgacagtagcacattccatcccatatgttttactttgataatattgtatcaggcagtttgaaaggattaaaataagtcactgtctttcgttcataaaagtatagatatttacagaaagtgacagaaggtagacatagtcatgtttctaaggattttatttgctagaggcatgaatttgccttccaattctgtttatttttttcctttgataaaattagttatataaagattctttggactaaagaaagctttttgactgtacagatgatgaaagacaaaagaaatt

SEQ ID NO: 54737 - DNA, 1023 bp, Homo sapiens
cttttttagtattttggtttcaatgtcttcttaaacatttcttcagtgtttctttatatgtgaacgtccttttttgtggagagttatttaagaagtgtgtcataatcgtcttatagcctaaggccatatagcacaatgctcatagcaggcactcaataaacatatattgaataatcagtgatctccactctttaaagaaagacaataaagtaacatgtttttaagagtggaggattaaatgccccttagttgcttagtaaataaacaatagatattgttagttttagaccagaaaaaacacacattctttaaaaggccaccagataatcctacataggttgtttagggtaaatccttgtatgtctttaataaggtaagtttggggaaactaacaaaacatatttgtcttgctgttttgtattaatagagtcgtataagaagaatgtggaatgatactgtgagaaaacaatcagaatcttcttttatctcaggtgacatcaatagcacttcaacacttaatcaaggtcagttatcaggaaaatttgagttactaccatttattaaagtacatataagttccttttattcaataatgtaatgtaagaaatataattttaaactgcattaacaggatgcggctcgaaggtaattattgaaaatataccttgccacagattaaaaatattatcctagggagtacagatttatcctttctgaccaagacatttatgaaggttttcttcataaaacattaataaaattagaatagttactattcacatgaaacagtaccatggaaattatgaacttttttaacctttctttcaaaaagtaaaaaataaatgctaaaaacatgtgtagtaaatcttcataaacaaaaatacatgaaagtttataaagtaattatttctatattgtttgatgtgtctacagtggcatctttaaatttatcagataaatcagtatagttcttaaaatatgctaggaaatgaagtaatttagaaaagagtatatgcacacaca

SEQ ID NO: 54738 - DNA, 1075 bp, Homo sapiens
gctatagaaaaccacattcagcctatcaatatatccaaactatagtatagtgcagctttatggtagttttcttttttcttaagaaaaatttcagaataaagttaatattagttagcttatacctatagtttttaattgggggagggggaaagattgtcactaacccatccatatattactatgttgtttaatagcttattttaaataaaagtatatatatatttaatattaacagaattttcaagattttggtaaagttttcacataattactgctagcatataatctttatttgtgatgaatatttgccactaaattaaacacagaacttggtttccatttttttcttaaaattattttttaatgtaactgcagcttctcttttcattctcttgttttttttcactttccttatgctttcctctagcaacctacagagagacaagtatgggagtaaaacttaactttgcctatcaaatgtaaattttttcagcatgatttttaacgggcacaattaaaacataactagcagtcatgaagtagactcagcgggcaagtggttcacaatttgcaactaaaatattaacaaattcaaacagtacatccatctgtactgccttttgtcagtaatggaggtctgtagcaaatgctgtccatacttaagtatacgcaatgctgaaataatttgctctataaagcctgaagtactgtcaaccaaaatgcttaataattgacttatcatttctgcattcccacagtaatcttgctacaggctgtggaaaatcttcaagtgaattacctgaacttgggcagaaaaagataacctcttcaaaaccagtcaaagatggcttaaatctgcagtatatcatagaaaagaccttttggattatatccagtgtatagtgttgtatttaccaagcaatgataaaacaaaagaaaatctttgaaaacagtgaacctctacagaggaaacaaatgctagcaagtgagccatgtgtcactcatacctttaagtgcgaaatggttttttttttaataatcttataaagattatagcacataacatgaatttatg

SEQ ID NO: 54739 - DNA, 1649 bp, Homo sapiens
aaggctgccacccttctcccattccatagttaatatttattcttggtttaatttctgtgacccatacttaagaaatctctaacatttctgcgtttgacctccatggccatggtgtctgtgggcctatcttgtacagtggactctgctggttcattcggtgctgtcactgtgactgatgcagactgcagggctgcaggcaaactttgaccactagaagcctggggccattgctattagagagattattagtaccaaatactcaaaataataaatattaaatgaaaaataaaaggctgctattgctggtaatctaatttgttgaacccttgctctgactaagttgctgagaagcttagaaattcttcatcatgttacaataaatcattttactttcttttatatatcagctactcttaggccagatagcctgagcagacagacatgatgtgagttgtccaaagtgagtcattccacctgctgtctatcgtgatgttggatggtgcttgtgggcccctggtccagtcagtatgagagatggctgtctttgtttaacatgacttctttgtatctgtccatgttttcattcttttttttacttcatctccagaaaaaggaaatgttagaatgttgtttaaaaagttgcttgccagttatgtgggtttatgttgtacatttgcctttcagttttgtattgtgacttactcctttttaatttagtgttgtttaggacaaattctgttaattttatttttataaaccatagtcttgtactttaaaatgtaaatgtcactaatgaattgctttgcattaactatgcaagggcatggagtgaagtcttctttgtgtcagagatttgaccaaaatcaattaatcagtactgtctcctgaaattgataaagtattactctgtatgccattttctctccctggaaaacagtattatttttaacactttttcctgttatctaaggggttgcaactatttacagttgggaatgcaggaaagcctggcacttttcaagtgttagctttcaaatacaactttgtcctgaacgacattaaaaagttttgtacaaaagaaatagagtttctgtggaaaggaacagagacagtaatgataactccccctcttctgtttcaggacattcactgaacaatgccagggatacaagtgccatggatactctaccgctaaatggtaattttaacaacagctactcgctgcacaagggtgactataatgacagcgtgcaagttgtggactgtggactaagtctgaatgatactgcttttgagaaaatgatcatttcagaattagtgcacaacaacttacggggcagcagcaagactcacaacctcgagctcacgctaccagtcaaacctgtgattggaggtagcagcagtgaagatgatgctattgtggcagatgcttcatctttaatgcacagcgacaacccagggctggagctccatcacaaagaactcgaggcaccacttattcctcagcggactcactcccttctgtaccaaccccagaagaaagtgaagtccgagggaactgacagctatgtctcccaactgacagcagaggctgaagatcacctacagtcccccaacagagactctctttatacaagcatgcccaatct

SEQ ID NO: 54740 - DNA, 1204 bp, Homo sapiens
agcttcagatgtgctaccagatcagcaggggcaatagtgatggttatataatccccattaacaaagaagggtgtattccagaaggagatgttagagaaggacaaatgcagctggttacaagtctttaatcatacagctaaggaattccaagggccacatgcgagtattaataaataaagacaccattggcctgacgcagctccctcaaactctgcttgaagagatgactcttgacctgtggttctctggtgtaaaaaagatgactgaaccttgcagttctgtgaatttttataaaacatacaaaaactttgtatatacacagagtatactaaagtgaattatttgttacaaagaaaagagatgccagccaggtattttaagattctgctgctgtttagagaaattgtgaaacaagcaaaacaaaactttccagccattttactgcagcagtctgtgaactaaatttgtaaatatggctgcaccatttttgtaggcctgcattgtattatatacaagacgtaggctttaaaatcctgtgggacaaatttactgtaccttactattcctgacaagacttggaaaagcaggagagatattctgcatcagtttgcagttcactgcaaatcttttacattaaggcaaagattgaaaacatgcttaaccactagcaatcaagccacaggccttatttcatatgtttcctcaactgtacaatgaactattctcatgaaaaatggctaaagaaattatattttgttctattgctagggtaaaataaatacatttgtgtccaactgaaatataattgtcattaaaataattttaaagagtgaagaaaatattgtgaaaagctcttggttgcacatgttatgaaatgttttttcttacactttgtcatggtaagttctactcattttcacttcttttccactgtatacagtgttctgctttgacaaagttggtctttattacttacatttaaatttcttattgccaaaagaacgtgttttatggggagaaacaaactctttgaagccagttatgtcatgccttgcacaaaagtgatgaaatctagaaaagattgtgtgtcacccctgtttattcttgaacagagggcaaagagggcactgggcacttctcacaaactttctagtgaacaaaaggtgcctattcttttttaaaaaaataaaataaaacataaata

SEQ ID NO: 54741 - DNA, 1081 bp, Homo sapiens
aagaagtccctagtgccatcccacccctgctttcccccctcgccgactctttgggagctacaggtagtgctgtgggtaaggttggctcttctccctccatcacttgggtccgacccaaccttatcacaaggcgggggctgctagtctggctctacgcaagtgaggctaatcctgagtggacaaccctgccttagagatccttcatctcttcagattaggaatggaaaacataatgagacccaacagcaactttatccattagagaaaaaagccaggcaggtttgccttttctctagacattcaaggatctgctaccaatgcctgtaaaacttaaaggtcattcggagttgaagtgcttccagaacacggttaatttcttctgagagcggaaggtgcgggtactccacactttacatcaaacagtaaaaaatcatgaaaatggaatttctgtatggcgataaggtgtgtgtgtgtctgtgtgtttgtgtgtgcatgtatacacatgcatatatatgtgtgtatatatgtgtcagaatggttgtgaaataaaagttggtttgcctttgtaaagttcatatatttttataattcagaatgtccaaataacagatggtatttgttatatcaccaggagtgaatgacatgttagcacttaaagtgggcctggtgattttagtttgtgtaaatattacttgtaatgttttcatggttgtaacataagaattaggctaattttataactttgcatgaagaaaatagcttttttctgtattaataaagtagaattcatttagaaggatttagtcattcattttgtttaacataaatatatcagattatgtggtttatgtttcatcagtaaggttttggtattcattttcaggagcttcagaaaagtttgatgagctattatataagccaagaacacacagcatgttatacggagatttaaagaagccaatgtagaggtagaatgtatgttattttattattattttttgagatggagtttcgttcttgtcgcccaggctggagtgcaatggtgcaatcttggctcactgcaacctctgcctcccaggtt

SEQ ID NO: 54742 - DNA, 2710 bp, Homo sapiens
aatatttactgaaaacagaatggaaactttaaatgtttatctgaacatatttaaattatttctatggataaattcttttctatgttttaagtgttaatgacaatctagttcttaagtatgttagtcagctttttgtgtaactttatttatggaaactgaaggtcattatagtagtttaaaaagctgttgtgaagtgaccaaaaaaaatagcatgttatgtgtcatagggaaaattatttgaaatgtcacgtgttgattaatgtttgtaatttcatttggagcagtgttatcaggtatatgttgctgttctgtagtgaacaaagaaattgtattttaaacttaatgaaagaactcatcattacgtacctaaatgttctgtgtattttttaaagaattattcttgaaaatttgtttttcaaaacttttagaaatatatgatgttagagatcagcctgtacaatcattccctttcaaagatcctgacctccgaagaagctggagttgagatcatactgttagtaataacagagtaaggaatagagtctgatgcctggactccattcagcatcaataaataatcagttaatatgtttattttcaaaatattcaccaaatgttttagtttcaattaaagactataagtaaaagctgaaaaatgttactgtctaatgggaaagaaaatatgtatatataagagttacctgaaaggcaaaaatacaagtgctaacattatggaaagtggaattagaactctgaaaattgctgtatgaaaatgtttgatttgaaaagttgattaaaaatatcaagtcagttaagatttcaggttcagttagcaccaagcttcagaaaggcaggtgattccagagcttatttctaaaaatattccagaagaatgaagttaggcataaagataatttagaagggtcttggttaactttaactatctggtgcctgtattgtactctactgaaccttttccctctattagaattaacattttctggggtaagacctaaaagctaggtgagattccatcttcatctccacaggttttggagataacattaacttaggtacctgttgttctgctgtagtgaattaggaaattgtattgatgtatctcaaaacttaatgaaagaataactggtactattacatacctaactgctctgtgtgtgtttttaaaattactcttgaagatatattccttttaaaatttgggcgtagttatttaaacgtcagctaatacagagaaacataaacttttagaaatatgataaaattctcagagaagttttaaactcttgtcagttaagtttgttttacttatccagtctcttccttttacaccagccccagtcaccaacacaccaaaaaaacacgctacttcttttaacctgggaggggtttttatttatttcattttaaaaaaatactatacctccaggttgcctatggggctttgtgttatacattcattgcaaaaatgttgaggcccatgggtgaaaagtgttggtagaggtttgaatgtagattctttcatgactgcaagtcgtaaagttaccatgtgacctagtgttcgcatatgatctttgaatgttttccagagtatctctctgtcctgtggatttgaaagtcagtaggaattaatcaaagaaagccaccagtagactaggttcaacaaaaatgcaagtttcttaacaactaacattttttgaggactaatacgtgccaggttctctaatgctttccgtgtataaacttttacttactcttttaaactgtaaagcacttgagttattccttcatttatggatgaggaaatgaaggctcagagagcctaagtgacttgcttaaggttgcatagctagtaagtcaagaagcaacatttaagttgaggcaactgtaacctcagaacctgaaattctaaccactttgctgaacagcctctgtatccaatagaatagccgatgctaagacacacagaatagcttagacaattatagcacatttcagttttcaaacatgactttatttggtatattaaaatcttaagtgaaaaagattatttttttcttgtaccattctctggatttttatcatcattatcttttcagattcaatatagtagaatttcaaattaaaccacataaaactaattttatgtacttaaagccttaattactacagtacttatatttattttttcccatttgtaaatgtatacttttcccttcttgcccaatagttgataaaaaaaattattatttgaacttgtattaccattttaaaagtattggcaaattctcatttcaccatgattagagtagcgctgtccagtcaaacattctgtgataatggaagtgatctccacctatgctgtccactgtagtagctactagccacatgtctgttgagcactggaaatgtgactagtaccactgagaaactgaatctttaacttacatgtggctaattagtgtttggtatattggacaacacaggtttagaacatagttgtttttgcatttaatagaaatgccaacccatctttctgtcatcttggttatttgtggatccttacaagtgagtgtagatgaacggaatgctggatttattttttctcatttaagaattaacttatttcctcagaataagcatttataaacttagtgagcaaattattatagttcaataatttgtgtttaat

SEQ ID NO: 54743 - DNA, 1219 bp, Homo sapiens
aagtgtgaaatttatgaaaggtaaatatgcttaggtcactatcattttgggtatttaatcttacttttaaatgtattccttcaagaatgtcctgtatagttctttgttcattgcttcattcattcctttattcagtacacataattgagctcctaaaatgtgacagactctacacaagactatgggaataaagattgaataggacagagtacctgctcagggtgcccatattccagaagggggaagatagacatgtcagcaaacacatgaaacctgccacaaatcctttcattaaagttcagctggggaaccaagggaaagaatggtcatttccactgggatggggaggaagaggttcaaaaaggacttcaaagaggagttgaaccatgacttgagcattgaaaatgataaatgttcatcagatggattataggaggaagggtgttctgagtagaccgagcattgataagtgaagatgcagaggagtgaaaccatgtaacatattcaggataaggaagtaagttgcccattatgattaaatgatggaatgtggggttggtgataggaagaggggacattgtataatgatagatgaaactgaagaaatggacagagggccacataatggagagagtttgaattttatcttttagacactagggagccatcgtgcacttggaaataagagagaaacatgatacaatttgggtttaaaagaggttactttggtggtgatgtgaagataaatcattatggagcaagtggaatagaggcaagatcaattataagactcctatgataatttgggtgagggattttgagggtctgaaccaaggtggtagaggttgggatggagaaaaggatctgaaatgggagaaatttgaaaaattgagcagaatgtattgtactgattgcatgtgggaaatgaggaaaaggaggattggggatgacacgttaagtttaagcttcaatgccatggtagatgggttgtaacgccagtaatagagtcaggaaatgaatacagagggcaggagtacattgggggttggggtggggacttactgaactcgggatacccgtggcatttctgataaatgatagctgattggttattgtatgtgtggattgtcttttatctcccagccatgggggaaaatgcccttggatggtcaagggaccttttctacattttatcctcattttactcttttcaaagaca

SEQ ID NO: 54744 - DNA, 1054 bp, Homo sapiens
tttttcttttttttcttagtggtacatgatataatggtgatttttataattgatagtcatagattcagtgaaatagggtggtgatatctaccactcccacctccaccttctggttcccagatacttgttttttatggttgaagaaacaccaggtaatggtccctgagaagtttcttttgtgtatgagctacaagatttcaagacttttcaaatcttgatcttaggtaatttttgaagtaacaataatcactaatagtttgtctttaatgttcttgtactagctatcacgagttttatgtatctttgttattgttactattttgtgtcaattgccaagagacttaaacatcttttctaacatgttcatattctcttgattaattacattatgaaacaacatgcctattcattatttttatttggaatttttccttttttcatgatttagtgtatttgttacaaaaaataacttgaattcacttttctatataggaacatttttattgattttatgtctcctctttataatctctttcatatttcattatgtttcttctaaatttatcttgtttttttaatacataaatttgaagatgaaaaaggaggtactcctcatatacattcatgtattatacatatatattcatatacatatatatgtacacattcaaatcacaagtctgtcatttttaactttttaattgaaaaatccccaaacttcttgccaatcgtagctaaaactgtacattacccctaaactttcccttattcagatctctaaaatgcctggtgccactccattagcacctgacataatggaaagtgtgaagaaggggaagttggagagaaaagagacagcaatctcaaccaattgctattaaaatatcttacttttgcaagtcttacaaaagcatgtgtccttgtgaacacaatgctagaatctctcccagggtattagaagggttgcctgcacttgagaggtcctgaaatttaatctctgttagcttcacagtaaacctgctgtggccctcagatttcagttctctttgtgaga

SEQ ID NO: 54745 - DNA, 1073 bp, Homo sapiens
tatggattgaaagactcaatatggttaagatgtcatttcttccaataagcataatccaaataaaatcccagcaagattatatttgtagacatagataaactgatcttaaaatttatatggaaaggtgaagaaactgtagtagccaaaacaacttcgaaaaaaaggaaaaagggccgggcactgtggcttacgcctgtaatcccaacactttgggaggctgaggtgggcggatcacgaggtcaggagattgagaccatcctggctaacacggtgaaactttgtctctactaaaaataattaaaaaattagttgggtgtggtggcatgcatctgtagtcccagctacttgggaggctgaggcaggagaatagcttgaacccaggaggcggaggttgcagtgagtcgaaatgacaccactgcactccagcctgggcgacagactgagactccgtctcaagaaaaaaaggaaaaaaaaatagaagatttacactatcagatttcagacttactagaaagctatggtaatcaagacagtatagtattggtgaaagaattgacacatatataggtcagtgaaagagaatagagagtccagaaatagactcacacaaatatggtcaattgatttttgacaaaggtgcaaatgcaattcaacagtaaatggatatataaattgtggtaattccatacaatagaatttagccatataaatgagtgaatattaagatacacaacatagataaatcacaattgccatactatactaaatgaaagaagccaatctgaaaatgttgcatagtctataagtccacttatatataacattctggaaaaagcaacactattaccctaaaacctttatttgaatagcaggagttatagtcatgtcatttgtcctctacatggagcacatacatcatttacacattaaatatgttttcatgtttttcttttatttaacctttaaactctaaagtacatagttctgcttggccccaagatgattgtaagaaacatggacaatgaaattttatggctataggtgaccgtcttaattaaaaccttctcatagca

SEQ ID NO: 54746 - DNA, 1036 bp, Homo sapiens
acaaaacaaaattgacctatgtaggagaaattttatagatatagatagagaattcttacccagtaattgaagaatacataggaatatgtagaacacttacaaaattaataatatgactaaatgtattcaacaaatttcaaatgattgatatacaggctacagtatatcaattcttaattacttaactaccacaaggcaattaagttcaatcagtaataaaaagctttaaaaaaatcacacaaatgtatacatttggagatttaaacattttaaataacttaccaaataattaactcgtaaatttaaggtgtaactatgtatcagaacttgtggggtgcagcaaaagtggatatagagttaaattttaagtgctcaaattaggaaaaagaaagacattcatgatataagaaaacaagtttaaaaagccacatggttaatcaaaagaagaaagaaactgataaagacgagcaaagatcagtgggtggaatagaaaataaagatacatgagaatcaaaggttagtttatgggaaaatattttaaagtactaaatagaactatacctgttttaaaaattgaatcacagaatctttatgcagaacttaacaaaattaggactggagagttttacatacaagttttaggaaaccttcaaagaacaaaaacttcaatcttgtatggaattttccagagcattgaaaaagagaaaatactcttaaatgcatttactgattctagaatagttttacaagtcaagtataggaaaagaaaattagatacattttctctgaagttgggaataggaaaaggatgtccactgccattgtttctgtacatcattgtactgttagtcataacctgagcagtaaaacaagaaaaacgtggagagaaccaaattgtcattattcacaaatgatttgtgattggttacatagaagactcaagtgaatctaccaatgtgatttcagaattgataacagaatctggcaagattgccagatattaaaaaaatcaatatataaacatcgactatgttct

SEQ ID NO: 54747 - DNA, 1052 bp, Homo sapiens
agtagaagaaagattaatacagtaaaagaaagataaataagtagaagaaagatttataaactcttaatacaaaatatgaatgatattcttttaagaattggataatggtatactgtgactaacaacatactctttttatcataagcagtaacctagtttatcttacacagcagtcaaaaatatctaataaatacatttgttaaatgttaatagtgaaacattcttatagtggaattacctgaattatatgggatgaagttatgctgtgcctgaattttcagtcagttttcctaatgtttaaaataaactttaaaatctgatttttaaactatgttctatgtataaatacattgaaaaatttgaggggggataagaagtaagttgtgtttttatgaacttgtgaaaatgcataaaaattgtctctcttttttttttcatctcttgaatgtgggtgaatgttcctgcaaacaaatcttgggtgaacatgtagattcctttggtatgctcatttcctttagaatgcaatgtgatagactatttaaatcatacaaacagaaaaaatatataattgaaaatgtatacttttgggaataaattaattttttgtgtgtcctcttttttgtagtatctactttgttcaattatttaccagtagagaataaaatgtgtttcagaaaaatcattctttgaaggatttttttcttaagaagagttactaatcactgttagatgctttggagataggtacctatggtcacacagctaggaagtattagagctaatattctaactcagatgttccaagctctgaaaccatcataataatttaagtggttaaatgtagatatggcttatatattagaacacaataagtaaactaaataattgagaacttcaaactatatgctttatagggaattctgggttgaatgtggagcagtatttgaatctggctgtctctgtcacatcttattttattaattatctgccaacactttatttcagtggatagaaattttttaaataaccagagaagagaaaggcatttagaa

SEQ ID NO: 54748 - DNA, 1068 bp, Homo sapiens
atacataaaagaactagctgggtgcggtggctgactcctgtaatcccagcactttgggaggctgaggcgggtggatcatttgaggtcaggtattcgagaccagcctggccaacatggtgaaaccccgtctctactgaaaatacaaaaattagccgggcatggtggtgggcgcttgtaatcccagctactcaggaagctgaggcagaagaatcgcttgaacccaggaggcggagtttgcagtgagccaagattgtgccactgcactccagcctgggcaacagagcaagactgtgtctcaaaaaaaaaaaaaaagaactgtacgtatttacactaacatagagattatacttatgtctgtgaatctatgtaaacaagcatagtaaaagatttggaaattctgatgccaagattgtatctatggtttctgaataggtttatgagtattcattattcttcatcaatattttatgatatttttccataacgagcgtatgtcatttttgtaacaggaactattacaaaatgggtaaaatggcattaatctgcagataaatgcagctaaagagcttctacatagggaaattctataaacacttgaaatttgtgagaaaagtagatggagcctgttaactatagcagtggccccgatagacactccatttggcacatttgctttccaattattctcaagatcagacataattagaaagacatcaatatatttaaatatgggcaataatgattcacaatgagctaactattttaggtttatatttttcctcaacatatgcttccccataaatttatcagagcgttatttgaacaaaatatagagatttaataaatatttgaaaagtaacaaggttctttacatactttttaaaaaaatactttttgttcccaaagtacctctacttcatattagtttttatgcataatctactaattagaatgtattaactcatttttacagaaaatcaatggttttatttctttgcagtgagccccatgcacggttctatgcagctcagatagtgctaacattcgagtacctccattcactagacc

SEQ ID NO: 54749 - DNA, 1021 bp, Homo sapiens
ctaggcatgctgtggaaaatctgtttcataagattatggacctagagtgggccttaagaagtaatgtggtctaactgccttcctgttattgagcaagaactaaattataccagtgaaataaagaaaatttcattgtctataatattcttaataattttaggaagaagatttaatactctttcctaatatccaatttcagtatctggaaatcctctcctttgtttaatttaaatctgacctgatacatttggttcatttttaaattctgtcctgaatagctgctcagcaattgctttaaaaaaatttttatatgcttccagatcattttgaaattatctttgacttcattctcttttgagtaacttaagtaacaattgacattggtgttggtttatctcagggctacaataaggcagtggattggtgggcattaggagtgctaatctatgaaatggcagctggctatcccccattctttgcagaccaaccaattcagatttatgaaaagattgtttctggaaaggtaagtaaaacattttattattcctctcttattactgtatatgaattttaagcttcatgaattgaaactatattgtgtcataattattattctacattgggaaaaatatagaaaaatctacagttgctgctcttactatcataagaattgaatcatttcagtctcttaagaaaaaaagggcagttttataaagaaattaacaaaacagtaaagcaatttctgtatttagtatttttatcacaaagaacaggatcatagccataattctcgatattccttcaaataaataaaaatagtttattatttcatgtgtctatcttcatggagaaaagttttaggggctgttttatatgcccttccattttcaggagagacttcttgttttaattatgtccaatactataacattggaagtaaaagtaaatataaaatgaataagcctttttcagatggaaatttatagaattgattttaacagaattgttcatatagattgtg

SEQ ID NO: 54750 - DNA, 1061 bp, Homo sapiens
ttttaactcaagctggtatttttaaatgcacacaaagatgatcaatcaacttgttagattctctcctacacatattttgcctttaaaaaaacagaggaggtggtatttaaatgtcacattattcatgcaatgttaaggtttgagtctacaaattcatagttgaaagaaaagatttatgattcctgcattaactatgcctcatcctaacaatacatatgctgagtttctgtatgtagtctttaaatttcatgtctcagtgtcatgtactccatgacaagaatcagttatggtctctatagcacctttgtctggctgcgttacccatggaaatatagaaagtttatattgcagtcaaaaattatacttgcaaataaggtactcaagtaacagctactatggaaaccataactttagagcccttggcttatgtaatttaaaaaaattcttagcttcaacatatctaatgtaaatattgttccactcctaatgagtaacaatatataaggagacatgcaacatagagaagtataaacataagtatatactgaatgatcaaagagttggttaatttttcctgaagggaaattcaatatttacatgaagggtaattgattatcagcccaattgctattcctttctgtctcaggagtccccaagactgtctccaggtttgatgattcaccaggaggactcaacaagattcagcatacagtggtacttgaggctaagatttattacaacaaaagggtacaaagtgaagatagcaaaagtccagaagacaccaggcacaagctttcaagagtcctctcccagggcattcacaagggatgcacataattccttcagcaacaagctgtgacaagcgtgaaattttatctaccagcaacactcattaaatactcaatgcccaaagttttcattgggggttggtcacatatgcaccctctgcctagcacatgccaaaatcccagcctcccagaacaaaagtagttgttcagaataaactatgttgtttgtaccaacagtgtaggcacagtgagccactctaatcctttagggaa

SEQ ID NO: 54751 - DNA, 1101 bp, Homo sapiens
tactgtgaaaggcagtgtgggtttttacaaccatttttagacttcctttttgatagatctcttttcaaaatgtacatactgatttccttcatatgctggttcttctatttatattacaaagttaaatttatgtatctttgagacacaggtttgtaatgtatgatccaaagagattgctcttaaagataggtgaactttctgatattttgcaaaagttctgtaggtgtgcacatttttctggagactgctccatgttcttaaagacatcataaccaaagcaaggccctaagagaacaggtttagttcattcacccaagtaattctcttctttatggctactgtggggactgtaacatgtagttaaaagtatgtgaaggtcatcgctccatatttttgtttatataatggcttgttgccttgaaaaaaaaactttatgaaatcaaaacagaaatatcatgagtcttagaatgtgtgttttaccaaatggtgtgtttgtgtaggtccgattcccatcccacttcagttcagatctcaaggaccttctacggaacctgctgcaggtggatttgaccaagagatttggaaatctaaagaatggtgtcagtgatataaaaactcacaagtggtttgccacgacagattggattgctatttaccagaggaaggtgagactttcttttttaatttaaaagcttttttaaagttggtgtttaaattatatgtggtggagatattttcaacttaacacatagttttaatttttttaccttttgaattaatcttgtgcaggatctaaagtactttacagcccataacttaaaaatgagtttccccctagaattttttttttttttttttgaggtggagtctcactctgtagtccacgctggagtgcagtggcacaatctctgctcactgcaacctccgccacctcagttcaagtgattctcctgcttcagcctctcgagtagctgggactatgggtgcatgccatcacatctggatgatttttttgtatttttagtagagacagggtttcactatgttggctaggctggtcttgaactcctgacctcaagtgatctgcccacctcggcctcc

SEQ ID NO: 54752 - DNA, 1047 bp, Homo sapiens
attctttttcaataccttatttgtgtgtgtatcttataatagtatagtcatacatctaaataaattgtaagtaaataactatatatatgttgattatgtgtactagaaaatgttttaatgaaagggatataaattaaaaacccttggagagctctgggccagaagtggagaatcatgaatatgaaacctgctttagccgcttatcagtcatgtgaatttggtcaatcgactcttttataatctgtaaaatgggagtaagaacaccagtccttccttcctcacagtgttgtactgagaacagaataaagcaactgtaattgtttgtaaattctataaaggctgtgcagattatgattttttttttttagcttttaaaatcttttcctcaaatgtattcagtacccacatttaatctttatagaagaccatattcgaagtagtgggaagacattttacttttaggatcaaaggagaaaaatgtttaaggtttaacaattctctaattctaaaagagttatatttctttccaaactctcagaaagttttgatggccagatattttaaacaaaataaacttgggaattaaaaaaggaaagcaattaaaagtaagtctgagatttagctgtaacttgaggagaaaagaatttttacaagagggataggaaaagataaggtcttaaaaacaaggaactaaaaattaagactgaagttttgtaaccttaggagccaggattttgatgccaacagttaattatcccagaaatttctttttttttttattattatactttacgttttagggtacatgtgcacaatgtgcaggttagttacatatgtatacatgtgccatgctggtgcgctgcacccactaactcgtcatctagcattaggtatatctcccaatgctatccctcccccctccccccaccccgtaacagtccccagagtatgatgttccccttcctgtgtccatgtgttctcattgttcagttcccacctatgagtgagaatatgcagtgtttggttttttgttcttgcgatagttta

SEQ ID NO: 54753 - DNA, 1452 bp, Homo sapiens
gggaactccctgaccccttgcgcttcctgagtgaggcaatgccttgccctgcttcggctcgcacacggtgcgtgcacccactgacctgcgcccactgtctggcactccctagtgagatgaacctggtacctcagatggaaatgcagaaatcacccgtcttctgtgtccctcacgctgggagctgtagaccgtacctgttcctattcggccatcttggcttctcctcttatcccagaaatttcttaagtattttgttgacctgcatacttccttgaatcaaaatgttgaggttaatagctaacctactgcttgctgcttcttctagcactattatattttaggaacctaatggcatctaaggatttcaccgtgtaataacagtgggaatttatttttcttggtgtttggaaactctcaggaatttttttttcctttttcttatttttctctccctctcaattataggttgaagctccattcataccaaagtttagaggctctggagataccagcaactttgatgactatgaagaagaagatatccgtgtctctataacagaaaaatgtgcaaaagaatttggtgaattttaaagaggaacaagatgacatctgagctcacactcagtgtttgcactctgttgagagataaggtagagctgagaccgtccttgttgaagcagttacctagttccttcattccaacgactgagtgaggtctttattgccatcatcccgtgtgcgcactctgcatccacctatgtaacaaggcaccgctaagcaagcattgtctgtgccataacacagtactagaccactttcttacttctctttgggttgtctttctcctctcctatatccatttcttccttttccaatttcattggttttctctaaacagtgctccattttattttgttggtgtttcagatgggcagtgttatggctacgtgatatttgaagggaaggataagtgttgctttcagtagttattgccaatattgttgttggtcaatggcttgaagataaactttctaataattattatttctttgagtagctcagacttggttttgccaaaactcttggtaatttttgaagatagactgtcttatcaccaaggaaatttatacaaattaagactaactttcttggaattcactattctggcaataaattttggtagactaatacagtacagctagacccagaaatttggaaggctgtagatcagaggttctagttccctttccctccttttatatcctcctctccttgagtaatgaagtgaccagcctgtgtagtgtgacaaacgtgtctcattcagcaggaaaaactaatgatatggatcatcacccagattctctcacttggtaccagcatttctgtaggtattagagaagagttctaagttttctaaaccttaactgttccttaaggattttagccagtatt

SEQ ID NO: 54754 - DNA, 1088 bp, Homo sapiens
gccaggctttagcatttcggagattaaaaacaaacagcggcgacacttaatgttcacgcggtggaaacagcagcagcggaaggtacgcgagaggcgggggctgccgggcgcttgcgcgttgttcctgacgcttagggcggtcgcggggcgcacatctgtggttgtctgctggtctcaaaagtgttctctgtggctccgtgggaagggtggcgtcgcggcccacgtgttctggtcccctcgccctagtttggagactctaggttcagccttttgcctgagcgtcaaggtggaagattatcttgataggctctttcctgggacgctagattcacaaggaaagctgtaaggccagttggcttagtagtgaaaactacgccctcctggcccagaaggcaaaagtctcagccctttggtccgtctaggtagcgttggttaatttgcagaatctgaaatggaggcaatacgtaataaatccaaaatactgcttctctgattcctgcaggagctccttaccgaaattagtactgtaaagtttctggtaattgtatttgttcttttcagctttatccttatacgtttctggtaggtaaacaaactgaaacgtaaagaggtttaaacgacttgtcaaggtcgcagtgctcatttctggttaaattgcaattggaagaaaacgtttgcttattcttgcacatcgtagaagttcacacaatattattattatgtgtctgcctcctcttactggcccttctgaggcccgggactggttcttactcatgttcagtgtcaaggtgctgtttcaatacatacaaggggcgtttaactcattctggtatgcacgtattggggagggatgtcctggaagacttattggagctatgatttctaatctgaaacctggtggattgaggatcagtaggtgctggggaaaaaagaatattttttattttgtcaagcattctatctagaaatctccagaagaatatatagattgacaatacaaatacagataatcttaagccaccttgcaagctcttactaaattttagaagtatattttgattataaaatatgtgaataactggtgatgg

SEQ ID NO: 54755 - DNA, 1819 bp, Homo sapiens
atctttattgaaaaaattttttaaactactaaatgctcatacattattgcatagctaagttatttttattttcagtgtatttatagttactcctaggttgtgatttatttttgcaaaattttgaaaacattcatgtctccgcctcccattcaagtaagttaccaaataagggtgtttgaggaagggaaaaaaatgtaaagacagtatacaaactaaacactctactatttcatacattctttgaatagtattaggttaaaccatagaaaattgtcaatagtagactgttttgacctgcagtatcctagtatgtcaagcatgttagtctctttttaattcttttgtaatcagtctattacagcaaattaatgttatgatcaccatttgaaaacaccaccattcttgttttttgagatgaaagataacttcttaaaattgcctcctttaaaaaatgcttaaaatgtaatatttgtttcatagagtaataaatgctagtttcagtttgtattttcttcatagctctgctagtgtacatatattttgaattagttttaatgtactcttacaattctgtgttctacttcttagcaattcatttacaccatttcttggtctaagctgagtatgcatgattgctgatcctaacagtattccataatgttgatgtactgtagtatgtttagtcattaccttgttgaacatttgccctgtttgctgtttatttgcattataaatagggatactatgtatttcttcgttcaaatttctcccccatttacattcctgaacataaataccccaaagtaaaattactaggtcaatggataacaactagacttttgttaaatatttctgagtagcttcctgaaagtattggaacaaagtcatgtacggatgtcgctttgttatttttttcttttatttttctcctgtttgatgtgtttccccctagtagataactatcttgatctctatttcttctccttgttacttctgcacagttttaagccttttcattcagtgttggccattcttctagtatgtgtgtgtctctgcccagattgtttaaaaaaaaaaaaaagcctcttattcaatattgttattagaattgatgtagcaatagaagtggattgatatgaggaacagattgagtttggggttatttgtagctttctgttatttttctccaacagtaatataattaatgtaaaatccttctaaaatgtaatcccttctcttttacttaggctccaccaaagcctgtacccaagaccattgacaaccagcgagtgtatgatgaaaccacagtagaccctaatgatgaagaggtaatgttagaagtcttaaattagtttgaatgatcacatataattgataaattatatgtttttttgttgatatttaaagtgctggctggccaagttgcataatggactgattcagctaaaatgttggcatattatcttattatttggtgaagactatttcataattgaatttcccaataatgctatagaaaaattctataaaaattctaggtaaacttttacatttgtcatataatccctgaatggtattttggagggttttgtttttgtttttgtttttgattttgttgagacagagtcttgctctgtcgcccatgctggagtgcagtggtgtgatctcggctcactgcaccctctgcctcccaggttcaagcaattcttctgcctcagcctcctgagtagatgggattacaggcacctgccaccacgcctggctaatttttgtatttttagtagagatggggtttcaccacgttggccaggctggtctc

SEQ ID NO: 54756 - DNA, 1050 bp, Homo sapiens
aatgtccacttttcgttcctaatattattttattttggctttttctcttttttaaatcagtttttaccaagatatctattctcttagtcttttctgagtactttcttctttgatcctgttgaatctttgttttctaattcatttatatctccttttatctttattattttcttctgcttcctttgagtttattctgtatttattgatttgctcaatatatattttttctaatatgagcaggtatagccataaaactctttcagactaccacttttggtatattccacaaattttaaaaggtactactttcattaatgtttaaatctgagtgtctctcaatggaagatttgtcttctcgtaatttcattagttttttttggttctttttttgtttgtttgttttgttttttttgtggttattgtttttactaaccaagttgatgagggaaatgaaagtagttcaagagtaaacacatctcagtttctgccctgaagtgatttctgacaattttattcagttttgtacttgtattttacacaggagaaatccactcatccattctcttcacgtgtccattaatgtcagtccttcctagtctgtctttaaagcccctatcagctagatactcagtgtccaacagtcctgctgatgctacttttagaattctggcccagtagagtatttctttgatgtaaaattattcctcttctctgttctcaggtcgcttatgatgaagctacagatgaatttgcttcttacttcaacaaacagacttctcccaagattctcatcacaacatcagatagacctcatggggtaaacacattgattaatttagttcttgaattcttaattttcttattacttctatttaaagtactctgttcagaagagttaaaccattagttaattgccttaaagaatgcctgtgactaagtaaataaaacgtagctctggtaatatgatgtaggtttactaaacatgattcttcaagataggatttctcaacctcaacattgttaacattttagctggagaattctttgtta

SEQ ID NO: 54757 - DNA, 1037 bp, Homo sapiens
gctgacctagttggggatctgcatatggtttgttgtggctagattttacattgccagaggtggtatcacaggattaagtttttgaggtagagacttgggcccatgttatgtgtgtgttccagtctaaaactttttctgtgagtctcagacctgagatgaatgtgtcacctgaacccaaggtatttcttcctgttgagataagagatttgataaaggatatctaggtttgttattattgttgctgttttatttatttatttattgaatgatggctatgagttcagtaaccttaaagatgaccaattgaatgagtcatctttatgatttttaatttcattaaaataaaattataaagaatttacaaaatagggacaagactttctgtgctgccagaataacattttatttctaatatcagtgaacactctattagtggtttaaaaggctgtttttaaaaaatctaacttttatgactttaattgttatcaatataacttactttatccacttgtactagtagctttccagaaactactataacaagctttgtaatgtgttttgttggccatattataatttggcttaactggattaatgtaccaaaatatctaaaatctcttgaatacttaactactccagaaaaaaattatttttaaggtagttgctgcctctttttctttttttaaactgcctccacaaagtggcaaggtctgttttcctctttttatttttggcagttaaaaaacaactgtcatcactttgaggccactagtaactctgctaagaagcaggcattcatcaattcaataaatgttctatccctgttttatccagggtgttttatatagtcacacaaatttcacttataccatctattgcctttaaaaagtttacattttctggccggatgcggtggctcacacctgtagtcccagcactttgggaggcctaggccagcagattgcttgaggtcaggagtttgagaccagcctagccaacacagcaaaatcccatctctactaaaaatacaaaaatta

SEQ ID NO: 54758 - DNA, 1012 bp, Homo sapiens
tacctaagttttaacagattagttgggaagaaaggtgttttcctaactcaaaaagtgatgagtgctgtggtagcagaactgagaagatttagatcttaattctgactacataaaaaggtgacatttgaagtagaccataatagatgagtaaaacgttgcaggtattcaaaatagcagaagcaaaaaatgcatgctaggattcacatatatagtacataagactgtgagtacctaccagttaggaaacaggcttgatgtgggcatagggtaaataggttgaaaaggtaatttgtggccacattatgagtctgatactaatgtcttttttctgtagatgagtctgtgatgagagtagtatgaaattagctacagctgtcaagactgtgaaggtatctagtttgtttttcacttagcatgtgagaaactatggtacagatataatgaaacagctgagtcccatagctggttacttatagaaccaaggcctaagtccagacttgattttacaatctgcattaggagatgtacttgagatggtgagaaaaaggtcagaccaaccacaatactaccttaataatctaggtggaaaatcttgaggacctcactaagacagtaagggtaaagaggatgctaagtgagaacttctgaaggtaaaagcagttaagatttggtgggagagggagaagctgaagataccatagcttctaatctggaggaatgagtgttgatgccattgtaaaaagatggcaacatctgctttgaaagatacatattaaatgcagatagacttgaaaccatctgattctggcctatttaagttgttgaatcagatgaaatgtgtttgaaaatttctcctaaactagaaaagcataatacaaagtgaaagccctgtccattgtcattaatatgcctgcttgtaatgccattaagcaatagccaagaattactcatgaaaagtaaaggtgtttcaagtgaaggtcagattgtgccacaaacttgaagaatattatat

SEQ ID NO: 54759 - DNA, 1102 bp, Homo sapiens
ctccacctattctgtacctacacctgagcagctgaacatggctagagaaaaaaaatgtataccatcgtaagtaccattctcactttaaattcatgaccatgaatttcaagtggaatctttttctggtgggcagtcttactatctgccactcattaattcagtctttcactcttctaaacaagtatgtcataccatctcagacccccaataccttctctctattttctcttaaaccaactgcggtcaagatttcacctccattattccaccaaaactattctcattaaattcacctttcattactaaatctgttggttaattcttatcctaaacattcttgatctatgtgtgcacaacagttgacaccattaatcactttctcttccttgacataggcttcgctaggcttctagcatacatattatgtttgttttcttcttacctccctggttgttcattctcagtcatctttactgggccttcatcttcctcctgacctcttaattttggcatacatcagggttcagctctttgttctcttctctacctgcgctcattccttggtgatctcatctagtctaacagatttaaataccaactttatgccaaggatttccaaatttatagcctcatctcagtcctctttcccaaattccagattcacgtaggcctatattcaactgactaactgacatcgccacttggatggccaatagatatctcatcttaatatgtctgaaactggatttttttcccttccctaaaacttgcactacccatgacttttgccatctcaggtgatgtcaaatctatcctttaagtatctgaggccaaatgccttggagttatacttgattcttcttgcatacttgagtcttctacttgactcttctttcaaactccacttccaatagattgactctgactcttctacttgactcttaaactccacttccaagggattgactccagcttttaaatatatacaaaatctgactactttttaataacctttactgctagcacgtgagtcaccattgtctcagactgtaattattccagtagcttcataacaagttctcttttcttgcctcttatagtc

SEQ ID NO: 54760 - DNA, 1062 bp, Homo sapiens
gaattctgattcaataggtttcatgtggtgtgggacccaggaatctgtattttaaaagctccgcaagtgattcagatgtacgccttggctaataatcactggctaagggcaaggaaagaatcttaggacatgaaaaggagctcaagtagaatctattaggaggctcgtttctgtaatctttgccattgttaaaagtgccataagcaataatacctagaaagtacagatgttccttgatttatgattgtattgtgtcctaataaacccataaacatatgataagttgaaaatgaacgaaataccctgataaatccatcgtaaagtctaaaaattgtaagttgaaccattgtaagtcagggaccatttgtatcaaatatagaaccatggaattatagaataggaaagtgttatgccctaaaatttttatttcattgtatcctttttgaataattggatttaggaaacttttttccctcttactgtactgtatacttcttttatttttccctttcctgtggtgctgaattgtactaaatactttaaaatctccattttaatttatttatataggatcctgctggccactttcatcaagtatggtatgataaccctcagagtatttctttaaaggcaacatatatacaaaactatcgcttacggggcattggcatgtggaatgcaaactgtcttgactactctggagatgctgtagccaaacagcaaactgaagaaatgtgggaagtcttaaagccaaagctgttacagagatgaacatcttttgtcaaaccattaagagttagaaagatgatctgtatcaacagatctagtttcttgcatttttattatgttgctatatacttttgttatccgtatactaaaaaaaaagaataaataaatgttttgattgtttgaatttgaaaaatacacacgaatgtcctcagtatccaggaacataaaggcaagaagcaagtcaacttacctattaaatattcctctattagatgtttcaacactataatttaattgggaaaaattgctttcagaattttattatgccatatt

SEQ ID NO: 54761 - DNA, 1031 bp, Homo sapiens
ggtcacagaattaaagagctacaaataaatgccttgaagagttctttctacaccctcatttttatagatgggaaaaattcagatgctttaattgacttagcagtgatacagacctaactataagatagctgacactagcacccaagtcttttgctttcttgtctaatataataatagtaccatctcaaaaatatgagattaactgtgagagaaaatcctggtgaaaacactcttacaaaatggattggaaatttacttgcttagaggtagtcatttatttttctctattactataatatacctctcattttgtaataagaggcagtgataaaataggaacaaatatgtaataattttatttcataacttattttgttggaaaactactgagcaaagcttataattataaagtgctaatattcacggaattataaagggaactttgaagaagtcctaaaaagagttttgctagaataaattgttcaaagtataaaaatgttacctaaagtatctcagtttttaaaataatcagtgtttattgagtgcctaattaaggggggaaaacaacctttaatgaagttttagaacatttgtacatgtataaaataaggctaattaatatttggttaaggcaataaacataaagagacacattcttgttgaaggctggctcactattcaaaatgaaagataaggctgggtgtggtggctcacgcctgtaagcactttgggaggctgagatcggcagatcagctgaggtcaggagtttgagaccagcctgggcaacatggcaaaaccctgtctctactaaaaatacaaaaaaattagctgggcgtggtggcgcatgcctgtaatcccagctatgtgggaggctgaggcaggagaatcacttgaacccaggaggcagaggttgcagtgagctgagattgcgccactgcactccaccctgggtgacagagcaagactccatcccccccaaaaaagaaagataatactcaacatttatttgaatatttccgtaaaataagatc

SEQ ID NO: 54762 - DNA, 1684 bp, Homo sapiens
tttaatccttttcccactgcagctgaaaatatttttctaaaatgcataccttccccttttaaaaatgcttttattctctccctttacctcaggataaacaaggtagtactaacttctcaacagagcttatgaggcctttcatgatttaatccatgcctactactctctggtccttcactaatgctctctccccaaattctagacgtcggccatactaaatatttagttacgcaaccaccatgttgtctctgcctccaggccttggcacttgccactcttccttcctggcccatccttcccctctttcccagcctggctaattacccctgccaccaattatcttgggacccctatgtcttatgcacttgtactctcactgccaccatagtgtttggtgtatggtgatgtttgatgaacggtattttggacggtcagcataatattcttggtttaaatgatggtgctcatctttgttctggcaggtctttgtgtttgatgttggacagaaaacttggaaatcttatgattggtcacagattacaactgtggcaacatttggaaaatatgactcagaacttatgtgctacgctcattcaaaaggagccagagtagtacttaaaggtatgttgtttccagatctatgtgtgcagcaattgggaaatttatctgtatcacttgctatagtcccgactttccaaaaaagtccttttatgtttatctgtttttgttaggatcctataattaatcttagatactgtgtaattcatttcacaaacacagatctttttaaaagaattaaaccactgtatggttttgagcaaaatgttaactgccaaattagccttatgacctttacttaatcatagtccacaatttctgtttctaacttcagaacaattttactaatgatttataatggttattttggagattcatgagtaatggctttctgttactttggtatattctttctccattggaaaacttcagttaagggcttagtcttccaaaataatgaaatgtttttgcatacatgttcaaaagatatatacttcttccacaggagatgtatccttaaaggatatcattgatcctgctttcagagcatcctggatagctcaaaaacttaatttggccaaaacacaatatatggatggaattaatatagatatagagcaagaagttaattgtttatcacctgaatatgatgcattaactgctttagtcaaagaaactacagactctttccatcgtgaaattgagggatcacaggtaaaaactcatttattttttggaaacctcatattttccatatcagaatatactcatgagggtataactaatataatctttgttttatagtaatgcaatgggaaagagtttcagcacttatttcctaaaaaatttttctggagcctttggtgttcttatttaaggaattttaaagccctaaatctattctctattcacagcaaaatacaacactgggattacccccactacttgccttgtagcacagttagaagtgttaggcaatgggagaacaaaaatcaaggggggcgcctaaccagcttttaccaatgcaggacagaaacaacccaggagtagaggtagttctggggaagtgtatcacttgctctacagtctctgaattacttgcacccaaggcccagtaaagcttaaa

SEQ ID NO: 54763 - DNA, 1075 bp, Homo sapiens
tacaaggagagtattttgctaggctctaaggagataaagattaatgagagagaccaggtccagtaaggagttaactacttaattacaatggtattaaggactgtaggggttacagggggccacgccagcatataaaggggacctgctagccagatggtgcacgaaaacttttctgaggactacacactttcggagtgggctgaaatcagcagaatgatggaagagatatacctatggacaaaagattgcattctcaactgagggaagggaaagcccaaaggtcgctacacctcaggagaattctgagattctggaactgaaaaaggtcaatgtaggtagagcacagaaatcctgcaagtatgtggaactggataaaacctttaaagtcggtagtggaaagattaagtaggacttccaagaccactgaagatgttgtattttatcttgggatcagtgggaatcaattagagttttaattcaggggatatgcattacaaaagagatcactgggtccttgtgaggggaatgaatgagggagagacagtggggatagcagctgtaaaagttaaaccaggcatttcttaattttttttaattttttttaacttttcagaattaattatgcataactcattttttctgctaagcaattgcctactgaaataataaaaattcataatgtgaaattaagtggcccattgttttctgactcatatttctatcaaaacttctattttagttctgataattaagattctatttgtttaaaaaatactaagagcctgtgatataacagatatccttaaaaaaaaaaaaagctgggtgaactaattgaaaatataaggggaaaatgccatgtagtctagtttttgtgtttgaaaaacatagaaaacgccagtagagaaaaagaccatttaccatgaagatacaaataagcataattttgcttctttgaatagttggttttcaaagtgcccacagatattgcctaacccactaagtattgggtactacagtaaatctttcaggttttttttttttctcttttttgagacatagtcttgctctgtcgccc

SEQ ID NO: 54764 - DNA, 1031 bp, Homo sapiens
ttcctcttttcaataaccagtgaggtaaggtaattttcctagggccatatagctgttaaagacttgacctggagtataattcaagtattttgattctgtccgaaattaaaggtactgaaagtgcagtaccaataccaatggaattgtaggatgataaagatcaatacactaagaaccagaaatgttatttgcagacatgttatctctctgtaaaattaagtctgattaattgacctaacccctgccttatgaggatatatgtttctggctgcagaaacatgtggagcacattgaagcctggcagttcttttaggccatcattatactattgtgcacattactgaaatgcagttcttaattgccactaccatgactgtcctcaccacagttggcatcaccatcaacttcactatcatcatagtctatatggcaattaaagcaaaattctaatattttaaaatcaaccagaatacaggacagtcctgttcctgactccccagagtcttgagccctgtggaagaaactgacattccaaggtggctggtgcatggatactcttatgggttgaatcgtgtgtcccctgtccccctccaaattcatatcttgaagtcctaacctgtagtacctgagaacatcaccttatttggagatatggtattttttttttttctttgagatggagtcttgctcttgttgcccaggctggagtgcaatggtacaatcttggctcactgcaacctccacctctcaggttcaagcaattctcctgactcagcctcctgagtagctgggattacagacacgtgccaccacgcccagctaatttttgtatttttagtagagacaggatttcaccacgttggccaggctggtcttgaactcctgacctcatgatccgcctgccttggcctcccaaagtgctgggattacaggcatcagccactgtgcccggctggagatatgctctttatcaaattaaaatgaagtcattagggtgggttctattccaatgtgactggtatccttataga

SEQ ID NO: 54765 - DNA, 1037 bp, Homo sapiens
ttatatttttggcctagatttttagaattaaaaggaacttattttttttgaagagtgccacattatgaggttaaagtacaaaagaaggagaggatagtcactaagatctgcctttcttttcccaacagttcaatcaatgtactgaatataactgctgaagaaattaaaccaaatcaggttggaggagaatgtacaaatcaaaaatggagtgtggcatcaagacctggatcacaggaaggttgctatagtggatgctccttgagctacacaaattctcatgtagaaaaagatgacttaccttagacatgtggactggaatttttttcattaatgtgttcatcaagtttcacatctaagttgaaacagggtgtgtcataaagtcagttatctctaataacttaagatggtctgagttgtttgtttggacttccctgtcttcccccaaagagttgaaatcttaaatctatttaaaaggatataaaagctttggatatgtatttttagtaacagaagcatctggttctgtgaataaaggaatgtatagatgtttggatggaaacaaaagcactagactgagtttcctcttataggtattaaaaatagcacttttaggaaactgattattgtaaatgtttaattttgtctcaaatatagttggcattggaagtttagcctttacttgaatgtatactgtagatttttaacaaagcgagttctatatttattatgtttagtgtggtttgaaattacctctttcatatgttttaaataaagtgaaatttatgtatgttttgtacatagatacacatgattatgttaagaggctttaagatttaaaagtttcacacaaccataagtatagtatttcatgccagtaaaatttttttagtggtattctgtttacagatgtattaggaccattgatgcattacatttaagaattctctttaatacatctgggcaataaatattgaaaggtattccatgaagctgagttctttagataatcaacactactaacattacatttttgagat

SEQ ID NO: 54766 - DNA, 1065 bp, Homo sapiens
taacttttaatgtatttcaagttttcttgtttatcagttcattgattccctgctatgaaagataaggaattctgtgtccttattgtacctcctacctacacccttcctcattcacatctcatgtcttcataatattgttcctcttgttcgtctgcttgccttttttttgctttaaggaaataataaaaagcttccatttcatgtttgttcaacttcagtcagtatcagttcatccctgcagtgaaagctgaggactttcttgttgttactcttgttctacctctcttgctgtactactttgcaatttttgtgatattatttttcattgttatcacattcatagtttgtcctctaatacaatccaggtataagtactttgtctaaacttgagacttaaaagttggaaaaccaggaaagaaaattgataatactacaattatgtaaatgttattctataaccaaatatgtttggacacagaaaatattctgtattattaagactttgccacccagagagatatatcactatctagtgaattctttttctctgtagcttcctttgtgatttcctgaatcagatttcagctgccatgttgctcatatctcatgttactgtctttcttgggtttctgttcaattcgctatattagtaattgagtaattactaattcttgagtaattttttttttataaatagtgcatgagctgtaaacattctgaattctggaatagtcaaaaatatattcatacttgattggtttggctgtgtatagaatttagattccagttttttttccttcaaaactttgaattattccatttctcctagtgtttagttttactgatgagaagcctgattgtaatatacctgtgttactttgtagataactgtgttttgttttctatctccctctgtggaagctttggtattttcttaaagtttggaaattttaccaggatacttctagagagttcctttcatcctaaagattctgtatttctttaatttagggaaattttcttctttattttttccttctttgacttctctgtgttctggaactt

SEQ ID NO: 54767 - DNA, 1244 bp, Homo sapiens
ttcttcagacttagctccaaatcacttttgcttctttttcaaagccaagtatactctcgaaggatgatgacattgctgtacttgaggagatcttcaaaagtgtggtatagaagtgttaaaaagtattaaaaataaactttaaaaatattcaggggcagcatcatggagtgatgctctttccagggatccattttgaagcacttttgtatatgtgtacaaaatttgatatgtagattaaaatttgatgtgtaagtttaaatgttattttatagtgtgctttgtaataattcctttaaataaacatttcatgtgccactaacatttgattttgactaataaacactaggatgtataacttcttgttactgatattttaaggattcagttattctaaatcctttattaattttaagcaaaattgcttataaatgttttaggaacaactggaaacctccaggagggaaatgattgggcttcaggaaagagacagacagttacaatgtaagaacaggaatttgcatcagctactaaagaatgagaaagatgaggtgagttgtcagttattgcagatgaagtttaagtgaatttttgttttctttgtaatatgagatgaccataagagccactttacttgaaaaaagaaagaaccatttattcatctttccccaaattgatatggtggacctttgtgtaatagtatttaactggaagctcaggaaccctctccactacagaccccgcccccagtggatccatttggcttagatattagttcatagctggtaacagccagtgtcctggactgcccttcctggactcatgttcactgtcactttttcttaggcacaagagtgctttaaatgcagatcttttattctctgctgtacctgtacgtgatagctgaggtgccccttcttgcatgcactgtcttaaatattgacattgttcgtctagtcaaccagtttcttcattaaatgggcacagaagcagttcacattaaaaatctaatttctgacacaaaagatacaattctgatttctgctttagtggttacttagcagaattctaatttctactttagtggttacttggacctatagcactaatgcatttcaaaatatattttttaatttgtgtagaaagaaactattatgtttttattgctctaaagtatgacccctgaccatgtaataactataaaaatataatacttagtttcagtgttttatatgttgttttaacta

SEQ ID NO: 54768 - DNA, 1039 bp, Homo sapiens
gattggatgactgttacagatccaggtctgtcttcaggtaattaagtctaaataattgtaaacaaaagcagaaactgtaaaggtgaatttttcaatgaaaatataaaataattactgcagatgttgaagatgtgactaaagagagacaaatcgttgtaaaatacttattttcatgtctactgagaacaccactgtatttgtatctttttggaaaaaaaagtatatcattttcataaagaggctttgccctaatttgaaaataccttaaaatatgtatgtatatattatatctatgtttatatgtatatatgtaattcaaagtctttagtaatggcgattatgttagctttacatacgtttttctaaattatttatatagatgccttttattctttcagaaagcaaaactatctctcaatatacctcagaaacaaagatgtctccatcaagtttatactcacagcaagtgctatgttcttcaatacctttatcgaaaaatgtgcacagttttttcagtgccttctgcacagaagataatattgaacagagtatctcatatcttgatcaggtaacatgtttttgtaaaaaacagtagcataaatcatgttatataatagaatgtatcaaaattatgagaaaaacatttgtcaaacacaagtttgttgtttatgtagtgcccctgagacttagattttcagagaaccttggtgattatctcatctagagatagcaagtctaacttttttgtgtggagcaccttggcctcctcattgtcccaggggctcctccactgagagtccagccatcactttatggatgcagaaacccaagtgccttgctccatgtcacagatttatagcagagactaaaagagccccgtcctcttaactctttgtcctttgggatattgaccattttcttaactatttcaagatagttttctatttttctaagaaaagatttctatcttttgattttttttttactaagttgcccagtaaccaaccttttaaaataattcacatttatttttaatttt

SEQ ID NO: 54769 - DNA, 1162 bp, Homo sapiens
aaaagacacttaaggcactattgtcttacttacaaataccttaacaagaacacaaattggaaaggtgcctattactgttttcttctgaccttgttttttccccccaaccagttgattatgaaattagctcactgcttactgtgtttttataaagatatctgtctctagatcatttaagaatatgtgttcaacctttattaagagcagcggtacattttgttataggttttagaagcctgtcatttataccaaatagccctgtgtctagataataatgatgatgatgattaatattagcttatgtgtgtcttctatgccaagcagtgtgctaaatactttatgacttatctcttgggataagtacattataccttatctcttgggaaacttaggaggtatgcttcattgttacggtaatttatcagagaggtatggctcagagaggttaaggaatttacccaaagcagagttctattagaataggtttattgtcccttggattctgttttacttatagtgattatctcagaaagctagaagtaaaatcagtgtctttcttagttggtacagtctttatccttctcatcctgttgctaatacccatttaaggacagtgggaagaacaaaatagttcaaggtgcccttccttaccaagcacatgagtagaaaagtggcaaaagaccattgccagactgaattacctcctgtgtctgtgtgtgtgtgtaacatcataacatgtaatatgacatgtaacatcatctgtcttagtatatattatatgcttctctacaacttagaaatcatccttgatttcttttttgcccacatttcaatccatctttgagttctgaaggttctgtctccagaacacatccctaattcatctgcctgtttctgcttccactgttagaactgtagtttaacactggtcatcttgcctgaactattgtagtagcctcctgatttcttccagcttctacaattgcctacctatagtctactcacagagtagccacagtaatctttcttaaagcataaaagagaacatgctactttcctacctacaagaaacacatcaatagattttcattgcagtttagaggaaatccgacttcctacgctgtagccttgcttactgtgcttcaaatatactggccttctc

SEQ ID NO: 54770 - DNA, 1349 bp, Homo sapiens
gagatcagcgtgggcaatgtagtgagaccccgcctcttaaaaaataaaataaaagctagggacagaagaatggactaaaattgaggaaggctgtgaatggaggctaaagatgaacataaagattcatctctgcaaagattggtttttgtgccccctgtctggtgaccatgacagatgacacctgctatcccagtgctgcttcctgcagagcacggctgtggtcactcttcaacaaagcagtccaacaaccagcacacatttgattctcctttgagtttttgacagagcctctagcctgagcatcagaacacctgggttttcattttggacactgccattaaccaagtgtgtcctgtgacctctcctaaacctcttagatggaccagatgacctctgaaacctcttccagttctaaagcgatgtggttctttggagagagatgcttggttgaacagatgcagagttaacctttaccttcctctattgcagtgaaggaggaaaattggctgttctagtaatttataaggccttgttagcgaagggacacagagattctttttttttttccagaaacaaaccaatgtatttattgagtaaaacctaaatgtaacatatatttttctttttttttttttaattttactttaaattctgggatacatgtgctgaacgtgcaggttacataggtacacatgcgccatggtggtttgctgcacctatcaacgcatcatctaggttcagctctgcatgcattaagtatttgtcctaatgctctccctcccctttccccctaccccccaacatttccccgtgtgcgatgttcccctccctgggggcatggaggttcttaagagacaggtgactcctcacagtgtttccaaaagcatctgctcaaacctcaaacagtgtacattgcctttatttatttatttacttattttttctgaatgttggtaaataatcagaataccttgcctgtcttaatttttcttcctcttctatgtttcactcaacatgtctataatctacgggcctagaatatagagtattcctattgctcctcaaagatgttaaagtattgtatctttcctcttttcttctttccctttctgttacaggaaaagaagtgatgatcacttgatacctattagctaaagttctgctaaagatgattaaagttcaggcatccttatccagcggctgagcagaggaaccccaaatgacttggacaagcagttccaaaatgactctcttatttaattgtggagtgggaaagaggactcacagttagccagctgaccatgactgaagttccagctttactttttataaacttgaatgataaagaa

SEQ ID NO: 54771 - DNA, 1042 bp, Homo sapiens
ctttctttaaaaaaggttttgctggctagcctataataattgtatcccacttcttatactacagtgttaaagtagaactctgaccttacaggagatagtttaaagataaatatgtatttacattgaatatcacctgaattaaacataattctttaagggaggaaagaaatgcaaagagtatgtggcttcagactttaattttacagatcaggaactagaaggtcagaaagtttgtcacagaaatgaggcttgaatctagaactctaatttgtgagtgccctttgccttcctagtgcacagcagcaagtcacttaccctgtttatcaaagtgaatgtctctatcccaagggaacctgccaggatcagaggtggggagggaggggagttatggcttcactcctgccctggctggcattcccattttctgtttctcattttggttgaagtacttgcagctatacaatgtctccgttgggaatcatgcttatgagaacaaaggtaccaagcaatctgctatggcaatctgtcagcacttctacaagcgaggaaacatctaccctggaaatgatacctttgacatcgatccagaaattgaaactggtgatgttcttctataacctagaacctcaatttttaacacctcaatttatatttaaaattagtaatttcatctttgaaaacattgatttggtctgtgatattaggacatagtaagaatgatatacgagttattatgtgtcaggtactgttctgagccctttactataactcaagaatcctcaaggaaacccagcaagtcaaggattattattatccccttttatagaagactaaattatggctcagagagttaaatgatctgccaaagatggagctagaagaggcagtgctgaaattgggctcaggctgtttgtgttcttagctatcgtattccaccatctcttgtgcaggatatgccagtgaagtattaatagatagatataatgtttgtaaaacattatgcttgcaaactcttggtatatataaaactctcctgccccaa

SEQ ID NO: 54772 - DNA, 1039 bp, Homo sapiens
taggactttcttttccttcctagttagtttcctgggaatttctctcttcagaaacttaaagggttcctgctacaggcaaattcttagattctcacaaccctgtgatcatgagaaccatgcaatggaagaatgtgaagttaactaacagaagaggagtggcaggagctagtgaaacacaggacctctttttagttcaaagggagcttttaaatcacatttccttggctgcttttaatatttttttgggggaaagggggaaccatattttgtgattcttaatatatactggttgtgatttattcttatgaaaatatgttttcctgttggtcaaattatctcttgctaaaagcaaagggcaaaatagaagcagattttagtgagaaaaatagatgtgataggtttatttttattattacttactcttcctaagttggtgaaaaatgcctaagtaaataaacaattggtattgaaggagagattaaaaaaaacaggatattactaattttaactgcttattgagaacaaacacttatgattgttagggaaccaaggcaatttttacaatcatatgaagttggtagaattcttgcttgtttctaatgctaggtgttgtatcaagggaaacaaacatttagtgactaccctgttccagtacattatttcatttaattctaacattcttactggctcattttacagaagaggaaactgatgtttgtagagctcttttaaagtcacatggcttggccaggcagggtggctcatgcctgtaattccagcactttgggatgctgaggtgggtggattgcttgagctcaagagttccagaccagcctgggtaacatggtgaaaacctgtttctgtaaaacatacaaaaataagccaggtgtggtgatcacaccactgcactccagcctgggtgacagagcgacaccttgtctcaaaaaaaaaaaaaaagtcacatggctagtcagtggcaatatcaagactttgaaggcaggcattctctctattatattaccctgaaaatggatgttca

SEQ ID NO: 54773 - DNA, 1003 bp, Homo sapiens
aagaaagaaaagctggtgttatataaaaaccctacaacaaagagaagtaagacttcctgtgggcataattttgttgttatatgatcatagctagcttgagttgtacttaatgaacagcatggtgaatttccctcagataataacaaaatcttctttatttgtctttttaaaaatttgtttaaagactggaccgctccttcagtcatgctgtgcaccaaaaaggtacacctcaggccactggtccctgactcggcccggagttttctacatcggccgagaagatggatacattgatatctgggaccttctggagaaaacccatgaaccagcccagtctcaaaacatttgcataactatgatcacctacatcaaaccctggatcttttcttgtatgttaattctaactaaataagctaagtcattttgggtaactcgggaacatcttgacattcatctgaaaagcctccaatgtttatttcttagttttttgtttttcttcctgctcatcccttcttatcccttcccttctcttcctttccttttcattcttctctcttccctttccttcccatctttcctcttccttttccttctctcttggtctcaaactttggacacaacctgagctcttctcactgttgcctcatcaagaatgatttctgagacacgtgtcaggcagaggctggttttgaactgcacgatgggaacatccttctcttctccgggtcagacaggatgacccggatctttgttatcttttgctgattttttttcccagatagaataaattttgtttctttaattttcattacaaatcatatttttaaatattatatcacttttgtggttctcccctggctaatatcaagcaattctcttcataagataaaatgattatctggagttatatatgtatttaagctttaacctttgaaccaactatgaggaaaaactactatataacaaaacaagcataaattcaatgatgtgtctatagaaacat

SEQ ID NO: 54774 - DNA, 1844 bp, Homo sapiens
gtaatctttaatagctatgtgtcagcattttaaattgtctattttatatacagaatagccttaaatattttgttcaacacacaagagtaaaccttggtttgtaatgaagtaatgtgtgtctctgtggtaatcgtctatatggctagcacaatgcatactctcagaataaactagtcttaatgtggaaaatgttatttgggattgttaaatacctaaccagaatgagaaaataaaatatctgtactatttccaggcaataaatgaagatagtagataatgctgtataatcaaactcaggtaacaaagtggtcaaatctagtatttgtacattttatcaaagtgaaatttgatctgcttagtaaactatgactctgatgctaatagaattgcagaaaagcccacaagggtcggaacttactaggctgatcactttagatgcctttgcctcatttagatgtttgcagacaaaggaacttcttgttatattttgtttgtacaccaatatgccttgcctgctttttgctgtagcttttaatttaggagaagctaccagcttagctattgtttgaattatagctagataataataaagttgcatagaaaattaatcgacattggaaatgtgatttgtttggggacgttatgatgtagcatgaattagcaccatggaacgttatactgcttctatccttaatctagattatttctggtaataaaaaataattatggaatgctttcttttgacagagtgcatgtttttgttttaatgcatgtttgtagttgatgattaaatggcttatctttagctctgttttttttttaagttcagttggattactgtcactaaagcaaaattattgtttgtttctagtgcagcgtttaactgtcaaaaaatcaacagacaatttattcccagagcagaagtcttctctgaattatctgaggcagaagaaagaacgacctcatatgttaaatttgagtggtactgattcatcaggagtacttaggccaaggcaaaaccgattagacagtccacttagcaatcgttatgcaggagactggagcagctgtggggaaaactactttttaaatacaaaagaaaatttaaatgatgtggattatgatgatgtcccttcagaagatagaaaaatcggagaaaattatagcaaaatggatgggccagaagtaatgattgaacagccaattcccatgtccaaagagtgtacatttcagacatatttgacaatgcagacagttgagtctacagtggatcgaaaaaacaatctcaaagatctacaagaaagtattgatactttgattggaaatctggaacgtgagctcaacaaaaacaagcttaatatgagtttttgagattgagggtttttttttgtaatgtcttaaagtttcaaatctgtttttgttttattttcttataccacccacagcgatgttttcatttttttactcttgaaatctttaattaatttttaataagtttatctgattcaattaaaaacactattcattaatacaatttttacttatctcactagaaaacttttctggggatcaataaaacttggacttcttgggatattttactaaatcttgccaactctatggagataactttcaaatgcacttaagaaggttcacataagttattagcccctcaaggtttttctgctttatgggaaccactcttctgtagctgagacagatgtccttttttttgttgttttttgagacagagtctcactctgtcgcccaggctggagtgcactggtgcgatctcaggtcactgcaacctccacctccctggttcaagtgattctcctgccaca

SEQ ID NO: 54775 - DNA, 1033 bp, Homo sapiens
aaacaactattcctagtgtacagcaccttattccaaagatttgtgttggtggttttaaaaataactgctcctttttctataacctgttatttttctttagttgtagtacctcagacaaaaaacagggcagaaagttgagaagaaacaacagttttaccctgtcaatcacctgctgttgaattcaagaaaaggcagaaatcaagtagacgaggtgcatttacttggcctgagaaagttgatggtgacatagagaatgtggcaaagactagtaggccacagcatattaactcagtgaatgcctatcctatctccatgcattcaatagaaggttttagctttccttgatatgcatatcttatttttccatttggaaattctccaactccagagttaaaaagagtcgcccccttattttttattttctaaactttttgttttgtttcatgttattttttgttttttatttttgggcaagaagataatttgctttgagatttatatttgaaaaatcctgtcttcaaagtaattggttagaacttcagcgtatcagcattagaaggtaaaagtcgtcctgccaatacttttttagattgtcttctactaagctctagggttctttggaagcagcttagaagccagatcagcaagggatgggggaacaaaatggaaacacacttcccgttgaccagaacagccttcttttttatctgttttatgtattgagttttcacaaaaatgtttcttttagatattcattttctgttttaagaatactgaaaataatactcctggcccccctatcactttaaagatggataaatcaatttagagagagtataattcctagatccttgctataccacattttctttctttttttttttttttttgagatggagtctcactgtgtcgcccaggttggagtgcactggcgcaatcttgactcactgaaacctttgcctctcaggttcaagcagttctcctacctcagcctcttgagtggctgggattacaggcgtgtaccactgcgccc

SEQ ID NO: 54776 - DNA, 1051 bp, Homo sapiens
ggatcatttgaaattggtggcttcctatcatgaagtgaataagatgacgtgccagaatttggctgtgtgctttggaccagtattattaagtcagaggcaagagccttccacccataacaacagagtctttactgattcagaagaacttgcaagtgctttggattttaaaaaacacattgaagttcttcattacttactccaactctggccaggtaaatgattctatggaaatgtttttcactttcaatgatagggtatttgaattaactaatcattaaatatgctcatatatgattgaagaaactcttctagattttgctttttcaaaatgttgtgaattgatacctgccctttagatttttttcatttaaatgttttctgcctttgctgatgacattgtaggcatgtagattaatgtgcacatgttagacttggtcagatctagatttaaatcctggttgtaccacttattagcaatctgaccttgggttggtttcttaacgtcttagagccttgtatcatcttttgtcatatggatttaataatatgtttatagatttttattaggatttttaaaaattgtgtatgtaatgtgctcagtgtagctcttgacatgtaatagagactcaataaacactaatttatttactcttctcatttttagttcaaccggtataaagcagaattcatttttccccttaaatcaattcttctttacgtctttaactgcattcatggtcattagtcaaattatctcagcttaaattgggaattacccttgacctttccatctttcttatccaatccttatttcaatcaataactaaagactgacaaatattttcctaattatctctgatgtaatttcagagttaaaagaaatatgtgtttaatttgacattctataaaggacactgcatttaaatttcaaaattttcttagattttagtaacccctgctactctcaccccacactgcatgggaccaagtgtgaagtactttggtgtttagtgtagagcacactagtaaccgtgcttggccccggggtcag

SEQ ID NO: 54777 - DNA, 1033 bp, Homo sapiens
caaaatttgtgtaattggaataattcataattaacataaatatgccttgctttcttaacttctgtttcacatgcatttagagaagctttttatagggggcagaatcaataagggtatatgtatcaagaatagcttactttatgattaacaaacctaacgtgtggtaactgaaaattatgtgtacatttttagcatgctttcaaaacaagtcaattaccaaggcaacttaaaagaatacaaaatgctagtattttataattctttttatgttgttgcctttattgttttcaaaatgttgaaagttggctataatacttaaattttaaaaaattgaccatagttctttatttcactctgcagtccaatcaccaactgtctgcggtttgttttttaaaggtgttcttaaggattatttaagagaactcccttctcctctgataacaaagcagctttatgaggctgtattagatgcaatggcaaaaagtcctttgaaaatgtcatcaaatggttgtgagaatgacccaggtgactctaagtacactgttgacctgctggattgtctgccagagattgagaaggtaagcattaccagtatacatttttcctgaaagccagttaatgaactgtatacctacctccagagctacaaataattttagatatttgacatttgtggcactcatggatttaaaagctctgccattactgcctttaaacagcctaagtctgtaaaagcttcttaaacagaataaatctagaaaacagttttatcttttctatatgtgattttagcccaagcatgaatactcactgaagtttttttaattgtattgttaaaatattattacaataatatttgttcattatagaaatattgaaaagatacagaaaagaagaatataaaattgcaatcatcaatatccagaggcagctataattaacattttggtgtgtctccttttagtattttttagatacaacaactgtgttggtgtacatggcttaactttaagacaaacaaaagcccctcccc

SEQ ID NO: 54778 - DNA, 1090 bp, Homo sapiens
aggaaggttcatcttgtacgtatttaagagaattttgttggtgaaaatccttaaagcttacttttaggattgaggctttctgaataattgagcttcccaccctttgagtgctgaatgactgtattttcatcaagtatttaatatataactcttggataatcaaaactttgattccaagcattttagtaagataaaacaaactgtcacttttttcttacatattttaacaaatcagaaataatggttccttttaatttttatataggaagaggcatatttctacaaaaaattgagatacctgaagaatgttctttccttgttaatgtgtaattaacaaaatcagcaaaagactcattttatgaatccatgaaagagaagttttataaatacaaatttccagcaagtacactctataaataaaaatagatttggtcttggtgaagctttgtcttataaataaaaattatgttaaacatgtataattttaaaatatgaagtgaagaaagggttcctagttttggaaattggcagcatatgcagaagatatgaacaataggtcaatgaatattggatttacagcattctttcctaaaattgagagtttctgtaatttataaattggatatttcttggctcaattctttgtactattccatttgggtaaagctgtttttcagaagaatttagaactatttttttcttgataaaaaggcaatgaaatgatttaagatttgtctgcaaaataattgcatgacacaaggttttcatggctaaaaataaagggtattgttgatttgaggagttagccagtgacagtgatgcttaatgtgtttgttcctcatgaactcacatttctgagtaaactttgaaatatgattaatagttcagtaggtctaaaaaatgagaaattaatgaaatgagtgacagattttgttcacagtttaatgtgtttttagtagttggtttgtctggagcatggaatgaaatactccagacgaaccagtttttttttaaatcaagtgcaaaattttaggtataaaatccattcgtaattcttttttgtttgtttgctttttgagaaagagtctca

SEQ ID NO: 54779 - DNA, 1029 bp, Homo sapiens
atttgttgttttttaaaatgaataaacactttttctcattttaattgtgaaatgttgtgttacatacattagcttttgatgtgaggttattagatctttctctataaggaataaagtatgaaaaattaaattaaattttaaataattgggataatgcagtattctgcttgaatatcatgatggaagttgacctgaacttctaatgaaatctccccattgagatgaaataagagaagaatttctgcctatgtgaaagcctgtttagttgatggtttataaaataagaataaaagaaatcaaaacatattgctttataacgtatttttctttctttcttttaaggttctgggatcctggctgctacaaatagtactgaattgggaattatggaaccatcttctccaaatcctagccctgtgaaaaaaggcagttcaattaattggtcattgccagataaaataaaatctccacgaactgtgaggaaactttccatgaaaatgaaaaagttgccagaatttagccgaaagctaagcgttaagggaacattgaattatataaacagtccagataatactccttctttgtctaaatataactgccgagaagttcatcatactgatattctgccctctgggaacacaaccaccgctgctaagaggaatgttataagccgataccatcttgataccagtgtatcctcccagcagagctaccagaagaaaaactctatgagttctaagtattcctgcaaaggtggttaccttagtgatggagactcacctgaacttacaactaaagctagcaaacatggatctgaaaacaaatttggaaaaggaaaagaaataatttcaaatagttgtagcaagaatgaaatagacattgatgcttttaggcattatagcttttctgatcaacctaagtgttcacagtacatatctgggctcatgagtgtacatttctatggtgctgaggatttaaaaccacctcggatagattcaaaagacgtcttttgtgcaattcaggtagatt

SEQ ID NO: 54780 - DNA, 1077 bp, Homo sapiens
ttctaaataatataaatcatatttatatgtaaaattcaaattttttctagttcaattttagtctctgaatgtgattgttgttactttttgtttaaaaaaatttttttaaataactggtctgaagtgacatgtctttctgatataccagccattatattctaccttctattctatctttgcaacagatttatttgaaaatgcctatgggtcttcaatgaagggaagagaacttgaagagctgaaggataatattgaattcagaggtcataagccacttaacagcatcactgtttcaaagaaacgcaattggctatatcagagtactctgaggcctcttaatctggaagaagaaaataagaaatgccaagatagaagtcatttatccatctcacctgtgtctctacctaaacatcagctatcacagtctttcctcaaatcatctaaagagtactgtacatatgtggtatgtaacgctacaaactcttcattatcgaaaaactgtgctttagattttaatgaggaaaatgatgcagatgatgaaggagaaatatggtacaatcccattcctgaggatgatgaccttggtatatcaagtgccttgagttttggtgaggccgactctgctgttctgaagctccctgctgtcaatttgagcatgttgtctggcagtgacctgatgaaagcagagcggcatactgaagactcactgtgctcttccgaacatgcaggtgatattcagaccacacggtcaaatggaatgaatcctatacatcctgcccattccacagaatttgtgcagcagtacaagcaaaagctaggacacaagacacaagaaggtataatggtggaggacagtcccatgttgaaatctccttttgcaggtaaaaatgatcatatatgtgtctttctttcttcttccatttttgaattatttgataatagctaaaactaaatataaaagatgtttgttatattcatgtactttttcttgtgaagtgaatatattttcatgaaaataaaactcaaaaagttttataaacattttaacgtacacgctggtttaattattactatcac

SEQ ID NO: 54781 - DNA, 1083 bp, Homo sapiens
ctgctaaaagcctaaaacaaaacagaacaacaacaacaaataaggcaggttggacaagcttgctgagtatttgggagcctttttcaaaagtctgatttgggggaagtaaagtcacttattttaagctaccttagtatagcacctaaagagttactttgtgaattttgtatggctgcaattgaaaaaaaaaattgctcactttcacttgcatttaaaaatcagagctctaaaagttaattcttgttttttattgggaaactctgagagaaacattaattgatgagggtaataattttggtataaagccagtgaaattttaatgcttaacatgttgggttttttaaaattactgattgaaactcttccttttctatttaaagatgatgaaaaagatgagcatacttctaaaaagcgcaaagtagagccaggagaaccagcaaagaagaaaaagtagaaacaaatgaccagaatttctgtactgctaaacttgttgaaatgtttctttggacagattaagttgatattgtgggttattatgccacatctccatgaaaatgcatacgttaatgaactaataagtattgcctcaagaactttccactatagaattctttttttatttaaaacatgtatgtatttaaaactcaactggtgacttgtgattgtgaaattgataacacttggatgcattcttgctctcacagaattggtgacatgctttgagagttttgtcacatgttgacatgccaatgttcttataaaccttttataaaggaatatatttttaaagtaaatatattgtaatgtactgtgaacttgtagggtgcttttcaacagtctttgtacagtgtaaatagatcatggaaataaaattacttattcaatattactattactgtataacattaacatttgaatgtttgtctgtgacaagtaccctatttgtcgtgtgacattttaagttgtaataagaagtattaccatttaaagagtgcctcctgtgttccaggtgctttgtgcatatattttctctgatccttaaacaacctagcgcaaggtattattagtattctcattttataa

SEQ ID NO: 54782 - DNA, 1055 bp, Homo sapiens
aatttttgtatttttagtggagatggggtttcagcatgttggccagggtggtctcgatctcctgacctcgtgatccgcccgcttcagcctcccaaagtgctgggattacaggtgtgagccaccgcaccctgccacttctggttttagtggttgtaaaatgtaggtaagcaaagcttagttattagttgtagctttattgacatgtataataattaattgtaaaagcataattaatatagtgatttttagtttacactttttagaatttagaaagtttgtctattgataagttaaacttacttgagtgatttgagttccataataaaaaaattgtttccttaccagtacatctatactatatgagaccgagtaaaaaagctcagtaaaattgataaatgaacattgctcagattttttcctactctagtttataaagcaatgccttgtcatgacactagatggcatagcacttctgctcaaatcactgatagccagttactttttaacttcagtagtttgtggttttgttattcagttaatttacttgtaataagtggcaaattaaaagcaaaaatatctcagtatcatctaaatgtatgctaatgcatagtgaatattatagtaaacttagtactttccatttttatattatcactactgaaaatctcaaaagaggagcttagtgataattaactcgttaaaaagcaaaaggtgccgggtgcggtggctcacgcctgtaatcccagcactttgggaggccgaggtgggtggatcacgaggtcaggagatagagaccatcctggttaacaccgtgaaaccccgtctctactaaaaatacaaaaaattagctgggtgtgatggcaggcacctgtagtcccagctgcttgggaggctgaggcaggagaatggcgtgaacctgggaggtggagattacaatgagctgagatggtgccactgcactccatcctgggcaacagagcaagactccatctcaaaaaaaaaaaaaagcaaaacgtttggcttgttttggtggtataccatgttatttggtttgt

SEQ ID NO: 54783 - DNA, 1051 bp, Homo sapiens
aagcctagatgtacaaatcaaattgattctccacttctgaggatggtaaaacataatccttcttttcttccttttccttgattcccactgtaggtttatgagaaactgaaggaccatatgctgatccccgtgagcatgtctgaactggaaaaggtggatgggctgctcacctgctgctcagttttaattaacaagaaagtagactcctgagctgcagagtcccccccggttgccggcaagaccgcacaggcaaggccgatgactctgtgcccactcctgttgttttccttgacaatctactgtgccactgtgctactaactcttgtttacaaaatttgattctaagttgaattgcttcattcaacacccccaccctccctcccctcgaggtggtacctaagctgtggatttgctaaatgaattaagcaacctagaagatacagagctaatgaattatcaaaatgtgattaatcccagtaaggaaacactcatttagtgtctgtatttttggtgtgaaaattatttagttgccagtatattctgaagaatgtcttcttgatcagtcagataagcttgctttttttttttttttttttcatgaatcatgtttggttcctgtgaaagtccctggtccagggatcctcctcctttctcttttacttctgaattctgaaattcagttagttacttttgcctttcgctcttctatcacagccaccttgaccttgggtaaaacccaaggtctttccttctggctaccttcctgcaggtccaccctgtctgccattggtctcctctgcctctgactacatctgccaccaacaaccctcccctcacccctgccaggggcagacaggcttctcagcagaactgtgactgaaatcagagctgctgtctggggcagtgttaactacacagaggcacatcctgacagggtttgccccagagatctaaattccagaaggagggcaccacacctaggaaggtaaatccagtatcagaaggttgctaaaagattaaagatcaagaagcttggaaacatcccatgggt

SEQ ID NO: 54784 - DNA, 1759 bp, Homo sapiens
atcattatgctcctttgcacttggcccacagtgggcccttcataaatgtctgatgaagggatggataaatgaatgagagaggtggtattatctccattttgcagatgagaaaactagatcaagtgactcaccccaggtcatagtgctaataataaatggtgggtcaggactgcagccccttcctcttagctggtcctgcacacgagcatgcatgacttattaaagggccaaagccagaagttcctcttagtcatagacagcaaatctgtgggccctgaggctctttcaggtctcttctcttctacctcagtgccaagtgtggtggtttggctgggaagcaatcgtttccttgagctaaatttcctctctgtattatctgccactctttgagctagctcacctggcctttcttccacctcttcccaaacggtatctttgattctgtttctaaggcttttattaattgttgctgaacaatctgtctcagaatttgatttgtatcatggtggcttttgttcgtttactttagagaatgtcttttgttctgctccatctggaagttcatgtcaacttcttgcatataaaaaaagctggtgtcttgaaagaaaacatttgataaatggtgtcactcaggaggtctaggaagattatttttctccttagggactgtggtatctatccgtggtacctaggctggtctgcatatgtctgagatcgattataagatgagagggtttaagctggtctataccatgcatttgtgtgtattagcagaaagaacttcttctgggtggaccaactagaaaaagtggccccttctgccattctgggtagatcaggtccctaactcaaatcatttggtccctacctcaataggtctgtaactcaaatagtctagagagactaacacataacaaaataaaaggtaatcaaatatgactaattagcactacgttatatgatataggccctaactgctcttcaaagttcagaggaaaagggggcgttccctgaggcctagatattcagagaaagctttgtagagaaaaatgagactagatgtgagtcttgaaggatggatggcatttgacagggtagaattcaatgagagaaaattacaggtggggacatggcataagcaaagactgagcaaagtacattgatgagatgtgagcaaaccagctcaactcgtagagtttctagtgggtttccaggggtacaggtggaaggggcaggtgagatctgaagaagtaggaacttaacagtgaggaagacaagattatcaccgtgagggagcaatctgggtctttgaggagaaagccctgcattgtttcagagatgttggaccaacattggaaaaggaagaccctgcagtcagaaaagaggaccactgatgacctaggaaaaaaaccccaagccctaagtcctattgcatggcttggcaactcacccctatttctctcttcatctttcccttcccatggtcaaattctctcagaccacatctgttaagggcatcctatgaagactttatagtcctcctccctgtagagttcattcgagttagtgttaataatgatgttccttttctacttgtcagaacctataaataatcctcactagctagaaaggcattcgttggagattgcattttccatcagcaaatgtactgcctaaaccacaggcctgtggatttggtgaatgcccacctgccatgtttctagcatcaaaaatgtcatgttaccttgtagtgaaaata

SEQ ID NO: 54785 - DNA, 1040 bp, Homo sapiens
taggtgatttttctacttttgatctaagttgatgtgtgtagctgtagttcattttcaatgttgtgtagttctctgtgataagaatacaccataatgtatgtattaattttactactgatgtgtttttggatgttttccagtttttgtggattatcttctgtgtttctatgtacattcttgtgtgtgtctcctgggaacatatacaagagtttctctaaagtaaacacctggaaatgaatttcaggtgatagagtaaactctttttcttgtcactgaaatgattatatgattttctttaatctgttgatgtagttaatttcattaattcattttctgatatttgaccagtcttgcaaccccagcatgaaatcaaatttgatcatgatgtattctctttttaacacagtgttgaatttagttcgataacattttgttatgactattatttttgtggcctataatttatatttcttgttatccttgtctggttttgataaaagagttacattagcctcgtagaatgtattagggaatatttcctctttttctattctctagaatcaatactatttgaattatatattccttaaactttggaaacaggctcttgtgccttctttatggagaaatttaaaactgatttagttgattaatgattatgtgacaatttagattttcctgagtcagttttgatgcgttccattttctaagattttatctgttttaagttttcaatatgttgggtataaagttacttatatttcctaatatctgtttaagcttcacagcaactatagctatattatcttttcattggtaatgttaatttatgccttctttctttgtttgccagaggtttgttaattttattaatctttcctaaggaccaactattggcttggttgaactctttctcttgaatgtttcttttctgtttctgtatttccttccttcacatttctttctttttactctgttctctttttttctacatctcaagttggaattttatctcattaattttagcctttcatcttctc

SEQ ID NO: 54786 - DNA, 1037 bp, Homo sapiens
tgcttagtacctactttgaagataggtcaaaactactgggcttgagatgctagggaaagacctttgaccaaaagaagagactcctagtgtaagttgcactttcacactgaggagattttagggggtctttctggctcagctgctaaaataaatggttgtgaacatagcttggttaagccatatttcaaatgttaacagtacctgcttacaataagttattcattgcatggctatgttctgataaaaaagagttatattgtaaggaagtgtgatttacacatctaacttttcacaaaagcctattttgttagataaacagactgttgttctgtactgtcaaaaagaatgaaagtgccatcaacgggagacacaaagaatattctaaggggaacttactaggcagattcaaagaatgcctgagtctgcttgggcacacccagagataagaatgcagcgtaggccttcttgactccttgttctgtgttcttagggttcaatgggcatgcaaaccaaaccccagagatggaccactgcatgagacagtggcagcacaggtgcagtacacaactccagggcatactattcacacaatccctaagaagaatggcgcccccagagctggcaacgtggtggccccacccatagcgacagtatgtgacacttagcaaagaactgcttaaatgtcacagaataaacactattccttcttcaggaacattaattatgtccaaagtaagtaatgcaaaacattattttgatattaaaacaaaaatggctatatcttgactatacatatatatgagattcaatataaaattcacatcagccaaaatattagacttccaagaagcttcacgctttcagtgggccacttggggccacattcccaagtccctgaggaccagcctttgctgtcagggctacattggtgaaatgtattctctgacatgtctgggaaaataaattctcactataaattaaaattactattgattatcttgctcatcagtataaccagaatgaatttggggacccag

SEQ ID NO: 54787 - DNA, 1049 bp, Homo sapiens
gagtgcaggagtttgagaccagcctggacaacgtggtgaaaccccatctctacaaaaaaatcgttaaaaattagctgggcatggtagtgtgcgcctgtagtcccagctacttgggaggctgagatgggaggattgcttgggcccaggagatcaaggtgacagtgaaccttggtcatgcgactgtactccagcatgggcaatagagtgaaaccctcctcaaaaaaaaaaaaaaaaagaaagaaaaaagaaaaaagaaaagctgcgtctcttaaaatccaaggtaaaattatatttcatcctcattacaactctttttcctaaaagtaaatataaaccatgctcttctttatgtgctatttagcctatctttatctgatgtatttagtcattctctactgctccaaggaagtgaataaatccaggtaaaaagaagataccaataatgaaagatttcacttttcatgaatgttttcatagtaggccctcttcattttaggactgtaacctgttggaaaaaaggatcgattcctgtaattgtattgctagactgtgtcaaggcagtgtattatgaaagctacatttgagcagcacgaagatcgccttttaatgatgagagatagtgttagtctgctgtactcaaaagtgttcactctttagcccaatgttctcgtattatataaagctttagaaaccctggacatttgcctacaatgtctttgaagaaggcaatcacattgtgggcatggatcatatctctctgcttacatttttatggttttcatttatgtaccattgtactgcagaagggatagaaggcagcttggaaggatatatataataaaggtagaaccaatcaaaagatggatataggaataagataaaatgattaccattaggtggccaggaacacaatgtatggtctacacactgttacagatgggtcacaaattccactgaaagctttctaaccaccagcataaagaagtgaacctggtgggtattttagtctatgagggcctaaagatacaggcaggtcagattctgagaag

SEQ ID NO: 54788 - DNA, 1020 bp, Homo sapiens
gtgccctggttgcttctaacagcctatgctcatatgcaggagcaaataaatgacttaaagctggaacttatatttaaaagggaagcagagagtaagagtttggaaaatttgcaacctggccatgtggctgctgagcaaccacttgctagagaaatttgcataactaaaaataaggcaagtgctggtagccaagacagtggggaaaagtcctcaaaggcatttcagagaccttcatggcagcccctcccatcacaggccctgaggcctaggaggcttccctcctaggtttcctgggacagacccagggagtgtgctgccctgcacagcctcgggacactgctccctgcatcccagtcgaaccccatctagccatagctcagaggagcccaggtcgaaccgcagctcagaccacagctccagagggttgatagtttgcaaccttgataaaatgtgatgaaaatggcactttacccctgtgattctctccaaaaaatgataagcccagactaattgttatttttaaaaaatcaaggaaatgcaacttgagggacattctacaaaaataaaataaaataaaatcagctctcctgaaaactctcaaggtcttaaaaaataagtctgaaaaattgttatagccaagagaagcctagggaggcatgaggattcaaatgcaatgttggatcctagatgggatcccaatataggaaaaggacattaggtgaaccaatatatggtaacaaatgcatcatactaacgtaagaaggcaataataggggaatgcatttgcaggtccatataggaactttttgtactagtttcacaatttttctttaaatctaaaactgtcccaaagagaaagtttatttttaaaatatgttacccagacttttttttttttttttttttaagatggagtttcactcttgtcgtccaggctggaatgcaatggtgtgatcttggctaactgcaacctctgtctcccggtttcaagtgattctcctgtctcagcctcccgaatag

SEQ ID NO: 54789 - DNA, 1027 bp, Homo sapiens
agggagtgggagttgtggggaaaggaatacaaattcggatcaataaaaaaaaatatttgaagaaaactgagtaaaattactagcttgcagagatgaacaagtgaaaatctagaaagaaaaataaaaaaagaagtgatggattgtctttgaaaagtgcaagtctaaaactacagtcctgaagtgagattttggtttcaacatgaaagaactgcagtgtgaaatgtaatgcctaacttcatctggtagttaatgtgacatgacagctcacatgaaaatgaactgcaaataaatgcttaattttaaaagatactgtatgatctcaataattgaaacattgaaggcttcttaacagagcataagtaaatgtttcaataaaaaaaagggatactcttttctacagacagccaacgacaatagactggatgactgtgatcattctcattattgtttatataactaattcttatctcttcctatgtgtttatatttgcttcctttttttacactgatacattagaaaggaaagccaaaggtcattttctctttattgtataacttttttatgattatagaactaataaatatatactcattggagagaatttggaaaattaaaaaaaattaaatttaataacacagcacttagaaatttcattaaggtggtatatatgcctatgataaatccttagggaactcaggaaaattgactggtgtttttctaattatatagccctgtgaactaaaaaggaaggagataatggtatctatttttacatttgagaaaatggagatactagttaagggggaaaaatagttttttaaaaagcatgctcaccagactatctctgtatctacaaagatcttcttttctttacttatatagtgtgtggacagatatcaccttagttcatatttgtgctgaaaaatataggtatttgaagataatcaggttgcataattcattctgtatgttagtctcacattccctatactgccttgatctcagtgcaattaataacttaaaaag

SEQ ID NO: 54790 - DNA, 1024 bp, Homo sapiens
acttgaggtcaggagttcaagaccagcctgggcagcatagcaaaaccctgactctactaaaaatataaaacttagctgggcatggtggcacatgcctgtagtcccagctaccctggacctgggaggcagaggttgcagtgagccaagatcatgccactgcactccagcctgggtgacagagagagacaccctgtctcaaaaaaaaaacaaaacacacatacaatatgatactttaataattaaagtggtactagtgtaagaatagacataaaaattaaagaaatgtcatagtcatggaacagactcaagtgtacataaaaatctggtaaggaggcatcacaagtcaatggggctaggcaactgattaatcatttttaaaaattggggcatcatgtgacacatcaaaattcaagatggatcaaaatgttaaatgtaataactaaaatataataactataaagtaataataaaacaatgagaaacaggtgattttaagatgtgctgttaggatagggggtgagggaaacagtgtaagtggaacaaggaaatcacaataggaaaaatcaatcactttgattacattttacatcctgatatggtatcttaaatgtattttaatttttaattaataaatactgtacaaaaaatgttaaattatttttttgaatcctacatttgatctaagtaacataaataattacctgaagatttaaatgtgtttcttttctacaaaatcaaatatcaagaacatttaacatatgtagattttgaatgagctaaatcagaaataatacaatattttatttgtatcttaagtttaaagtttccttagtattactcttcatagttaacatagcttaggctacaaataacataactagattatgttgcatggctgttagcttgttgttgacattattgtttttatgaaagaacatgactattttaatgatgtccttatgaaggaatagaaaaatacacaagcttgagatttttaaaaagttgctcaatttttttccagctt

SEQ ID NO: 54791 - DNA, 1381 bp, Homo sapiens
ttctctcttaaccattcttaattttccaatcctgctttttgttggcttcaaatgtgctcaccagaatcctgccagctttagttggaagaaatacatttccgagcttagttggacatcagttttttttgggccctgcccagacttttgacagagaaggtagtgttaagggggttgatggtgtctagacagtaaaatcagaaactttgtaatttatgttgtattacagacgtccacttcccggattggaaaaaggaaactgacttttatctaaggaagttacattaaaaaccaaagcccctgggtatttctgacccatgaaaagttaaagcttgagtaattttacataacattctccagccccttcaaagactggaattattgagagtagtcctgtatagggtcagggatgaaaaataaacttccaagtctcagaagataattcatagacccatataacagtctttcccggctactcacctctgattagacccctgtgagctcacaatgtgagtgggtcttgcacatcagtttcagagggattttggaaagttgtagaggagagaggctaatagcaaaagagcatggaggtgtttggaattccaaagaagattgaagatctgactcagggctcaccccgctaaaaaaatcagacttttccttaagggaaaaagcatgttgttgatttggaaaaagtataacaaaaattaaaagtaccttaattatgcaatgatattttgtttttctttttatgctgtttaatgctcataaatatcagatacatcctcaatattcattattgtggaaaataatagaaaaaaatcttaataagctaggcaaaatttatgtaaaactaaaggcttttaaagcccatgtcagcttttgttttgttttgacctggatcatcatccaggtttccaagtagaattctgagttcctttcagaaaagtatgaacttctttatgtagaactatgacacatcatatcaaaggctactatctgaactgttttagaacacatgtatttaaaatgctgtagtcttattagcattatgaattaattctttgcttttctatcagtctgaaaaattttaaatatcttaaagtaggaaaattagtaaaaactccattcattacggaaaaattgtcttgttattcttacaagatgctaggtcactctccctgagttaaatttcactttgacagtttccagctgattgtgcctgggtcctaatagacacacaataagtgttagctgaactgtatgttgaattctttctaaattttacatcgaaagcacttttcaatgtgtagtaactagatgattaaaatttgtcttgaagagcagatagtttaagaaaacagatataagaaacaagagaaga

SEQ ID NO: 54792 - DNA, 1061 bp, Homo sapiens
ttttccattttcctttttcctgaaagcccaccagtagacaattgatatggttaggccttatgtccctaccaaaatctcatcttaaattgtaatcctcataatccccacatggcaagggagagaccaggtagaggtaattgaatcacgggggtggttttccccatgctgttctcatgatagtcagtgagttctcatgagatctgatggtttataaggggctcttccccctttactcggcacttttcctgccttcttgtgaagaagttgcctggcttccctttcagcttctgccatgatcgtaagtttcctgaggcctccctagccatgttgaacagtgagtcaattaaacctcttacttttataaattacccaatctcaggcaattcatagcagtatgaaagcagactaatacaacaagtccatgagcaattgctggggcggtacagctcacagcatgaatgtctcaacttctgacatgccacagtcagacatgcaccagaaaataagtgtctggctgttcctgatgtccttactggactgtaatattttgaatttgccattctaacaagtggtcagaattgcagatggcatttaactattgggattgcttcatttggctttaaaatgtaacatgaagtcaagtgtgatggcttatgtctataatcccagtattttgggaggccaaggagggagaatagcttgaggccaggtgattgagaccagcctaggcaacatgaagagaccctgtctcttaaaaaaaaattatctgggaattgtggtacacacttatggtcccagctattcaggaggctgaggcaggatgattgggcttaggagatcaaggcttcaatgagccatgtttgcaccactgcactgcagcctgggcaacagagcaagaccctgtctcaaaaataaataagtaggtaagtaaattaatccaatgtaacatgatattttcattgagcatataccctttaggaaggacagaaggacctcattattctttcacatatcttcacttgctttttacgttaaccgtctgtcctaaattgatgccatat

SEQ ID NO: 54793 - DNA, 1021 bp, Homo sapiens
ccaaaggagagcaacagagggatactcacttgtaaacaaaggggggtggtacaaggaggaaatgaatacttcatagaactctaaaataaaccaaccagattttcagaacctctcactcttaataattcctgccattccttatctcttagagcagagatgattgagagaattaaagagtaggcttagtaatggtgaaaacacaaattctgattggtaatccaggataacaacttcaaagtaatagaccttggtgttctaacataggggtgtccgatctttcggcttccctgggccacattggaagaagaagaattgtcttgggccacacataaaatactctaacacaatagctgatgagcttaaaaaaatcacaaaaaaatctcctaatgttttaagaaactttacaaatttgtgttgggccgcattcaaagccgtcctaggccacatgtggcccatgggccatgggttggacaagtttgttctaacaagaaaggatgatgaagatgctggctcctgactacaatgggtggatatttactgctgaacacacagcactgtatagggtctccaaggcctccatgtcatccttgggttaattaaaataagggatgaatttagggatgcagccggctcctctttctgatgattcagcgtgaaggaagagggtagttttgcagagaagaaatccttccagtgtttctgtcaaggattagcctgttgatgaggaaattcagacatcaaaggtcagtgtagcttttggttaacattttgcataattcagactgactaaacttacaattcctggtaactccatttgaatctttggcaagccttggaagtaaacgggagctacctccaggctcagactagcaatcatattactaggtcaatgattttacattctagtcagattcctttaggttgcaaataactgaaacatattcctgcaagaaggaggaggaagattgtaaggatagactcaaatagaaaccacagaatcattagggacatgaagtctctc

SEQ ID NO: 54794 - DNA, 1050 bp, Homo sapiens
ttcaataactgtctattatgtccaggctgaatgtttggtgctggggagatacagatgaattagacacttccactgcccctgaggatgtcacagtccagagagggaggcagatcagtgacagacacttgcagaacacgggggcagattttatgacagacctcagcccagtgccatggaagctcaagaagatgtgtctcacccacaccaaggcttcccagaaggagcgattattgagtgagaattaaccaggggaaggcagagaagagcaaccttccagatacagagaacaggatgagataagatgggggtaatagtccagtgaagattaattttattaatgttgagaagatgtagaattgagaaaaactcacccgtgccctctcagatcttttgaaatttcagatccaattccaagttcaccaaaagaaacaggtacagaactgtattactttgttttgggtctagagggatttggccactttgcacacttcatttctaagtgtacttccctcttactcttatccacatgctccataatggtctggaaccccttctaggattcctgactggcacagtttgggaacaatgtagcccactctggagttgactaaagtctactttaagtctgaaacttaaacatttcctgagtttgccatttagattctggtaaggcacttttttggtggtggagggtgggggggtcctgtaagttatcagtatattctttgctgggggttttcccccttgacccataatttgttacatgagggtgtatcaggaaaacctgtcatcttgtagtatgtagttatatacagatgctcctcaacttataatggaattacatccggataaacgtatcttaagttggcaatatcataaattgaaaatacacttaatacttgtaacctaccgcacgttgtagctcacgctacactaccttaaacatgctcagaacatttacattagcctatagttagacaaaatcatctaacacaaagcctactttaaaataaagtattgaatatctcatgtaatttattgaatactgta

SEQ ID NO: 54795 - DNA, 1056 bp, Homo sapiens
caggccttttaaagcacatttgtgaaatgatcgtaccatactagggtttggggatacaaagatgacagatgtggtccctgactttgaggatgacacagtctagaggagagcttgcataaatagtgtgtatataatgagtgacttcataaaggtgcagtatacatgagctgctttaggagccctgcctgaacactgccccacactggggtgaagtcttcttgtcacactggatggtgctgctcttgagacttccagagcttcctccataaagcttggaagggcaagctgtgtttttctctgcttggatataatttattatgctttggacatagtatcagcaaagacttgaggatcctttaataaggatcctttaattatgaactctcattcataaggaattgcatatttttattttaaatgtctttgcacttccctttggtaagcaatctagggttcctaatgtgcatagccttttgggtaaacgtgtgtttctggtgttctaatgatagctagtgaatgtgtgaattatattcttggccttacttgaaatgatgcgaggtttctgttgtatagtgttaaaggtgagcctgattatttgaagcccttccctaggcagtgggcacagtggataagaagggagagcatattgggtaaaatgacagtgctccaggattccattacatttagtggcattttgggatattgttttatttgattccactgtcgttcatgatatgccatctgtctttatttcctttcctttgtttgctttgggtttaattttctcttatttgtctagtttcttaatatggaagctgaggtcactggttgaaaacattttctctctattataagcacttaatgctataaatttccctctactcctgcttcagctgcatcccacatattttgacatgtttttatttttaatctgtttaaaagactttctaatttcctttttgattttttttgactcaggttatttagaagtgtgttatttaggatatttggatattttccaggtatgattctgttatttatttctagcttcatttt

SEQ ID NO: 54796 - DNA, 1800 bp, Homo sapiens
caccagcttgttggcgtcttcgtcgccgcgctcgccccgggctactcctgcgcgccacaatgagctcccgcatcgccagggcgctcgccttagtcgtcacccttctccacttgaccaggctggtgagttggactctccttttgccacctattccccgtccgctctccagccccttcccctggtcccagattgcccacggcaggaaaagttaaaaagttcgcgatcgtttgcgggtagccgtttctttaagcactctccccctccccccgaagacgtgtcgggacctcttggtgggagcagccttccgaggtggccgggctggacgagatcagaggctccccgtcgatagggtcggagacccccgtccctcactgcggcagccgcggcgcccctcctgcgcaccgcgccgagtctcacgcgtatcttctcccccttccaggcgctctccacctgccccgctgcctgccactgccccctggaggcgcccaagtgcgcgccgggagtcgggctggtccgggacggctgcggctgctgtaaggtctgcgccaagcagctcaacgaggactgcagcaaaacgcagccctgcgaccacaccaaggggctggaatgcaacttcggcgccagctccaccgctctgaaggggatctgcagaggtaagatgcttgtggtttggcccctttaaaaaaaatactagtccccatagtccagaagtttagtaattctgagaccatgtatggtgatgctttgttgttggtagcttggcagaaaggcacatgatttcagcagtctggaatgcaattcagtgtgtctgggcccaacgaaagcgcatacggaaaagtgattcctgactaacttattgttctggtctggagtctccggggaattgtagggaactttaccataaattgaatttaacagcagaaaatatgtatgagtttcaggcggtggtttggaatcttaactttatccccttctacctttctcttttggtgatctttgcagctcagtcagagggcagaccctgtgaatataactccagaatctaccaaaacggggaaagtttccagcccaactgtaaacatcagtgcacatgtattgatggcgccgtgggctgcattcctctgtgtccccaagaactatctctccccaacttgggctgtcccaaccctcggctggtcaaagttaccgggcagtgctgcgaggagtgggtctgtgacgaggatagtatcaaggaccccatggaggaccaggacggcctccttggcaaggagctgggattcgatgcctccgaggtggagttgacgagaaacaatgaattgattgcagttggaaaaggcagctcactgaagcggctccctggtaagtggagactgagcacttcagacactgtactgagatgcatttctggtctaaatctttgtagaaatgagtgcttgagcctgtttgtgtcggtatgcctctgagaagtcttccctcttatatgtctctagtttttggaatggagcctcgcatcctatacaaccctttacaaggccagaaatgtattgttcaaacaacttcatggtcccagtgctcaaagacctgtggaactggtatctccacacgagttaccaatgacaaccctgagtgccgccttgtgaaagaaacccggatttgtgaggtgcggccttgtggacagccagtgtacagcagcctgaaagtaagttccttcagggacgtgtagactgttgcctggcaggtgggtgggatgtgaacatctttttgaagaaagagaaatatcacccctaactttccttctct

SEQ ID NO: 54797 - DNA, 1040 bp, Homo sapiens
ggggagaacggatgcagtgggccaaagaacagtattattctggtaaaacagagcctgtggtgccatgagacacatcatttgcctccccctctcctgctggacacagcacaggcagcatgtggtgttgggaaaggcccttctggaagggtgaaccacaggaatgcagccctgcatgttggctgatgagccaatcagagcactgacgattggccccacacggatgtacagattggttctgctatgtaacagctcatatctggaaatagatattcctgtctgtgccaggctagggatggggtgaggctggggactcatgtgaaggtctgggatttcaaattcataagcaggccaccaggttggacagcgtgtgcaacttcgctctgttggtattttgttcctgccccatgtgttatgacttctttcccaaactgatattttctcctgagtcttagggcacaagaaagcaaacaaacagacggaatacattagccacatcttttttcttagaccctttgctgatattggttaaagctgctttgctctttacttggaagtagttttgactctacttttaaagtaacatttgccaagagaatgcaaaccagtgctttgtcatgattcctcatgtttggggaatttgagatttgagttctgggctgagtggatgaggcctcaaaaagcaagtcttattgagctgtggccacagagacactgatcagaatgggaaggctgtgctccttcccccctcctcactctgatgtaactttacacaaacctcagctccgggctgctggttttcatcattagatacatctggagatgaattttggatacatgtggactctttaaggcatttacaaagcactttatagaaattcaaaggttgtgagggcaagactgagagaaggtgggtatgacatgtaagacctcatgccagctgggctcatccacagctgcaagggccttcacctatccaaagatgttgttaaggatcaactgaaggtcagcgacgtgggtgaatctcataggtgtaaggatga

SEQ ID NO: 54798 - DNA, 1085 bp, Homo sapiens
aaacaaaacaaaaaaacctttcaagctatgtactgcagtggacaaagattacaccgtgtttgtgttgcaatgttgctatggaaatgcatatggtggaaatttgcagagaagtcgaaggaagtcatatgtatgcatgacaaacatgaagttcgagagtgcctgagtgcctctcagcctggctgggtgtgcctgcgccctaaggagggaggcaaaggtgttagagtcaaaaagtggagggtttaattcagttctgccacccagtagctgtgtggccttgggcaagttactgggccactgctgagctttactcttctctgaaacggggaatgacaacccctactgtgcatcattgttgtcaagatggaaacaagatggcaggtcttgagcactgtacacagtaagtgcttaataaatgtttctggcgtgatggcagcagtcccaattatgcgccaagaatttagggtcattcatcgaatggtctaaaaatgttcagaaaggtccttcagaaaggtgctctggcctgaccagaggacaacactgccaagatttggctgcagtttgggctttgagacttggagcactgtggggaagctgagtgtgttcagtgctggccagacttggttgtgtagacagttgtcatcacactggacgatacagaaaaatacagacactcagttgtcaagggaactgcaggtgatccactccaaaaaatgggaatgcggagtcaatgagatgaagttgcatggcaagttggtaatatatgtcaggtgcagtgctgtggcctctcagcttcaggctccgtgatcctcccactccatgtggctggcagcgggctagccttcccatgctccagcacctttaggagaacagaagatcatgtttaaagtgcttacactccagatgaatacttttggaagactggataattattataattgtaacaatttaattttcaagttaatttatgaaaccaaccagggaggtactctgcacacacctttgtgcattttggcttgcattttgaaagatctacagacctgttggagtgcttgctgtctgtgcaccccaccccccagccccaatat

SEQ ID NO: 54799 - DNA, 1089 bp, Homo sapiens
ctgtttctctgctgagcagccccctttcccttctatggggaaatcactcctggacaggctctagagtcggaagtgggatctagacaggataggtgacctcttcaagctttggatccctcacgtggtaagcaagaataaatttattattaatagtatcatattcatattaatattatgactatataatagtataataatcctgcctttggggtttgtgaggaggcagtgttatagagagctgctcagagcacctggcaccgagtgagtactaccgaaatggtaggttttcttatcaccacttggctgtccaacctcctatccactacctcagtgggccatcagatacctcagcacaatttcagcgaggaagcagccaaggggcatttctggtgataataagtttcactggattcatgacagtgaaacaaagaatgacatttccccaatgaaattcctcctcaccttcagctagtgagggctggaccttttactataggatcaggggcaagcccctgcacaatcccagttgcctagttgcttgagaatttcttcatgtcagtggatctccatttgtcaggaatatgaagcctttaaaagctggggctctgggaagagggagaatcagaggggagaaccagggaccacagacagacaaacccaccttcctgcatcagccagggaaaggaatgcctcccaagctagcccgtccggaagctgcacccagggactgcccgggaaggaagcataacaccggcttcagataagtgatcctgggcagagatagttccacagtgcccttggggcgaggagccacgggaagtagagtgaaacaaaatctttaaaaagtgctggattctaatccctgcactctcccttcccagcctgtgggcgtgggccaggtgctggccttcgttaggctggagggttgcatttgtaaaatgtgtctgacagcaataccgcctggagggtcgccgggagggtaatctggggcccgcggccgggcgtgcccaggaggcccgcggcgatggcaggggtgggacttaccagcgtcccctcgctggagcgaccgggccgagaggggcaccccat

SEQ ID NO: 54800 - DNA, 1040 bp, Homo sapiens
tgactacctcctagaatgttgtgaggattattgtgagataatataaggaaaagcagatagcacagtgcatactacatgataggcactcaataaatgcctactttctttcttctttaactttttaccaccaactcatccataaattcctttagggatggggccatgctgtatatgaagacatgccttatctcccacagaacctagcattaatttgtgattgatattttgactgattcattgattaaattaatatgttaattagattgtggttttgggacttaggtttgtgttgcagtgtacttcttaaagtacttttacattgattagctcaatttatcagcacatcaatccttagagggaggtagggcagatgcctggctttagtgataaatgtgaattctactgaggtaggaatagatcagtgctaggaaaagagtgagtatgaactacgtgcaactggatagaaagaacaagaggagaagcccccaaacgtgggagtctgggaaatctcaaggaggtagtggcagaagaccaggcttttgttctgactgatctcttcagttccaaccctgtcatcagccaactgagagaacttggaaaaagtcttcagtttctctgagtcttagctgcctcatcattcaggcatcacttcatgcttggatgtgggtctccatgtccatcacactttatcatcagttttccacattagactatgacctccctgagagcaaacgttccgtatttacttgttgtaactccagcatttagcacatgcttgagttatagaaggagcacaatatctattgcataaatgatgaatgaataatttagataaaaagagaaaagagccgggcgtggtgtctcacgcctgtaatcccagcactttgggaggctgaggcgggtagatcacgaggtcaggagatcaagaccatactggctaacatggtgaaaccctgtctctactaaaaatacaaaaaaaattagccgggtgtggtggcaggtgcctgtagtcccagctactcgggaggctgaggcaggag

SEQ ID NO: 54801 - DNA, 1044 bp, Homo sapiens
ggaggttgtcctggaaggcttccctggcccacatggaaatcaacccatacaggagttagaattacgcatttgattgtttttgttggctctgcacatcttaccttgaatgcctcctccttttgtccatgtatatttaatttgctgtcctgtcacagctgaatccagattcctctctgtctaatgaacttaataattgtgccgtgggtgtctacagacggtaatcagagcctctttggttcattgaaacgtcataccaccaccaagttcctgcttttcatgctgtcttgtttggacagaaagtcgacttatttgtttatttgtattctactttgtttcaaaacacataatatgtccaatacactattttttaagaaaagaaaatggggataagagaaaaatagggtatagaaataagattaagccagtaatgaggttaacacacaagatatatgctacctaaagttttatgtacttagtacattaagggtagtccacaaatttggttctgagtttcctagtgaccaatgcaaagtgcgttattaggtacaagtgtaaagtaacattcttagttttttgggttttgtgttttgtttttgagacagactctcacttcgtcacccaggctggagtatagtggcgtgatcttggctcactgcaacctccacctcccaggttcaagcgattcttgtgcctcagcctcccaggtagcgggaactactactattgctactaattttttgtatttttagtagagacagggtttcgccatgttggccaggctggtctcgaactcctggactcaagtaatccacccacagcctcctaaggtaggaattacagtcgtgaacaaccatgcctggccacattcttggttttcttgaggaatgaaaggagagaaattgcagtgggtctgaatatatatattcagctgagaaaacaacaacaacaacaactatcctactgtaatctaatggacttgagaactgaatcctgactaatatcaggtgtcagacaattttccaatacattccaaagacagtagtt

SEQ ID NO: 54802 - DNA, 1001 bp, Homo sapiens
ggagttcaagaccagcctggccaacatagtgaaactatgtttctactaaaaatacaaaaaataattagccaggcctggtggcaggcacctataatcccagctacttgggaggctgaggcaggagaatcacttgaactcgggaggcagaggttgcagtgagctgagatcacgccactgcactccagcctgggtgacacagtgagactctatcccaaaaaaaaaaaacaaaaaaaaacttcagaacttggttgatccttgaatcatttatctgtaggtgacctgtcatctgaaagtgtggcagagtttttcagcagcctattaatgtgcttctggtatatgtccttcttcgtcttctttctccctggtacctagggcacttcagatgggaacagaaataaagactcaaagtacaatctttccatatccaatgactgtataatttagccctagggtaaggaagacagccaggagaggggcaagtaggaccagagaggactgggtagagggagtggggtccttaaatctgccatgaggaataaggaatagagtagaagggactcagtcagggctgggctgtctttaaaggtaagctccaccttaccaccatcaccaccccataccctgtgcagtcctgggtccagtggccctgcatatctctaagcccttgaaataaaggtgggcaacttacctggacaatttatatgaggatatgggtatgatgaggaatacctctgcctccaaataagatggaactaattagagctagttgggaatctttctacaagctgggccaaatgatggatccaccaggaaggctgtctcagttattaaccttcttaaatgtagggactggttgttgttgaagactataaaaagctgcaatagaagagaaaaattaatgtagtggtccgtggaatacagaagtcacagtttttgaggcaaaatattccggagtttcttcatttaaaatatgtaagtccagtgttgatatccctctctgt

SEQ ID NO: 54803 - DNA, 1052 bp, Homo sapiens
tttgctcgtattttgtagtcattctggaatgctcttctctcatttgcaacaacaacaaagtttcccacgtgatatagatgatgtgaggaaattcaaatgagcacctcttttaagtggtcttttcatgttttccaaagtcctgtcttctataattgaaatctgcagaaccacaggatctgtagacttttagaaccaaaagaaccataaagatcaattagtcagggcctcgcaatgtgcgtcaggagacaggcaaattgatttttaggtgtttcattaacattttttattttaataaacattattattatgagtcctagaagaatataactagtatttcacatcaaacctgtgaagtcacaggttttgactttcattgaaaggatcaaacctgtgaaggcgcaggtaatgtttttattgaaaagaatattaaagcttaaagagataaatggcttttttagggattgcccagttggtgaatgaagggtgaggatattaaatatggaatcttgtaactggaagggaccctagagatcatgaagtcacctccccacccttccacgacttcagtgtcacaattctctccaaagcatctctctcaagtggttatccagcctctacttcaatacccgcagtgatgggaaacttatcatttgaggcagtacattccattctggcagttctgatagttagaaaagtttccccttatactgagttccttgaaatttcttttcatttgtttctagttcttcccactgaagccactcctcaccttcaaatgtgtcaagacagttactctaccctctccacctctccctacagaaacacacacacacgcacacagacatacagtctattttcatggactcggttttttttttttgtttgattggtttttgttgttgtttgttgttgttttgagacaatgtctcactctgttgcccaagctggagagcagtggcacgatcttggctcactgcaacctccgccccccaggttcaagcgattcccctgcctcggcctcccgagaagctggaactacaggtgtgcaccac

SEQ ID NO: 54804 - DNA, 1058 bp, Homo sapiens
actccggttcccattttgcagatttagggaaaaaacactaaaaggcagaatgatttgcagttacattgattcagcaaacatactctaaattgtgaggatagatacagagaagaaaggtcgagtttctgtcctccaggaactctcagtttagtgagtgagtcatagttagtcttgcttgctctaagcaagacaggggtgtcagaggagctccatttctattcttctttcctgtgaaaggaaggagatggcgattagctagtcttctgtcactccacattcactcaacatatactgaccctcaattaagtttaaaaaaaaatcatggaaaaaatttattctaaccacaagtggctggccaggataatagtgatctattcagtggcatgaatatggatcataaccacattgtgaagtgaccattcctaagtcttccacagagtcaggaaggatgttacctcacaaaatataattgccactttcagacatcatttctctatttattgtggccagaattgtatatcctagctgcctgggacatgacgcggtttgtgtgtccctgtgagcagtgcttttgctgtacatcagaaggagggagagaagagggacagagcaacctaaacagaaaaatataaacacttgactgtatgtttacttatttttttctagtgaagagtgaatctaccaagaacgttggcaatgaaaattgagcattttttctggaagaagaaagtgaaaacttccagacaactgcagcagactctgcattgatgggctgttggctgattggggtattgtcaatgggtgattggaattttttctttgtatgaaaaataagcttaactcttttaaaaaatgtattttataacctcttgaattaattgacttgtaagacccatttattcatattaagaactctcctttgcacttgatcagcatagtacttattaggccctggctttttaatatgcttaattgcttaattccataaactgaaaactttttttttcttttttctttctttttttgagatggggtcttggagtgcaagtggtatgagc

SEQ ID NO: 54805 - DNA, 1065 bp, Homo sapiens
atctaagtatttttcaactttttttttattattgcctcccaaggagctttctgccgtgatattttgataccatagatacactgtatatctgttgcatacagtagccctttgtagggccacaagcattaaaatagcaagattttgttggcccttcagagaaccagtttttgccctctttggggccatgctgccctcattgagaatgcatgtgtgtattgatatttagaggaggagagggaaacagctttgctatgcatgaatagttacttgggtttcataggactcagaagaggttagtgtttctgttgctttgtcagattgtccagaagggaacataaggattaagttgccacaattactccaccagtcttatcacccaactctaaacatggtatcttggagtccctaagttacctagaatatactaggtatagtaataccatttttgagaacgttgatatgccaagggtatagtgacattattgtagttgaaggcattttgttgaatttagggaacagtagctctaatgcattaggagtaattgtaaatgttcaaacctttatccttgtggttctcaaacagtgatgattctgcttccaggggacatttgcaatttctgggagcatttttggtggccacaactgggtgtatgagtgttcctagtggaacactcatctagagggtggagtcctaggatgctgctaaacgtcctgcagtgcaaaggaccaagtcctttgcaaagaattatctagtccaaaatatcagcactgctgagattgagaaaccctgctctgtcttagtgattgtacttcttggaatctagctttagaaagtaatccaagtaatgttgctaggattttgatgtatgtatatttttttaagtgggacatatatttgtatatataattataaaaaaatgagaaacaagcttaattctttcagtcttaagaagaacacatgtcaggacttacagtaatttcagcaatactgaagaattggaaaccattttagagaaaattaactcacccatttcagcaattttttttttttttttctgtgacgga

SEQ ID NO: 54806 - DNA, 1049 bp, Homo sapiens
gagctgagactacaggcttgcaccaccacgctctgctaatttatatatttttagtagagctgggatttcaccgtgttggccaggctcctggcctcaggtgatccgcctgcctcggcctcccaaagtgctgggattacaggcgtgagccagtgtacccagcctatctgttagatacacctctctaaaacttgttctcaccataatggtcagctacttagaatcctttaagcttctgtgcccacaaaagtcattagctcagagatatctcaattggccagaggcagcattgccagtagatgaaatttgtcatctcatttttgagtcttgtactgtctgtactccattccgtagcctgaggttaactccttcttatccccctctcatttgaagttgctacttcccagacagttggaaatataattcatttcaagtattcctcattaaacaaaacagagtaagtcatcttcgttgtatttgctttttaaaggaggaatcacaatatagttaatatttcttgaatgtttattttttattaaacataacaaattttatttaatctttgagaggaagttttcttggcaagttacttatttccctgtgcctattgccttatctgtaagatggagacagtaatagtaccagttttatgactagtggttttcagtttatagtgcatgccagaattaactgtgaggcaatttcaaaatgcagaatagatacccgggcttgaccagcagaacttgtttttttgagatggagtctcggtctgtcacccaggctggagtgcagtggcacgatctcggctcactgcaccctccacctcctgggttcaagtgattcttctgcctcagcctcctgagtagctaggattacaggcaagccccaccacgcctggctaatttttgtatttttagtagagatggggtttcaccatgttggccaggctggtctcgacttcctgacctcaagtgatccgctcgcctcagcctcccaaagtgctgggattacaggtgtgagctaccccgcccagccaaggacatctttacttc

SEQ ID NO: 54807 - DNA, 1041 bp, Homo sapiens
acttgttcagctatattgtccaagtcactttccctcctcagttgtctaattaatcatatttttagtctatgcactgtttgttttttagtttatttttccctggaacctctgtttctttcccaaatctttctcatcttttagacagaattgtattacttactcactcacgttgtaagcttcctttttttcttcagtaatttagaacacttctcatctgtgtaaataatcccagtatctgaagttgtgtaagtctggtactgctgtctgcttggactcttttgtgtggactaaccacccatttcctcagaaatggacccaatttttgaccttcttatccccacatttgtctccaaatgatattggccctcagttcttaacaatccagttcttctgcttaccattcttctaccactaacagcttagaactgaaagtccttaacttttcaatttattcttttgaactagggttctttagctctgtgtttgtgtgtctgtcttttacttacagtatgaagataatagaggtgcgcctattactaaacaacttaatatttaagagcttcaatctgttttagaagcaagccactaggtgtccctcttgtaaagaaataacaaagcttttatgaattcaaaaaattactttttgttctttggataaaattacatcatccttattatattgcagtaatatacctatttacccctgtattaatgtcagtagcacttttttccttaaacagttatgtggtaatgtacttctaaaagcacaggactttttttttttttttaacatggtatcctataaatataagtagtataggtttgtactttgctgcaaattggctttagaaaagagtaaaggaaaatgaaatgatgggtttagcagttgtggtcatgaggagacaagtggattttgctgtgagctttgggggattatataataggtgcccagtacagacttgtcaactgattgacagctctgtggtttctctgccataatagctttgatatggtttgatggaagaatttcagaacaacagc

SEQ ID NO: 54808 - DNA, 1324 bp, Homo sapiens
gacctgtgtttttgtttgtttaatctccattaaattcttctttggctcacagaacatatggttagaaacacaagctctggaattagacagaccagggtttgaatacaggttctatctctctgggatagctgtatgatgttgggatctcactaatttttattgctaaaatggagatgatagtacctattctcatagtatcatggtgaagattacatgagattactgcttagagctgttgtaacacttaggttctcagtaaatcttaactattattgaacattgttttactcactttttaaatttaaggaatttaaaaattaatttgtctgtttggtttttgttgttagatgtactttatgaaaaatcgtgcccggaggcaaggtattaacttaaaacttctacccaatggattcaccaagaggaaggagaattcaaccttttttgataagaagtaagtttctaactttttagtatatcaggtattctgatttgatcaggatcattctttaaggtttggttgctatagagcattgctaccccaagtgtggttctgtaaactgtttgttattggtccatgacaagataactgtagtaattgtatgtcatgtaactctaataaaaatttgggtttgcagtgtgtgcgtgtgtgtgtgtgtgtgtgtgtgtcttcatatcatttgagaagcttctcaaacattaatgtgcataccagtcacctaggcatcttgttaagtatgcttgttgtgatttttcagtaggcctgggttggagtttgatattgggcatttctaacaagctcctcaatgatgctcattgtttgagaaacatattttgagtagcagcgccctggaacactctcatacattagaaataaactgtttctttgagaactaagataccaagaaagtatttcaggggcttccaggacaaaacgagtaaaaacaggacgcctgtactgttttaatcaaggcagctctgcttttattttctttctccactgggtttccaaataagatttcaattaaaagctgtcaatgtagaagaaggggactttgaactcttgagtacagataatataacagagattagtttgctgctgtctgaaaatgttgggttgaaaaggccccaagagtacagaagagaacaggatcccaaagttctttaagtagccaactaaattatcagataatacctttcagaagtcaagattttggatttagaatttttaaaaacttgagggagtccctcccttttcagcctcttagtaactgtggggccttgaacaaatcaacttcctttctctgggccccagttgtatgatgtg

SEQ ID NO: 54809 - DNA, 1061 bp, Homo sapiens
ataattacattacacatatctgaaagaaaattattcatatagcaactcttatttttcctcaaacttaattaggcataattaaaattctacttaaagataaattactttacaatttttttttaaattgtgaaatatagcaagtatattttctaaacatcacaaaatggaaatacacagtataatgaataattataaaatgaatattcatttaactaccaccccaatctagaattagaacattactggcttcccagaagttccatgccacccttttatgcccttccctgatcttttctcatttctttatatttttttctatcttaggactgtaccacaatttgtttacgcatttttttaatggattttggattttctgtaagaataaaaaacagtttagaaacaatgccactacttttgtctatgaattatagtatgtgtgtgaacatgtgtttctagggtttatacctgggaatagaattgctttgttgtgtggtatgcatatcttcaatttgcctagatgttaccaaaacattttccaaagtgattgtactagtttacactctcaccaatagtgtatgaatgtacctattgtcatattctcgccaatacttagtttggtaagactttaaaaatttttgtcaatctgttggctttgtaattttattgtggttttaaatgtgcagttctttaattcctgatgagattgaaccacctttcaaatactttattggccatttggatttcctcttttatgcagtgcctgttcaagtcttttgctcatcttttcattggtcagctttatttttcttactggtttgtgagaattcttggtatttcttggatgctagtgcaagttggttgtatgttataaataccttcttctagtctttgtcttgtcttttcattttatagtgtcttgtggtgaatggatgttcttagttttaatgtagtcaaatttatcatttgtttcctttatagttagtaggtttatatgtttataaagaaatccatctctaccttgaagttaggaagttattcttttatagttattgcctaaaagc

SEQ ID NO: 54810 - DNA, 1028 bp, Homo sapiens
ttcatagagaagaattttcaaatgatgttcaacagctatcaaatattttatcagttacttgtcactgagtttataaattgattgggaattctaagtttataaataaatacaattaatatttgataatttaatgttacatgtgggcttttgtaggtgtgagacttgtggtacagaagaagcaaagtacagatgtccacgttgtatgcgatattcctgcaggtatacatgtaacttcctaccttttaacctgtatctgtacctttcttaccctaaaatataaaagtacttcccctttgtcttttcagtttgccctgtgtaaagaaacacaaagcagaactgacatgtaatggagttcgagataaaactgcatacatttcaatacaacagtttactgaaatgaatctcctaagtggtaagccactttatgcatagcaaattgaggcttcctggccattggtatatgtcacttgtttattcttctgttttgaaatttttagattatcgatttttggaagatgtggcaagaacagcggaccatatttctagagatgcttttttgaagagaccaataagcaataaatatgtaagattttttcctaatttcttccagttagaagtccttcaaatcaattagattctttttttttttttaacttaccaaatatattaagtggctaccatgatgtagagctattctgattacttaaggatatggctgtgacccaaacaaagtccgtcccctcgtggagttgtatttagtgggagatataggagataagtagaggaacaaatgtaatttcagatagagttaagttcatatagaaaataaagaaggctcaagagattaaagagagaatgaaaatggtctttgttggggagagattgtcagggtactattttcgatacagtggtcaggagaagcttctcaaagagatgatgtgtaagcagtgatctgagtgctgagaaagaggctgtcatgtgaacatttggaggcagattatcccaggtagggacaaaagtaaaaggaa

SEQ ID NO: 54811 - DNA, 1097 bp, Homo sapiens
cataaaagaggaattgatgcatggagagtgtgtaaaagaagagaaggatttcctgaagaaagaaatcgtggatgatacaaaggtgaaagaagagcctccgataaatcacccggtgggctgcaagcggaaactggccatgtcaaggtagggcatgggggattccatttaggggaataaagctgtggagtcctcatgtctagagtgaaggaaaccacactatcaggagaaggtggaataatgaaaaatgagcacaagtttgggtttctggagtcagacggcgttcgcgggggtgggttgggaagtggagggtgttgtacatgacaacacaacaaattcagtgaaaatacatgaaattagtagtgtccaatgggtaatggtcaagttaggaaagtggaaattctggggaccaaaagatcagttggaactggatctggcttgacttaatatgctctttactcggtattcctttgagagagaatagagatgagaaagtctaataaaactaacaatgacaaagtagattaagttaaaactaggcaaaaatacacttgacctcaattatcaagcttcttcatgggtgctgtgaatatttattgcttttgattgaatttccttagtgtgtggatcatgtgacaaaggaaataagagtagtcagattcttgagaatattcccgtctagaacacagtgggctaaatagaagtaactgtagtttggttgtcagtatcccaggagcatagaagagcagttgaggacagatgatgggttacatggcatttctagattatttcgatgctcattctagattaggcgtggagttcaggaaaaagggtgctactactactctctaaatttcacttggccttatattctttgtctggtgtgtgctttaaaaatatctaaacatagctcatgaattggacttctggatacacacacatacaatcattaccacatttccaggaatcacaagttaaaatatcagtgaataatctcattccctgattatagtagaaaaagaagtcaaaagcgagatgggttttaaaaattttaatacattttcctgagttacatatcactaacaacattggaaatgtag

SEQ ID NO: 54812 - DNA, 1085 bp, Homo sapiens
cttccctaaagggaagggaggggcacacatagcatgtttataaataaggtaaatatctcttggagacaaaaatagttgtaacatcaagcaatagtaggaactttaggcctggaaatagccagaggttgcaagaacttctatgttctcaaagtaaagaaaactgaaagcttcccaacaaaaatggacccaccatgaaagaaggctggaaaagaagctctgtgtgtgtgtgtgtgtgtgtgtgtgtgtgtgtgtgtgtgtgtgtgtgtgtcttttataatgtgaataaatttatctcttatttgcatgatatttttatgaaaccaataaggaaaagtgaattttttaagtaagtagattcctgaaggcactacagaaagggaaaggaagaacaaatccctttagatgaggtttaaaggatgagagaaaggattagaagaaatggatcttaaaagtcctaattttagacgaagttgtcttgacatttaaacaattaaagggtgtcagaaagaatctgctcttatgctatgaagtttataaagggacagcaattatgcccttttggacacaggtatctcacccttgagttcagtgttaccaccatcttctcatgagattgctattgcctttgtaatgtgttaaattattctcttgtagggacctccaggcactgagggagagtctggtctgcaaggtgaaccaggtgcaaaggtaaccttctaaaaaataaaggagaatctctaaactttcaccattgaaccccctacatttgctaccattgaatcccctatatttgctaacttgaaagcaggtggaagcccccagataaaaacaggaaatgttttggaactcctattccttatgacagcagtccccaacctatttggctggcaccagggacaagtttcatggaagacagtttttccacagatggaagcagagcaggggatggtttcaggatgaaactgtcctacctcggatcatcaagcattagattctcataaggactgagcaacccagatccctcgaatgcacagttgacaatagggttcgtgtttctatgagaatctaatgctgccactgatctg

SEQ ID NO: 54813 - DNA, 1209 bp, Homo sapiens
ttttcctcaaccagtgtaatatgaagaattctttttattttttaagagattctaagaaaatgttcacattatcaaaactagaattctatcaacttttaagacatttaattattttggaataaaatgtgaatttttagacagaaaatggcaaaaactagtatgaaaatatatcatgttacatgtgaaattatgacagttgttaacctattaagttaatcatgttaaatatgtaataatttggggctaaatgaatgtatattataaattatatcagtgaagatcaaccatgtgtgtgctttaattattaattttaaagagtgagctctaagaatgaacacatcagatgtgagtattattttaaaaaatcaaaaagaattatctagttattgtatatatgtttttaatattatgactctggtcctttggaatgaatgctattattgcttatctgtatttttttccttttttctttagaaagcacaacatcaggaagtgtgtttgaaagaagtacaaaatagtcttgagaagtcggaaaatcaaaatgagagtattaagaattatttacagtttcttaaaacttcttatgtaacaatgtttgaataaattgtcaaatttattttctctaagtagtagatttttattatgagtctaaaatgtgattgggtaaaaaaataaatatactaccagttacattttatgatttatgagtggtagtattagaggtttttatgtaaagatttttgaaacataatttatctaactgaaactttaaaataggatagttgttactattcctgtttgctggataattcttatttatctttggtttaatttcttttaaaattaaattggttgttagaatatttttctcacacatagacatggaagtcagattcattctttgtgatgtttgtagccaccattcaagtgaatttgtagtaagtcttggtcaatatgattttaaataatatatataattgttttatattatgatatataaatgtaaaatattctgaattttaatttttaataatggtgtaattacatactttctaaagctactaaatgtctcaatatactacacttaatattgtttcaagtatatgctgagttgccattataatttctgttaggttttaagtatacaattttaaatcatcgctattaagtaccaactgctaatgacagatgaaaacgtggtcatgcatt

SEQ ID NO: 54814 - DNA, 2320 bp, Homo sapiens
tcaacaaactttttgaaaactaaagtctaccccactttttagttatacattcttatttaacagagtttaatatttattcagttgtgttcttatttaaagccattatacctaaaatacttacgttataagcatatctagtatttaagataataaaaatattaatgctgaatgtgtgatcttgcacttatttccctactgccacaactcagatgagaggccagatggagtctcatctgaaggagttagagcgtgtctgcgattccttgacggcggcggaacggaggcttcacgagtgtcaggagagtctgcagtgctgcaaggggaagtgtgcagaccaggaacacaccattagggagcttcagggccaggtgtccagccgtccttctgagttttgctagatgcgttaaaagaatgctttggaatgatttcaccagttgagggcactcatgtcagggcttgatttttaaattcccatctacttagttcgtaaaacatcattttcatgcagatactataatacagttttgcaagctattcttttagtattttatggtgaaaaattggtaattaaaattcttattttagtttattcatgcaaatctatagacatttgaagacatggtaatagaatgagagaaggagcaaagttatacttacatatatgttccttgatgtaaggataaggtaaattattgaaacttacattacaaaaattgaatttattttaattagaattgtacgtcaagttttttgggatatttttcagtctgtttctttttcctgttttactttttataccatcagaatatggatcatgtgtatcctgttagtagccacatagccttctcctagctcaatgcctagcacatagtaagcactcaatatttttttaattaatgaaattttttttaaaggagcagtccaaagatggtgacaagtcttttttcttttactttcaaggcagttttaggaagcattccctgtctatcttccaaatatgatctggattttaattttgcaaaaaaaaatactgcattttctcacttaaaaagtaggagctaaatgatgagaacacgtggacacatggagaagaacaacacacagtggggcctttcagagggtggagagtgggaagagggagaggatcagaaaaaataactaacaggtactaggcttaatacttgattgatgaaataatctgtacaacaaacccccatgacacaagctgacctgtgtaacaaacctgcatttgtacccctgaacttaaaagttagataaaaatatgcagacaaaattttagtttaaattcctgagaagagatttttctagtaaaatgtcaaacgacatagattagcctaaattactaattgaaattatgagaaaaaaattttttccttgaatcaaagcttcttacattatttagagcagattttgaagcagtgggaagaatattctgtcttggcatgggtgagtgtgtctttggttgatttgttcactttgcttctcaaaaaaatatgtattttatttacagtttcgacttcacagatactcaattattaatcagtatttttaggtgaaacagaaaaccataagagaaaccctaggtatccaaaaataggagattaatactgcttaaaattttcctatttcaacttaacaaaataaatatctttcttcaataaggtgttgttcaaagtgttttaatagccatcatcctgaattttttttagttggttattttccaatacaggcaacataacttctttaaatttaaccaggaatttaaaacttccattttaacaatataacattttcttggtgtctttctgtgtaagagtagtaacatttataccttctcgttgcttgtggttgttctaacaataaattatatggatttctttggaagttgattgtgaagaaaatgactaagaaaacttttttttttcttttaggttgatggaaatcacaatcttctgacaaagctttctctggaagaggaaaactgtcttattcagctgaagtgtgaaaaccttcaacagtaagtattaaattacttaacattgctgctgcatatttctctgcacattaacattttaaaatatatgttttctgtaaaaagaaaattagaacagatggacgcagaaaataaagagcttgagaagaagctggcaaaccaagaagaatgtcttaagcacagcaatcttaagtttaaagagaaatctgcagagtatacagcattggccagacaactggaagctgctttagaagaaggaagacaaaaggtatgcatggcctttatttagaaactttttaattcatt

SEQ ID NO: 54815 - DNA, 1053 bp, Homo sapiens
ttaagtataatttttgtgtatttttcttttccagtaacctctgtattctattgatttttcatatctaggcacatttccaagtttttttgtcagtaaatttagaaagttttaaaaataatatgtcctgtgtaaatcttaataaggatgttcataattattagtcactagctttgtgaaattcctaaattttagatggtattgcatgaaataaaaaataattattttatcaactttgttaatacatgagttatgtttttataataattctgtagcactggagtataaatgtattctaatgacttataaaatctatatcttttttgctagactacacttgctgctttgaaggatgaagttgtatctgttgaaaatgaactctcagaattgcaagaagtagaaaaaaaacagaaaacccttattgaaatgtataaaactcaggtgactactgcatttattttagtgtttactaaaattggtagacaatttaaaacactatttctttgtaatctaaataaatagaactgaagagaggtggggctatcattgtgggttataatatggtgtgtctcaaatatttcttaaggtcccacacatctttataaatagatgattctgctgattcctgattcaaacactgcatatggatatactggatattcctaaaagtagatttaaaatgaattacatcggtataatgtgacccttaatgtattcttgttaatcttggttatatttgtttgtcatcatgtgtatttaatggtattgatttagattaatgactcccttctagggtcattaaagttcattatgcctcctttctcaagaaataaagtataattcagattattcacatgaaagaccaagaaaagaacatatgacaatatatatgaaatagaccatgtgttcaatggtaatttatagaaaacctttatttttttggaaatgtagtattcaagaaaaaacttcataagatgggacttatgcaggtccttgcatgatggttaacacactggtcagagagagtttgaattaaagaataatgaactggctggg

SEQ ID NO: 54816 - DNA, 1049 bp, Homo sapiens
ccctatgactttattcagtaattaacctaatttaatctctgtaatacatttaaaaccatgtgctgacataaacacaccaagtaaaatatatctttggtatagtacaaatttgaaaatggccttagtgctttgttgtttttgataaattattatatttattcaattactaattaataatttttttaaaaaagtctcactgatatcctgcctcttaagaacttatgttaaggcttatagaattattagaggcttttagaaatgaaaacagacttgtataaaaagtttatggcaaacaaagtagtattttgttaaccttgtgacttgggataaggaacttaacctcttcaatttcctcatgtataaaatagggcatcataatactccctatctcatgtgtttgtagggagagataaatgagaaaatatatttttgcattgtcctcctttctgttgctgtaatgcatgaagtttttttctttgttttgttgtttttcttgtttgttgttgcatctggctttaatattcttccctggctcacaatagctctttctttttttaatcattcaggtatcttttcaattgacatctcttcagagaggcctttcttgaccatttcttttgaagtagttctaaaacaatcatatcaatgtcttaatttttttcatagcattcactataatctgaaactatatcatttattttttcatttatcactgctgttgtgttttgttttatttttaactgtttccttctacttgagtataagtctcagaaggcaggagcttgctatcctattcacctaaggtaagggtaccattatttaaaacagtaccttaagtctaaaatatgaacagttcagcaataagagctaaataatagtttaacaaaatgttatcacatatctacacaatgcgtaaattttgccaaggactacagagacagatcaaggacaaggaggatttgtaaacgtctgtggtctttggtaattagaaggtcactagttactaattcacatgcagtttcaatgcagtggaaggaaaggtgaaaagg

SEQ ID NO: 54817 - DNA, 2163 bp, Homo sapiens
cacttttggatttaaggcattaagtgattaaggggttcagaatttagttctttttgagttaggtttgacagtggtttttttttgtttcgtttttgtgttgttttttttttgagtatgaatccaatgaactcaatttggcaacatcaatctcaactttttagtgttgagtaatttgttgtattgagtcttttaaaaatttacattataaacctctgggaacatcccacagatgccttccaccaatttttctttctagatctttgttatgtagcaattagaattagaacgttttcttattttcagaagagactgagaatgattgtctgtataaaatgtgacatgtatacagacattgctttggagatagaaaaagaagataatcagctttatgtgttcattcatttggcaaatgagaggttatttttaaattataaaaataatttgtcatttcagtatactccttgatagtgtataagtgtgggatttgataaatctggtgagaagatcgtgtctggaactatgttcaaaaagaaaatttagtttctatgtttagaagttttttaacctaagaaagcaactattcatggtgtgatgatgacaccgtgtggacttttagaggaatgacaacagtgtttcctgtgggatgttcctttgtcttatgtcgacttactgtactgctgtttttccccagctacttatgttttatgggattttgttttttaaaaacaatttaagaatgtattgctccttctcttagtttacttagtcactcttcaaaaaaatcaaatctaaatcttaatatatacttcttaatctcaattttagtggcagttaagaagcttagattttgatgattgtagagttaagttgaaaagtcctaggtttagcttgtactgtgactcctttgcaatttttaaaaattaaaatggctttctaaggaatgggagactaaaacttattctgtgataatttcacattcatttcagtattacacaggttttgaaaatgtaaaaacattaaaatcataagtctttaatagatacttaatactcaaatactttaagtacacagtcttaaaataatttgaaataaaagcatctgagttaccacattaaatcacatccctcatctacccagcctaatattccgtctctcatcatgtcaccaagaggtatgccaaagagatagtcatgccaattagttacaatcacattcaatgatagaaacatgtcctcaataatacttatcttatgactcttatagtcattaatttatctaaacctgtgtttggtcttggaataatgacttccatacatttactttattggataaagcagtattttattatctttaatgtaactctagtgtcagggcgtgccccctaaatctagtaaattaaaatttggtaaaaaaatctgtttatctcgtctatagccttcttaaagattataatcatatctttaagattttgtctttcaaagtgaagagtcctaatatatttggggagctaccaattcctttgaacattggtacatatttggattgtttctagctcaattatgtttttttaaactagtttttaaaactagtatgatgtataatattctagatgtgaactaaaaaaactatctgagttaatcacagaagttttaaggaagttagtgtttgtaccataatcactatagtatctttgataatggtagcattagtttgatataggattatatgttttaaatttgcatcctttaacaggttatagagaagcattggtccccaatgtgtagaggattattgtattaggccattttaacattgttataaatgcctgagactgcatagtttataaagaaaagaagtttaattggcccacagttccacaggctgtataggaagcatgattctggcatctgctcagcttctggggaggcctcaggaaacttacaattatggtggaagacaagtggggagtgaggcatctcacatggtgggagcaaaaggaagagagagcaagtagggaggtgctgcacacttttaaacaacctgatttcgcaagaactcactcactatcaggagaacagcaccaagaggatgctgtaaaccattcataagaaacaacccccatgatccaaccacctcccaccaggccccagctccaacactggg

SEQ ID NO: 54818 - DNA, 1065 bp, Homo sapiens
tgaaattctagattatttggatattttacaggttttacctatcaaatataacatcttaattttattaagtttttttagggtttttatggtgtttgtcaggatacttggcataaatcacttcatataggaactgttttaaatttgtattgtgtttcagttggggaacaaattaaggaattttagtgtttgtaggagcattttaggtatacccatacctttatttagaaagatagatgggaattttaaaaaagaaagccattaaataaaaaatgttgggggataaaacttagccctggttgggcatgaaatacatttgtaataggggcggcagtttatgtaaagtagtgctttgctttttatcagctgtttagattgtgcctaaatcagggtaaaattaaagatattgggctggggatacagcaaataatatggatttttttggttttctctttctctttgttacaggcaaatactttgaaagcaaaccgtttttcccaatcagtaaaagtagtacatgaacgactacagatccaaattcataaaagggaagccgagaacgataagttgaaagaatatgtaaaggttatatataaatatatatccatttttatagcttaagtgataaaattaatgaaaggccataaagccttccttagttctagaatttggtggttttaaaatacacagttgttgacatgggaaatacatatttaaggtaaatcttaatatttgtggcctaactaaaggtttgggtacaaatttcaacataaaaatgctgtctctgtttaataccaatctaggaaggatttatggaattgaattactttaaaaatcatttccactttatagttaatttatatttactgtggaaaatttatagaaaataaatttaaatataccaaaatcattgttaacattttggtgtacattatttcaatcttttttctccatctatacatatatacatacatactttcacacgtttaacagtcaatacgatgtttattttttgttactaatcgtaataattttaaaatcagcccaactttgatgttcacaaaatta

SEQ ID NO: 54819 - DNA, 1033 bp, Homo sapiens
ttttggatgtttgaattacccggagttgaactagaaaatcagcttttcttaagagtgaattttaaactaaaatcttctgagagatgaaatatatctgtttctatagtattatttggagtagataactatttttaaatttcagcatattaaagtttaaattagggacaaacagtagattatcttctataacttttatttgaataaaagcctaaaatgcttttagaatctaagctcttattttgatttcattttattttaatgtactgtataacagatccaatttactattgacaaatttcgtagcatttattattactatgcacaaaagaatgattttgtttagtaggaaaaaatattgtttgataatatattttagagggttttatttaatgctgtgtcttaaaatgtgtatgtggttcttataatttgtcaggcgaatctttctgcattgaatttgaagatttctgaacagaaggaaatattaataaaagaattagacaccttcaaaagtgtaaaactagctttagaacatcttcttagaaagagagactacaaacaagtaaggcatcaacactaagcactcattttaatagtgatatttctcatttgaaggatacattatttttaaactgtagaaattattggtatatttgaaatggaaataatgctttgaattttgtcagtcattaatccccacctttagtgtttcataagtagttgtatatgaacaccacgtttttatagaaaatgtatttttatttttcatctcaaaaactttgtcatacttaattgagctgattctaataaaatatacactttttgagtttaagatctttgtacattatatttatacatatctatatattcttcatctggtaaaagctttattgaaatagaattcacataccatacagttcttccatttaaattataaaattcagtggttttcattgtattcacagagttgtgcagccatcaccacagtcaattttaaagcatttttatcactccaaaaagaaagcttatcccttta

SEQ ID NO: 54820 - DNA, 1024 bp, Homo sapiens
aggttaaggatgctgctaaacatgccacaatgtgcaggatagccctccacaacaaaggattgtctggctcaaaatcttaataatgccaaggttgagaaaccctgatttaatcatgcaccattctgccccacaggcttaatagtttcctcttgaaaccaatgcttttgcacaagccaggtatgttattacaaattacttaccattctcaatccagccaggtatgtacagtgctccactctgctggggtatcactctccgtctggctgcgttaactcctcccagagcccgcacttttacactgtatctaccattcgtgtcataagttgtgaaataccttgagtagacaccgtcatccttagtagcatcagcaccttgataaagaatgaaggaattaataaataggtaacggggagggtatttgtatatttccaactcatatgtaggctatgaattttcaaagcaacaagaaattcagcattagctccaagagaccttaagattttggtgtgttgagggtaaggcttacttcttttatcactgtgtgtggttttatgtatacattctgtcttcttgaattgttgactttctttttgaaatctaagatggtatcgtttctgtgttacacccaatgtagcacaaggtaactactcaataagtatctgttgaactaaattaaactgctatatgcaaatgtggaagaaaaaaatgttgtatgattatttaataaaattcatcacttctccccagggtagatttaggtgggaaattcattcacaggattcattctattaaggttacttgcttcacagtaagcagacatgttttttttttttttttaaactgtagaattctctttctctctctccctgatagacttcttaaagacaagaataatgggcagaattttcacttttggggcaagctaatatagagtctgcatagatacaggaatcatataggactgtgcttgaatctatctctgctgctttctaaatgtgaaagcctcagtgaagatattataaaa

SEQ ID NO: 54821 - DNA, 1052 bp, Homo sapiens
aaatacgatagatattttttctatagtagcttttttgtggttaatggtttaaatcatttcaggtggtgatttttttttttcttttcaaacagagaacgagctgggtaaggtggcttacacttgtagtcacagcattttgggaagctgaggtgggagaatcacttgaggccaggagtttgagaccagcctggggcaacatagcaagatccctgtctctgttatttaaaaaaaaaaaagatagaaaagtggtaagaatttaaagcatctaaagccacttttgggattctgattcaaagtctcactaggttctcaaaccatctagcccacagtgacaaagattagcaagatgtcagttctcctgatttaagaatctattcagcagtaaaacagaacaacaaaacaaaaaactccaactaactagacaactatgttatgttaaattagcaaatttgattgacacacattatccaatgttaaaacagaaaaacaaaacagacaagcaagctaggccatttaactacatactttaagttagtaaatttgatggacgcacagtcataaaaattccaaagtcaatagctatgttgagaatagtcccttgtaatagttcttccctgaatccataggaatttccccttatttcctggttagtggaaatatagataaggaaggcacacaggacattgaattaaatacaaaatatttcctgcatatgggaccttgactacacaataaaaaattagatctataatgaaagcatttaaaattcctttctgaaaagtaaaatgcaagaaaaaaatggctaatgttagatgttcatcagataaactaaaatgttcctgaagttacttgtactattactctagaaatatttacggattatcttgtctgggtcaattgctttagttctacctgcctgcaaatagagctcactaacacagtatgaccttactcaacttgttgaaccactctttgcctcagcttcctgatttgtaaatatggataataatgttattgacctagggtttctgtgaagaaaaatgagataatat

SEQ ID NO: 54822 - DNA, 1057 bp, Homo sapiens
cttcagttatcctctgtatgctgacgatgaccaactacacatccagctcagacttctgaacagcagcactaggtgcaagaagtggtagaataaattttcaaagtgtttaaagaaaaaaattaaacagtgtttttaattatcacttacatattttcatgaagtggatactaagactcagaccacctaacacacatgttaaaagcactgttggaggaaattatccggttagaagcaaataagatataggaaataaatatcagtaaataatttagtaaaatttcttgtctaaacaagtaatgaatgacaacaaaagtctatcaatgtttaaacttagaaaacaacaacatgagtcaggttggtgttggagtccagagagaccaaagagcttactaaggcatttctgttgaaagtgaaggggataaggaaaatatagctactgacaagctttagaattctattactgtaggaaataaatcagtgaatactaaatataagaacagaagttgagaaaaataccagaagactaaaatcatgtgtaattttcaaaccagcagagtaaaactcagtctatccaatagatgttaggaaaggagggaaacagaagaaacaaaaaggaaatacagaaaatggaagagataaatgcaagaaataaataataaacgtttgtgaattaaactcacttttagtaagagagagactctcagtatagatttttaaatgatgcaatagtataaggttcatagagaaatacttaaaatgataatgtaacaattcccaaattacctacgtgtaaaagaaaatgtatgaaaggatatttgtaacaggtaaagaaaaagaaaaaaacagttgaccctagaatattttattctgcctcattataactttgctcaatagttcactagctcaaagattgccaactctgttctacagaactctttgtctctatcttgattgctctcaatatgtcctgcaacacagtctaagtaaaaacatgattcacacctgttgctgcttttcacaatcgttatctattgcctataggatagaagtccaagat

SEQ ID NO: 54823 - DNA, 1232 bp, Homo sapiens
tttgtactgaggattttccttccaattctcaggaattaatatagatacatttttgaaaaaaaatcttttttctgtggcttcaaacaggtacgtagaagctgtagtcaccatatcctgtcattaaaggaaaaaatatgtgaggatggtgaagttagagtgaactaaattagcagggttttgtgacaggcatttcccaacttaagagtggacagaaaagcaacagactgatgagtagggtctctgtctcattattctaactctgccacctgtcaaccccaaaccatcacttattcctgcacgttgaaagcctcctcagtcttctataatcctgccttaaaaggcaaatgcttgtatttggcattaagaggaattgattaataggaatatgtacatggactttggagtcatttacgtgattctaatactaatgttagtatcttctggatgacagatcttggttgatttatgcaatgctccgaatctcagtttcctcatccttcaatggactattactatctatcagtatggttggcatagagatggaatcagatataaagtcctctacaaacaggcaatcttaaaactgtttgatatcattactatttataagaaatcttcgtagaaaacaggcttagttgatgcaaactgaggaggacactctatagaaatgggtcattgaagaggtttctcatcccaaccttaggagaagcagctaggttgggagactgtgtgggtgggaggtgtgatgaaaaaaaacccatagtagagacaaaactttgattacagaactgttgctctaccacctatatgaaaataatatcaccttatattcagaactataaactcacatacaaggacaaataagaaaaatagttcctcccagaagaaagcaaactacttggaaaacatatttcagcatatcatctatgaaaacttccccaaacctgctaggaggccaacagtcaaatttaggaaatacagagaactcctgcaagactttacacaagaagatcatccccaagacacaatcatcagattttccaaggttgaaatgaaaaaaaaaaaaagagtgttaaaggcagctagagaggaaagggcagatcacctacaaagggaaccccatcaggctaacagtggacctctcagctgaaaccttacaagccagaagagattggaagctgatatggtttcactgtgtccccatccaaatcttatcttgaattgtagttccc

SEQ ID NO: 54824 - DNA, 1695 bp, Homo sapiens
atgggttttttcgttacaaaattcaacaacctaaaaggttaataaaataaaaaataattttaatataccatgcatttaaaaatcaaactacaaacctgaaaaatttaaaagtcttctgcagatatgttgtttgttgaatgaaatatcatttactgagcatcaatattacaataaggtagatttaccataataagaattatggtaacgtaataatagataacactagatagcactagttcagcaaatactatgtgttagccagtgttcaaagaactctatatcaatatatataatcctcaggtcacctgaacagatactttaaaaacatgacaatatgtcatttgattataaattctggaagcaattatcagcatacttacagaatcaatactttgcataaacattatggatgctttttctgtttgtactttatcaggaaagaattgacaatcttttccatacagttttgttgtagaatcaattctgcatgctctactaagacagctgcctccttgacacttataaactctatttctaccagagatacctgcggaacacctgaaaatatatgacagttaatctttgaggcaactgaatcattagcacttacagaaatcttaagtggttctattcatgatgaactttatatcaagatgtttattcttctatggtaccatgtacttcctatcctggctatagggtttaagggttccaatcaaaataattatctattttttaagaaattctagagggaaattttaagtggggcctccagataaacacaatggttgagttctctcctctaatgagttctctccttgtattaaagcttagacatctctcctgctggacttttggtggtaaatatgctatagggacctggataagagaatttttgagacaatttactctgagtaccactttagcttgaagttctttgtagatttccttccaaagaagatattcccaaaaaatagtacatgggatagacacaaatgttcttattactcaaagagcatttttatccaaagggaaatgtgattggaagcgaagatgaggtgctgccaagaatcccatggtagaataaaaaatgatggagacattttagacctatgttttatggaatgtaattgaccacaggtggcagtgattacaacaaatatgctgagatgtgaacatattttgtcttttcaataggctttcagttcaaattcaggaaatgatgaatagtttctattcagctatttagagagtcttataaatatgtcgatgcttctattgcttccaaactaggtggacatgatgaaactatctatgtggaaaatcatgctgaatattctgcagcagcagttgtacatctaaggggaatatgacataaacaaatgcaataaatgtaatactctctaaaagatgtgcctgaaaattggtgcaatggggcagaggaaggaccttgattgaaatcatatacctttcagttctcacattagtgtcaagtcccacgccccagcaggacatctacattgatgaggtgatagcaccaattttaattttaaattgattcttcccaactattttgctcttttgatcacagaatcaaaaggagagtttattattaactgtgatgctagacggcattataaaataacctttataaatctccaagaagttcctgcttggctccttgaagctgcttga

SEQ ID NO: 54825 - DNA, 1036 bp, Homo sapiens
agcaagcatatatttagtaccattagaagccaattcaacataatttatactcatgtcataaattatatattctctactatgtttaagaaggtattggaaacacgtaatccattttcatcacatctgtgtgtctgaaataacagctaccatagttaatgtttatataaaaacttcattgttatttagatcttttcagtctgagcttctgttaatcacatacacccaccccacaacttatgctctggtctcatggggttttcaccattccctccatgcgccttgcattgtcaccccaacgtgatgttttttgctcatgacttgatcatcttttcttaccccctttttcttcccagagaaattcaccacctgttcaaagcccagctcagaattcagctagttttgcatgcttcctttccctggctctatacaactctagtaaaactaatggcttcctctgctcacatagaactttatttttctatattcctcctgttatgtaggaatgctatctgattatgttatttcatcaacagttttatttgtctctccagccaactggactccaagtgccacgagaacagagattgggtctggtccccagcttcagtgcctccaaggcagaaactcaagagacgttgttgaactgtcagcctttacatttatgcattactattgaaggcctggaataaatggatcgtgttttacctgttatcttgctcatctctattactgcttcatcagcagctcttcccaaagcaataaaatgaacaatggccccactttgtttcacttcatcaatacaagaacttgcagtgttatcctccccatcagtcagcagcagtacttcggatccatcgagttgggaatgtagctctccaatcacctgcaaacataatgcagagcacagttaccaacagatgttcctagatcaaatagacaaatgggaaatgagaaaaaatttacagagaaaataaacaaagttatgcagaatagaagagataacctctattttaaaataaagaattttcaatcaaca

SEQ ID NO: 54826 - DNA, 1143 bp, Homo sapiens
tgtccttattaattcatatacagaatattacatatagtactcttacaatttctccaccactgggttgctttcagcttgctttctctaaacacactatgtcatctctctgtttaaatcaaaagggtccctactaaggaaaaatcctttctttgtgtaggatttaattctcacaacagtcaactaaaattactaaatctggagatttttagaggtacacatttcccagacttcctagggaaaggtcccagcattctgtgttcttacaaaccctcgagatgattcctttgcatactaaagtttgtctgcagactaaagacatttgcagactaaagaatgtctgctctatgtcattgttaatcactaataccatctcaggtaaaggcattccaaattagcaaatttccccaattacctaaatggtcatctagcaaaatgttgagaagggaaacatggtgcatataagttttaatgtagtagagatttgcagaaagggaaaaaagaggcaagggatagttgtggaaatattgatatatctgaagaaggcattgaggtacacaaaagaacaatttcaccttctcagtttttctcaggggcaactctagttgaagatatgattataaaatgattgaataagttacattgcaaaatatactgatagaaaattttgttaattcgggtgcctatcaatatagttatttccttgctcattaacctcttaacagaagcttccgttcctagaacaatccagaatctagggaaagggtctttaggcatcacccatctgtgcagaccagggagacagataatggccaacgttgcatcttgattcctaccagccagacctggtatctgatgccccagtgatgaatcttcctcttttgtggcagtgctagctgcctctgggccccagttctcaggactatatttatactttgttccagctgtcgaggattactcctgctttcttttcctgccagagacccaagctctatcacttaatcacatttagtttgcttgtgcttcaccctctctctagccaggctttcttgatgctgtcctcagcctcctgaatgagacctttctaattggtgacagacattggttgcctggatgataaacaacaatgatgacaaaaaattacat

SEQ ID NO: 54827 - DNA, 1097 bp, Homo sapiens
tttatttattctcaaaaatgtctagttatgcaaagcagatagatcaaaagccttactcattttttaataaaagctgaattctggtcttaagctctgcaaattgctaccttctttgtatgaaaagtaggaccacgttaaaatgtgtcatttgattgattaaaaaatatcagattataaaattaacactttgctaggctgtcaatataaaaccattctccccccacccacccttacacccctgtttttgcaattagcaccttttacttaagtcaaaatcacatgacacttcatccttaccttttccaacatcaaaattatctcctggtgctgtccatgtaagaataatcttatcctcatgaactgtggcatcaaggtctgtgatttgacttggtgggtattggtcaggcaagggaaggcttgggacttgtgataccacaaatgcacctccggatgctgttcggctgaaatcctccaaggtggtctgagtatcctcatcaatttcaggtcttggcgggtttgcttcaatttcccctgcattaaacatttcctggtttataatgggcaaaactactggtatttattataattcagtgaatcaccttcttcacttgtcttttccttctaaaaaaatatatacagtcacatttttactaagttttgtgacaatcataagcgcccaactggtgagagaattctttctttggtaggatattgtaggacagaatcagaaaacaaattgctttagaattaagcctacactgggtgacagaaatattatataattcaatgtgtgcctttttaaaaaaggaattgctttacctcttgaattatctgcactctgggaatatacctggggaaatcattgccagttctcctccacccacttgtgctaggtccctccctccatgctgcaagtgctaaggaataattcttctgattgtattccaattgctagtagaaagcccctaaaagtcacaagggaccagatgaaagaaagctagcaaagaatgcattcttaattcttacatcactttactgcacacactgtttttctttttgacttattaaaattctaaataagtgtttactctacagca

SEQ ID NO: 54828 - DNA, 1399 bp, Homo sapiens
gagaagagagacagagagacctacgtaagtggaacacaaggtttttgtgaagagtagtagaacggattgataaggcctatttaaaaggaaactaaatgttaagcagaggatctgaattatttttaaaaatacactaaaagttattcaccacacacttgaaataccttcaatatttcatggaaaagttaaaaataaagtccttactccaaaaaaaatctggtgttttatttttcatcacatttcagaatgtgagaatatatttctacatgaatggtagatatcaaaaagcagtgtagaaagaaacatttatgttggcatcttcttttcctttcttgataaaataacagccaatatttcaaacatttattaatttaccatttattaaattgtagtgaacatgtttcatgcattatcatctatgattcttaccactagaatagtaggcactcaataaatatttgttgaatgatttgaataactgaatccctattttaacagataaaaaactagagataaggaaacttaagtcggggtgcggtggctcatgcctgtaatcccagcactttgggaggccgaggtgggcgggtcacaaggtcaggagatcgagaccatcctggccaaaatggtgaaaccccttctctactgaaaaaaaaaaaaaaattaactgggcatggtggcgcatgcctgtaatcccagctactcgagaggctgaggcaggagaatcacttgaaccagggagtcagaggttgcagtgagctgagatggcaccactgcactccagcctggcgacagagcaagactctgtctcaaaaaagaaaagaaaagaaaaaaaaaagaaaagatatcttaaataaatttctttttatgacacagctagcaagtagtaaaattagggtgctactcaaggtttgtctaggtccttaacacatatttacttttattttttattttcatatttttaaatttttaatttttgtgggtacatagtaggtgtatatatttatagggtacatgagattttgatccaggcatgcaatgtgaaataatcacatcatggagaatggggtatccatcccctcaagcatttatcctttatgttacaaacaacccaactacactcctttagttatttttaaatgtataattaagttatttttgactattgactatagtcactctgttgtgctgtcaaatagtaggtcttattcattctttctaactgtttttttgtgcccattaaccatccccaccttctcctacccagtcccccactacccttcccagcctctaggaaccattcttctactctgtatgtccatgagtttaattgttttgatttttagatcccacaaataagtgagaacttgcgatgtttgtctttctgcttagcacgtgttta

SEQ ID NO: 54829 - DNA, 1062 bp, Homo sapiens
aagatatattatcttaattcttaactcttccatggaaatgttctcattaattttgagaattaaacaattagtctttgtaaactgtccatagataaattttaagccattcaagtatgaatttgacattgctattttgtatattcatctaccatgaccaaaatatgagaggtttgtaacccatagtatttacaaaattaatatcttctgctcttagatttagacatttataacaaaaatttttaaaacaagatatattgaactataacttatcacatgccaatcactgtagtagcattttctgtatatttttctatttaatctttacttcagcatagcaaggtagacattgtattataaccccaattaactgggacctgagcctcagagatgtgaaataccttgcccaagttcagactgaagctagtaaatggtgatgctgagatacaaaccaagatctaattccaaattgtatgctctttccactaccatcctaatctcttccgctaaccaacatcatttatttatctcataaatgaaatcccaagttccacgtgccgtgaatgttgacaagactattgttattaaaacatctttatgttttaatacacaggaaggggaacatcacacactggggcctgttgtggggtgggaggaggggggagggatagcattaggagatatacctaatgtaaatgatgagttaatgggtgcagcacaccaacatggcacatatatacatatgtaacaaacctgcacactgtgcacttgtaccctaaaacttaaagtataattaaaaaacaaataaataaaaaataaaaaataaaaaatctttatgttttcaaaatagggagttacttttatttaaaatgtttttataaataattttgataggttatactacctcttttagagcctttaggaacagctatttaacttttttaaaccctagttttcaaaaggaggttaataatactatttatctcacaaaacttttattaatgaagacacttttaattactatcataacttactaatggagattaaatgagataaaacatataa

SEQ ID NO: 54830 - DNA, 1871 bp, Homo sapiens
ttttatatatgtgaggaagcagccttactgaggttaagaaacttgcacaactagtaaataaccaggtgctgtctgacctagtactcccagctgctttttcttccgggataagcattccagatttaagatagctagaataatagaatgctgtggcctagagagaccttaaaaatcatctggttcaatctgagcatttccatatcaacaagcaagtaacactttagagatggtaaattccttctagcttttgatttctaagttctaaaatctgcatggtgagtaataagctagctgccttaacccttttcttcccttccttccctaaaatatgatatattgtagacgttgagcctttatagttaaaataatgttttgatttaaattcactagcttctaatagttcaaagacaaggtgcaagaagaatgagtgattgagggtgtgaaatgaattttgatgtgtgagacacttgtacacttttaacattgactgcaatagaggactagagcccttggtatttttgtttgtcctagtgctcattacctataattctagatgcttatgaggatttgacactgtataatgctactcttttaaatacagttaaatatgtttcagacgtataactcacaccccttaaagaggacacatttactagaatttagtctgatttaaattgtggatagactcaatttaaaaaattaaatctagcaaagctctcaaaatgtgtacttcccaaagaattttaattccttgtttcaaattctttaggaaaaagttttaaattttatgctaatctgttagccatcaaataattttcttttcagttttaaatatttaagtgtctactgcatgtctgatgtctgcttgtggctactgtggacactggtgatacagcagtgaataaaatcagcaaagtgtctgccctcctgaagcttacattgtagcggaagataagcttgtaaatacatcaggtggtgataaaaatcatggccagaagaatagaataacgcagagatggtggttgttaatatctttattagtattttctaacattagtatcgtgtatagataggatggtcagggcaagtctttctaataggatgaaattcaagagacctcaaggaagtgacagacctagttttttttggaataaaagtatttcaggcagcaggaagaagtacaaagactgaagtttcaggggcattaaggagaccaatgaaggagctgtggccataatacacgtaaaaggcgattgtaacttagattacagtggtagcagtgaaggttccaaattatccagtattggctgttggattggctgtgaggtatgagagaaagatgagttaaggatgactccaaggttttggcttgagccgtttattaagggaaaaattttaggagaaacagacttctttaatgtgtctgtaattgttagagatacatactgaaatgtttatggataaacttatatcatatctgagatttggtttttacagggtatttttttttttttttttttttgagatggagtttggctcttgttgcccaggctggagtgcaatggcgcgatctcagctcattgcaaccttcgcctccccgattcaagccaatctcctgcctccgtctttcaagtaactggaattacaggcaggctccaccacgcccagctaattttgcatttttagtagagatggggtttcaccatgttggtcaggctggtcttgaactcctgacctcaggatccacctgcttcggcctcccaaagtgctgggattacaggtgtgagccaccacaccagttgagattagcgtttgaatatttcaaaagaaaaaaacagaagtcgctgaaacaacagcaacggaatgttgat

SEQ ID NO: 54831 - DNA, 1701 bp, Homo sapiens
aatgaggttgcatagtttatccagctggccttgggatcagggtttgcttttgctcagtgcccagtcctccagctacactgcaagtttatgggcttaggcaatagctttgtaactgctatttttggttctacccactaggtcaggggctggctatagaccattctcaaaaagacccaaggctttacaaaagctatttaagctgttatttctagcccctaaacaggagcctcagtggagattgtaaccagaagtctaagaatagaattctagaggatccttcagcttaaggtgttgataataacctgaaagtattaaaccaagaagaaggatgctgaaagaaacaataaaactcagaaaatagagtagcaaacgagatttttgagaaacgaaaggagagaaaggcaaggtgaacactgttttgtcagccagaagtgagtcattactgagcacagaattaatgctagtgatatacctgtgttaagatgggaggaagccacatattctagaggaaaatgatgcatgataaacagcttgagtcatcacctctaatgtttaattaaaagtatccagaaggctgtagatctacacagaatctttttactgctttattattatataggcagtgctaccttttctcaaataccagtatattcaataataaaaattgattcattgagtacgtttaaccacattttatgacctttaaaagatgtcttcatagtatgaataggatatgttccaaaagttagtctataaataaattgctggaacatatcctcagcagcttaaatgacaggttttatggtatgttctgggaaactatttatctaactaggtgtgattaaagtgctaataagacataaaccacaataaacattaacagctctttcaaaacttaataattacaaggcaccaaacaaagtgatttgcatacacaatcatacttaatcccccaaacactataaaatatgtattgtctctcttttataatagagggtactaaagaaaaaatattcaatacattgctcagctcacacagcaaggaacaaagttaagatttgaattcagattcaactgactcaaagctcttactctttaccgttatcctagtctacctaggataggtagttgaaatagttgcatgctttatataccaagaagtatacttaggttttctgtagaattcacaccatacattttagcagaactaagggtatgtgatgactgtaaggtagggtcatccacaaaagaagtatggataaattaccataggagcaaaaaaaagtattcataagcaatggcttacaaagctggagcatggttatttgtatgtttaggattgtttagctttgaatttgctttttacttattgatatggttccctaaaatttatttgcagtatatttaatttttgttttacaatcaataacagttcacagaagaaaagcttggccaggctgagaagacagaattggatgctcacttagagaacctccttagcaaagctgaatgtaccaaaatatggacagaaaaaataatgaaacaaactgaagtgttattgcagccaaatccaagtaagaaactctacctcttgtgtaccttaagtactattagtgggtttttaaatgttaaaaaaaaaagttttaatggccatctgaaaacataggatttttttattgtagcttcaaggtcagtgggttt

SEQ ID NO: 54832 - DNA, 1385 bp, Homo sapiens
ccttaaactcctgggctcaaacgatcctcctccctcagctttggagtagctgggactgcagacatatgccaccactgtgcctggctcctcagccatccttttttttttttttctgaatgtttttgatcgtggttggttgaatccatggatgcagaacccatagatacagagggccgactgtgaccgtaaatattttggggtatatttgccctctttagtcccattggtagaattggtacaattatctatgctacaataggaagttcatctttgtctccttcatttagacacatactcttaaatttacttttaaaataaaactaccttaattacagttaattctatttggttttactttagcaagcaagttacagctaacttttaaacagaccaaattgctgatttatctttacatgattttattttctggtattaccagacaatgatttttaaaaacatttttcctttgcaggtaatgcccttattaaatgtggagaaacccaaaaaagaattggaacagcagacagagaactgattcaaacgtcagccttaaattttcttactcctttaagaaactttatagaaggagattacaaaacaattgctgtgagttgaaaaatgtcccctttatttagtaaaatcatttagatatatatactttttaatgaataatttggcctcttaatgactgtgtagatgtagtggattacaaaattaaataatctaggtcagtgcatgttcaccagaacacaaaattaaaccaaaataaaagactactgaacatttactccatttgtgtgtcctacagtgttattgagatgcctttatcccttttcattcattaccaacgctaaaatctatagagaggttcctggaatgattatgaaaatatggtctaaaatatcaccatagtatatataccgtgtagctcttcattttttaggattttaacttattttcttagtgatagagaatgaaaattttctaagagttttacaaagctgctcttataaatacttcaaactttaatttgcagatttcctattacaatatattatagaaactttgaatatgttcacaatggatttgtctctgtataaacaaatatttggcctgagacagaagaactatcaagttaaagtatgatttaaaagatattagcagccgggcgtgatggctaacgcctgtaatcctagcactttgggaggtcaaggtgggtggatcacttgaggtcaggagtttgaaaccagcctggccaacatggtgaaaccccgtctctactaaaaatacaaaaaaattagctgggcatggtggcaggtgcctgtaattccagctacttgggaagctgaggtaggagaattgcttgaaccctggaggcggaggtt

SEQ ID NO: 54833 - DNA, 1026 bp, Homo sapiens
acgttttgggctgcacaattccttgtaaagatagactgtcttgtggaatgtttggcaacatttctggcttctggctagcagactccaataacatccctccaccaattgtgacaaccaaaaaggtattgccaaatgttcccgaggcagggacaggatcataaaatattaaaactgatattcctttgtttccatcattgcctgccatctttcccagacacttacaatgtttcaattatttattttaaaatttaaaacagtaacaagggggtgggggggggcagatacatgaatggtaactttatagccaattttgtagtcatagatctttatcaagtgatacatatgtttactagggaataatactttaaatgtgtatgctcttaacagaattttagcatctttagcccttattttttcttttctatatttatagaaagaaaggaaactattgcaaaataagagactggatttggatgctgcaaaaacgagactaaaaaaggcaaaagctgcagaaactagaaattcagtaagtaaatagaaaaatatttttgattaataactttaagatttgtaaaatattttgctaataaaccatgaaagatacagactattaactttagagtcttgtttttgtgctttctaaacaaatttatcagaacttaatacatccaaatcactgcaaagtagtcatatcaaaaaggtgatattcatggccaggcacagtggcgcatgcctgctatcccagcactttaggaggctgaggcaggcagatggcttgagcccaggagtttgagaccagcctgggcaacatggcacagccccgtctctctacagaaagtacaaaaatgaacgggcatggtggcacccacctgtagtcccagctactcaggaggctgagatgggagaatctcttgagtgtgggaggtggaggttgcagtgagccaagtttgcgccactgcactccagcctgggcaacagagccagaccctgtctttaaaaaaaaaaaaaaaaaaatatatatatata

SEQ ID NO: 54834 - DNA, 1070 bp, Homo sapiens
aatgatctttgaataggaaaatttggggttaggtaggactttcttagtgaaaatttaataaaaattgtaggtaactggcagttttaaaaatgatacattttccctaaatgattctcatttaaagtcaagcatcaacatattttgttttgaaaatttgaattttggggaaaaaaatgaataggcaccactatatgcagtttcacagaacaataaatgtagtgggggttttttaatagaaaaaaatatttgattggctcttttacttgtttaatgtgttatttattgtgaagaagtaatttgtttcactgtgttcattggtataatgtgttctttgtctcttactatgcacttaagcaactaaactcagctcgccttgaaggagataacattatggtaaatttctcttacatgctcaacttcctgcatgtaaaatggctgaaggtttgttggcctactgtgttttctacatcttgaataaagtgccttctcttgctattagccgcttgtaaaattttgaaataattggaaccatgtattcatttatctttaacaacaaaaatataaggaaaaaatactagctgaagtaatactggaactttaaaagaaattgtatgttctgattgccaaatatagtgtttatgccaaatacagattttagaatatgaatttatacataaatatatagtgcctttttgcactgactaaaaggtgctaatttaagctggcatttatattttcacttttggcaaagaaaattaacaaaatatacttaaagaaaggtgtaaggtaaacacattgcctttgctgctcagtagcttcaagatttaccttattttcacccaaactcaacatagaattaattttttctgccatttcaggccaagacagaccccattaggttaggtactcctgtaatggccaggcttattttccacccagtgctaactcacttaagaaagttttggtggaatggtgatagccttgggaaagaatagagaatgcagattgttttatggtatccaatgtatatgttgagcttagtttgagaaaatttttgagctattagaagt

SEQ ID NO: 54835 - DNA, 1024 bp, Homo sapiens
atctgcagtacagctaatacattggcaattaattggctgctttcattcactagcattaaaccaaaagcaggaaagtaataggaaagattattgtacagaatatataaaatgcatttttgtttttgtttttttttaaatggtaattactgaagccctggctgaattagggcttaccttagatagcaagagaatgcattaatgtgtttccattgtcctatctataggtaaatgaaaagcgtgaggatatttcagtcattgctaatttaaaatataaagcatagcttttctttttgtctgaggtaaaaacataattctaaacaattaacaggactttgtttcattaatcatttgtgtttactattaatgtaatcttatagtaatatatatttacagctggtcattttatatttattatatctccagcttattgtttctctccaaaaagactgtttcagcagccattaatccttgctttgcttcatttcctaaaatgttagaatttatacctaaatgagaaatttgaaatcatttagtccaaatctctaattttccagatgagaatactggagctaagaaaggttaggtgttctcaatttgggaaaactgtagatttaacataagattttaaaattgatagcaatgatacatataaaagtcatactttcacagtatgttaagctgtaccgatttagttactactgtgtttaatctataaatatgattctgaaaaagagtatgccatttaaacaaatatttatatttttctatactaagttgtagaaaataaattccaactttcatgctttatatttttctctaatttttaatgctggctagatttgggcagaggaggtgacaaaagtaagtaaattattaaatacagaactatgaaacaagaatttagttgacgttgattcagtaaatatgtattgggcaacaacccatgggtccagtcacagtctgtgttagtataccttataaaatctgaaaatgagggatatgttcaggtctctttagctaatag

SEQ ID NO: 54836 - DNA, 1057 bp, Homo sapiens
tggcaactaaacgcaaggtgaaaatcctatggcttcactctaaagtcttttgcatttgagactgaagactctttaacttcaaagtaaaaactgtagtaataattgagaatttttgcagcaatattactttatacttgtaaaactggtcatcttaaaattttgtaaaatagtaaaatttagcaaaattgatactagaaaatttatgaaaatatcttggctttctcttagtagtttttgtaggctcttaagagtgtatcattaagctttagcgtaacagattcttttcaatcaagtactggaatcagttgtccaggtggagtaatacagaaaagctaaggtctagaaaccaggggaccattttagatacaaagcagaattgcggaattgccagattataacttgaggtttgttcgggggattttttttaaccatctaaaataaatgtatataagatggactgagtcttctaaagagattctaaaactatattcttacttaagtctgaacaggaattaagaataactcaaagtgaatttgatcgtcaagcagagattaccagacttctgctagagggaatcagcagtacacatgtgagtattcattcattggaaattcatttggaacaagactttggtagtcctaaggcaattttgggaggaaaaactgaacttttcagtcattcatcaaggaaatttaaattgttctactttccaatatatccgaataaatattttaaattgttgtttacatcttatcaccgagttctcccaccctcattaaatatacatgttgttgtttattggctaagcagagtttgctagtgtactattcacgaaggccaatcttaataagccttgtagtaaaatgttagatactggtgagtctacctcagtacaatattgtggtctgtctcccccttgcatttgccatttaagttgactatacagctaagaactaactataattttccttcacaggcccatcaccttcgctgtctgaatgactttgtagaagcccagatgacttactatgcacagtgttaccagtatatgttgga

SEQ ID NO: 54837 - DNA, 1062 bp, Homo sapiens
tcaaagcaaaatgacagtatgtaaaacacaaagctcaatcactcattcatcacgtatttattgactatctgccatgtgccaagcactgttacatattgtggggtaatatcagcaaacaaaacaggcaaagatgcttgcctttatggagctcacattataaggtgacactgaaaataaaataatgtttagggcaaacatggtctctgctctcacaacacttagcctaggtagaaatacaaagcaagccgttggtagacaggccatgtggtaggcagaaaagcagaaggtgcctggtattgtgaaggcatctaactgtgactgaggtacatctagcagagtttcccaggtgaagttatcttggtaggaataatctagatgaagaaagggacagggatgaatattctaagcaaggaagaatatgtttataaaaaagccagaagaaagagagtagggaaagttcggggaactgatagtagtccattcaggctggagcatagtgttcaagaatggaatggtagatgaatctagaggagttaagcagggtcataccatgaatggcttttaaagtaagttgttgtaaggagtttggaatttatatattgaggaaccattaaagcaggggagcgatatgtagcatttgaaggatgaatatcaaaaaatcgtttcaaggaataaggtaaataaagtcactttggtgtttgtttctgcacattaacacttcaaaacttggcctagaataaaattgagcacgtccatgaaaccaattttgaacctcaaaaatgaatggtagcctaatcattagttattttaatagaatatacaggagcatttacataactatatatttgaggttttattagtggtgttaatatctcaaggcagaacagcactttatcttcacatcattataactattttaagcccaagaagccttagtacttttttccactttatcctgaaactctggaagtgcggcataggggttgcttatactcgcattctacttaaagccacactatgcttaggacttggccatttaaacaaaatccagttgttgcgtta

SEQ ID NO: 54838 - DNA, 1642 bp, Homo sapiens
actgggtgtggaggtgcatgtctgtagtcccagctactcaggaagctgaggcgagagaattgcttgcttaagcccaggaagcagaggttgcagtgagccaagattgaaccactgcactacagcctgggcaaaaggaatgaactcctgtatcaaaaaaaaaaaaaggagttcctgattgttcttttttcctctcagttaaaaggaagcaagctcatcaactgagtgtaatggttatggggagaactgctgaaattttgaggatgggcaagagggtatgaaatagtcatcaggggaatgaaagtgaaagtgaatggagtagagaaatgtagtatcattgccaggtggcatgtggacccacttgaggttcctagtcataaattgaatgtaaaacaaagcttttctgtgtttctcctgttaaagtagatgcatggatactgaataggtaaataggtttttaccaaatcagtacaatgaagtgagtggcataagaaatgagagcatatctaagagttattataataattaactatggacatgaagaaggtgttggtaggatcatagaccctggtaggcttgttgatgtgagagcacttgaaagaaaaaggcgatggtcaaagaatgggatagtagaaactattattattggaagggttgtggttactggaattggtaagatctagatgtgactgtgggaataggtggctgaactaggatcaggtatgaagtcactagaagagaagagttcgaggatctaagaggctaaagggttggaagaattgtccatttggatattaaagtcaccaagaattaagtaagagataatgtcagtgagccaggtgataaaatcttctagaaatgaaagtaagggaatgaggcatctgtaggtgattgcagtaagagatactgggtatctctttttttaaagagttgggaatgatacaatagatggagaaaatgtaatatgggaaggaaagataatatgataaaatgtaatatgataaaatatgataatgtgggaggaaaagatgatgtgctatagttgaataacatgaagttgaaggattggctagaattgtttagggaaaagagtctaaaaacagtgatgaagaacataagactcctccattgacctctaggttcagtgataaaagaggagtatgggagataaacgctagcactggaggatgaagggaaggtttagagaagaggttaaggatacagggaattttgctgatgactgaaatgatttccagatggtatagtgctcgtgaagagaaaagaggacttttctagtttaatgaatttattaaaactttgaatttttgtagatcattttttagcttagaaatggttgaattagaatgatgtcagaccagctattttgtactgttttatatttggtattattggggaaactagccttaaaataaactgaaaattctaattatcttcaaattatttatgagcacattaatcacaaaaatcactaatttctaatagaaaatttttctaaaaaatagcacaaatgaacttgtaaaatttgtcctattctaccattgagtcttcaatttcattgagataattagcagtcatattatttgaatgtctaccttctcactatgtgtatgtccttaagggaata

SEQ ID NO: 54839 - DNA, 1850 bp, Homo sapiens
ttcatttgagagtatcatgtgggcattacatacttgttaatttcaataataagctcaaatccccaataaactgtcttgctactaatagatatttttctctttaaaagtaaagtaatttcacttgcttctagtcccagggaggctgaggtgggaggatcacttgaaatcgggaggtggaggttgcagtgagctgagattgtgccactacactgcagcctgggtgacagagcaagaccctttctcatgaatgaatgaatgaatgaatgagtgatttttttaattctcctttttttccgaaatcctgtaaaactcttctccttaaagatttcctttaagacttgtttattgtcatgtctaaaagcctttttttaattactaaatttaaactggattgaattgctttgtcttagatgaggctgagaaggttgtttctgaacagaaagtaatgatgacgtccctcttttttgtagtatgtccgtggttcagaccctgtattaaagcttttggacgacaatgggaacattgctgaagaactgagcattctcaaatggaacacagacagtgtagaagaattcctgagtgaaaagttggaacgcatataaatcttgcttaaattttgtcctatccttttgttaccttatcaaatgaaatattacagcacctagaaaataatttagttttgcttgcttccattgatcagtcttttacttgaggcattaaatatctaattaaatcgtgaaatggcagtatagtccatgatatctaaggagttggcaagcttaacaaaacccattttttataaatgtccatcctcctgcatttgttgataccactaacaaaatgctttgtaacagacttgcggttaattatgcaaatgatagtttgtgataattggtccagttttacgaacaacagatttctaaattagagaggttaacaagacagatgattactatgcctcatgtgctgtgtgctctttgaaaggaatgacagcagactacaaagcaaataagatatactgagcctcaacagattgcctgctcctcagagtctctcctatttttgtattacccagctttctttttaatacaaatgttatttatagtttacaatgaatgcactgcataaaaactttgtagcttcattattgtaaaacatattcaagatcctacagtaagagtgaaacattcacaaagatttgcgttaatgaagactacacagaaaacctttctagggatttgtgtggatcagatacatacttggcaaatttttgagttttacattcttacagaaaagtccatttaaaagtgatcatttgtaagaccaaaatataaataaaaagtttcaaaaatctatctgaatttggaattcttctggtttgttctttcatgtttaaaaatgatgtttttcaatgcatttttttcatgtaagccctttttttagccaaaatgtaaaaatggctgtaatatttaaaacttataacatcttattgttggtaatagtgctttatatttgtctgattttatttttcaaagttttttcatttatgaacacattttcattggtatattatttaaggaatatctcttgatatagaatttttatattaaaaatgatttttctttgcttaaccttctgtgtggttcaaagtgacttcttcataagatcaaattggtctaatattctattatgtcggctttacctcaggataaattcttcataatctagaaacttcgctgttgattttgaattaaattattttaatgaaggatagttggaaatctataaaggcagctctatcagagaatgtttataaagtatgtacgtatgtatgtatgtatttatttatt

SEQ ID NO: 54840 - DNA, 1181 bp, Homo sapiens
gagttctttataatgagattttactgcttttcttataatatctccacatagtactttctataacgattgttttaattttaaaactttgatcacttaatattaaaagccaccagaaagaatttttattaagtaactatcttggatagatgatatatacctatattcagtttatcaccctaaaaaaaaggtaggaaacctttaatattttgtagcgcttcctaggacatcttacctatttaaagtttattgtcaaatctccttatctccttcggtctttttggctaggtttaagaataattgaagtaggttggaagtttctctaccatttattatacttgggcctccatcttctcttccattagactggaactacatggtcctgtctggctaaccagctttgacatttctttgatctatatatctgctaactgtaatgtttatactgtgaaaatttatatttattttataagtacatttttaatttataccagttttttaaattcctgtttttccttttgtagctgtatgcaggagctattcttgaagtttgtggatgaaaattgggaaggttccctcaagtccaaggtatataaaatttactccagtaaactgttcagtcatttaaaatcaacattttatgtgaatcgttttcactatatattcccaggaataagaatttttaggattatactttcttaacaatatatgcttttttttcaatttgttttcatggaagtggtttgttaaagtaattggtgaatgctatgttactttaaaaaaaacacaatatatgaaatttagaggccaggcgtggtgggtcacactcagctcatgcctgtaatcccagcactttgggaggccaaggtgggtggatcacgaggtcaggagttcgagaccagcctggccaagatggtgaaaccccatctctactaaaaatacaaaaattagctgggcgcggtggcgggtgcctataatcccagctactcgggaggcggaggcgggagaatcacttgaacccgggaggcagaggttgcagtgagccgagatcacgccactgcactccagcctgggcgacagaacgagactctgtctcaaaaaaaaaaaaaagaaattcagatttaaaatacaacacatgaaggggttattttcttaaaagaagagcctttcctttgccgggtggg

SEQ ID NO: 54841 - DNA, 1038 bp, Homo sapiens
ttccccagcctcagcctcctgagtagctgggactaccggtgtgcaccaccacgcccggctatttttttttttttttttttgtattttagtagagatggggtttcaccatgttggccaggatggtctagacgatctcctgacttcgtgatccacccaccttggcctcccaaagtgctgggattacaggcgtgagccaccataccctagccgagagtttaattttcatctcagcttcttactgactttgtgattgagctagcacattactccaggatcttcaattttgtcataattacattaccttacattagtgtttattttacactggttatacgctaagtgttttacctacattatctatttaatcctcacaacaaccctataatgtaaatactattatccctatttaatagaagaggaaactagggtataatctgcctaccgttaactggcgattagatgccaaaacctggttttatctcaggtctatttgattctagagcccccaggtttttaaacctctgtgctattttaccttttattttgaaaatgttaatagtaagacctgcttcggagttactttaagaagttgaatgagttcaatataaaacactgggctgtctttctgaaggccccttttgccatttgtacttaacaatattaataatagaatttcgttactagtttttatttaaaattaccaaatccttatttctcagtttaccacagactttaatggctcctgtcacttggtgtttttcaagaatatgttcccaaattgggctttatttaaggcccagccagataatattttatataaatcatgtaatttttcttaattcggtaaaagagcatcaaaacatttagttgttttcaatttgcgtggctattgtgtagccagttgcagttactcataagtcagcttaaacagcattatttaagacaatggcaaattttaggcttcaggctgtcagaaagagaatgctactgatgtgtaaaacatagaaggatgaaatggaggttaagctaactgcgtga

SEQ ID NO: 54842 - DNA, 1073 bp, Homo sapiens
ggcacctgccaacacacccggctagtttttgtatttttagtagagatggggtttcaccatgttggacaggctggtctcaaactactgacctcaggtgttccactcccctcggcctcccaaagtgctgggattacaggcgtgagccaccgcgcctggcctatatcccactatttctttagttagtaccttttcttttttagatcttggtttcccaaggtccttgtagtttctttcttcctccttcaaaatattttgatataattggttttagcatttttagtcttttgcatttacacttgccttatttctgaactactattctgaaggtcaagctggtaccaaaccagagcacctctggagataagaattcacttagctgaattgcttatctgtgtgaaataataaacaaattatttcagcctaatttattgttcagttttgattaaaaacaaagaagtttagactaatggttaagatagactatagaaccagactgtctagattcagatattctctgctactcagcgagtgttcttggacaaattacctgattactgtgtgtctgtttttataactataaattggggataattatagttcctgtctcatagggtgattatgaggattaaataagttaatatgcatgcactgcttaaaattgtgtctagcatataacaagtagtaggtaaatacttgctgcaggtggcgatgacagcagcagcagtaatagtagtagtagtaatctggtttgctgatgataaaagccagaaagaacagaaaatttggagaactcagaatagcatgataataattgctattgacaaagtagggtaaaagaaaatagatatgaaatataaactatcagatttgccagtgttaaaatttggagcagtatcttttattccactttcaagttcctggattagtcgaatcaagaggaaatatattcttacagaattagtatgaaaatttttactatttataactacttgtatgaaacctaatacagaaataaattatgtcaaacacaatcctactttcaaatttttaagtcctttcaactgacacatttt

SEQ ID NO: 54843 - DNA, 1057 bp, Homo sapiens
tggagtgcaatggtgccatctcggctcaccgcaacctccaccttctgggttcaagagattctcctgcctcagcctcccacccgccaccacgcccagctaattttttgtatttttagtagagacagggttccatcatgttggccaggctggtctcaaactcctgacctcaggtgatccacccaactcggcctcccaaagtgctagaattacaggcgtgagccaccgtgcccggcctgctctttgattttttttttaaatgtttatgaatctccagcctttagcacacagtatttcataagttcttgcccttgaataaggctgtttttactaagaacaagttggaaaaggtgatttttttaaaagctatgttgaaaatatacataacttcatagctacttgataaatatctttttcatatatttcacttatatcctgaaatatatttttaaaaactgaaagaataaggaaacttgtctccatgttggcagttagccattggtaacactctttggttataattatctaactacaaatatagatctcccgtttctacattttacttacaaggatgccataagcatcccaaatctatctaaaaagagataatgttaattatttagcacaactttttagtgattccaatttgaccactcaccttaataggtattttttcaaagtatacatgaccatcagattaaaattgtttcctgggattttcttgggatacatataaatattttttctgttagaatttttgaactattcactattttctaagatctgtaagattaagtgtagtattttagtgggttaaataagtgggttatttttctcatctttttataatcttgcaaattctgtgcacttgaacttgcttatggctgctggatgctttttttcattatttccttaatcaaggttcttaataatgatttcagctgctttgagatgttattttagaacttttttttccctaactatatccgcccctccccctccccccctctttgttttgagacaaagttttgctcttgttgcccaggctggagtgcaatgg

SEQ ID NO: 54844 - DNA, 1067 bp, Homo sapiens
ataaagtagactggaaagatcatttgagttgtccagttaaaactaaattggtaagatacctgtgtttgtagtgagaaaaaaatgttagcatatttctgttgtttccttccagtactgtctttgacttgtacatgctgaattctgtttgaagtattatggtttgtaaagctttcaggcataatgatgtgttattattattggtagtaaaggtttgtttttaacagtaagtgcattttcggagttctaaaagaaaaacaagcaggcaagctttgaaatgttagtattcagccaaaatttaacccttgatttctctgtatctgaacctgaaattccaagtatctcaaaaatggcttgcaaagccttacatgtttttcactttactggttcacatataccagtaaaacattttaatgtttagaagatttctttacatataagttattctttttcttgcatgtaaataaaatctaaacaagtttttaaaacttgattttaaatagatttaagacatacaacttaactagtttagtagaccttttgctgcccctctgttctttttgctgaggtattcacatgggacaaattgctgaataaatctgtatgagccatcctctccttatctttaagctgttctatgggctgtactactactcaaccaacatcctttttcactgaaacaccaaactcagaaggactgaagaacaaggggcattttataataaacagtgtttaccacacacacccccttgtgattagggtaaattgagaggtctgctatttgacaacagatatgccaaaactgtaaaccaaatgcatgtaaaagctatttttacttactgccttttcttagtagttcttcataataccccagttttttggtataattttagtagaaccaaacttgcaccacaaacctctaaaattaattatattcctattcaattttcattattaatggagctatatgttgtatcttgacacatttcagcagttgcagctcagcaataaaagtagatctgccaattaatatatgcccagctaattacaagctggagtgattatcgtat

SEQ ID NO: 54845 - DNA, 1108 bp, Homo sapiens
agaatttattgctgggcgaggtggctcatgcctgtaatcccaacactttgggaagccaaggtgggcggatcacgaggtcaggagatcaagaccatcgtggcccccgtctctattaaaaatacaaaaattagctgggcgtggtggcatgcgcctgtaatcccagctactagggaggctgaggcaggagaatcacttgaacccaggtggcagaggttgcagtgagccgaggttgcaccactgccctccagcctggcgacagcaagactccgtctcaaaaaaaaataaaattaaattaaaatttaaaagaatttatctccaaatgaaacatttcagtaacttgtcttcaatgtgttagtttttgacaaccccgtgttctctttttggaaagctttgtagtataaatatggaattgtgttttatttcccattttttattttcaggtgtctgcttttggggcagagttttcatcggaggcatgcagagagttaggcttttctagcaacttgctttgcagctcttgtgatcttctcggacagttcaacctgcttcagctggatcctgattgcagaggatgctgtcaggaggaagcacaatttgaaaccaaaaaggtactgttttctagtatattccttccattggatggtttagttgagataaggtaaaaatgtaagttgcttaatcaatttaagtgtaaaaaagcctctaagcttttacattttttagtaaaactcaactgatttcttgtctggcctattagttcaatcaaagcaaatatgaaggagaagtatggttgcataccaggatcccattccaccatgattgtcaagcaaaggggaagtagaatccctataacatgctttgatcctgtagttctccagtcttcctaacttctggccaaatgaagccaaaaaataataggtgcttttgttcatttatagtaagaacccagtgttggatgaaacttgaaatgaaagtaaagcacataatacctggcacttaattgtctacaataaattgtaacatgaaatctggttaaaaagaatatggactgttagtttacacacctattgctagtaatttgagacacctaacctcacctttaacatct

SEQ ID NO: 54846 - DNA, 1034 bp, Homo sapiens
cgagacttccaactcttagaggcaagtcttcaagtcgttggtccaggcgaacagtttgtgtttacctctctcgcgcgcgtgctctctcattttcactacttctgttagtctcttaacttccgttctcctctgctattcatatacggctggctgcgcttgagtgcgatttgtgcttttaaacaatgttgttggagtaaaaggagttatctataccaaagtataattcatttttgaagttagttttttaaatgatgttcgttgtcttctttaaggcagcgttttttatttcatttttctctattggcagaatagatgggtgacctttgaatgggaaaagtgtacttttaacttatttcttctcatatccatgttctgctgtgtgaatagtaaaattttaggcacagtgctgaaagcttttacgtttttttatcctagcttaattcttcgggtagtctctaataaggagacctggtttaatttacttatccaaggttgagggtgttaagggactacaccggagtcctctatgaacacctgtacttacctttctcaaagagcttgaaagcatcctggctgtttgctttggctactttaaccaaaaggtagattcttaacttctgtaattaacattccaattatcttgttattcaggcatttggtgctaggaattactggatcacctctccctaaactttctactgtttaagggtttttgcacatctttaggtcattcgagataacatttcaggttgtctttttttgatctccctctgtctttgactgtcagttgtctatagctgtgtaaccgccctaaaacctagtagcttaaaacagcaatgatttctcataattctgggtcagtggagtagaactactccacctatgttggttttcccctggcctcatttatgctttttgttgacctagtaggtcagctaaaccgaaaggttccaggattaccactgtttatagttggtgctgtcagctcgaggacttggttctgttccgtgtgacctctcatcctccagtcggct

SEQ ID NO: 54847 - DNA, 1058 bp, Homo sapiens
atgctgggatgacggagagcaacatgtgaacactgtagcgagttgcactcttgtgctccgggcagcaaaggaccttgtaattgccagctgagggaggctggccgggtagtgcgggaacgcgagtgcaaagcttcatcggagtacggaaatgagggtccggagatttaaattcttctttagtggcgctaaactgatgaattggggcttgagaatagggatgcctatgtatgttgcttcacggcagtgttgatgtgaatttcgaagaggagggaacgctgaaggggaattatgtagtgaagtttgtgtttgttaaaggaaaagtaggattatgcggaaagctaaccatatggttaaataccttaaagggttaacaggtgctttaatggatgagggggtctaaagtacaaaaagttggtgtgaagttgtgaaagacaggccagaaaaaagcacagataataggtactttcggattaatagggcactttggcatttggaagagctcagcatggagagcgagagttaaaagaatgacagtgataaattttgatttaaaaatgtacatggcacttaaaaatcagctcaagaggatgtaatttgaatatggaaaagtaatgtgaagtgttttttgcatactctcacctcaaaatcattttaaataccttttgagaagccagcaaaaacaaaaacaaaaaaccctcagcagtgtaatttagactaagaaatagatgttactgtgagtggatgattaatttttaggaaaaatgtaccagaaaataattgtaatattatgtatagtagctattttggtacaaggctttgcaaaagccttgacattttaaagagccttgaaagaaaaaccatcaagtaaatctgagtgaagtgcaactaaagttggaggaaaactagagttacttccagccctcaattctagagtaaaatttgaagagatactcagtttatttacgaattcctttattaatatgtatcttgtgtggtggaaaaaaatgtccactttaaatattgaaggttatccagtctggtttttcttttcttttgga

SEQ ID NO: 54848 - DNA, 1084 bp, Homo sapiens
attatcattttcattgtagaagattccaaaggatagtattgtctgatagtggctttaatataccttgatttgagagtacagtattttgatggtgagacttctaatagagcaatagatgtattcaaaactgaggtgtactcattgactacttgggaaattcactaattaggaattcctaaaaaaaaaaattcagtaatacagctttttatttttattttttaaaaaacaaatatggcattgtagtccacatattacaatgcggcttgctttttttgccttgaatgttatacacatctttccaggtcagtacatatagatgtgacttactcattctattaataatagctgtataatattccaaagtatgcatgtatcataaattattaagccattattctagtaacggacattcagtttgtcccccatctgtcgtgtgtgtgcgtgtgtatatatacatatatatataatttttttgagtgtttcttttctttcttggtattataaacaattataggaaacatccttatgtgtccgtttaactcatgttgatgtcattttgtgctaggatgaattctgtatgtgagattgctgggacaaagaatatacatattttataatttaacagatttaaaaatctacttttcaacatttttttgtttttcaaaagatgtagtaatctacactgccagcacacattcattagcactagaagataatcagcttttaatttttgccagtgtgaagctgtgaaatgatatattcaattaatttaccttctaatttctaggtaggttgaacatctttacatgtttattgcccttttatttgttacttttttctatttttctattgggtggtttacttttttttttaaatattagaattagtaatcctttatctatcctatgtcttttttaaattttttttatttttatttatttatttatttatttatttttttgagatgagccttgctgtcacccaggctggagtgcagtggcacgatttcggctcactcctgcctcagcctcccaagtagcggggattgcaggtacgtgccaccacgcccaggtaatttttgtat

SEQ ID NO: 54849 - DNA, 1410 bp, Homo sapiens
tcaccatgttggccaggctggtcttgaactcctgacctcaagtgatctgcccccctctgccttccaaaatgctgggattacaggcatgagccactgcacccggcctcttatttgtttttgtccaagtttgccatttgtttcttgactttatggtgtgttttgctcatatagaagttttaaaatacacacagttaaatctatcaatttagggaagtcgttttcatattttgcttaggaagacttacccagagccaggattgtgtacattttctgtattttattatagtattttatagtttattacatttggctctttaaaccatttgtatgtttacagagatttatcatgattttctcagtaaatcattttttccaactgtatgttaacattccttcttttaatcacatactaagttttcatatgttcttggatcaattttggatgctattttccattaatcagagattctttaaacctcggggacccataaataggcttcaaggtatcagtgaattccctgaaattatatacataactttcatcagatttgcaaaggagtatgtgattcctttaatggcaaggatcacagatttatagtagatgtttcatatttagtggacttttttttgtttttagtaacataacgtgcagattgtgagttaaatttaggagataagcttattacctgtgaaaaagagaagtttttcaacttcaaatgaagttaatacttcattgtattaaaatgtagacttaattttctagtgagaaatggaaaaggacagggaatccaaatgaaaactatttaactgtgactcgttactataaaatgtcagaatttgtggctggtaaaaagtagttcttcccgaatttcaagagcgcacttgttgctaatattgactggtcgaacagtgcagtgaaatattttctcacataagtgatagaactatgtgcttggtaactttattttctatagggttttagcattgtaaataatatttgttgactgtattcttacatctctatatggatttatgagcacattaggaataatcttttacatggggaaaataattgagaatggattatgtaatcatccattggtgagaattaatgttagtcattatgttcttaaaactctactagactaaacaactaattccagggccaaggttgagactgctttttggaatttggtagtttttacaagtaagttcctgaaaccatgcagcaatacctgtaagatgttccagagaatgctagatttcctcacttctgaaatcatttggaaaacctcatagtagctactgttttgaggactttgggttaataggaatacagttattctagaattggtaattggtgcctcacttagtcttgaataggatgtctagtgccatggagtagtcacc

SEQ ID NO: 54850 - DNA, 1029 bp, Homo sapiens
gttttagtccgttttcatgctgctgataaagacatgcccaagacaacaattaactaaaagacgtttaatagttctacatggctggggaaacctcacaatcatggtggaaagcaaggaggggtaagtcacatcttatgtgatggtggcaggcaaaaaatgagaaagcttgttcaggggaacgcctctttttaaaaccatcagatctcatgagacttattcactatcatgagaacagaatgggaaagacttgcccccatgattcaattacctcctaccagttccctcctgcaacacatgtgaattcaacatgagatttgggtggggacacagccaaaccatatcacatgcttttcctaattttttttgaacaagtggaatattgttataataactctttctggtgctgttgtctactaattctatcatctgggtcatttcttggttgctttctattgatttgcttttctctacattatgggccatattttcttctttacgtgtctggtaatttttaactggatggcagacattattttaccttgctaggtcctggatatttccatattcctataaatactttcaaactttgttttgggacatacttaagttatccagagacagttttgtctttttgaggcttgcttttaagtttgtttgatggcaccacaaagcctttagcctaggactaattttgctccattactggcagtcccttgtagtgcccttcagagtattccacccagtgccctgtgtattacaaggttttgccactttggctgaagggaacactggttgagtgaattcccaaaattgttccacctgcccattttgaatggttcttttttggcctcagtttcttaacacatatacactgagaggtactctgctgaaaattctgtttttagctctgtcctcttcagtgcactgcccggcaaacttcagccgccttgtctttcctaaaaccttgattctcgctccttaattcaaggagaatgttggatccctgaattagactgagttctctctccc

SEQ ID NO: 54851 - DNA, 2036 bp, Homo sapiens
taaatagttctgttcagaggcttctttcctgtattccttccagaatacctttataccaagctaagtaatggggaagagaatcagagggatggtagtgctaatagtagttatattcaatatgttgcatgtatagaaaatgcatatagtttgccctatggtgaatattatcattatagtcctcagatcttcaacgtggcatggcacaattcttgctaaaggtagttaggttgtgctgaacctgtgagtactctaaagtgtcaaggagaagtcttttaaattgtaactcttggcttctcctgtgggaaggtagtgatttgaaaatggtgaattgatttgctgcttatatagcaacttaaaactggatttagagggaaagtaatgtccactttcctaaattccagcacaagttaggaataatccattagtatcaccttatgtttttccattatttatttttaaattcgtgacatagctagaaataagtgatttgtacaggtaagcactcagaaatgactataaagagtgatcagatgatgtcagttgggaaaggagagttgtgttgaaaacccttcgatttttgcttggtatggttaaggatttgaggttaagtggctatgcaagtgcagactaactcttggcatatttatttctaattacaaactacttttgagttgggcttaatgaatgtaatttagagatgttattggttcattgataagcttctgctatgtagtccctgtatgctgtgaagcaaaacactataggaaatgggctaatcaaactagttttatttttttctgctgcttaagttggtagtctgagtctccatagcttgtcttcagacaatgaattgtacatcaaatactctgttactatcatgctttcaaaataatgctttattacagtatgtctttgttaatagtaacttaaaaattgaaatctttagaagaaactaactgcgcagcataaacattcaaactaaaatcttgctgcaaacctgaatttttatagtgtattcagtagagttgtaaattctgccctatttttgttctaagactttgatgattagggctatctgcgtctttcagtttctaaggtgtgatgtaaaaggacattatcgtaagttttcagtgataaaaaatatactattttaaatataggcaggaatattagagctttgagtgaaattgaattactggattaaaatcaataaaatccttcttcaaccttgcatttgattaacttgttcaaattttgtccatgacaaactgaaactggctcaggagtgaggtttgacactaagattcttgaactatatttagatttgatctgtatttaagattcttgatttatattctgtatttgggtgttaagaaagtgcctccaattgccagtatttttatttcaacacagtcttattgcttttcaacacacccacctcttattaactgttggatgttcccagaatgttatacacctctggcagaaaaactcagttgtttcctctatagaaaggctgattagaaagactggcttaacatgattttaatgtattttaatagatagtttctgcatttttaaaaataaaatagaagaaaacattcatcattgtcttctaggacataaatttcttattttccttcctactttgaaggttaaaacaaaaaagcaaacaaagttgtgtgatgatattttagtgtcttgaaatggatttctcagccattaaaataagggatatgtatgacttttgcacctcacctgggatttgtcagtgatactctctgacttgatatgtaccttttcaggtttgtcttatagataagatgccatcgtgtgccctttttcttttaccctaggttggaactttgtgtttaattagtaagccatcatgacctctgaaccttcatttagacaataactaacagttatggagtacttactgtgtgtttataagtgttttatgtgtatagtttcatttaatgtaaatgatacttgtttttgctttcttcagagaattgctgtgaagttaaatgatg

SEQ ID NO: 54852 - DNA, 1033 bp, Homo sapiens
cactcaaatacagaacagtataggctgtacattaatatttattgccaagattttgaggatgactttagaaaagacaaaattcttgaatcttacacagcttcaaacactattaactcaggtaaatagttacttgccattctacaatcagaaattttggtagactgaaatggtggactatgagaggtaaactgtgttgtgatcacctcttttatcatatatattgctgctactttttttcaggaattatagcattattcttaagtacaggtcagccttactgttgaatttaacatgtagctgttgtgtacaatttgaagagtagagcagtgatttcatttgcgtattataatgttttatgtttatggatatctttaaaatttttcctaattagcagtgaaaacattttgaaagaaatgctggatttgttggaagctcagcttgcattttagctatacctttaaaactttaaaaaattcatttcttaatgactttaccaatctagaattgagaaagacagaatggagaaacaacatgaaccttttacatttcacctaaccttcctctatccccacatgaagcgtaataccccataggtggaaactgtcttaaattttattttgtttccaaaaacttaagcatacgttagtctgggcttttgggagttatcttgtagaataagattattaaaggaccttaccattttctaagtagattttatcctaaatttataattgcattggaaaagtgggctttttaaaaaaatttaaccaatgtcatatgacaccatcctcccctattcctcccaccctgagttaccagtttaatttgaaaactttgaatttcccacatatccaagtatgcaagattttgcattgtcctcacataaatgaacaaatcttcaaagcacgaaaagttgagtatttgttttatgtgctcttcatctaggtgcttgtagtaatgttggcacttacaggagaaattaagagatgaggcagagaggtgaagaaaggagtctttaaaataagtgattaaa

SEQ ID NO: 54853 - DNA, 2083 bp, Homo sapiens
atagtaggttttgagagttttgactatgtacatgacgttgaatgtagtcaaaagttggcaatgtaatttttaaattgaattgtattatacattatttcacatttattattcagtttaattctaccttgtcctgaaaaagagttgaagagatacacagatgtgtttgtgtaatgcggaatgggtaaaaaggcaaatgaggtaggaaaataagtcaaagtaaagtatttgtatggatattaaataacttattttaattttgtagcccattttttttgttttgtttttgtgggtagtgaggtattaaagtaccaaaaagatctctatatgtaacccttacttcagattctgaggtaatttggagtgatagcatttttgcagccttttatttaaggagccaggaaagcagatttcatacttgcattttggtcacagaataaaagtgaaagttttattaaataataacaaggatagtttgggaagatgaggcatctagtgataagaattgagttaggattttgtgccgtacatgatttatgataaagcttttcttactatgatactaaaggctttgattgtaagttcaagtagttttcaatgcagaatccatcagtgtggaaccttatataatgattgttgagcacattttgacataatttaacatcatgttattgcttatttagaaaaaaatgcttaataccagtaatctttttatttcttctatcaagtatattttgtttctgagaggattaaaaataacacggtgcattgaagtgatatttcttggtggtttttaatttaagaaaatctgataaagtagtttataacttttctttcttctttttgtagagacaaggtcttgctttcttgcctaagctggtcttgaactcctgccctttaatgatcctcccatcttagcctcccaaagtgttgggattacaagcatgagccactgtgcacagctagatagctaagagaaatatggattaagttgagtattataagttatggttttcaaatatgatttaaaataaatattgttagactaacattaagggctaaagtgaaattaccaaagcacgtattaaagacaaatttggggcgatatcacatgttctcacatatgtgagagctaaaaaaatttgatcacatgagagtagagagtaaaaagataagagactgggaaaggtgagtgttggggagaatgaagagaagtgggttaaagggtacaaacatgcagacagacggaataaatttaatgttataattctcctggttgttcatgatataccatgtaccatttcatataattcatgtaatataccctcttattttataggcaaagcaacagcagcctaagtcttgctgggggataaaaatatttctgaataaataaagtgatacataaatcatataactttgattttaggctagggtcatgatcaaatacattgatttgttatttgtaaaattaaaattactgatttaataaatagtggtacctgtctttttctctgtctgtattagaacagcattagtaataggaagcaagcaggatagtcactaaaagcacatgcagtgtcagaaataagaagtgggatctcttttcaaggggaggagacagaagaaggcaggagaagtacagcaatccaggttaggttattgtggtaaacctgtctttctcagaagcttctgagcacaattctgaagaaggtaacataattataatgtgctcgtaaaataatggggcaaaaaaatattcttcaaagtagttaccttgaggaagttatacattagaaaatataattgctaaaatattttgaaattctttatgaaattggtttcagaaccttttaaaactgcaagatcatttttgtagccatagattaaaattataattaaaatttttaaattgtaaaagtaattatagaatatttagagaacatgaaaagtaacgcttttttcacatactaataaaaccattgttctttgcaaagttttttcatatggattctttagataaaacttattttaatctactcaggtgtagattttttggtgtttatccctcttgagttctttgagc

SEQ ID NO: 54854 - DNA, 1027 bp, Homo sapiens
taaagcctttttattttgaaataatctttaattcacatgaaagttgcgcagatagtacagaattcatgtgtatccttcacccagttttccccatcatgacagcttatgaaaccgtaatacaattatcaaacacaggaaatcgatggtggtatgatactattaattaaactatagaccttatttagattttaccagtttttacctgtactttttttgtcatatgtatagttttgctattattattgcaatggctttctactacatttctctctgtctctttgcctccttccctgccttctgaagagtaaaaatggtgttaattttcagaagctgctttgctaatagattttaaattctgagtttttagttgctttcattgaatgttttttaaatttttaaattatttttaaattttttctcttcttttcaaaggtactgatcattgaatttttagggatgtaattttctcatttgctaaaaatgttatttttgtttctataacatgtcattgcattggctaggctagatttccaaattatactttttgtgcctaatttttgtataatagtcctcgagtttccctttaagagaaaaattagctactgtgtacattattagttgatttctctaatatctgacattaaaattaatcattgatatgcaatgaatgctttaccaagtttcaggagttataatcatttcaaataaatcatgtaatttaacccttacaacctcctaagataggtgtcaatattattcctgtttacaggtgagtaaattcagttgggttaaatgatttatttgttcaaggtcacatagtttaggtaagaagctcaaacctgagttttaggtttcttactcattttgcatttaaccgttcttttatattctcttctattgcaatagaaaagatcaattgtaaactattcagatgaatttcattctacagcatacgtttattccatggaactggcattccagaatggagtgaattagggcatggtggctcaggcctgtaatcccagca

SEQ ID NO: 54855 - DNA, 1050 bp, Homo sapiens
gctaaggcaggagagtgggcttgaacccgggagacggaggttgcagtgagccgagattgcaccactgcactccagcctgggcaacagagcaagaatccatctcaaaaaaacaaaacaaaaaaactacagctatatcaaagcccctggtacctgctactgaacctgttttcctctgttctgctcacaggtaactgccaagtagagtttatctttttcagaaacattttcagaaaccaagtcaatcttttaagtaataaatcaaaatgagtgaaatttaggagggaaatgtttatgagcagaagcttaatactgtacttagaggttataaatagttgataaaaccagttctgcatctggattgttttcatccttctgtgtttgactattcagagctaattgtttaaagactttcctaataaaaatttgaaaatgcttgcaaacctaggctataaggagacacaaaggattaattctactttgttaaaatctactaatgtgtgttgaaatgtgattatggcttgtcgacaaggaaccattggatgaacagaattcagtgtttatagaactagattgttggcaggcacacttaactactgccagcatcactcaaaccagccaactctttcatctttagtaaatactttgtcaaataagttatcagtctctttaaaatttagataatgaatagaattcatttagatgttagttaacagtgcagttaaaataggctatcttagattatctttgttcttctgttctatttggtttagattaaaagtgctaaaggaatgctgaagagggtggaacaacagcataaacatttttgagagggtggaatagagaacataaacatttttggagttctaaatctaaataaaattatttcagaaataatgaaaatattttgtattatttctgaggaaaatcagctttttggggggtactttttctgcagcactgtttagctatttttggcaaatgaaaaaggtattggggtagagacagagatttcctatttgaagttgaggcaatgaataactcctttcccct

SEQ ID NO: 54856 - DNA, 1937 bp, Homo sapiens
aatttaatttattctcttccaaagtactcaaagactttggtagagaaaaaagttttatacgcatattttaaaatcatgttactttccatgtgatctaaaagtcattttctgtggaaaagagatcagtgttttaaaattatagctttttctttttttttttttaagcttttcctattttggtggtaggcaaaggaagaagtactgttgtaatttatagtgctcaaaatgctaattggctgcataaaaaaaggcaccttaatttttcttttctctgattgagataaaattatttggtagctcttagaaagaccaaaggctgaggggaggaagctgaaatgatgacatatagctatgtagctactaatatatgtaaatagaaattctgaatctgtagataatctaaatgagactgcttaaagggaatggcagagcttttgactcacatgtagttagtgtagttaataaaattttgttgatatcaagatggcattaaactgttggataaattctaaatatgtgttcaatttaaatctgaggtaatttttacagtttaaggcattgtttattttataccttttaccaaatgctatgatatgcttttaaatgtaactgatggcatttagtaaatctttatatgtatttaaaagcattatcaatggaaaagtttataaattttgttctctggttatacaactgtgagagcctattttaagggtgaagtacaggggctagtaactaaaaatcacgacctttctactggctatttctacaggctgtaaattttggccaaatactttggaggatttaaatagttctcatgagattcagctttacaaatccaaatttaaagtgccatggcaaatgtatctttggtattttttgtcctaattatctagcataaaaccaaagtgtacatttattaaatgcattatgattattagactgaattgctgcaatttacgtatctatagcagaaacatagtttggaataatagatttaaagtttctgtttctattcagtggcagatgttaacacattctaagttggaaaccctcatggtaatagattttgattgagaacttgtcagtcattgtagcagctgctttagaccacatttatatttaaataggagaaagtgatctgtttagaatttttaaagttgttgccatggcaaagtaacttgctatttcatctttttatctgccatcgaagtgatctgtctggctgcttattcccaggagtaggggggatgaactgttctgttggaaagcttatattaggacaatgctgaatgcttcctaatgggatataagttagaaagactaaagctttcagaaaccatggctttggttaggtataattagaattgatttttttctcaattaaaaacaggcaagataaagctaaaacattttttaagaagaaaaatatgagcttaatttaacaccacttttgacaaattcaatgaataacatattcaaattaaatgctatgaaaaagaatttctttgaatgagtctattatttctgtagcatgaaacactttgtaaatccatcttttctttataaaattgtatatatatatatatattttaaatgcccagtgtctcctgctgcccattttttttttacttgttctcttgaaaaccatggcagtgggctgggtgtgatggctcatacttgtaataccagcactatgggaggccaaggccagaggaccccttgaggccagaagttccagtccagcctgggcagcatagtgagactctgtctctaccagaaataaaaaatgtgccttgtagtcctagctacttgagaggctgaggtgggaggatctttgagcctggtttttcaaggatacatgagctatgttcacaccactgtgttccagcctgggcaacagagagaaaccttgtctcaaaaaacaaaacaacaac

SEQ ID NO: 54857 - DNA, 1026 bp, Homo sapiens
tatacatttaaaatagatttttggaatacatttgaggttaaatttccttaaaaaataacaacaacctatgttgtttgcttgaaaaatacctggcaggagcataaatggcaatcttactctccttagtttagagagatttcatctgtaagaaaaaattttcaaaggccaaaacttctaaaccttttatgatatttttactacatgcttgttcccccttactgtaccttaattcatggtacttaaaattttaatctacagcaaccagccaaagaaaccaacaatttctgttcaactagaaggtaggaattgacacctgtgtttttgttttttgaaaaaacacaaattattcttcttttataaaatcacctaaattgtgtgagctttgcttgacatgttaatgtgatcattacctgttagtaatacactaatgagcttggcctctttttttttttttttttaatctcccacattttccagaacagccccaatttgttacaatcaggattattttatctgctgtatttgctaagtattattttactctccttcttaatttattttattaaaagtgattttcttaagtatgtgatttaaggtttatcagtgggttttattttcaagtaacttcttatataaatatttatctatgtaaatttataacagaaaaggccttttctggactgtgttttgttacagttttcttagttatactttgtcagcttcagggctgcattaagttccactaggttggtatcttattgcttgaaaattgttctatcgaaacgtgctattaaccagccagtcttccgattctctcacttgtagtaggcagaataatccgcctccctgcaagatgtctgtgtcctaatacctggaatttgtggatatattaatttacgtgccaaaggagaattaaaataacaaatgacattaaggttgttaattaggtatctttaaaataagattattttggattatctacattgcccagtggtaatcactagcatccttaaattgtggaagagg

SEQ ID NO: 54858 - DNA, 1050 bp, Homo sapiens
ctctttcaaggcagtggcatgggggacttgcttaaatagtatcttaacaaaaagccagaaattctatatagtgacaagacaaaaaagatttatcttcaggcttccaaaaggtggggtaatatgggaacacatatttactactgctgtctctgagctgataagcagtgttgcaaaaggggcctagctttaggtgagaaaggcagcgagaaggggtgggcaaagtgtgcccgttttgttaagcttttaacttaaactaaaatccccagtattttagagaggaaaattttgttttcctccagatacttaacagtttataaatctagtgttctaagaagtatgttaaaaaaaacaccttattcctgcttccatgtgaattatattacctatgaagcatcattgtacatttatgtaaattcacatttgctaaatcacactgagggaaagcttaatataatcatttcatcattatataatccattcagtatgattgcatttcctcctgatgcaatttgataaacttgtgtttgtatagctgcaagataatgttccacagataatgcagttttatacattttattttcaatgctttttagtgggtgtatgtgtatgctatgtagagaaattagatgaagtttctcttaacttcattatgggcaacaaaattccttggctttgttacagtttactaggccccatagtgaaaacacctctgagtgtaggccaattctagaatacaaaattacttgtgatcagagctgtaatatgagattgaaatttgttacacaaagaggttactatcctttttttgaggataattaaacaatttgtttctttaaaacaaattaatagtgattgtttcaggatagtataaagtacaatttaatctttaacagtgagagaggctttgtagtggggtctcagtggttaagtccaattctgggacaagtaaaaatgttttagggtcttattacagaatgaaaactatattgtttcttaaggaatttaatgaactaaaaaacatttttgcttaacactcttgatttgtagtac

SEQ ID NO: 54859 - DNA, 1067 bp, Homo sapiens
gcatgtttaattaccttggtgtttaagagctctgatgaatattaataatttaccaggatttgatctggaattattttcactctgtgatattagaaaactcttaaaaacaccaacattatgttttatttctgtcactacatagcaattcctgggcaacatagaggtgacatgaagagtaagagagaaaggggattagatgtcgacacttgggattgagctgttagaaatagtatgtttgtctaaagagaggaaatgaaattttttttcttttttctatgcataagaaatgaaattttgtggggtaggtgaggagatctctggtttgtgatcttctttattgacttaatgcattctttcaatatctataggaagttatgtcagtaactggtagataaattctggcattacataccaaacaggagagacaagcttctgccttcattggagcttatattctctttagggatagcaaaaaaaaataagtaaataagacaatttcattgactagtaagtgctatgccagaaataacagagggtagagtgataaagaatgattggtggagtgattttagattcagtgctctggtaaggtctctgaaaaggtgataattaagatgatgagaaagcaccaagtggtggctggtttcttaaaatgaggtattaaattacctagatcaacatattggataaaatatataatatttaaatgctttaaactcttaagctctaaaaagatagccatttttttaatgatagcctgtaactaggtagggacagtagataaggatggtttaatgctgtgcagaaaaggaaaacgaaatggaaagagatttttaaaagaagtaccaaaggccaggtacagtggctcatgcctgtaatcccagcactttgggaggccgaggcgggcggatcacttgagattgggagttcgagaccagcctgatcaacatggaaaaaccccgtctctactaaaaatacaaaattagctggtcatggtggcacatcccggtaatcccagctactcgggaggctgaggcaggagaatcgcttgaacccgggaggcagag

SEQ ID NO: 54860 - DNA, 1058 bp, Homo sapiens
tgcctttcataagtatttgtgttgcaggtacatgtagcccatcttggctggagatggtccagtctcatactgtcccccaaagcaaatgtaagcctctacagatgagacatattatcctagacctcagtgaacccctacaattacattttccagcaagtagtcaaagataacaaagcatatggagaaacagacaactgaaggagaaccagcaaaaagagacagcagaattggaattccatagacttgggatattaaaaatattagacacatatttaaaataactatgcttatgaattataatacatatgaagatatctccaaggaaatcacaaaaagcagcatagcagatttgaaaaggaaccagacaaaacttttggaaatgaaaatcccagtaactgaaatttaataagcctggttttgtgttgagtactttgtatcaaatgaattctcctactgaaaccttataaacgttaggccatatatatatatacaacagctatttgaaagccttggagagcagccggtgtaggttcgacttgagggtctgtgattcttgagaaaagagaagctcatgaagtgatctccatatttattctggtcttttccttgagggaattttctaattctcagtgccagatggagatcaagcaaaaagaaggagttttacatggctaaggagcccagagaggctggtaacggaggcctaatcgtgggggttgggggtgagaggagaactgcagagaactgaatattctgcacataatatctgcatataagttctccttcaagtatggtagtttaatcactacccaggcccagggcaggatttctggaaacccatctgataacagtgactttgaggcttaagagctgagcagaaatttcagcaactttgaaatacagattgagttcgaatgcataagataactagtaattggtacactgaagccattatctaaaaagtatatcctttatgatatattcacctgtgtaaattgtgttcttaaaagctaaagatgagagaatttgtttaaagaaatacagtaataggctaagtt

SEQ ID NO: 54861 - DNA, 1264 bp, Homo sapiens
tatcatccccttattttaatgtaatggaaactgacacagcaattaaatgcctgtttctagtatttcttaccaaaaagtatgtagaacatatctctcagcttttgagttttagtctaaagtccagaagctccaagatgataaatttccaaattatgcccacttcaaatagggaataaaacttggactaagtggcgtctggcatcagactgcatgtgaatagttttaacgcaaaagacttcctgttccaaaaaaatgatccaaagagtagaatgtagttggtagtttgccctaatcaattgttggggacatctagagttgtgcatttgaaagcttgtaagactttgcccagtttcactctatgcatgttttctactattgttttctttatagggcatgacagtcatttaccttttatagcttttgtatgcttcagctatgtagcacagtgggaacatacacaattttgcacttgggaaagtactaccctgttttctgggttataactactgaaacaattttaccagttctaccctcagtttctgttgaggagtagccaaacatgcctactgttctagagatatttaagataccagtccctcagaatcaaaattaatgcctgcagtatattggtttccagggtttgttgctttgtagtggtcaggtatccagaagcttcatcttaagtataatggaagaaagcttttgtttttatacaagtggatataaccctgataatgttgtatatcactttgagaaataggaaaaatagctgaaaaatgagagcaaaaatattttaaaatctttatttttccaaaatgccaaaatgttgtgtggagataatcaggagaagagaggtgctgtatgtgaatacctttggatttactgtacacaggctactcctcataatccattgcttatctttttgaaccaagttcctatctccccaaaataccatgtaatcttcgggttaaattttgttaatattataagtttcaaatctttatttacttttgggggataaaaaagtctgttgtagtggttgttttccaaattttccttgccctgtcattttttatgtgggctatctgcgaaggagaaaatttgtaatctaaatttaataaaacttcaaatatttaaatggtttctaaaagtccaagacagttttcctctgaaaattaaaagagccttctagaactttagagctcagaattaaagaactttaaaaataaagtattacttttaaaaagactgtttatgaaaagtt

SEQ ID NO: 54862 - DNA, 1265 bp, Homo sapiens
cctcccaaagtgctgggattacaggcgtgagccaccgtgcccggccggactattgtatttttaaaataacaactgcctctaaattttttggtaggtgagataactttgtatgtagctactatttagactgttaaatgttaaacctagccaggcgccatggctcacgcttgtagtcccatcactttgggaggccaaggcttgcagattgcttgagtccaggagttccagaccagcctgggcaatatggtgacaccctgtctttacaaaaattacaaaaaaattagcagggcatggtggtgtatgcctgtagtccctgttacttgggaggctgaggtgggaggatcacccaagcctgggaggttgaggctgcagtgagctgtgctgtgattgcaccactgtactcaagcctaggtgacaagagtgagaccctggagactttgtctcaaaaaaaaaaaaaagaaaaagaaaaaaaagagttaaacctctgtgtctcattcactatgtagtttgttttttttacacaaaagtctatttttttcattgcccttttgaccaaaaagttaaaaattttcccccccgctgactaccttgtataggtcccctttttggtcacctacaaccctgaaaatccttgactcctgatcggacgttttgggagtcatctaaagccatttgggaatcattgattagtctagaatgtagatatggaacaatggctcttgcaactttttagcagtggaactatttaattaaaatctgtcatagaaacttaggatgtataaatgtacaacacataagtgaactactcttctctcgaagcaataggtgcagaggttggatttgggccctatctacttgtataagcaaggggtgcgtgtggcccacgccctgatggctccacagatcccagtccagactagaagatggcgtctgtaataagtgatgaatcaggtgaagaaggatctttgaacagggaaagcaaagtattggtgcctcataagttttgaagaaacccttgactggctgtgattaaagtagaacataagattaagtcaaaagctctttaagatgcattttatctgttttgtgttaggtatgaaattagtttaggctaagattcaggagaaaaaaatagaataatgtttacacattgttaaacattagtattcatactaaatgggattttatgtgcagttaactaaagctaaaaaataatttttgaatgtatacagtattcatgaacaaaaaccagttagtttttgttt

SEQ ID NO: 54863 - DNA, 1008 bp, Homo sapiens
ccattccatggtcccagttttgacctctgcagttaaaagtttaagcctaatcagctttccacaggatggcagttgcatgtttaaagatagttatcatgtccctctggtaagatttttttttctttgtatcaatatcttttaaagttgatatcttttgctatgaatctcaaattgagaagggttgcttatcatagtgtgaatacccttttgcccacgcagaggcagaatcctcttctgtacatgttggttttgttatttttcttgagctttcaatattttgtcttgttagctcaaggttggtgtaccttatcctccaattttcctaaattttcaaataaatcaatcctggtacctttttaagcaaataaaatatttaatctatttttgttattttaactaattgactcttaaatcattatattaaattataaagtaaataaaggtatagccagtgaaaaaattaactacaataaaagacaaaattgagtgacattaaacatttagtgtataaataaacatcagtgatttacattgttggcaaaataataacactgtaaacatctctgtagcaattgtggattcaataattaatgattaaatgaatgtatacattttgaatgctcttcctttatatatcatcacttgttggatacctaagtattcagttggccttcgtggcatgtttaagagattctcttttactaggtgaactgagatgctcctaaattataattacatagtgaaagacctcacatgccaatccttgttctcctcagtcatattaccaaaatttggtgtactttgaaggattcgcctatgataaaataactttttagaatttttttaagaatcagtgtgatggaagaaaacagtggatttctgttagtattttgtgagaaatggaagattacgttactgttgtctctacttcttccatgtaaagaaaatatcctcattacatttttgagtgaaaagaaagatttatttctagagccatatttttgtata

SEQ ID NO: 54864 - DNA, 1078 bp, Homo sapiens
ttaatagccaaatggttatagattttagttaattagaatggttaagatgaaaattctgaatgaaataaattgaatcatttctttatattgatccattatacatgaaattattaaagcttaagattgccatgtaaaggtaaatcatgctatgagtattctaactaaagtttgaatcattttagtcatttcttctcataatataaacatgctatgattaatctaaaatttatttctaaatatttgctaacataagataatagcttaatccctttattagcaataatttttgttcactagcagctgctgagttagagcgataaggacaagtcactgttaactttctgttgtagaattcttctagtcctttcattatacggctgctagtactttttttctctacagaatggagtgagtgaaatagcagtcttataaaagagaagatattttagactaagtgagtaatgctgtccattgcagtaggaagaagggtcaattttttttcttacaatagcataaagattttttggtcaacaagttctgtatagattatacctaaataacctcttaatttcttttcttaagccctgcagtcataccagaagcaaatgaaaatcatttagaaactcagatttatcagtttatgatactacttgttctagttttttttaaaaagtttatattcaagaatatagttcatacacgtactttcacacacacatattcatataacatcctaagagatccatgtatatgtgtacatgcattttctatttatctttatattttgtgatgcttggcttcctaacatatgattaaaaatatctaccaaatatttaatttgtagctcctgccaccatttctacaatggtgggaatacctagaggcatggcccctaagttattatagaggatgcatagaaggacatacactcaagcactgtgagagcattatattggtaattatacactcccagcatagcaaggctggttaaaatgtgataggagaaaccacctcctgtttcacttcatacctgttactttctactcattttttttcctctcaaaatactttgcactcc

SEQ ID NO: 54865 - DNA, 1103 bp, Homo sapiens
ttatttgcaaattaaagtaaaagttatttttttaaaaaattttatttgtaatttttgtgggtatatagtgggtataaaataattttaaattgtagcatataactaagaaaggtactcagatttcggaattgtgaggaaagaaataatattttaatagaaaattacttacattgggcatcttggacactgcttttggtctagtcttcctgacaaataatttaagtagaatgtttcctgtattaaatctcaagagaagcaaagtcaatttacctgaaattatattgagatataatcaatatgtagagtgacttaaaaataagaaaagtccagtaggttatacagaaattagtctcattacttttcacaactcgttcttagggcaaaataatgtataacatataccatcagttaatgactcatatttagagtttgataattaaattatatctaacactgaagcagaaatgaagactgattgcttgtgtcatgtattgacaaaacatttatacactgtaatattttgaaacataattactgagcaacaatgacatgaatgttttacttaattgcatttgcttcagtatcagttatccagaaactccaaggcagttcttaagcgaactttctaaattcagtagcaagtaaccttttagtccagctcataaattaatgttttgacagccatttaaaatggcaagtaggtaaatttattaggaaacaatgcaggataaaattgaaaagacttggagtgggtacaactgtttgtgtttgactggctcaagaaggtttcacaagccccattacagtaaaaattcctcataagcagtattttaaaatattaaaatctacttgctaattctctagctaccaagctacgaaattcagaaggagttgtgttgtgttgttttgttttatttatttattcgagacagggtctcagtctgtcacccaggctagagtgcagtggtgcaatcatggctcactgcagcctcgacctcctggactcaagtgatccgcctgcctcagcctcccaagtagctgggaccacaggtgcatgccaccacaccctgctgatttttgtagtttctctagagatgagattt

SEQ ID NO: 54866 - DNA, 1049 bp, Homo sapiens
aaatacagttttcagatcctcagccctaggatcacaaagcagagtataaaagggtaaatttggaattaagacacaatagcttgacaaatgcacagagacatctgtgtagaatatctcatattttaacaccaaatttatgtatttttcatatagaaaatttgcattttaaaatgtttttgtctagaaggaatttgcgtgtacatatactttccatcaataatttaagatgtgttcctttcagaaaggatgactgagttcactaagaattccacataatttgcttttctccccacaacccccaactcttgctgaaaatttgatataaaccctcatgaatctctaggaaaccttttccttctttattgcatgtgattcttccaggaattaagatttgcagaatgtaacatgaattaaaaattaaatttgaaatatttgcagtcatatgtttattgttactgagtaaaattgctagtgtggcttcagtttcttgcagttaaagcagggtggacttgtagagctgaggctgtttctatgatttaaaagatactgtgttaaaaaaatatattcttattcttctttgctaaagtgagccaatagattgcaactgtatttttgattaaatatagtttgatatttttgcaaattatttttttaaaagatactagtattcacagcaaatgtgcagacgtaactaagacatccccacacctctgttacaactagatatgttcattcgattttggtagttatacagttcccagtgaagtcaccaatgtttattggccccttccttcactgagatacgttcatgggttctgatgagaaatacttgtaattattctaagagcatgctttagcatgcaaccttggtaaaaatatggtaggatcatactcttaaaacatcttttcttttgtctgagtgcaggcattaggtaaattatgtcacacacagcactgcagtgatttatagaagttaaataaatgttcgtaagtaatcttaatacctttaaaatattttgggaggtaaggttttacattatgaaaatatt

SEQ ID NO: 54867 - DNA, 1888 bp, Homo sapiens
gtgaggtgacagcctacactttactgtgtgccaatccttacattgactatttgacatttcattaagtctttactaggttaaggattaacattctaaaggactgaatcatggctctagtttgatcaaggctccgtttttacctgaattatataagacaattatgttacctgttcttaatgtgtcatattaaccacctcttcaaataaagaggcattgatcttttgtgtgttctccaagaattatttacctttcctttttttccccctttgtaagtaggaaagaaatctcatcttaggaaaaccacagagaagaaactccccactaaacaaaccattgcaaaactacagcaatctgatatttggaaaatggagaatgagttctatgaatttgcactagagcagttccaattcatcagagcccatgccgttcgagaaaaagatggagacctctacatcctcgcacaaaactttttctatgaaaagatttaccctaagtcgaactgagtataaggtgtgactattggattcttgaactaaaatttgaccctgtcttcacctttgttctcagctccacagtctggattgctgacagtaggtgtatatgacaatttgtattgagccaaattaggaaacagacagtaacgtcaaggaagtagatactggctggcattgtcagtgttctaagtttcaggcatttttatttttcctggctaaacgttggtgaaagttataacctcctgcctgggagaaaatatacatcacctaaaatgaacttatggcaggtctaatcaaaaggctaaatacaatttcagaaaaggttctgatactcttgtttttgataaagcattttttcaactaaccatgaattaagatgagtccatttgcctcttctgccttcactgagggtttgggttatacacctctactgaattgtgttaataactgtttggcagtgtgtactttgtttttgtgagtcatgtctcatgaaatttattggaatgtttaatcatatttgctaagaaatgtttctgctgtagttggatttgcccatatttatgtaggtggttttaattttttaaatggtgattagtgttaaaaatcaatttaaatcatgactaatatggtaaaaagataaagcatcaaagcagtatttctcattcctgcctcctcaatatctaatactgggaagatacttcaaagaatattgagattgtctgaagttttagttaagattttcacacattaatatcaaaaaagtaagtttagtatttgtttctccatgggttatttgtaaagctgtaaactgagatatcggtgactccgtattatgactccattagtgagctgtggtatgggtaggattttcctacttcttctgtacttttacctgtagactatttttactaaggtgctttataatgtgttttaaagcattgcatttacaaaacaaggaaaatgctgtaaatattgcatattttatgtatttggaccaaaaggttacaagtaattagacaaaagtggttttgcaccaattttatgtcaagtaaaaccatcagacctactgttcttgtatttctcatttaactttactgttaagacatcactgaaatgaacttcagtaagctttcaattttgatacacagttcattattcataacttgaggcagtaattacagtggaatgagtactggacaaggagtcaaaaaacttgatttcaggtcctagctctagcacttacagctgtgtgatcttgggcaagtcacttaacctctctttgcctcaatttcctcatcttgaaatgaggataataatacctgctgtacctacctcacagggctgttgtgaggattaaatgagatggcatgtgaaagcactttgaaaattgtaaa

SEQ ID NO: 54868 - DNA, 1045 bp, Homo sapiens
gaaagaatgatttctgcgttaggaatagcaatctggacacctgccttccaaacccaatttacaattcatttactttttagaagagtaattttacaaaacattctgtaacttcataagagggcatttttgttcattggcggtaccataacatttgaataagttatggcttttaaaaccaagttcttgttcttgctaacccgcttagtgccattaatagtgccattagaaattatgtatcttgattcttgatccacaacttgaaaatccttgtaccagaattaaaaattaggaaattatacaagtatacaaatcatgtagtattagaagatattccagagggaaaattggtgatcaacagttgtccagcacccccagtactggatagttttagatctattttaatctccttaataagtcctatagctatgcaagtgagtgcattttgataactgctgtgcctaatttgtaacaattactgtcaaccttcagttaagagactgttcattccacaccggcccagaaaagagtgaaatgtatgactcgtgtgcataattttattcacatcatatttcatactgattatgtattgatgacattgattcatttactctttacagcgccacttgcatggatattaaatcttattgaccacagatgaattttaatttcagattggtgatagatttttccatcagctctgatagtatgtttgactttttcatcattaacccaggcaatcacacagcactgagttattgcattgaaacaaaaagtgcacacttcacttggtaattctttatggatttacaataggaacttcattaatgtctgttgtaaggatcacaaaaaaaacaacatttatctgcaaataggaatttagcaagcttcaaaaatctcggggaaaaaaatagacttttttgtcttctgtaatgcattttcttagtgcggtggtggaggtgggggtttgacaaatatttgaaaacttttaaccattaaaattatgctgccatattttgatgcttatatttgcccttttcccttgctc

SEQ ID NO: 54869 - DNA, 1052 bp, Homo sapiens
cccactgctgggcaagatgttacattccttttggaaagacacttgctcttaacagagttaagcaattaattgtagtactttacaccagaaactttctgagcgtccatttactgtctcattttctttgctagtaaaactgcagaaaatgttatgctttagttcttcactgccagagtaagtagcatagaaagcctctatcaagtcacagttggaaagtaatctaataaaagaagattagtgaatgtggggaagacaaaagcagtcatgtttgagtttaatatctctcaaatttagcattttagctaagatgcccgtttttatttcttgcaggtctgctaaaaggtcagagtaatgcagaatgcgtgccttcatctcagatttgttcatcacaggtggatcccatgtgtcttcagtagacaagtcacctttgtagctagcaccagtgccagctccatgccattgcaccttctttagtcttgattgcccttcccgcatttattggtgtattaaaatgactgaatatgaacattaaggactccatgaacctgggctaatgggagactgtagagaaaatgaaaaaagatccaccagaggacatcttggggagggggagggagctgggggggagggaaatgactaatgaagctaattaaaagaagcattcaaatctgctttctaccctcattaacaattagcagggcactggccagagtttgtaccctgtgttttaccttaacaacattctatttgctctttgtatatttaagtgttgtaaggaaacgtgtttcaatcaaaactgaccatgagataaaggaaagagatgtggcttttgtgatattctatcacaaacacttattgtatctctgtaaaatacaatgtatgtatgcatgtaagtgtttttgtcctaatgttgctactcccatggcaaagaaaaaaaaaagaatgaaaaaaagaaaaaaatttggaaaaaaaaatcaggctcatagcagctactgtgtagaaaattccccctacttctaatttgctgaatgaagaaaaaaaaaaatctttta

SEQ ID NO: 54870 - DNA, 1051 bp, Homo sapiens
tttgaggtatttataatacatttttcagatgagaaaatagatttaaaagaggaaaatgactttccaagtcacaaagattttgaatccaaatcttcttccttctggtttagtttagtctagtcacaatgcttcctttctatgagtaaagtatattttaaattactaccacccagagacatacagagatgtagaggctatctgtaggtttgtctggtcagcaccataccttctttaggggaccaaatgctgccattcatactattctacccttctggtcactggagtatgaaaatgatccatttcaagcccataatactactccaagctatttcaattttagtccttctggaggatttttcaatttagaggtaaagagggttattgtcctttcaagtttcggagccagaaggatggaaagtgagtgtggtctgtttatggccatggaggaagactatcgtagttggagaaaaatgagacaagccaattgtgaggtagaaagatatagagccccaggctgatcacgccgaataggtcagctccatcctagatatgttgaaccatatgaaattgccatttttttgtaggtcaaaaatggctaaatatcattttcatttggctcaatctaacatgcaatattatccagaatcttaagaaaaatttccagctcaagactctcttgagataaatgggaaaatgagggcctagaaatgtcagaacactagctcaaggttagtactaatgcaggttttctgaatttcagtctagaaccctgtccattaagcataatgactctaaaattttaaattagtcactttcggctgggcgcgttggctcacgcctgtaatcccagcactttgggaggccgaggcgggtgggtcaggaggtcaggagatagagaccacggtgaaatcccgtctctactaaaaatacaaaaaaaattagccgggcgcggtggcggccgcctgtagtcccagctactcaggaggcggaggcaggagaatggcgtgaacccgggaggcggagcttccagtgagccgagatcgcgccactg

SEQ ID NO: 54871 - DNA, 1021 bp, Homo sapiens
ttagatagcctagtatagtatctcttacgtagcagatatttgtgtgtgtatatgtatgtgcaattctgtatgtattacagaaatttaggttgttagctagggactccatggccctcagaaaattaggtaagcttgccttgaaggcccagtttcatagcctctaaagtcaagagcctcttttcacctagtccaatttttggaccctgaaaggttattcacaaatattgtcctccttctctcttcctccacatgtattcccacaacactcctctatcacctttgttctttgactatgcctatattgatagggatcagaagcccagcccgtaacttttaactaccaaaaccctctgtcttcaagcatttcatgaattcattaactttgtaccaaacatttaagagggatcacatgacaggatctgatgcctttcaccccaatgttgggtcttttgctcttttttcaccctcaatacattaacaagcaaatcctgctcctttccctgctacagtttgatcatactcaggtttttctgattctcagctgttatcccaaataagattatttggacatttcttcaaaatataaactgttcttttgaaaggggtaccagaaaataccattttttctaacttgggacctaatcaactgaatgaatgctaactgcttgagttgtatgtatttgaagtaatgaaaagaaagtgtgctttaatcactattgagaagttgaactttttattcttaccctcagtgttatatattgaatattgtcctctacaaattcatatattgaaatcctaacctccaatgtgataatattaggaggtgggggcctttgggaagtaattaggtcatgagggtgaagaccccatggatgagattagtgcccttataaaagactctccagagagctctcttgctctctttctgccatgtgcagatgcaatgagaagtcagcagtctacaacctggaagagggccctcaccagaacctgaccatgctgcaccctgatctcagacttc

SEQ ID NO: 54872 - DNA, 1045 bp, Homo sapiens
cctactttcctgctgcgtttaacggcttcactgtgaacgctagaactcgggagcctgctcgctgttgttttttcgggtttcgttttttttttctttcttttttttttttcccagttccaccttgccgaaacttgggcctaactttaacaggcccttttctaacctccataacccaaagagcttcgggactcagatcttacagattattcctctgctctccccttgacccccacgtcaacccaaactaataatcttgccttttgctcaccctcaaacccagcccccagcgcgccttctcgaccagttaaggtgcacagctagctaaacgggtatggtctgtacttttcatgaaatgtaagcggctggatccctggcaacttttaatgtacggcctttaagatgtctttttcttgaggttgaactactgttgcttgtactggagaactgtacagagctgagaattagctgggtttttttgggttgttttaactttatttaagggagggggaggtgggacgggattaccctcgggaaaggaaaaaagccacctttccttggcgtggtaagcattaaagctaacctgactacttagtaaaatatagctaagtaaagtaaatctaggtgtttgtttttaatgacactatggtattaaggaatttcgaagtctcctacaggtagcttttgtttttgttttgtctgagcagtgaatggataggtaaacgcgtaacttttgattttttgaagctgcggtacaatacctttgttaaaactacctggagagagtggtaagggttatttaggtacgttgctacttagaaagggcattcgttgacatatttcttaggaagtgtaacattatgtacttctcacacgctccatgtaactctgttggcctgatgccaggacttaacgtctatccttttgccttctcaagtctcatacatcaattcagcaaacatgtattgaagatctggagttctgtggccacagtttctgaactctaacttatcatatgtgtgataaagaatttttctggtgtgtactt

SEQ ID NO: 54873 - DNA, 1081 bp, Homo sapiens
tctcaccaaatgtttgcttcacttcagcagccctcttcaggtgacagagtttctttcctctattttgagggttatctttttcttttcttttcctttctttttttttttttaaccgagtgataaatacagggtgcctttctctgctacccctgcccagatccgggagctcagatgctgatgcttttcagactttcattttccctctcatttgagcaccagagaaagagctaataagttgtttactaatgagaaagcagtcgactaagggaaaacattgggcaccacatgtctgcaaaagatgagagcaaagtagatcgcttagttaagtcatgtcgagtagcaatgttatttcccatttccagataaatatttgataatgtaggcacgattttctttagatctctatggtgtacatggggacttaagctaccctgtcgggtttttcattacttgggagtgttccagagatgtttgttttttgacttaaaagttattttgctttattttaatatagttatcttttagctactcaaagattgtagatgggaattaggagaaaaaaatagcatgcctgcatttctttttgtgtgttggacagttaattttttttaaaaaaaagactaaatcaagaaattctgaagagttgatgtcaaaattaagtattgcaactgcatctaaatttcttgtttaaatatactttttaagaaatctctttataagtttggtttcttgtgcagtcagacgtaagcttgaaaactttggtataatggttgatatttcctccacaaaaatagagactttaacaatgtatatcaatgcagtgttgcacatttagaatcctttggtaatgcaaagctgaatttcatataattgaaaatgttgctatgtagtattttaattacagttagccttttataagcagatcttacagcataccacatttgctaaatgaatggaatttactattttattaatagtaaataatttacatgagcttttaaaatgaagatgatgtgaggcaagtcagaaatactttacattgcctggtcttgaaccatgaaaaacatactttggttttgat

SEQ ID NO: 54874 - DNA, 1035 bp, Homo sapiens
attttcttggtttatttgactcccagttttgataaaagttattgcatttaaactttatcgtgtttattaaaatgtttgcgactattacttatatcaacacttaaagataaatagtcataaagtttgcttctccaaatatttccatctattcagactttttatttcattgggtcctgaaacttagtgtacagcaaccaagtatttattaaacttttgtttcaagattcacttttttaaaaagcttctaaattgtttgaatttagactgaaatactgtttaatatgaagttcttaattcttctctgccatacagattttaagtatttaagaagttttgtagccagttttaagatgtatttaatggttaaaactgttactttgctatgtatcctgtctcaggaatacttgtttactctgaaagttacatattacaacctggctttaataaaattgatatttatttagaaatatatccagcttttcattattttttcaaattgtagaatttgaaatactccactgcttgagctggaattggcttttggtcatggaaaggcaaagtaagaaaatctgaaactacagtattctgtcttgttaattactgtaatagcatggagtaatgtttttaagtattgttagtaattcaggaggcttattcaacaaggaagcattaataaactatgtaaactttggtggctagaggtttcaaggtataaggaagaatatttactgtagtaaaaataaaaatcggctgtttaaaatggccaatttctaatttttatctcataactaatttgttgtgttgtattctctttttttatttgaagtatagcagaaaacagacatttttgcaatgccaaagaaactaaagtctatttccaagaaacctggattaatgaaaactgtaaagaatctcagaatgaaagtgttggctacaatggtaattttgtagaatgcagaccaaatattgagcagtgtactaacaaagctaccttgttgattattggagattcattttcttcatcaaaatgcccaa

SEQ ID NO: 54875 - DNA, 1264 bp, Homo sapiens
cactgcagcctctgcctcctgggctcaagtgattcgcccatctcagcctcccaagtagctggtactataggtgtgagccatcatgcatggttgatttttatatttttttggagagacggggttttgccatgttgcccgggttggttttgaactgctggactcaagcagtccacctgccttggcctcccaaagtgctaggattacagatgtgagcgtctgtgcctggcctgagtatcatatattttacacattaatcatactgttttcccttccctgtagttgctaccttagggattctttaaggaggtgtttgttctccatttcagaattttcattgaacaaattttatgcaacttttggatttttaaaaaatttgttaaacatcaggcacactgcattggattaatcacctatctgtctgtcaatcattttaataagtactcatggaccaccactccccctctctcaaaacaagctaggaactttaacctacgtatagttttcctctattctatccgtctatttccaccttcttgtcatctaggtcatcatttttgagtcctgtgttcattctcttccttatatagtagtccctccttatccacggtttcagttacccatggtcaactgtggtccaaaaataggtgagtacagtatagtactataagatatttataagtactaagatactttgagagaaaccacactcataactgtaattacagtatagttataattgttctattttattattagttattgttaattgcttactgtgcctaatttataaattaaactttagcataagtatgtatgttaaaggaaaagtgtaaatagagtttagtactgttcgtggttttaggcatttactgaaggtctctcggtggataaaaggagactactgtgtatagtttagttggacatataaatctaaacatcttttagttgtttgtatagaattgtgaatataatctttttgaacttgatttttcacctgttataaataagatttatccacatttttgcatgttgctatagtcattatttaaattgctatataatatttcattgagtaaaatattcattaactctactttggtggatatttggatatttatccactctcccttgttgggcagttattttccattttttgttttgttttgtttgtaattataagcaaagatcctatggacagtctgcatgtttcctactgtgcatgtgccacagttcctattatatacctagaggtagcattgctgcc

SEQ ID NO: 54876 - DNA, 1114 bp, Homo sapiens
ctaatattgcttgtctgtctgaacagcatttgacaaattggacaatccttaaaattctgataagaaaatcatattcattgactatatgaatatatttatatctaataaaagttttacttaagatatatttttgattaataaatttagggaattggtcatgaagcattttgatacatttgcaaattagtctctgattttacagctcctgttattgaataatatatcacttaatatggtaattgttacatgtctctactactttcaagacaggaactaggtcttactcctctttatgtcgctagcaactgacatataggttatgcttaataaatgcttgaataaataaatgaacagattttaaaaaacattatatgaccaatctgccagacctgacttctctaaatttccaaaagctattcttcccctggctgctagaaatctgctagttacttttatttgactgttgcttcagtctcttcagttgtttcttctacttctgtatcttgagttcattcattactttgccattgtttaagtgtgggccttcattatcatttggatgattataatatcttgatattttacctccacctcttttgccttgttctgctgttatttaaactatgtacaattgctagattcagaatttgtccttagcattcagtgactccttaatgcctgtgggatatagtcctaattccttagctaggcaatccaagctgtcattgttgtagccccaaaatgcttttcattcttaagtcttactcatgtaagcagcttattttttcaggcatactatgattagtgatttttcctcacctgtatttttactacattctgtcagctggaatacttcaaggccaaattcaaattttgcatatttatttttttccttattttcccctactcatgttcagtctctcctcaaaacttaagaatattttctatctcatgacatttattatatattgcattgtactgtagttgtttgtatcctacttcattttctcttctaggcttaatgcttaaaatctttgaaggaaaggactatatttttaatcttcatcatttacccctttagccctttagtcctgaagaaagtagcttgcacata

SEQ ID NO: 54877 - DNA, 1151 bp, Homo sapiens
aaaacaaatgataatgaatacatattgatgttacttaatcgttaaaacaactcagttgaggccgggtgcagtggctcatgcctgtaatcccagtactttgggaggctgaggcgggtggatcacctgaggtcaggagtttgagaccagcctgcccaacatggtgaaaccctgtctctactaaaaatacaaaaattagcctggcatggaggcaggtgcctataatcccagctactcgggattgtattttctttacagcttgagagctatacttttattaagcccttctactagagttagccttatcttttaaggaagttaaaataattgtatacagttcctttttttgagttttgtttttctggttgctcaatatgagacttgctcaaggccagctctattgtcagtgcctataaaacgaaacaaaacaaaaaacagcaaagcattaagtattctgactttattttgtctagccttgtgacttcttaaaagagctccagtttactcttcacagttagatcccataaagtaaaatgcccagctattgggtatggtgtggtaatgtataataatataatttgatttattttgggattactgtaactggtttttgttttattgttttcaataaatccgagtttccatctttgagaagcatctatttcatttattgatgactttagatttctagttagctactatatcagaagtacttatttgactgaattatgaaaagtcaaagtttaaattacatttggatagcaatagaagagatggctcaaagtcacacacaatttctaagtgacttgtgcaacagtcattgtaggactttagaggagggagtggtcatttgttttgttttgttttttgtttttttgagacagagtctcactctgtagcccaagctggaatgcagtggcgcaatccgggctcactgcaacctccgcctcctgggctcaagtgattctcctgcctcagcctcccgagtagctgggaatacaggcatgtgccaccaagcccagctaattttttgtatttcagtagagatagggtttcaccatgttgtccaaggtggtctcgaactcttgagcccaggttatctgctgtccttggcctcccaaagtgctgggattacaggcatgagcaaccgtgcc

SEQ ID NO: 54878 - DNA, 1050 bp, Homo sapiens
taggaaatatttcaaacatgtaccaaaaggctgagaataacttatgtctcttttccttgagtaaatgttctgcaaaatttacattgtatttttttaaaaataaacgttttatagatgtaagccctactttttttgacattcttcatcttactgcctactacgtttccttgctgtacagaggaaaatgtggcagatgaagtcttacattcattatattcttttacaagtttttttaaatttaattcttttccatatttattcaaggagatgcatgttaatagattggttttagcgacagtgtagtgtctcattgcattgcatatattataaatctgtttttttgtatagatgattatatgaattgcttatgatttttctcatcacaaacaatggtatgacaaaccttttgcattttatatacatgattatagcttatatgcatctagaaatggaattgctggttctgagcaaacgaatatcttcaagttagccatatgttgattgccaagttgttttccatattatagttccttttccttacagattatattttaatctttttccagtcattttggtaagaaaagatacctcattatcttaattgtatcttcctgattgtaacaggattggtatattttcatttgcttattttccattctggatccattttctatgaattacctggtcatatttttctaaccagaatattgagagaaagcaactcaaatgacattttacatttctttatctcagagcactcttagataatggtgaaagtaatccatatgtaacttatattcaaattaatatggttcttgggtctatagttgttctagtatttttctttccatgcatttttatttgttttgtgtatttgaaggaaacccagtctattggacagtattagtagtatatgggaacaagactgctgtttggttttattcagtagcatcactaacactaatgcagattgttaacctagagaaaaaatgttgaaattattcattattaaggctttccttaatacataaatacctggtgatattgtgt

SEQ ID NO: 54879 - DNA, 1291 bp, Homo sapiens
gaagggaaggaagcatacaatcccaaatcaccattaaaccaaaagttgtttacaggattcaaaatggacataatagaaacttagggttaaaattagagccatattaggaacatatagatcattctaaaaatgtcactgagtaaaaatatacaggttaagaaaattagttgtacttggctagatgtaaacatatcacttgaacaaaagaacagcatacatgttattatttattcaaattgtgtattactccctctttttacaagaaccttaaaaaaaattatgctgggtctccagttgaacagtgccacttctcaattacacattctctttctccatacacatagccttgactttgagaatgtatcagagaccttgcaaagggaatggaaagtgggtatgtggtgtttggcatctgattggatgtggagggcaagagaagggacaggtaaaaaaatgatccttaggattggaggtgggtgattgtggattttggcatcatcaaaagaaatagggagactaggaatacagatgaaacatttgttttgagtcatgctgaatttgaaatcaatagactacctcaagtggtgatgtgtaaacagacagttagaaatgtaaaaccggtcctgggattcaaggtggagatgcactttgggaagtcatcggataatatttgaatcatgatattatataaattagaatatattaagtgccatattagtatagaacataggaatgataagtttaaagaagagattaattgaaggaatcttcctggaagtgagttatgattaagatctgttagaaaagagaaaaattttccaggcctattttttctcctattttatacttaatatattgaggagaaattttgcataagaactacttttattatttctttacattctatggtatttttacatgtaaaagctatcataataattatttgaaattaatgtagctgaacttaaccactattttagaaaagacacaattgaaacacacaatttaaggatttgccatgaatcttgtcacaaaccagttttctaaagctcagcatcactgatcattacagaaatgcaaatcaaaaccacagtgagataccatctaagactagccagaatggctattactaaaaagtcaaaaagtcacagatgctgtcgaggtggagaaaaaggaatgcttatacactgttggtggaaatgtaaattagttcaaccattgtggaagacggtgtggcaattcttcaaagacctaaagacagaaataccattcaactagcaatttcattatt

SEQ ID NO: 54880 - DNA, 1028 bp, Homo sapiens
gagctaagccaccaacttatggaaagagtagcttgctctttatatcaccactgactagaataggatggcgcatataataggtatttaattaatttttgctaaatgagataattttttaggaaaaaaacctgtattctaagtataggatagatgatgtatcaaaatacctatatgccaaaaactgaattgtaatttatatctgatcagactgttttaggccactggtaccccttcccaggtttgcttttatactacctatggtggaatatgacttctgtaggaggagtgtactttcaattatgattttgcatactactaaaatttcttcaagacagtgaagcatactgtattctgaattattaagaatgtaatgatgtatgtgattctttcagacagaaaatactcagggtgtgttataaattattaaaaacattaacaatataccataaaatgtaaagtattttaaattaaggttgtaaatgagaatccatttaagacactaacttgtgaagattccagttgactattacttaaatgatacatttgtgccatcttagtagtttcgtttattttattttatgtttttattatactttaagttctagggtacatgtgcacaacgtgcaggtttgttacatatgtatacatgtgccatgttggtgtgctgcacccattaactcatcatttacattaggtatttctcctaatactatccctcccacctacccccaccccacaacaggcccagtgtgtgatgttccccaccctgtgtccaagtgttctcattgttcagttcccacctatgagtgagaacatgcaatgtttggttttctgtccttgcgatagtttgctcagaatgatggtttccagcttcatccatgtccctacaaaggaagtgaactcatccttttttatggctgtatagtattccatggtgtatatgtgccacactttcttaatccagtctattgttgatggacatttgggttagttccaagtctttgctattgtgaatagtgctgcaataa

SEQ ID NO: 54881 - DNA, 1523 bp, Homo sapiens
tacttgtatttagaacttcatttacaatatttgtgaattatcacagtatctctaaaaggtggctactattattatttagattttgtagactattaaaactgagtatttgaaaagttaagtaacttgctcaaggttcacagtgtaggggttgggatctaacctgggttcctaagataccaaaatccgctatctttacacagcctttgtgtgtagatgtgttcactttattttaatataaatgtatttgtcaagtaatgctacttagtagccagtgagttcttgaatttatgattttgtatggttataataaaagtcagtaagtagttggtctattgcttattaaggagataattaaatatagttaaatgtaatgtaatcaagaaagactctcttaggctgaaaacactgcatatttactgagcagccaactctcctaaactcccacatttgtatgtttattttttctgtagggggattcccgaagtcttccgttttctgagaatgtgagtgctgttcaaaaattagacttttcagatacaatggtgcagcagaaattggatgatatcaaggatcgaattaagagagaaataaggaaagaactgaaaatcaaagaaggagctgaaaatctgaggaaagtcacaacagataaaaaaagtttggcttatgtagacaacattttgaaaaaatcaaataaaaaattagaagaactacatcacaagctgcaggaattaaatgcacatattgttgtatcagatccagaagatattacaggtatagtagtgctttatttgatgtttatatggtatattaataaaaaaaatgtatctttttagaaaatagtaagtttggggacatgaatagtttttagcttttctgaaagtagagagactttttctcttttggttaaggtcttatttatattctgtttagaagggcaggagttgataggtatggaaattgaaatgtttacttagaatttaataaccctaatgtattctctcttactctctatcagtaggacgttacttagagtgagtctccagtattaatgttttgtattgagtcaatcacatgcttttacgtgattcatcctgtaatcaacagcacaagtttgccagctgacttaaagttaaaactgtgttctttgaacaagagatagttttattatttgcaaatgtaattagtcaaacctatggccttcattctttgtgctctaagcaactgaattaacaagtaaactactaggcatagtgttcaaaaaagaaaaacataatagaaaaaactgttacacattacttttattttctttatagaaaataagaggaaaatataacctatgatttcaatataaaaacataatttttaaacaatagaattaataaatatttatgttggaatttttttaatggtacagaaaataaagattgaaaacccacctctttctttcttagaccgtctccttaaaggtaacattactttttgttgtatatccttccagataaaaaattctatatttgtgccaa

SEQ ID NO: 54882 - DNA, 1069 bp, Homo sapiens
tactaaaaatacgaaaattagtcgacgtggtggcgtgtgcctgtagttccagctactcggaaggctgaggcatgaaaattgcttaaacccaggaagcagaggttgtgttgagccaagatcgtgccactgccctccagcctgggcaacagagagcgattctgtctcaaaaataaaaggtttattgaagtataaattacgtatgacaaaatgcacgtattttaagtacatgatttaatgatttttaacaattgtgtgtgtgcacccagctaaccatctctacaatcgatctagaacattttcatcacttcagtgcttctcgtatattccttcccagctaacccatgatccccaaccctggccataggaacccgctgatccatcttctatcactttagattgaatttgtctttcctactgttttatataaagaaattacctcctttaagtcctatcaaattcctgatcacccttaaaaaacaatttttaggtattaccataaaaccttccatgacattctctgctttatcttctctgtgctactttgtccattcattgttgcattgtaatgtatttctgtacatgttatatcactaaactgtctcctccttgaagggagggacatgtgttcactcatctattttcaaggcttattacagaaactgaaacatagtagatgcttacttgggaatattatatctcaaaatagaaaaacacccagcaaatcgcatcttatattagtctttagaattagtatcaaagcctaattattatgacacttgaaacattaaataacttagaaaacaaagacttaaaagttttatgataaagccagaaactttttatactgaccatttttaatactgacatttcagataattggagggcagatgatatatgaaatataactttatactgtgacttcttaatacttcagtttgtttagaataaacttgataagttcgtcaaatttttattttattaaaaaaattctgtttgcaaatggcatatttacacaacttggtaataagtcattttctcttttttccattttactaacttaacaatctaa

SEQ ID NO: 54883 - DNA, 2034 bp, Homo sapiens
ggctcatgtctaaaatctcagcactttgggaggtggaggtggggggatcgtttgagctcaggagtttgagaccagcctgagcaacatagtgaaacttcatctccacaaaaaatttaaaaattagccaagtatggtggtgtgcacctgtaatcccagctacttgggaggctgaggtgggagtattacttgagcctgagagtttgaggctacattgagccatgatcatgccactccagcctgggcagcagagcaagacctggtctttaaaaagaaggaaataaactgccaaatatattctagagtagtgatatttttcattcccactatcagtgaatgagaattctagttgttccacattctctccagcacttggtattgttaatatattttattaaccagtctaacaagtatgtagtagttaatatacattattgtcatagaggaaataaaaatagagcagcaccatcttaaggagaatttacaaaagaacagtgcatgccctaggtacagagttatgtacagaatgaagaagtcttctctactaggagatgataggtgcagttttcaaacattaagatatttcagatagaggcagttctgcaatttttatacctaggttgcttgttttaccttaaaaattattctaactcaatcacgtgaacccaggaggtggaagttgcagtgagccgagatcgagccattgcactccagcccggcgacagtgcgagactccgtctcaaaaaaaaaaaaaaaaaaattattctaactcacagtgttaaccctgcctatttctgtaacatattaagaaagcttaaaccagaggtggtattagttataaaatatttaccaaaattagttcagttggtgatatatgacaagggctatcgcaagtatataaaataaccaattaagcctcctttaattattcagcattcattacaacctgagtaggttccagagggctgtaaaaggtaaagtatctttctttaagaaagttggactttaggagaagtataaagttaacataatggtaacacatggcaagattctggagcagtttatttttaaaatagtaacttagagacttataggaagaagtatgttaagaatatagataaatagtaagctagtgattttgtatattaaccttattaatttagatttggctaagtttatttcagctattagtatagttcctctttaattgtttaatgcagtaaacagtgtttcttaagcagatatcctggctattcaagtaccactttatgaattttggacatagagagccagcttgctataaaataaagaccaaaggttatatcatctgagatgtcattcagctgcactattaaatggttgtgtggtgtataccacctggaacctgtcgagaccttggttttctcatttgtagaatgagagggacagacaatatgtaccctatctagggtgttttgtgaacatggtattttgatagcttgagaaaaagcatgaggtatccaaggccatctaagtttgaacatgaaaccccatttggatgtaaaataaagtctgaggaggctttcctgggtctgagaagtaaagactcaagaattaaaccatattcctaatctccaacacaatcaaggaatcagggtaaggctagaccttaagtagtcagaagtcctctaagaaggatcgggattgctcctgtgttctagaactctgtttcatcttgtaagccaactgctgagttgtggttttagagaaaatactaaaagcaccagaaacagcaatctatttattgctctacacgttttgggggaagctaacaaattcagtatttactccttattctggccttgggaaatcttatccctaaggaaattttaatcatatcctattttctggtgacttccaaagttgtatctccagctaggctgtgttttctgggcttcatctgatagtttatagccacccttttggatattacctggatgtcctgttggctttgcctcttatcatgtctaaaattgaactcttcttttcttggacagc

SEQ ID NO: 54884 - DNA, 1137 bp, Homo sapiens
cagagaatattaggaacacctctgtgcatataaactagaaaatctagaagaaatggatgaattcctggacacatacaacctcccaagactgagccaggaagaaatagaacccctgaactgaccaaaaacaagctccaaaattgaatagcctaccaaccaaaaaagcccagaaccagaggggttcatagccaaattctaccagatgtgcaaaaatagtgttggagaaaccacggacaatcatctaactgagtttcagacttaatataatcacttttatattttaagtggaatctaccctgggaagtagtcttgcaactcagatacgtgttttttttttttttgcatgaattggttgaattcatggattatctataagtataaggagatttcatttaggctcatctcaaagtttgaaaaatgctgtttatttgaaaaatattaacttccaattttaagcagcaattcattctaataagtaattttaacaatattttatttacagattgcccaaggactccagatactccaaataatgaccctcgttgttctactagcaacaatagattgaaggccttacaaaaacaattggatatagaacttaaagtaaaacaaggtgcagagaatatgatacagatgtattcaaatggatcttcaaaggtaagtgtagttaataaatgtaactatatagtcagtcattatttgcagattccatagttataaatttacctattcaataaaatttattagtaactccaacatcagtactggtggcatggcactttggcagtcatttgtgtacatgcatggagcaggggaaatttgaattatatgacatgcttgtttccagctgagttcgaacaaggtgattttgccttcttaagctatggtacactaaaaagtatcctttttcagatatatttagtgctgttttttttcacatttttgtgcttttaattggtaatttcactgtttaaacactatattgtgacatctgaaatcattttgacctcagaatttgaaagaatggataaaagaatttggaaacatgtttttctttgttgttgttttttttgtttttttaggtaacattttaaaaattgtttattcctaccaagacccagttaataaaaaatttta

SEQ ID NO: 54885 - DNA, 1153 bp, Homo sapiens
ctgtcctttttaaatttttcagatattttcaccctcctgcttcaaaaccctccaatggttttccctcatacttaggacaaaatccaaaattcttattctgactctggaaatctatagcttctgatctcatcttctaaaacaccttcctctctcattacactctagctactctagcttcttttctatcccttaaacatagcaagcacactcttacctcagggcttttgcacttgctatatctttgcctaggtatctattctcccaagtacttttgtggctttctcattcattaagtcatctacttggatgctaccacctcagcaagctcttcactactatcctaagataaatagcaacctctgtctcttcttaacccttcattgcattaccaccaccttaaattacaatttatgtgatcaatttatcatcagttttcagcattagaatataaatttcatgcaggcagagacattatcttggttatcaccctatcttcaatacctgaaacaatactccattgaaatagtttgctacaaatactcaataagtatctgttaaaacaatggataccgcttcgctgcccatttgtggccgtttatcttcctctggcccataatttacacattgttctttttcttatttcatacctgtgtgtactataattattttcatattatcccttttatgactaactatttttattgtcagcacaaggatctgaggaatgggatgcagttattttaccccgttacataagtagtatagcttgccatttctttatttggtagtgtggctttaagcagcatcattggttgtgtttgtttttgttttgtcctttggaatgatctctgggggcttgataagacatgttaaagacatgcctcctgttttttgttgttattgttgttttgttttgttttgttttgtttttgagacagagtctcgctctgtcgcctaggctcaagtgcagtggcgcaattggctcactgcaacctctgcctcccaaattcaagcgattcttctgcctcagcctgcctcctgtgtagctggaattaaaggtgcacaccactatgcctggctactttttttgtattgctagtagagatggggtttcgccatgttggccaggctggtcttgagctcctgacctcaa

SEQ ID NO: 54886 - DNA, 1010 bp, Homo sapiens
aaatatgctaagagagtaaattttaggtacacataaacatacacatgaaaaggggtaactgtagaaggtgatgggtcagtaaatttgtttgcctgtaataatcatttcactatatgtatgcataccaaaacatcatgtacactgcaagtatatacaataaaaaataaattttaaaaatacacagccataataagatttccttttctcccaaattgtcttaactaatggagttgtttttcacaattatcaccctgtaagtttgatggctcttttttagtaaatgtatctataagatatactatagcgccaacagcattcttttaactctgtttttcacttgctgatatatcacttgatctgtttagaagataggaaaatgtttcatttttccctttatttgcttaatttttcaaacttatttttttaataggatcggaaactccatggtacagctcagcaactgctccaggacagcaagacaaaaatagaagtcatacgaatgcagattcttcaggcagtccagactaatgaattggcttttgataatggtgatggaataaattgtcctccttcttatgagcataatggtgctaaataatcttatgcaggaacagggcagtggttcaaagttaagagggaggaagcattactattacttttttttttttttctttttttttttgagacggagtctcgctctgtcgcccaggctggagtgcagtggcgggatctcggctcactgcaagctccgcctcccgggttcacgccattctcctgcctcagcctcccaagtagctgggactacaggcgtccgccactacgcccggctaattttttgtatttttagtagagacggggtttcaccgttttagccgggatggtctcgatctcctgacctcgtgatccgcccgcctcggccccccaaagtgctgggattacaggcgtgagccaccgcgcccggcccttttttttttttttaatcttgagttttagactcttcacttggatag

SEQ ID NO: 54887 - DNA, 2239 bp, Homo sapiens
gatctagaatgtatctcttcatttaaatagattatcaagtacttacaatcagtcttcatttaaaaaaaaatctgttacctgtttaagagtatggctttgttttcttttgtttttttgttttgttttatttattttttaattccagaagaaatctttaaagctagttgctaagagtaggagtagaaactttcggtctccccatgttacaatatttggatatctttcagctctaaaatctttttttcagatttgtaatttagatgtgtaatgacaaaaatgaaaggctctgaatttcaatatcatatcaaatatttttatttcagtgtttattgatgtaaggactaagttattgtaatgttataggaattcatttcttttcatgattttaatcactgcaaattggaaagtcagataaatggtgcaattaaaatttttttttcctttctagcaaaacctgtgataagtcctcttgaacttcggatggaagaattaaggcatcattttaggatagagtttgcagtagcagaaggtgcaaagaatgtaatgaaattacttggctcaggaaaagtaacagacagaaaagcactttcagaagtaattttaaataaaaatttttatttggtttaataaatacattattcaaagtatgtgattatttaaatgacaacaattgtcttttccctgtgcaaggctcaagcaagatttaatgaatcaagtcagaagttggaccttttaaagtattcattagagcaaagattaaacgaagtccccaagaatcatcccaaaagcaggattattattgaagaactttcacttgttgctgcatcaccaacactaagtccacgtcaaagtatgatatctacgcaaaatcaatatagtacactatccaaaccagcagcactaacaggtatgtagtgtatagccattgttttttgtgtgtatttttgtctataactggttctgatttaataattgaaagaaaaacctgtgcatagatttttaaaattatgataagatacacatagaataaaatttgttgtattaaccattttaattttattcaatttggaagcatttgctatattcacaatattgtgtgaccatcaccactacctagtttcaaagcattttcatcaccccaaaaggaaacgcatacctgttaagcagtcactccccattcccccttcctcccagctgctagcaactactaattgtctgtctctacagatttgtctattctagatttgtcatatgatagaaattatataatttgtgaccttttttgcctggcttcttttacttagcatattgttgtcaaggttcattcatgttgtagtatgtatgagtacttcactcacttttaatgtctgaatagtattccacttgtgggaatattctaaaattcaaaactttttgtgcacccaacatgatgctcaaaggaaattctcattggagcattttggatttgggatttcagatttccagattagggatgcttaaccagtaagtataatataatataaacattccaaaatctgagatacttctggtcccaaggatttcagataaggaatactcaacctatactatatttgattgacctatttgtcagagcatatgagttctttttaccttttgactgttgtgagtagactgctatgaacatttacgtgcaggtttttgcttgaacatctgttttcaatttgggggtatattcctaggaatataattgctaggtcatatggtagctatatctaagattttgaggaactgtcaaactgttcttctcagcatttacattattttatacttctaacagtaatgtataaagtgggtttcagtatctccagatcctcaccaacagttaatattttttttcattcttctttgatcgtgttctaataggtccattattggaagtatggtaatatatctaactatgtctgtagaactgtctgtatttctcccttcagttatgtaaatttttgtttcctatattgtgggctgttttgctaggttcatgtatgtttacaatttttatatcttctagacggattgactcctttacctttaccttaactcctttataatgtccttctttgtctcctataacaatatttaatttaaaatctgttttgtctgattttataacagctacccctactttgttttggttttgtctttgggttcaaatgagtctcttttagattatatattattgtattctgttttataagat

SEQ ID NO: 54888 - DNA, 1374 bp, Homo sapiens
tatacatatgttaagtgtatggtcttgctttcattgttttgcatgagagatctcctgccatcttaatctttgttcctctctacgtaacatgtttttttctggctacttttagtgtttcttgttcacgacttgttttgagaaattggattatggtgtgctttagtatggcttgcttctgtttctttgtttagtgttctttgaacttcttggatacttcttgagtttatacttttcatcaaatgtggagaattcatggccttttttttttctaatacattttgtgtctccgattctttctgctctctcttaatgaggaatttcagttacacatatatggccacttgaagttaaactcacagttaatatatgcactgttctttgtttattctcaagtctttctttagtgtcttctatttttgataatttctttgctgtgtcttcaaggacactaatcttttcttttgcaatgtttaatctgcctgcagtcccatccagtgtattttttttttaatctcagatattgccattttttaatcactagaaatttggtttaagtctttttcatttcttccatgtgtctgtgccacattttcagtagattgactgttttgatgtccttgccttctaaccctaacatttatgtcagttaagccactaagcttgtaataatttgtaacgcaaccatagaaagcaaatacacctggtaatctttgagtagatgcagacattgtgaattttaccttgctggatgctgaatatttttgtatttctataaatgttcttgagctttgttctaggacacagttacttggaaacaatatgacccttttgggtactgcttttaagatttgttatgtgaaacaagcatcatttagtttaggggtaattattctctactgctggggcaagactcttctggatattttcttcagtgcctcatgaattgagattttcaagcctggctggtggtaacaaacactattcctacctatatgcactgagtattgttctttctaactttttcagtgggttctttcccctgcctcagatattttcttcataggcaggtgctgattagtactttgatgaatacttgaaaaccctctgaccatctcaggagttctttctatgaacagctttaactgccttgtgaactctagctgctttggtttccttgtactcttatttctgtctcttcaacttggctccgcctgagtttccccctccctgcactgtgtcctagaaacccttaagacagtaagctggagcaatcttagggcttatctcatttgtttcccatctctcagggatcactattcgtctttaacctttttcatatattttgtctgattttctttttttggtagtttgaat

SEQ ID NO: 54889 - DNA, 2519 bp, Homo sapiens
tgcaacctctgcctcttgggttcaagcaattcttgtgccccagcctcccggatagctgggactacaggcgcacaccgcctcgcccagctaattttttgtatttttagtatacagggtcttgccatgttgcccaggctggtctcaaactcctaaattcaggcaatccacccaaagtgctaggattacaggcgagagagctactgtgcccagccaggaggtgctgttcttttctataaaatttcttatagttgtctaaagaatttgtaatggtttctctaattaaaataggaaagatgatagctacctcatagatcctctgggagaagagtttttgttaccagattttttttttctttttttgaataggtaagagatttagattaaggattccatagattaagggttgatgttcttatctgatatttatgtttgccaacaggtactttggaagttcgtcttatgggctgccaagatatcctagagaatgtccctggacggtcaaaagcaacatcagttgcactgcctggttggagtccaagtgaaaccagatcatctttcatgagcagaacgagtaaaagtaaaagcggaagtagtcgaaatcttctaaaaaccgatgacttgtccagttcagtaaccagatttttaaaaatcatgtaacaaactaaagtgcttatacaagggatttatgaagtgttcaagttggacaaaacactttaaaattatggtttttataatttaattaaaaaatattaaaacctgtgatgtcaggaaacaaaaaggcaacaaattctgttttgttgaagatacattagaaaacttaatgacaaatgacattagttcttttggaagaatgaaatattgagcatcactcttatgccaaactgaaggtatacagaagctatgagactggtccttcttgtagaatcgtatcttgattcttttatttttctttattttttgagacagtgttttgctctgttgcccaggctgggtgcagtggtgcaatcaggtctcaacctgctgggtttaagtgatcctcctacctcagcatcctaagtagctgggactataggcatatgccaccatgcctggctaatttttttttctagaggcagggtctcactatgttgcccaggatggtctcgaactcaggggctctagctgtccttccacctcagcctcccaaagtgctgggattataggtgtgagccaccatctccagccttgattcttttaatggtttagtgacactttaatagtaacattgaaattttggtaatctaactgctgatccagacgtgtttactgagatagtagcctggtagtccactgagatgggggatggtaggggttggtttgaggagagtaaaatgcaagaggtttggaaagcactggggagaaattctgaagtataagcataaactatatgtagatgtataactggggggaaaagcatgtgacagttcagcctaccgtagaatacaaaagtgaatttgcctgtgctttcatgtgtatagagagaggctttaagaaaaataagaaaataaggaattgtttaaggaaacaagctctataaatataagatatagaaagaaaaactgattgatattcacacaaacagtgtggcaaacaactactatttatctgttctttcagtcacatgccaatgtaaacaaaagagatagcagtcactatttgtgtttttgtcaaacaatttgggagtgtctagtaggagtatatgtatctgtaaaactagccatttaagattcaaaagttttaatattgattatgaaaaactttattttcaaagggtcttaagacttttattgctaatcaaacagcagtacttctgttttttataaaggtttaaagtttttaagcaagtttgtaaattttaattacagatgatgtctgtgctgttttgaagctcgataatactgtggttggccaaactagctggaaacccatttccaatcagtcatgggaccagaagtttacactggaactggacagggtaagaggactaacattttacttgaattttaattataattcattttaaatgtgagttatattttttagaaggcttcaacaagttgtattcttaacaagaataaaaatagaacttagattttttttttacatttcttattcaatgagttatgcataaatctaccttaatatagagatgaatatcagattgctgtaggatctttcatttgtgtagtaatttgaaaatgtttcattcatagcaaacttaaagatcagtaaggtgtaatattgaagcatattggtgatcttaatgcgctaacagctaaggcgattcttctggctcaccatgtgtaggttatcttactcgagctatatttgaaatgagctattaggcttggtcacccagccttctgtgtgtttgtgtctttcaagaataatttgaatagctagaattcagtctgtggccatagaacccatcagaagttaacctggtccacagtagatttaaatccatagtggtaactttt

SEQ ID NO: 54890 - DNA, 1094 bp, Homo sapiens
cccaccttagcaaagatgggtttatgacatcaccagaaggaatatggaatattctaatgttgaaactatgaactacctttcgctagtagttctcacagtgtcccatagatgtcgctgtgttccctatgaaaagtgaaaatactctctggcaccccagggctcctcagtgaacacttcgagaacctcagcattctttgtgctaattcttttatgatagatgtgtactgttcttttttcaattgcaatacatgttttaatttgttgctttctaccacacataaggctgatgcagtgtctcttaccttttttgtttactttcagatcttagacttcagataagacatgcagattctttaagtctaccaagcagttttctctttgattctagattcaattcataataagacaaactgaaacacaagttgggacagtacctatctcaacttgtactgctcagctttttttggtggtagttttactccgtctagaatatcgttgctcctagagtttgaaattatctaacagcatgcccttgccttgtgtaactgacctgcttcatctagaaaattgccggcgtaccagcaatcacacttgcattttaaattctaaacattgggccaggcacagtggctcacgactgtaatctcagcactttgggggagccaagacgggtggatcacctgaggtcaggagttcgagaccagcctagccaacatggcaaaaccccatctctattaaaaatacaaaaattagccatgtgtggtggtgggtgcctgtaatctcagctactcaggaggctgaggcaggagaatcacttgaacctgggaggcagaggttgcagtgagctgagattgcaccattgcactccagcctgggcaataagagtgaaaccccatctcaaaaaacaaaaaataataaaaaataaatggtaaacattagtgacatcttcttatgcagaagcttcagtctatctgtatggtaccttgtttttcagataccatgtgactgttttacttattcaaaccatgctggatgttaggatttaaagtgggattgaacacaagtggtggagtactaacataaaatatctctag

SEQ ID NO: 54891 - DNA, 2608 bp, Homo sapiens
gtggcacattgtgagtacagaataaatgctatttgcagaactttttctggcttagcaatgagacaaataaatacaaaggtttcaaatgagttatttgaagcaagcattggggtagtaacatagcacatgatggcaaatagaggagggaaatctgaaagattgaagctctaagagaaggagtttcggtggttattcatctgtattggttgttcccagttgtgtattctttaagtatactttaggaataccttagctggaaaatgtcacaatgtaagttttgtttctttgaattaaaatgtgtaagtttgataaagtactatacagttgagaaatgttacaaacctctttaaaacagtgtgacctttgtgtgtgtaatttttgtttattgtatttgtatttcatattttttgtgatattttattcaagtgtgtgtccaatgatgtcttttctgttttctttattattttttttaattatcctagtcacgtgaactggaaatttcagtttattggcgtgattggcggtctctgtgtgctgtaaaatttctgaggttagaagattttttagacaaccaacggcatggcatgtgtctctatttggaaccacagggtactttatttgcagaggtaataaatgtattttattaaatgtgcataactacaattgaaattacatatgtaggcagcataatatagaagtagaaagagtgttaggctgaaagacagatgacttgagttcttggctgagctatgccactgaataggtatgtgactttgagacaaatcaattattcttcctatgtctgttttctcatgtagaaaatgaggggctggactaaactgtaactaagattctcttaagctttaaaattttataaatttagtagatttcatgaaccatgctattttcatgtcaacttgaattttcttcactgcaggttaccttttttaatccagttattgaaagaagaccaaaacttcaaagacaaaagaaaattttttcaaagcaacaaggtaattactaacaatcaaatgcatagcattttgatattttcttaaacaatctaattaccatttaaaaagtaatagccatctgtgtgggtttttttgttgttgtttattcatttatttctaacttcttattaaggaatattttaaatgtatccataagtggagagactagtgaaatgtacagtcacccggcttcaacaataatcaactcatggccaattttattttatccatatgccatcctctcactactttctcaaatttgaagcaaacccagacatcatattgatgtattcataattattataatttatatctaaaagataagatttatttttaaaaccttactactagacttaaagagaaaaaaacaatttcttacctatttatttttaaaactacgtatgctattttgcattagcctttactagcaaatagtaaaaaactagtttttttaagtgacaaattttgtttgttcttcgtagattataaactaatggataagaatttttaaattatgacttttggttatacataaagaaattacttgctgtttttgtttttttcaacatctacaggcaaaacatttctcagagctcctcaaatgaatattaatattgccacttggggaaggctagtaagaagagctattcctacagtaaatcattctggcaccttcagccctcaagctcctgtgcctactacagtgccagtggttgatgtacgcatccctcaactagcacctccagctaggtatgtgtctgagattttaagcatctcttatacaaagttattgggacattcttacgtactgattatagcaggtgtactgagtcttgcttttttcccaagtagtattttgaaagtagtgttctgtttacttaaaaagtaaattgtttgctttaattttaaagctgtttaaaatacagactttctattactgttttggtgagttactttatcttctataagtgattctacagtaaccaaattggactttgatcttgagcctgaacctcctccagccccaccacgagcttcttctcttggagaaatagatgaatcttctgaattaagagttttggatataccaggacaggcaagccattttaaaccttgcataattcctcttcactgaatgaattagcaataaaagcatcatagtgaataaggcgtgtctttccatttaaaattgccactgaactgtgaatttatggttttttgtttgttttttgtttttgtttttgttttttgagacagagtttcactcttgttacccaggctggagtgcaatggcatgatctcggctcactgcaacctccgcctcccggattcaagcgattctcctgcaagccattctcctatctcagcctcctgaataactggggttacaggcacatgccaccatgcctggctaatttttgtattttcagtagagatgggatttcattatattggtcaggctggtcttaaactcctgacctcgggtgatcagcccgcctcggccttccaaagtgctgggattacaggcatgagccactgcacccagccgaatttatgtttcttatggtctagtctcagctaaattagactgagtt

SEQ ID NO: 54892 - DNA, 1102 bp, Homo sapiens
atgagtatctgaattttacttttcactccaacatttatattgacttttgaaatgtttttccttaattttatcattatcaaataagttgttttctgggtatttctatggattcacgtgtatttaatattttacaggattcagagactgtttttgatattcagaatgacagaaatagtatacttccaaaatctcaatctgaatacaagcctgatactcctcagtcaggcctagaatatagtggtattcaagaacttgaggacagaaggtaaagaatatataccaaattttgcgactacatgtttggtaccatactttattgtcttattattaattgaaatttctcttttcagatctcagcaaaggtttcagtttaatctacaagatttcaggtgttgtgctgtcttgggaagaggacattttggaaaggtaatctttttggaattttttggaatatctacaacattaataactcaagtggaaaataattattttaattttatttcaggtgcttttagctgaatataaaaacacaaatgagatgtttgctataaaagccttaaagaaaggagatattgtggctcgagatgaagtagacaggttagtttttaaaaatgaaattgtttatttttctgaatttgtaagttaagagaaatgatatatgtattacaacagcaaaactttatgattttacagtaatatgtgaagaaattaaatataatgtatctatatttgacataaggtagacattagtttttcttttttgcccctttttacccttcttgtgacaattaactggttaatggataccaaaaaaagatagtgaaatgtttgaactaattttgttaagttttttatatatggaaatattaaagtgtttatatggaatagaaactgttattcatctgtggttttgtggggctatatttcattctgtcttaatggaaatgacaaagtcatttacaaataatctacagttaatggaatggtttaaagtattttacaaagcagaatatgttatcttatttttttccttttattttttttaaaaacatgttttttgaccctaacgtctgggtctaataaagtaagttgtggtatctta

SEQ ID NO: 54893 - DNA, 2459 bp, Homo sapiens
ttctgctaccttgttacgtctttgtgctgaatctttgtaggaaaatgctttctaatgaaatctatagaaagtttggatcacaggatgatgctgtagccagaatctaggccattacctctactgaaaattaatccagtcttgtgtagagacagggtctcactgtgtcacccacactggagtgcagtagcatgatcctagttcactgcagccttgaattcctgggctcaagccatcctcctgcctcagcttcccattgggaccacaggtgcatacaactgatccatctacatttctttcccccatagtgtcagggtcttggtatgttgtccaggctggtctcaaactcctggcttcaagcgatcctccttggcctcccgaagtgttgtgattataggtgtaagccaccacacccagtcttaacttaaatctccacttttcagtaacatgaaaatttaaaaatctcaagtagaactggtataaaaagagagaaaagaaaaatccaagagtgagaaataaaacacacttttagagaaatttgaggaatgaaggtaagaaaaaggagtacttttaaatttctagcatacctgaaagaaggcaagaaaaaaatttataagtttttttttaagactagctttttttttttgagacggagttttgctcttgttgaccaaactggagtgcaatggcatgaatttggctcactgcaacctctccctttcaggttcaagtgattcttttgcctcagcctccctagtagctgggattacaggcttgcaccaccatgccctgctaattttttgtatttttagtagaaatggggtttcaccatgttagccaggctggtctcaaactcctgagctcaggtgatctgcccgcctcagcctcccaaggtgctggggttacaggcatgagccaccacacccggccaagactagcatatttttaaaagtaatgtatttcattacttgcaagtataaatagtaaataactcaagctaaacttattataactgagcagaattttaaatatttactttccacttcctagctcatctttttaagccatagagtttggtgttattgtttattttttaatagctgttcctagtatactttatctatatattttttgagacagagtctcactctattgtccaggctggagtgcagtggagtgatctcggctcactacaacctccgcctcccgggttcaagcgattctccttccttagcctcccaagtagccaggattacaggtgtgcaccaccatgcccagttcatttttgtatttttagtacagacagggtttcaccatgttgaccaggctggtctcaaactcctgacctcaggtgatccacccgcctcagcctcccaaagtgctgggattacaggcatgagccactgtgcctggcctactttatgattcttaatgacagttctcatagtctaaattttctttctatagtctgtattatattattttactttgaaattaccttttttaataaatcatagaaaatttcaaatcaacctctttttaagtgaacacaaattatggattctaaaataaagtgttagataatttatgaacaaagatcatattctgtgtacctaccattagtaaaacactctaagtcccatttgcccttcagttgctgagtaaggatattatgtttatgttactgcaatgcctcctcactcagcttccttttcttaccaatttatatttcaacacaacagaatagggttggaagtatatttttgtgtttgtagaagaaagcacagctaaccagcttatgtaggattcaattctaagaccttggttttattaatgatgttttcccctgactaaaataactatttatataagttttcaggtttctaacttatctgaaaatgtaatgaactttgaaggaagtacacgaaacatgttaggatagaactagtaacttagagaaacgagacattaatacattatgtaataaaggtggctagatagagttgaggttaaaataagcaatacaaacaatagcagttcttaggaggaaatcagtgtactggtgtactactacaccatagtacatatagtgtactactccccaggtgtgcaactcttctagtcttccctattttattaaacagcaataccagttgttcaagccagaacacagtcattcttggtgctcttttccccttacctacaacactcaaactattagcaagtctggtcaacttcacctctaggatatatcccaaaccatacaaagcataaaaccaatagtaaatctctattgtatttactcttaaattttcattccacatctataatctgatgaaatatcaactgacatttgtgttgcactttcactttgacccctttatttgattcctgtcatcatgatcagaagtatttagagcaagatttaggtagagtcttataaaagaggttggatttttgct

SEQ ID NO: 54894 - DNA, 1065 bp, Homo sapiens
ctagtcttttaaattaaaattttatgcagcatatctgtactgttcaacttcatatcaattttatatgataaaaaattgaatactatagcttgtgaattatagatactgtctttgaaattaccttcaccacaaacttttaaatttttcaaagtacgctttaaattgctaaattctctgaccaattcctgaagaattttcatatttcacccttaattaagccttttaaaaaatcaactgtaaccactaaccatgtatgtgctatagactatcaatgtgaatgctataatcttttaaagtttctattaatatatttcaactgaagttatttattttaggtaggtcagttttcatagcacatatagcaaaactaagacacatgttaggatttttaagttatagttaaaattttgcttatttttaagtttagtaatttataaagaatgttatttccaactagaattatttttaatctgcttattttaaaatattttcttttacagcctgatgtgtgaaaaaagaatttttgaaactgtgaatagtgtaaggcatccctttttggtgaacctttttgcatgtttccaaaccaaagagcatgtttgctttgtaatggaatatgctgccggtggggacctaatgatgcacattcatactgatgtcttttctgaaccaagagctgtgtgagtatgctttagacatttgtctgagtttttccatgactgatttcattctgggaaggaaaagagattctttgaattttagattttttttcctaacagaaaatagatctctgcaagaaatactagaactccttacttacttttttgccatatactttttgtatgtattctgttgtctgtgttgaaaatgtcatggattgcccaaaaccacaattgatactttagataagcaatttagattcattttagtaaaatttctttttttgctattagattttctcactagagaatgccatccagaattacagctttaaagacagattatactcaaaatgcactgttaagtttttgaaaagaaagtacagaagagtctgtatcatatatttat

SEQ ID NO: 54895 - DNA, 1018 bp, Homo sapiens
gtaaactctttttgtagtttttgaattcaaggtttggcttattcaaataaataagaataatagtaaacacttgaaattatatatgcatgtgtgtatattttccctgttagtatcttaattttgtagctgttaaatggtggagctaggatttgaacctaggaaagtgatattaatacctacaccctgcatgctggtgtttaccaaatttgtgtttccagccccgtcctcttacctaaacttccaactctaataatattcagtggtcagctagttttccatttgtgtggctaaatatcttatttaacaacttaaactgaactgattttttccatttttctacctacctcatctactactccccaggcctgctactcttagtcttccctattttattaaacagcaataccaggttcaagccagaacacaaaaagtcattcttgatgctctttttcctttaacttcaacactcaaactattagcaagtccagtcaactccacctgtagaatatatcccaagtcataggaagcataaacccagtagtaaatctctattgtatttactctttagttttcattccacatctataatctgatgaaatagcaactgacatttgtgttgtactttctctttgattcctccatttgattcttgtcataaccattagaggtatttagagcagagaattgtaatactgtcataaccatcaagtttcagatgagggacataggggttaattctaatgggtactgaagcattttaaaaggagggaaaagccagaaagtagtagaaggctacgaataattcattccctcaatatttaaggcagagcattacaattatgcctaaccttatgctgccatgggaatttgtttggttttattttttatgcttgtttttgtttttaaaataatacataaatgtagtttgccttaagaaactgttatttttgctgagaatataaattatatacaaataaaaccataaagtccagtgaaaatacaagaatacaatgctgca

SEQ ID NO: 54896 - DNA, 1021 bp, Homo sapiens
gcctggccaaaatagtgaaaccgcctctctaataaaaatacaaaagttagccgggtgtagtggcacgcgactgtagtcccagctactcgggaggctgaggcaggagaatcgcttgtacccgggaggcagaggttgcagtgagctgagaccacgccattgcactccagcctgggtgacaaagtgagactctgtctcaaaaaaaaaaaaaaaaaggattaaattagattatcacaaataacaaattaaatacatttttccttttttatgtaacaggagaagaatttctcatgagctaccttatatagagtaataaacttaccaaaaggaagaaaactgaatgtttgtgttatagtatttaaatctcaaatcataacttggaaatcccatttttaataaagagaaaacacagttccaattgcaattatttttttaactgtataacctactgatttctttgatttttttttttcatgctgtatctttttatcctgaacagagatttgaaattggataacttattgctagatacagagggctttgtgaaaattgctgattttggtctttgcaaagaaggtaatcgaatgtttttaagtttcttttctgattcagaattactgtttctttgtgcatcagtagttttcaagtttgtctatggaaaacaaactgtacttttaactttattcttcattaagacattgtagatacaatgaaaacattgcttatataacctaattatcacattaagaatttgttctctgaatacaaataaggttagatgtatagaaatcatagtaagcttctctgtgtgattaataattttgtcactactttaaggaagtattgattaagcaccaaaatcgtttattctggtgagactgtacacagtgaatttcataggcctgataatttccttccagcttcttaaagttgaaacatttaaaaatagaaaataaatagagataggtatctcatgtatgttttttgtatattcaaaagtaaataagtaaattggggaaatttg

SEQ ID NO: 54897 - DNA, 1057 bp, Homo sapiens
ttgtaatgacaagaagaaaaagtaactgaaaagaaacatggatatcttatttctatttacccattaattagacagtatagttgctattgcagtttttgctataccagtccttactgttttcttgaaatgtcttagatatgtctgaatttgttcaccatgcacaaatgtgcaactttaattttgcctcccaaagatagctttgattttttttttatgctagatttgttttctttgctaacaaatgtttacattttatcttttccaggaatgggatatggagatagaacaagcacattttgtggcactcctgaatttcttgccccagaagtattaacagaaacttcttatacaagggctgtagattggtggggccttggcgtgcttatatatgaaatgcttgttggtgaggtaagcagtgtgaaataggtaagagaacagaggaaggatgattgaaataataaagcatgtcatttataaaaccacctaatactgtcttcagtatgagtggaatttaagttttataaatatttatagtatactagtagtcagctatctttctgtaataccttcaataaagatttttatgtggtttgtggaatgcactatcagtgctttgaaaatagttccttgtatttcagtattgtacttttattatgttttctgattttaagacatagtcattttatagggaatggaataacagaaagactaataaaaggaatgtactctgtacctgtaaagaaaagcccactatagattggtcagaaataaatgttaccttcgacttcctccagacttccgtctgagcaacacactctgcatccttgcttcaccgggaaactactgaagttcctggggaagcaaagtagaatttcgtaagaacaaaatggatggagagaggagaaaacctatggtagctgtgaaggccctgatgccatgtatgtcaaattgatatcatccgatggccatgaatttattgtaaaaacagaacgtacattaacatcagcacgataaaagccatgttgagtggcccaggtcaatttgctgagaatgaaac

SEQ ID NO: 54898 - DNA, 1563 bp, Homo sapiens
ttagtgctgaatgaacaaattatcaaattgaatatcagaaatttctaaagttttgttctatgcttgtcatttattggcacttaccccaaacaaatggttttagtttcgccggatggataaccccttttggtatgtcaatttgaagtggattccttggaaaaggaggagaagtatggctaattaaaatttatcatgtgctaagcactgtactgtatgccttaaatattagttcatttaattttgcaacagcctttaataagctcagtactgatcttctgcccattttcggaggtgtaaatagagacacaaagagattaatgacttgcttaaagtcacacagctctcatatggtggagctggaattttaaccttgtcactctggctccagagcatatctaaagcattatgctttgctgctccaggacaggatcttcaattcatccagccttgtttctgttcttaagactagtggtccagatctgaatttttcacctctatttagaaaagctgttgtgcagtgtttaggttggaaagatttattttagctccagtccacagtggcttttactttctgagagtgccagaagttctcataaaatagttaatctgctgtaagctctggcatacttgaactcctccccacccccttcctttattttaacagtaacattttggagggtttttttggttttgtttcatgtagtattcaagtaagtatgagatttatgagattcaattatgtgcttgcttaaaatttactctccatattagagatgacatgtgcaaaatatgagtttattacaaaatactgtagaattaatccagttgaatctactccctcctattataaagccactggagggtttggcagaaaacaaggaagctcctgtttcatgttttttaaaagagctaattgattgagctcttaattacctagaagataaaagacagtggatctggctatttcttcacagttgtttcttgcaatttctctttagtatctccacaagagggtagctgggaaaagaactaaacttaaaactcatcagtctacttcataattttatagcattagtgaaatgctagtgataactcctttttaactatgatgaaagtaaggtgtggctaaagtttatgtcagatttctctattattacaaataattgtaaactcaccggatatattatacatgttcagatttgtatacttctactagttttgattactggaaagactccaggaataaacaaacatcgcaagtcccctttttcctgtctcagatgggagtgaagataccagagagattgaacagaatgctggacatggttttagatactgtcagtgttgacatctgaacagactattggtttcctttaaatgtgctgaaaacacatttgttagctttcagttgttagccctgtttgcttacaatctatttgcagaaaaaagatactacatattttaacaaatgtatagatatttctttgctgttcagacttgtagaatgagttttcaagtaaaaattgttcaagcagaagaccaaagtgctgtctttgtattatc

SEQ ID NO: 54899 - DNA, 4565 bp, Homo sapiens
aggatttatctattatctaaatattccctactgtctgttagacactaaaaattgactgtctggccaaataggtgattgagtgaatgaaataaaatggaatggagtggaatgaaattaaatgaaaagtcatatcatatatgagatagacaagttttttataagggtctataaaatttaaagatttcagaaagagtatatggtgtattccctctgtaatagatacatatctgttgtcacttcttatagttcttttgttgttgttttggtaggcatgggtttattgttgttgttgttgttgttgttgttttgtctgttttttctttttcactgcctggatcttggttgtactttgaatgggtgataagattttactgccttaaaacttgctttaacttactcaaaggtatttcttctagtctccctttcctggtgatgatgaagaggaagtttttgacagtattgtaaatgatgaagtaaggtatccaaggttcttatctacagaagccatttctataatgagaagggtaagaattaaaataaggataagaattttttaaagactactttaattttttatactaaagaaaatttcccagtagaactttaaaagctgtttttcagttcataaatgttgcatggcttagacaaaaaaagacaaaatatatctaagttttttaaagtaataatccttatcagtgaattttattctattggttttattttaacttttttattttacattatgctagctgttaagaagaaatcctgaacggcgccttggggctagcgagaaagatgcagaggatgtaaaaaagcacccatttttccgggtaagtgtgactatttaaaattttttatgaaactagagcgattagatttaacaaactaaactagtcattttttattttatgatccagctaattgattggagcgctctgatggacaaaaaagtaaagccaccatttatacctaccataagaggacgagaagatgttagtaattttgatgatgaatttacctcagaagcacctattctgactccacctcgagaaccaaggatactttcggaagaggagcaggaaatgttcagagattttgactacattgctgattggtgttaagttgctagacactgcgaaaccaagctgactcacaagaagacctcttaaaaatagcaacccttcatttgctctctgtgccaccaatagcttctgagttttttgttgttgttgtttttattgaaacacgtgaagatttgtttaaaagtaccattctaatacttcttcaaaagtggctcctcattgtacttcagcgtaaatatgagcactggaaacagtttcatggagtttaagttgagtgaacatcggccatgaaaatccatcacgaatacttttggatcaatagtctatttttaaaaagaaagaaaaaaaccacttttttatagtccctagctttgccatatgcccgccttaagtggaaggaaagttaatcacttaactatgttttataaaaagaaaaaagggcttggaatgctattactgttcacacaaagtatgattctgtttgaataaggcaaatgctcctttttttaaaaaaaaagacattactgtaatatcaaaaaccgtggcagtttgtatacaactcggggcttgattttttttaaaaaaacagaatgaattgatgtcttattttataaatgttctatatttattaggagaaaactttatattgccttttttatcaatcatgtaacaggcttatagctttccaacagagctgcttgccaaacaattttttttgtttattaaacagtgctgaaacaaacaggatcagcatttacttaagatgttaagaatgaggacttttaatcagccgaaccaagatattgttacctgtatgcattcccaaagtctagatgctcagtatgttcagtcatatctttcagaatcagtgaaccgattaccctttttttggtattcactctacatctgccaacctagttcaccttggttttgtgtctgctgtagaagggaaccataacttggttaaaccgtagggattatcattgtatacatgctgtgaacatgtatatgtgcaagttttaatgtattctatgttgtaggcttattatttaattttaccacttcatcacttttgtacagtggccaagcagacacctcaaactccagcatttacattaagtgcatttgtacattttaggccactggatccagattttatattggcagttattgagggcaaaagcaatatattgtaacagaatgtataaatatttttgataaaacagtctatattttattaaaaaatgaattataacactaaagctgtacctcaaaagtctcaaaaataatttgatgaaatattttatacaactcttcaaaggatccgtctgtggctttttatactcttttagggttgtctttttacaaaccatgactttccacttgcctgtagttttttgtttgttttggtttggtttgattttatatttttttctcctaatctatgactttattgttttttcttagtttagtaatagcatctttgatcctgtgcttagcatgttagggtcattatacctcaggaatagcaagctgttaagtaaccatactgaattaactatttaattacagtgagctcatctcttaaaaattgttcaggtgtaaatcttatgagaaacatgaaaaagcacactgatttatggagagttgagctaaaaacatttataaatatttgctgggatgttttagcatcttttcattgtactctgagaacaattaaaattgtccagagatcatttatattaccttccaaattgtttattacccaagatcctttgggagaaaatcttatagaatgggggaacaatatgtggtttaaagttattttaaaatgccagttaatttcctcggcaaaggacaatagaggaacttagcttaattgtctggctttaatttaaactgtgttaatacaacattaaaataaaacactaaatacttttgaggtacagtctgctcacttttttggttctcaaatagcaaagaaagtaatgtctaaaataggctcttagcattaaaaactgacagcatttcgtaactacacagtgtacagaatttttttttaattgaagtcaatcactaaaaaaattagaaggcagggtctatttacacaattaagctgaagaaagcactaattttttgtagtttaaaatatatatatattttagtcagatttaaaattttaagctttatagagtgtaaatatattttgctattactgtatgtgtatgtgactgctcaagcactttgtaaagaaattaggatattttagaatggtacactatgcattcaaatgaaatgtgcctttcactatgtcattctaagaaaacaagtgttttttgcagtcataaattatcacaaatgcacaaattaaagtctatatagattgaaatttgtaactttggttttaagtattctttccttttagaaacttcctaatgattaaaatatactttaacttttctgtgttcaaaatctcaaagactaattaactttaataaacattcttgcaagtactttttgtcctagtgaaggcttaaaaccatgaacattcagagcaaactgtccacttcattgggaataatgggaaaagtttgtattctgctcctgtaaggtcagtagcatcttttatttgaagcatatttatggactgcttactgtgtatagatactgagaataggaagtttttttttttaaagcaacaaaatgttgatgaatgaagaacagcctgttttaattaagatgcaagcaccagtattgtatgtacttttctcttgtttgaggttagcttattttaatttaggacctggcttctcaaaaaggcaaatgaataaaacagaatactagtattttatagtaatcttacttaaaaattacaaatggaatattttagaaatataaaatgatccatgctctccctgtaacacaaattgaggacataatggaaattgcaatcatatattgacttggtaaatctgctgtacagattcaagtctaacaagatttttgcaagtactgccagtattcccaaagccactgaaggagtaagtatgaaaaatccaaagaagcaaatactaatccacagatcataaccttaatttaaatttagaattcttatttaccttccagccatcttttgaggtctagggtttttctgagatactggctttatacattagtatgatgggtagaggctttaaagttattaaaaataatatgtatacatatacatataaaattagtggaagaccgtcaataagatacgtaatttgaggtattgatgatctcaataaaggtaagagtggtctctggcaacccttcaccccaaaacaagcaaacaaacttgagcagagtctggacaagttagggcttcagcacctaagagttagagtgggagtgctcaagcacaaaagtaggaatattgagagaactggaagctgagtctacagagtatggcagagtagcaggaagttggaaaagatagga

SEQ ID NO: 54900 - DNA, 1020 bp, Homo sapiens
aataaatgaaatgctctttagtctatgagtacaccagtaagcctaacaaagaagaaaaaagaaccagggatatgcagattctataacataagattttaacacccaaaaattaaaatctgttgttctactgctgcttttatcagcatcatattctctgctcaataagctcactaagaaaatcacatacttagaacattttaatgtctctcaagctggtgcctttcaaggcccaagctcatcacttcttgtttaataatatacataataaatctcacatacacatcctttcaaactggaaactatgatgttgatgttaacaatggttctcaaaagcttttgctctttccataaatttattaaaataaaaaactatgtatatataagtaatggaaataaagtctatcagctttattagctgcaatgatttgcattatttgtaattatgtatcataagttacatgtaacatataacaaaaacttgagttttgaaaaatgttttattcaagaattacataatttcaaatatcttccaaaatacagtttcctagattgctacaaaagaaatttgataagaaatttaaatcattaaatatgtttcactagtatatacatacagaatgccaagcaatagtattcagccctggaatgcgtaccatgtcttttgtttttcctcatgaaaggctcaacccagcattttgtataggctatgtacaacaggcaaagttttgtattcaagaatttgacgttagctgcctcaatttatagctgtggtagtttgtccactggggtgtcaaatttgaagtctgtaggaaacagatctggggctcgaggatagatcagtctataggactgtctgattgtaacatcagcaacaccagcaatatctccaatttctaaaagacaaaaatcgaaacattaaccatcatttccatcctacctcctttccactacctgcattgtaatttgtgagatatgatagtataaagtgccaaacttaaaaacaaaaccagaagtgatttc

SEQ ID NO: 54901 - DNA, 1034 bp, Homo sapiens
atagatgagcaggatgcacaattcagatttctggtctatgtagaatcagatcttgtaagctatattttcatagaaattgtccatttttcatgctttccaaaaaattttttcatagttataaaactgttttatagggcacaggagctgcaagttttgacgaatttggcaattctaagtaccagaatcggagaacaatgagcagttctgatcgggcaatgatgaatgcattcaaagaaatcactaccatggcagacagaatcaatctacctcgaaatatagttgtaagttcttgtctacctcctttaagccattctggcattgactttgcataatttaatgaacacatgaaattttgatattgcagctaattaaatgacgtagagttaaacttagtttctctgctttgaaggatcgaacaaataatttattcaagcaagtatatgaacagaagagcctgaagggaagagctaatgatgctatagcttctgcttgtctctatattgcctgtagacaagaaggggttcctaggacatttaaaggtaagtttttagctttgtttttttgtgtttgtttgtttgtttgtttgagatagggtctcactttgtcgcccaggccagagtgcagtggcgcaatcttgactcactgcaacctctgcctcccaggttcaagctatactcctgcctcagcctcctgagtagctgggattacaggcatgtgccaccacacctggttaacttttgtatttttagtagagacagggtttcgccatgttggccaggctggtctcaaacttctgacctcaggtgatctgcccactttggcctcccaaagtgctagaattaacaggcgtgaggcactgtgcccatcctaaaataacattttctacatcatattaaagaaacagaccaatgtcaggcagctttgacacttagaagctaagtcatctttattgtgactacagtaatccacttgagcatcatttgccaatgcctacttatttcattccttgacagcaaattcatagcatgttcttt

SEQ ID NO: 54902 - DNA, 1048 bp, Homo sapiens
ttttcatcagattgttactttgaaacagaagcttaggcttattttctgcgaagcatttcccacgcaaacttagtgacattttaatatgaaattatttgcattaataccattctaaaaaatgttttctctttttttcccatgcctattgcaaattttgtgcaaaatctggttcttaatcattattacattggtttacctttgcatcacatatgaatagctgtactttgctacttttgactaatactttttcttccaagagttagaatatcatagcataatgtttcaagaggattattgttagattggcacaatagttaaaggaatgctttaggacaaatgtctgaaatgtgatatttaagcttggtcctagatgtccatgttgagatttcctgggaataaaatggcttagttgggcattggacagtgtagttaagtaaaccctatcttgacaaaatgattcagatatgtgcttatattcttaggtgaccgggttattgatgtgggatctgaatggcgaactttcagcaatgacaaagcaacaaaagatccatctcgagttggagattctcagaatcctcttctgagtgatggagatttgtctaccatgattggcaaggtaataagtccatttggcaggaaataccaattgcagagtgaccatagacctgagagtttgggaactttgcaaaagtatcagtcactgcaccagtggggaatcttgacctgtctaataagatttgccagtaatatcattgtgaatgatggctaacttgtgtgtgtattccatcttaaagtggggaagaccattaaatcaaaattataaagcctttatatcaggccttttttcataaatgacattttctgtacacacaaaaaatgagtgtagtgtggccttcatgagttaatattgatatgttctttgaatatcaagaatgtcttctcagctgggcatcatggctcacacctgtgatcccagcactttgggaggccaaggcaggcggatcacaaggtcaggagttcgggaccagcctggcaaatatggtgaaac

SEQ ID NO: 54903 - DNA, 1056 bp, Homo sapiens
aggccaaggtgggaggatcacctgaggtcaggagttcgagaccagcctgaccaacatgaagaaaccccatctctactgaaaatacaaaaactagccgggcgtagtggtgggcacctgtaatcccaactgcccaggaggctgaggtaggagaatggcttgaacccaggaggcggaggttgcagtgagccgagatcgtgccactgcactctagcccgagcaacagagcaagactccgtctcaaaaaaaaaataataataataataatgtttagggtccttcacttttgcatagtttccaaactatcatttaatgaacacatttttgactttcttccccaacaaataatttattgcaaaaaaacaattaggaaacagaaacgagtaaacttattcagagatatattttattgtatatccaaatgtatatttttataatgtggggtgggagctaatccagaagaaacgaaaaggccccagtaatttcataagtccttagtctgaaatatttggtagaggactggagagatgggctgacactcatgcatattaaataatgaatacatgtaatcaaacttttgtggcttttttatacattgggaagtagataaacatgatttttgagtcccacttaaagccttttagtcaaaaagaagatttattataacttttatacagtcatctattgatgaatatcttgtataaaattattgccaaaaataacacttaaagtttcaccttgttcctacttgcacactaatctagatatgcagcagaactttagactacagatagtctgttcaaaaattattcttgtggtggagttgtagcatctgagaataggggtaatatttagcagtttgaattacttaagaatgaaaattctagaaggattgtgggcagtataacagaagcattagtagtggcatactgtggacttgacttacttggtccaagaaggctgcttgcctcagacctatagtgggagttttaaagtatagagttgctaataggaattgagaatcatttgcaaccgtattctgctgagtaaggaatatta

SEQ ID NO: 54904 - DNA, 1063 bp, Homo sapiens
ttttccagttgaaatgtattaacacaccttccacaatcattttataagagtcagcataacatagtggataagaaatgtgagatgtttaacctctcagtaactcggttctctcattataaaataggaataaaatcagtacctgtttcatatgaaggtcgtttctgagaattaaatggactaatgtatgcaaaaagcctggcaaacaataaacactcatctgactttagccggtttcatgtttccaccattgtgtaaaaactcctaaccagttccacccctcaaccacatctatttgttttgtgtacccacctgtagttcctccccttcatttaccaatggccttgaactctgttcacagttttgcttcataccccaagtactgctgttatttgcggtggcttcaggtccacatagattagccaggctttccatactttgacatcctcacctctggtgatgttcacctccactgcacttcagccaccgctgccttggtcgctccctgaggcttttatgattcaagtcggcttcaccttttgagatcacaaattcatcatctcccactataatgacctattcttccagctcattgttgctgtcttgtgcacatgctctcccttttttttttctctctctctctctctctgtctctctctctcctccatctccttctcctcagctcttttcaaaatatcacttcttagccaggtgcagtggctcatgcctgtaatcccagcactttgggaggccgaggcgggtggatcacttgaattcaggagtttgagaccaggctggccaacatggtgaagccccatgtctactaaaaatacaaaaaaaaaaaaaattggctgggcgtggtggcgtattcctgtaatcccagctacttgggaggctgaggcaggagaattgctcgaacctgggagatagaggctacagtgagccaagattgtgccactgcactccagcctgggcaacagagtgaaactccatctcaaaaaaaaaaaaaaaaaaaaaatcacttctttaaacttactacaatttcaaatccactatttcacaaaaa

SEQ ID NO: 54905 - DNA, 1048 bp, Homo sapiens
ctcccttatacaaatcagcaaatctatcttcaaatcacagacaaagccagcaggtagcatgcttattactcagaacaataggtatagtgcatgctttggcagtggaaaacaaagaattcaatcaaaaatgattaataatcaaagaggaggggccaggtgcggtggctcacacctgtaatcccattactttgggaggccgaggcaggaggatcacttgaggtcagcagttcacaaccagcctggccaacatggtgaaaccccatctctactaaaaatacaaaaaattgaggtgggtatggtggcacatgcctgtaatctcagttacttgggaggctgaggcatgagaatcacttgaacccaggaggcagaggttgcaatgagctgagattgctccactgcactccagcctgggtgatggagtcagactctgtctcaaaaaatataataacaataataataataataaaagaggaaccaactgtgaatctatataggacagtataaggaaaagagaaaggtacaaggaaaaacaagtgttagagaatattcgcccaaaaaaaatgttgccatggagcaaataaaattagtgctatttcagatttaaaacctttaaaatgagaaagcagagattttacgaattcagggaagatagagtaagatattataagaagatcaaatgggagctatcagagttcaggtaggaaattgaaaagaaaaaataaagctattggaaattatggtgacattattaatagaaacaccacaaagaacactaaatacttctgtaaggacattaaggatggagataagtgagcaaaaggaagtagaaaggaacaaataatttttaaaatattaggcagaaaaattattgatgcagaggaaaaataaaatatgtggagttgccagaaaaaaataagagcagaacaaatggaacctgcatataataataattgtcacacaattattaacactgagatatacctcgcttgatatattgggcttcaaagacaattcctttggtcacctagacagtaagatcaaggcctcc

SEQ ID NO: 54906 - DNA, 1040 bp, Homo sapiens
gtaaagccaattaccatccataatatgggtgggcctcattcagtggaaaaccttaagaggaaaagactgaggtcctcaaggaagagggagttcttctgactccagttgcagcatccgttcttccctgagtctccaacctgctctgcagatttcagatttgccagccctcacaaacacataagccagttccttaaaataaatgtatgtatagctcacatttatttcaatgtttcatattagaagtgtttcattctttatttagaagtatagtagtgattttgtgaccagaaatatgctgtagaaactgaactcttatttatctcaattagcctatggtaaaattggtcatgctgtatatcattttgcttaaagctgcagtttccaagaacctatatgacacttttaagtgatgacttgctgtactgcatttaatagaagcacataggagaagcacctgaccctgactcgtagaaccaaagaaggcttttgggagggaatgaagtcgaatttgagaactgcacttggcaagtggaataggagttagccaagtgcaaggaagggtggtggggaccaggaattggactgagtagagaacatgcactctcaacaagggcatgatctcccccaggagaagaaaatgggtgcttggcagacaagataaatcttagctatcacactgttttgtcaccatccaaagctcaatcctatgtgacaaaattgtattcctcttaatatttaattgaggggagggaagatgactaggaaagaatttctaagaaggtctccttaggtgggcaataataaaaaaaaacattgagaaacattggtatagaaagagcatttgggcataggaaagatcacacatgaaactactgaaatgagagagaacatagactatttgaaaaattagaatgggtgtggcatagaattgggagggaagaggaagcaggaagaacaatgagagaagaggccagtctagaaacaaattttaaagaaaattaaacctgaaagtgcatttcaacctcaattatctaaataat

SEQ ID NO: 54907 - DNA, 1051 bp, Homo sapiens
gccaaactgtttgttttccaaaggggctatacccttttatattcccaccagggttgtatagagttccaactgccaacactcagttttcagccattctgatgggaatctagtggtatctcattgtggttttattttcatttccccgggtgactaatgctggtaagcatcttttaaggtactttttggccagttgtatattttctgtgaagtggctgtcaaatcttttgcccacttttaattggattgtttgtcttattgagttgtaaaagttctttatatatactgtattaaagtcctttgtaagacacatgttcgtaaatacttttctttcattatatggctcagaatctggcaactttttaagagatacttgagcccactgaatgatatatagatcttatagtttttttaagtcaagccttaataataattaacattttttgagtgttcatctctcagtccctctatggccatgaaggtgggagatgtgactctgtttagtctcaagtaaagaaatgcaaactgagataatgggtacaaatggagatgaagcaaagccctgtgatgttcaagttcctggtttctgttaccattcagtctggctggacctctgcctttcccatggtaacatgacctttctaatgaattctcccttttcatctaaactgtttcagattgagtttctctcacataactaagagatctgattactatagcttcggagcttctaaggcatcttatgcacttgtctcttccccactgttcaatctgaagcatgtactctgccctttagcaaaaatcacaactccaccaggtgtggtggctcatgcctgcaatcccagcactttgagaggccaaggcaagaggattgtgtgaagccaggagttcgagtccagcatgggcaaagcaagaccctctctacaaatgaatgtttgaaaaaaaaaaaaattaaggccgggcatggaggctcacaccaataatcccagcactttgagaggccaagacaggaggatcacttgaacccaggagtttgagaccagcctgggcaaca

SEQ ID NO: 54908 - DNA, 1452 bp, Homo sapiens
acttggtgtaagacttacacaatctctcagtactattattttagaaaatgaataatcaaacattcataattggaggggaaaggtagagatacacatacttagttccagattgttctagtccactttctttcctagcctactttgaagaacaaggagcagttattaaacataatttaaccttctttttttcaacaaagtgagttatcatttgaaccaagtgccagaaccttgtggcattatgaactgtcataaaatgtggttaaaagtcttagtagtctgcgcagtgcattctggggaccgaggtcgagccagccactgctgccgtcgcctgagggaagcgagaagaggccgcgaccgggaagaaaacgctgagtcgccactggagagaagtggactccatagcagcagaccccgccagagaggcccgcccacccgttcgcccctccccctgccccgttcacaatgcagcctgcttctgcaaagtggtacgatcaaaggcactatgtcttcattgaattttgtgttgaagacagtaaggatgttaatgtaaattttgaaaaatccaaacttacattcagttgtctcggaggaagtgataattttaagcatttaaatgaaattgatctttttcactgtattgatacaaacgattccaagcataaaagaacggacagatcaattttatgttgtttacgaaaaggagaatctggacagtcatggccaaggttaacaaaagaaagggcaaagcttaattggcttagtgttgacttcaataattggaaagactgggaagatgattcagatgaagacatgtctaattttgatcgtttctctgagatgatgaataacatgggtggtgatgaggatgtagatttaccagaagtagatggagcagatgatgattcacaagacagtgatgatgaaaaaatgccagatctgcagtaaggaatattgtcatcacctgggttttgagaaagaaaaataacttctctgcaagatttcatgattgagagaattcctgagttgatctaaaagcagatgctgtagctgcctactttaacccatttttcaacctgtttgttttttaaagggcttcactaagggttgatatgtaccattgtagggggcaattttaagtcagctaaggcaataaccttatgcatgaacatttcccagactttcatgaagctgttgaggtcctaggcaattaatgcggcagttgtgataaataaaaacatctcacctaagtctccttttcttcataatatagatactgacatgatgataggaagctctcagcttagggaaagagagctaaattttagattatagaacatggattcaaaagtggctgaacaaattggctgacaccttactggtaacctgctattcctctggtgttatccttcaggattgttccactaaaatttatttttcaaaaaatttacttca

SEQ ID NO: 54909 - DNA, 1125 bp, Homo sapiens
ttctagcgttgctttaatttagggcccatgtttcacttctgacataggactgtaatatcagaaagtatttctgacaactgcttcatttaattaatcattcaaaaacatttaatacatagtctactggctagcatacaaaagccaaggaaaccagtcataagtttcttcattttgtggtagatgtcttcccttcctctccaagagttctttcctgactctcgctcctgtacaaaaatggattttccatgccttcattggattagcacaaggctgttttgtatgattgcataaaacaagatttacaaggcaggggagctgcagggatgcaaagatccctggaaaagtcctcagcccccttgcctgcaggctgtctcttcaatgagccctcttttttacaattccacaggcaagaatcccaaaattcaaaattcaaacatgcctagagagtgtatcaggcatttcttccgaaaacggaagtgctttgtctttgaccggcctacaaatgacaagcaatatttaaatcatatggacgaagtgccagaagaaaatctggaaaggcatttccttatgcaatcagacaacttctgttcttatatcttcacccatgcaaagaccaagaccctgagagagggaatcattgtcactggaaagcgtgagtctttttttgtcccaaagcatgtctgtctgtggtccaggatgtgttgaagctgtaatgactgcaagtttttcaataatattgtttgcttctgtataggaatgcagagaaggagatgttcattgcacacatagaaatgaatgtttcttaattaaagtttactcatgtgaaactttcttgaggcctaatatgtctcacaaaattaatacactaatggcataaacacaaactcctaaggagagaaatctgcatgatgaggaaaagtcctataggattagtgtttctcagtgaagatatataatatattttataaatttacattagtcaggaaatcaacatcaggccatgagttccatgcaagctcattgagagtttgagaaacaaatttaaatgtcatattaagtacggggctagcttcatggcatgcaacctgtgtagtcgtccactccctatggtgagatgggcctgtg

SEQ ID NO: 54910 - DNA, 1007 bp, Homo sapiens
gtgacctcctctttgtctgattcatagatttctctttgtctccattttgagccgttacttggcatcattctcacatttaatgtccctcgcttttttatatagattattcacaaagtaagccattcttgaggaaatacagaaaggaccatcatgtatgttggggtagttacaatccaaccagtctgatgctgtggccccagggcggcttggctgctctgctgtccctgtgcttagcttcctcctcttccctgcaggcttccctctgggctccacggtgcagtctgaaaccaagggcatctggatgtggtgcgtgccccacccatccaagccaaaccacaccctggtccttctggacaccgaaggtctgggcgatgtggaaaaggtaagacagagagtcatagacaggttccttttattccagacgtgatccttgtaattaaactgttgtgatctatttgtgcaaactagaaatccaactatagcaaataaggcaaactttgacctgtttgaatcacacttctagacaaggttagatatcatggtatattaggtaaaacattcttttatttcttggcacagtggtgaatgatttgattcaatttgataaaaggttgttaagcagttgagttccaggccttggggctgagtagcatagacattggtgaacaaagtaaaggtcctgcccacaaagagccttcaggatgtagtgtgactgggaaagaagcaggttgctgagagggaggagatgggaatgcaatgcaatccctgccctctgtcaattccatagggaactctgtggctggaatggcccttttgagttatcatgttttgggacaagggtgctaggccttcatccctggtgctggtcaatcactggaagtctgccctggaaaactttctcattaagagagctgacacctgtgatccaggcagcacctcacagctttcaccacatacagttgtgtataacagtgctttgataagaaagagaagaggtattgactcca

SEQ ID NO: 54911 - DNA, 1053 bp, Homo sapiens
ggcagctgactactacagccagcagatggcccagcgagtgaagctccccacagacacgctccaggagctgctggacatgcatgcggcctgtgagagggaagccattgcaatcttcatggagcactccttcaaggatgaaaatcaggaattccagaagaagttcatggtaatttgccttagtcattactgttcatcatccttccccttgaagaatgaagcctatagttgcctttattgtcaccaatgctcatctgtcactgaggaataacttattgtggattctcatgagggatagagtttcaaaagactacatataagcacttaactagaaaatcttctgataactgaggtaaaatcaatacagatcacttaagatcctcaagtgaacacttctaaggattccaggcctgctctgaacacgcacaagtcatccctgagcagtgcactttttctgtgcatagtttacctttcccaggaaacaaagattctcttaccagatcgtaattccgggccattgttcaacttacattgctccttcttgtatccttgtaccattgaggacaggaacacaggatgataccattgcaacaaaccatagagattatggaatgtagtctcatcatgtcacagataaggaacctgaagctcaggaagattaatgaacttttccatagccttgaagagaatttctagcattgtaaatgtatgaagttttgtgtttctgattccacatctactccactagaatgtttttctcatgaggaccacagttagattgactctaccaccagattctttagaatttcatctcctccatgtttcttctggtgacatctctctacatttcccttgcaggaaaccacaatgaataagaagggggatttcttgctgcagaatgaagagtcatctgttcaatactgccaggctaaactcaatgagctctcaaagggactaatggaaagtatctcagcaggaagtttctctgttcctggagggcacaagctctacatggaaacaaaggaaaggattgaacaggactattggcaagttccc

SEQ ID NO: 54912 - DNA, 1024 bp, Homo sapiens
tcaattacctaagattaaataaagtgttccagctactcaattccatcacctggacaattatttttaagtttattattttttaagttttatgttgcttatatttttatgtttagggacctgtatagttttaaaataatactatgtttagaatataagttgtgatacatgaatcaaatatttggagctatagaagctgaatgatccatgtgtccattacattgtagtatgagggcctgaaactccttctacctctaaattcttgtttctttgcctatgtggctcttttctttttacttgacgagcaaaagaagtatactttgccaattttgttatctgttgtaatggccctaacagtgatgtgaaaatatgtctgaatcaaccccacgctttgagttttaaaaaacccacacagtgtaaccttccccagtcatgtcagcttttcccctttgtgacacgaatgaaagaacaagagcattggagtgggagttggaacagccagtgctgaccgtggcacagcctctgccaggggtgagcttggagatacatttatatctctatacaaagcatacagcttcctcaggaagagcccaggagccccaaggaaggttttgagagattatatcagattagttttgggaagtaacactggcaactgtgtggagggtgtgctgaagatgagagagatcatattgcgagaccaagtagggcagtgggatgaagtagaggagactagtagaaaagttagtttagaaaaaagtcataggattaaatattctatttccttttatcagaagatcctatggtaattacttaagtcaaactgtgattactgacattttactagttttactatagcttctaactttttcagagaaggagtggattaagttttgaaccagatgatttggggtcaaattgtcaaatttcaggttaccagtgagtgtgctttatattagcacaactttttaaattatagcttctaaacatttatgtcttctgactggaaatgggaaaagatttgggg

SEQ ID NO: 54913 - DNA, 1056 bp, Homo sapiens
caatatatttaatttgtgtaactcatttatattcattttaaagcaataagaacagttttcctgttttacatgagtatagattttttgtggttttatatatatatatgtaacaaaatttactttttaaactattttaagtaatttttccttttttaagtattttaactatttttaattctgtggcattaagttcatttatattgttgtacaaccatgattatagattttaagtcgtgaccctctgcttgggtgacagtcatatcagacctgtctgcagcataaatcttgactgggattatagacattgcatcaaaaagtagaggttaccggcacaggttaactttttaaaaacattgcatcaaggtatattaaaggcttcacaacactttgccttccttatgggccacacaataaattattaaggaaagttacatttcttttcacgacactttctagtaatgagtcttgtgatatatggtgagaactggcatggaaatcacaacttaggtggaaaaccaaacctcctaatatgtaatctggtatttgtttataggatcatactttaaaggcaacctttaaaggattaattttagataaagttactactatgttaataaataatcatgtttagtgcttacattgtacctgctgctgtgctaagcatttgaattgtagttgtctcaattaattcttaaaacaactccattaggttgaaaccattattatggttattatccctattttacagatgagaaaagggatactcagcttatctaagatcaagcagatggtaaacaacaaagtcaaaactcaatcttaactattctgcttccttcccttccaagtctctcacattttcatcagttttaggataagaactaggcctaacaaagtaacacattgaaaacatgtgatactcctttttaaagtctttcaaaaagaaggtcatatatgggtaatatggttttgatttattttaaccacattgtaatcggtatgtctggaagaaaagccatgtaaaacactgttatttaactacagattaaacttgagtta

SEQ ID NO: 54914 - DNA, 1059 bp, Homo sapiens
ggctgaggcaggaaggcatcaaatcagatattggtgatacagtttaatggaagcataatagaactatcagtattccctaaatgctaaagaagcatgaaggactaactacttgtttagggggacaagtagggtagcagtgtttgttttaaacatcttttgtgtttaatagtcacttaaatactgaacattaaatgtttgtatttggtggtcagaaattagctcaagcactaggctgatttgcagtgcatgacaatttgattttgtctttgggttaagagtgtgttatagcagatgtagcattatttacggtgatcattatcagacgttattggttttatgagactaaagctatctaaggacgtgcaatattgtcagctcaatcatagctcacagcattgtggaattagaacatttatgaagcacctaatatgtggtaggctctcaggagactagaaaggtctttgccctccagagttcaggacaagtgggcacagaatggtttgatgtgcagcatgcttgtttggatgataccttgataatcccattggtaccagtatagttcttgttgcattatactaaggttaacttgtggaaaagggaatgattgtgaaatcataatttgataagatattaaggtcattttggaatgctgtggcatttatccagtgtccaacactgattcaaaatgactctcagtcattataatgcaccagtcatgctgaatttgacagcagttccccattcagatttgtaaaacatcccatttggtgagtaagttggcaaatataaatttttctcctttctccctgaaggatgaagacttagcctctgcttctgaatttctgcccctgccatggggtgatggaaatgcctgaggctctgtcgctgtcatttgctttgccacccttccatacccaccatgtgtttgcaccagtggtgttcacagatctttctgaaagccaggccttctcctctgtacccttggttcctaaatgggtggtgaaacctgatctgctgtccttcatttactcaacaatgatttactaaatattcatggca

SEQ ID NO: 54915 - DNA, 1066 bp, Homo sapiens
taatgttagagaaccactattagaaaaatctttctttctaggtctcaaaactacgactgagtttgggaagcatgtttgttatttgaaaatcactgtactaacaagatttgaaagaactacaaagggacataaggaaactagtatatcaaatgttattgccggtgatcatttaagcacttgaaatatgtttaatgcttgtcattaaatctctcaagaatggtgaaatgagttacttagcataaagaaaaggggcatattaatcagagatactgatgcattgtttcctagagagagaactcaacaaaaggcgaatttaaatttcagttagatatatgttagtcccaagaaacatcttaatgggaagtagcactaaacattttgaagggatataaggtgatttttaaatcaattttcaatgagagtagtgtagagaaccgctatttggaattgttcggctataatccctgcctggggtcagagacagatctttgaagtagcgtcctcttctcagtatataatgacactaaataccatctgatcatcatttgtttattttttcacttgttattttagaaatgctttcaaagtaaaataaggactactgggaagtaaagatgcctaacttgaatgttgatgttacagtcttagagactttggagtaagattgtcaagtgaattcatgtgttttgaaaaagcttttatgacttcttaatgaggtttaaaagctgaaataatgggattagaaccgtaaaatccattactcttaacatttctttggattgatttagtgtgtttgtatattagaaatagatattttatttggattgaatcatcattgtttactaaaatatggtctggaaacaatttcctggacagacagtattaaatggcataatgacaaaagatagctatgcttaaactctctagttaagcacttcaaataggaaaattatcatcattttatacataggaatgctgagatgttttatatatacttaaatccagatgctatatatttaaatattaagttttagttcagtagaaaatatttagtaggaaaatgttt

SEQ ID NO: 54916 - DNA, 1054 bp, Homo sapiens
cttgttcctatgctactaatatttttttctttctttctttctttttttcttccttttttttttgagacagggtctcacaggcctcagactcttggcctcaagtgatcctccctgcttggcctctgaaagtgctggaattacagctatgagtcaccacagccagccacctaatttccagtggtcacattttaccttccaaaatgtctgagtaagctcctttccacaccttgtcccatgtctgaagcatcacttacagcccaagagttgttttagtcaccacaaggagcctcttttaagcaagctctgctttgtgaaattaccccttaggcttagtggggtctacaattctatgcccagaacaacctgtcactgaatgcattatctcctttccacacaagctttcgctttgtaatttaagtacatgagtatgaaaaaacttagagtatttaaaagttgggaagtatttaaaagttatggcttaaaaaagaataagaaagaaaagctctgctagaatattctatcatggggactccctctcatgtttaatgttgtgatggcaaagtactaaaaggataaacgatggaggcatattccattattaaattacttttgccttcaggaaaacaagattatcttgtattttcatactgaaaagtattcagacaacattcctgagaatttctatgttgagtcttacatacatcaattgtttcaaaaattgctaatcagtaaaatccagatgatctataagatggcacagagtaaagtaaaaggaaatatgtgggtcttagaaaatatctgataagaaaaagaagaaaaataataatggtagcatggtgcccccttgctggtagtccagctctaatctattttcaagggtttctcttggattttcttgagtctgaagtcttatcatttattctgggccagagttactctctagacactctagtattagtagcatccccaaggaagccttttttttttttttttttttttttgagacggagtctagtggcgtgatctcagctcactgaaacctccacctcctggg

SEQ ID NO: 54917 - DNA, 1133 bp, Homo sapiens
gaaacagatcaacctcaataatgaatggacagttgagaaactgaaaagtaagcttgtgaaaaatgcccaggacaagatagaactgcatctttttatgctcaacggtcttccagacaatgtctttgagttaactgaaatggaagtgctaagcctggagcttatcccagaggtgaagctgccctctgcagtctcacagctggtcaacctcaaggagcttcgtgtgtaccattcatctctggtcgtagaccatcctgcactggcctttctagaggagaatttaaaaatcctccgcctgaaatttactgaaatgggaaaaatcccacgctgggtatttcacctcaagaatctcaaggaactttatctttcgggctgtgttctccctgaacagttgagtactatgcagttggagggctttcaggacttaaaaaatctaaggaccctgtacttgaagagcagcctctcccggatcccacaagttgttacagacctcctgccttcattgcagaaactgtcccttgataatgagggaagcaaactggttgtgttgaacaacttgaaaaagatggtcaatctgaaaagcctagaactgatcagctgtgacctggaacgcatcccacattccattttcagcctgaataatttgcatgagttagacctaagggaaaataaccttaaaactgtggaagagatcattagctttcagcatcttcagaatctttcctgcttaaagttgtggcacaataacattgcttatattcctgcacagattggggcattatctaacctagagcagctctctttggaccataataatattgagaatctgcccttgcagcttttcctatgcactaaactacattatttggatctaagctataaccacttgaccttcattccagaagaaatccagtatctgagtaatttgcagtactttgctgtgaccaacaacaatgtaagtaaatccattctttcttttattcagtatctgccgtacttatagtgcattacatagggaaagaaaacacacttcaaatcatactgtgtgttctcaagccaagcccaatccgatcttgcataaattaccaaaacactgagcatccatttttaacctaaattacaagtcatcgtggaga

SEQ ID NO: 54918 - DNA, 1039 bp, Homo sapiens
aaatcagtgatccactaaggtaatttttggctctctggctcatgtgtcatacagtctaagaaagggcatgctaaataaattagttttaaataattgttttctaacattttttatagaatttgttgacccaggcaaaattggagttcttgtaagcttcaaggcaaactatttttaaagctgtaagtagatttttcaggataaaattgctgaattgaaggaaagtcttgagtctttaacaaaactccccaggctcctttagaaaaattgaatgagagtaggtgaggtaagatcctgtgccttagctgggcagagagctggagagaaagccccagagatggactctcgcacatagccagcgcagcccttgactcactttcacagcagcaatgctaaggggctggccctgaggcccactcccactaccttgggaaatccctctcttctagtggagcctaagaagttcactaaaatcacagatgtagagatttggaaggagactggtgggaatgtggtagtgctgatagccagacaagagagtgagggcagtggcttcagggtaatcacccagtaggaaatcagtccagttaaacgaggtacttgctgggaatctgaagctgactgaagaagggaaatacggaatgcctaatgcagctcaggttagggcacttttcttcataccactcattacagacaattgtgtaatcgtttcatgtttctctcttccgtgagacttgtgcttctcaactgggaatgattttgcctcccaagagacatttgtctggaaacatttttggttgtcacaactgggaaggggagtggcactggtaactggtgggtagaggctgaggatgctgctaaacatcctacactgcacaggacagccccacagcaagaatttttccacccacaatgtcaacagtgctgaggctgagatgtccatggtgacctgcattaggctaaagttttcaaaggcagtctttctaactcagtacttgatcccagcagctagctgggagcctggcacattagaaggcactca

SEQ ID NO: 54919 - DNA, 2140 bp, Homo sapiens
gggtaatttatttctgatcaaggactcaagagtaattatgatttttcttactggtttgtttttatcttaacgacaatgtgtgtataactacattttatttaagaattgcttgttagagtgtttaaaaccaaattcgttgcccacccatatacagcaaggatgtaggtgtccagggtagccacagtcctcactcctcattgtactcctgtcttcattttccctctatcttttcatctacttcaaatttatcatcattgtagtctgcatcacttataaacctccagaaatgttttgtttttttttttttggaaaaaaggtaaatgtcttatcataagccaccaaaaacctattttaccagcttcttttttcttccctttccagattgagatgctaccagatgggctgtttcagtgcaaaaagctgcagtgtttacttttggggaaaaatagcttgatgaatttgtcccctcatgtgggtgagctgtcaaaccttactcatctggagctcattggtaattacctggaaacacttcctcctgaactagaaggatgtcagtccctaaaacggaactgtctgattgttgaggagaacttgctcaatactcttcctctccctgtaacagaacgtttacagacgtgcttagacaaatgttgacttaaagaaaagagacccgtgtttcaaaatcatttttaaaagtatgctcggccgggcgtggtggctcatgcctataatcccagcactttgggaggccaagatgggcggattgcttgaggtcaggagttcgagaccagtctggccaacctggtgaaaccccatctctgctaaaactacaaaaaaattagccaggcgtggtggcgtgcgcctgtaatcccagctacttgggaggctgacgcaggggaattgcttgaaccagggaggtggaggttgcagtgagccgagattgtgccactgtacaccagcctgggtgacagagcaagactcttatctcaaaaaaaaaaaaaaaatgctccagggctttaaatgagaagtaaaattttctaagttaataaagatgaagaatgggtgactattatgatgaaccataactaaatgtcttattaaagcaactgagtgtctagccctaaattaaccaggtaaaaactgttaacactaacctgaagttttgtgaataactgttctttaacttattgagatgttgcaagaaatgcacatccagggtggactgggagctatgaaatgactaaattcctccttgcagtgtttaccttcaagattgtataggtattctctcctcttcttcccccagtccccattacttatttgcacacttgttttaactgacttcctgttttgatatttatcaccaagaccataaactcatcaatatgaattttcttgatgtatactcacgactgtctttgatttatgttcctaaatttttttagatagggtatgttgtgcttggcagaattcttttttggcttaatttttacttcctttcccagcttgcttgagtcttccttaacctggttttctcttaacaccaatgatgaaccctgagaaaatgcctgcatttggcctttgcctagaacaggagctgagtatttaagatgtattatcctcggggcatcctgaaaattaatgtattccctaaaatttcttcttgtctatcatcaaggcctttttttatttgttaagaatttttatattaaatgtaaaacatataaatattttctattgtataatcttggattcaacatctgtgaggatcatttttgtaagatacatagaatttgtgcatttctttatgaacttactgttagtgttcttggtttcggctgtttatgactcatgtttatgtacattctgctccaaaatgtttttgtactctgcaactaattacttttggataacaaaagccttgtgtttaatgccctaaagtatttgggggtttccttgtgagagggtggccgaatcatctacctctctcttccatagttgctgtgcaatcgtacgggtaaaattcttaattacttacaaaaactgtgatagaggggagaggtacagatttggtttttaaattgattttaaaatactttatagaaatttagtaagagttaaagcaaaagactttttttcc

SEQ ID NO: 54920 - DNA, 1141 bp, Homo sapiens
cagtgctgtggcatagctccaataggtgtgctgtggtgcactgcagtgatgtatttgcataacattgtttgatagtgaaaaattttttttcggttcaagtgttttgtgattaaaattttatgtttaattaaaatattgcataatattgatgggttcaaaaaccattaaaataatcaaacaattattctgtgcccttaacattattttcttgtgttttcaataaaattttcttttcatctttccatcttcacattctcttagcatcatcctatgcacataaggtatgttgttttccttctccactcacctaccgcactaaatttgatcagcaattgtacagtaacagaatatatttgtgccagaagatttgcaatgatatttgagcatgtatttatttaggaggaagccagtgcctgtaattatgtctcattgagtagttttactttgcccatcctgcagtatttagagctgatctgtacccaaagcaggacaatgtaactgtagatctgctttgttttcagtaactgtacattgcatcagaatctgtttatttctatctggaaacagacagaatggtgggggagggaaggagttattttgcatcctagtttgtattatgaagtcatcatatatatatttgaaatagtataagctaattactgttgcagaatgccctcgatataattatttcttttcagctggatgtgaaaagctgaagcagtgaaaacctgcagtcttatttcactggtttccttctgtttcttgtccatcacttctgtatccacagggagctatctactacatacctttggtaacaggctacattctcttcagattttttatatgaataatttcatcagcactaaagcattaacatagaataatgagccaaagtactgagtcgagatggctttcagttgagtttaatttcatatttaacttttgcatttaacttgtataatacactactgctgagaaaaacaattatgaatgccttctgcatgttgtacattatctctaacagagatggtgcaattttaagaatacaaaggggtatagagttagaatggatgtgttcgtgcatatatatgttgtatttaaatattaatgtttacaagaagattttttttaaattcttcaa

SEQ ID NO: 54921 - DNA, 1069 bp, Homo sapiens
ccaagtagctgggattacaggcgcctgccgccgcacccagccaatttttgtatttttagtagagacacggtttcaccatcttggccaggctaagcttgaactcctgaccccatgatccacccacctcagcttcccaaagtgctgggattacaggcatgagccactgcacccagcctctccttatgtattttaagaacttatcaaaatcaacaaaaattactaactagtctttttcaaatatcttagagatttatgaaaactagaaactggctcaaatatctttttaatatgaaagatatatcctataaatgtaacttctgggaaaatactgtagagaaattactatgagaatggcttcattagcaaaacattgtcaggctaatttatattatctcttgatattagcaaggttcagtataatatgcttatcagtaaagttaggagatactgtccagcacacataactttctagttagtgcactgctatgtggacaactgtgaccagaaagtgattatcaactgaggaagtagcagctggaggtatgtccagggtttggatctgagttgggtgttttagaattttatctgaggatctggatggcataatagaaaacatgcaggtgatatttatataagtgactttgtggtgtatagagtgccttgattttgaagcaagaatttgaaaagagtttggcaaaataaaatatataaaattaaagtgaaaggaaataatcaaagataagcaattaaattcatttaaggaaagcacagggtggtacattgaataaaaccaagcaaatgacataaatatactacatttgtatttgttttgttaaatttgtttctgtagtttccagtatttagaatagtatatgacatgaagcaaacatttaatacacatttgctgaataaatatatgaataaaatataagatggaggaagacaacatgtgattagagcaaaattaagattattcctaaggggatggaaatgcgtaagtactaaactgttagaaaaactttttggacaaataatttctgagcatgtgttaaaattttatttgtcttag

SEQ ID NO: 54922 - DNA, 1023 bp, Homo sapiens
atagctaacctagatttaaaaaatgtgggttcaaggtcactagacttttcactgacacctaacaatttaactggatggctaggtagctggtttctaagaacaagtgtttccctattaaacttaatcagaaaattgcttaattattaggaatatgtgtttcttcatagaaggagattgtgaattctacttcacaaataggttctgttgctgatcaagttagaaacttttttttttaatagtctctcaatttagacagtctttgcaggtctgtcttggtcaaggaagtctatccatctcattacatttttgcattagggtcattgaatttgttacctactcattaacttttaggtttctttatttacactttgcatccagagtcacagttacaagcactatttatataaacactgataatactttgaactggttttctataccagggaagattttcaaagcataatctaaactaacatagtttcagtgttatctactttatataatttatggtcctgggcttctatatttctgtgttctgttctacttagcatgctttgttttaaaaggtaccgcaagaggagcttattaatccgtttaaacgatctttttatgtgatcaaggcattcgctgccatatgatattgcacaaccagtaaggccaatgagttaacatctttgtggaagctttgtgaaatccttgaagttatgtttttattgcttctttcacactagaagtaatttttatagtactttcctctcagcttgtctactccaaggccagaactcagggagtatctaatttatctccatcagattttgcctctagtacttgtaactgtggtaaccctattttcttgaggacgcttttttcctcctcagattcttatcctgctagatagttatattccgtactgcctaaaaagttgagattcttttgaccatagagtagataccagactagtatccagggaggatgttctgtgcattgctacaatttatgtagtgtagcattagtaccttaata

SEQ ID NO: 54923 - DNA, 1045 bp, Homo sapiens
taactgtttacagacacagacaattgtacaggaaacctctgaacccattcctataggatacaattttaactgttcaacaaatgtaaatactgatacaaatatatacacaaacccactgcaggcaaaacacaaaataacttaagatttctgtgaatgttgtcataggataattttcaaaaagttaaacatgactcttaaatatagaatgaacagtcaaagatttatttaactcataaatgagggagccagcaggatggcaaaactggtgcaaagagtgttcaaggaattatttttgaaaggaatgttagaataacattgctagatataaaactaggtaatgtccttcaggaaaataaaacccataatgtttttagttttcttttctaccagccaaaaatctacaagactggaatttaatcagtagaaattaggaagtaaaaaaaaaaaggtatatttccccaagtaatccatgggtgggccaattaaataattattcagtattacattgaaaggatatattgctctacctttccctcacttccaagttttgaatactttttgaaacaatgtacacttgcttatcctaaatgttctttttaagggctttggttgtttcttagtaatatagtaaactttaagccatagaatgtgtcaaatacaaaacactggtggtggaaatcttcaaacttagaacatgggttctaggaacagaagttttgggttctacacttccacacttacatccctccaatatcaaatactgctctgatttcaccctgggggaggagtcctgttttaactccaaccccaagttcaaccacttcttagagctcaaacagctctccaagctctcaacttagatggcaagtcattttaagcccagtagaatgggagtcccttcagatggccattagacattgacattcaagtgctcaaattgccatatctcagaaaaaaaataatccagtgatcaagaagcataacacagtgggtaacaatagcatatatgccatgaagtaccttgatccagaggctgacaataact

SEQ ID NO: 54924 - DNA, 1061 bp, Homo sapiens
ttatgtgccagatactgttctaggctctgggagacaggagtgaacaaaacaaagtccccatttcttagggagcttaccttatgatgcagcagagagatagaagtataactaaatgagtaatacccgtatagtacatctgataaagataatgctattgaggaaagcaacttagggaatgaaaaagggagtgctgggatggcatgctcttgcttttggtgagttggtattaatattttcaatagggtagccagaaaaggtgtctccaataatgatatatgtgcagagacctgaaggaagtgagaaaacaatattcatgccaatatctggtggcagaatgctccttgctgcaggaagtccttagaccgttttctcctctctatatgctgcctaggtggtttcatcctatcactttttataaccctaatgactcccaaacttctatctctatcccagatctttcctatctctagtccagtgtatccagctgtttgtggagcccctccacttgggtgtctagtagacatctcagatttcagatgtctctatccaaactccttattccccactccctaaacctactttctgtagcctctcactccctttataaaatggcaactccattatttcagcttctcaacttaaaaatattggactcataatgattcttctctctcaaacctcacacccaatccatcagctagagcacgagttacttatattgggaaaaactaaaaaaggagtaaacctagggcagtgggaggaagaaattaaggtaaaatacaaagcagagcagtaatagagctactttctgggcagtgtttgatgggatgaggaaaatctaagctgaaggcatttgagccttggaactcaggttgctgggaaatcacatcctaagccacattcccttaaaagagctaaaactttaaagtggtttgctatgttttgatatgtcttaacatcaagagtgagttagttggcaaaactcaagctgtcaacccatgggttagaaagagactttaggtacccgtgagaatgttttacataaagtttacctaaagtat

SEQ ID NO: 54925 - DNA, 1075 bp, Homo sapiens
tttctcctttagatacaaagccttgcattaaatattcattagctggacagacaaaacctaacattctgatttttaggtacattcttatcagttttaatgctcctgaagggccatttttcctggaggctggaggacctgaaatttttccttccatcacaaactttactgagctcatccaacaggaaagaccaatcaacagctggcatgagatggagggcagccttcttgaaaagctccaaagataattagtcaaccgttagtgtttttctgcaattatcaaactttcatggtccctgattctagatggtacattttaaaggtagattcctgtaaagattagcttaactgaaaaggaagataaaaatgatcatactctaaacccattagtctttcagtctctcactttaaacatcagtctcttggtttctgtgcagtgttactttgtttcctagttttttatgtttaacctagctggaaattttaaattttacccctatttaacaaaaacaaaaacaagtgaaaaagtgtttgacaaaaagttgctttagcttccttgtcacactttttggttgacagtttgtataagtaccagtctaccatctatttttatggaaaggtatttgaaaaacaagctacatttcttgtcagaacagaaaagacaactttctccctatgaaatcattaagagttcaactcaaaaaaacaaaaaaacaaaaacaaaaacaaaaaacctttttttgagtattctaggccccagagcaaggaatataaaataaaaggtgaccccttgccttttcagaaaactgtaaattccagaagttacaaaataaacaagaaactttagttttaatgctcttgagggcaggagtcttcttgccttccgcaccctcctctccttgctgcccttcatcagaaagaaagcagcattccccgcacatggctttgccagctcctgtcatgcctgggttttctgggctgcgctgtgtgttcatggtgtgcctgctgcttagaaccctgtgccctctttgttcaaggggtaaaactggattggaggtaaacctcagtctctttctgt

SEQ ID NO: 54926 - DNA, 1083 bp, Homo sapiens
aattcatacggggtggactactcaattcaacaaacaatcctgtgcatcagcaatatatcagacactctgtggggtgttagatgctaaaagaaaaacagcacagcccatgccttcagattgctaattgtctgaagaccatagaaacacataagcaatgttttccaatatgtaaatgccttaatggtgcctcaagagcatcaaatatgatgttgtcatctcagtcactggaagtgagggactcaagaagataattgagtgaagtctcaaagaatgaatatacaaaaccaaaatatatattttaataagacgcatgaaggggaaaactcagcattaacagaatatttagtgtgatcattttacaaagccctcatggattggcacagtgaccggagggcccagatggcatttttcggagagggtggggtcagggatattaaacatcctgcaatcggtgggacattcccacacagcagaattgttttatccagaatgctaatagcacatccatggagtaacactggcaagagaacctgtgctagaatctgtatgtactttatttagttcccagaacaaacctgtgaaagtagattagtcccatttttcagatgagaattccaaagtgtagaaggttagataacttgccccaaagccaagagggatgcagctgagattccaatcttaggctgattctccatgaggcgtctgtcacccctgtgcacactgctatcaaatattatggaaccatcacaattgcacagattgtgagggcaaggtttggcttataaaacaggattttcagtgtaaaagcaagtacaaaatgataaaaagagaaaatcgttacaaaaagtatcaattttatgaattataaattaaaattttaaggggcattcactatatacctgctatttaaaaagaaaaatttgcactctatagtgagcattaacaaaacaagaaagaatgcatggtacaaattatcaaagtaaaactacctaggatccatataacaaattaatgttccataggggaagaatttaagctcttattttagctctgctatgataatccactaaaaatggcttaatg

SEQ ID NO: 54927 - DNA, 1162 bp, Homo sapiens
caataccacatagcctttaactgacagagctacctttttaggtcaggtggcctggctctagaggtccaagcacttaatcacagtactgcctaaaaggaccatgtaagataaagggcattatttgtgcatctcctcttaccaagtatgatgattctaacttgatttgttcttacctaaactatagcatgctccaagacactcaataatacttttgaatgagggaatgaataattgactttcctacaaaagaagaatctgagctccttggaggagtgattttgcattcttccattttatcacctagcagagtgcctaacatatggtaggcaatatgggtttcaataatctgtaaacatgtttttgaaaaattttgcagcaatcaaactttataaattgatctcaaatgcactgaggtggcttatgagtaatgtcatgatgaattcgttggaaaatgaaaaatagccctggtgggctaaatatggatatacctgcatagtcatacacaaataaatgtacagtatatttgcttgaaagtggtagtaatgctgaagagtttcaaattatttgagcctctctctcacctctctcagtttcctcatctctgaaatgggaatactaatacatacctcagttgattatgagggaaagagttaaatgacataatatgtggaaagggcttagccaactgcttaataggcatcgctcagtaaatgttacctaagtacaaccacatattataagtgtgatcaaatttctcaatctagtgtgtctcttaataacataactaacataatatgcaatatctagagcactttatttttaaaagacaggaactcaatacatatgatgctttaaaattacatggtaggagttcagcctaagtaaatggtaaaacaaatgttttctcattttctttcctcccctgcgctacctactactttaatgttctttctattctttatatgggttagacccatttcaaactttctttatatgggttaaacccatttcacttctcagacttatttaaactcttgcgggttgttttttgtttgtttgtttgttgtttgtttgttttccgagacaggttcttgccctgtcacccagcctggagtgcagtggcgccatcaccactctctgtagcccaaacctcttggctcaa

SEQ ID NO: 54928 - DNA, 1351 bp, Homo sapiens
gcttcggccccgggcggccggccctgcgggaggggagtgcggcttcctggctcctgaacccctcgcgcgcgctcccttctctcacctccctccgccctatcggaaaggcggggagagccggtttcggctctgctggttcctcccggaggtgggtgtttggtgtctggccttgctggcccggcgtccaaaggtgagccctttaacttctccagaatcgcctcccctccgcttccttcctgtgcagggtgggctgcgctgggagcccggcgggcgggggcggggaggtgaaggcccgcgccccgccccccgcgcctgtgggagggagctgggggcccgcaggtgcacccagccgtccgcgggccgtctccgggttgggtaccggtataatccgcttctagcttgtttggaggcgtgggctcttgggagcgggacttctgctcaaatcctgtccaggggcttgaaaaggaggagaattgggggtggttgccgggaggaccagcacctccagttactggagggttgataggggccttctcctttccgtcaccctttactagggggtatcccttgcagataaatgagattttttgatttcttaaaaagccagctgcagtgaagaagaactgctgcaggtcgaggggaagagaggtaggtccttgctggagagggagaggtgggctgtgaggttccaggagcacgcacttggggtgtgtgtggccgaaagtatggaggtagggttgtgggaaggaaacagccgagatgagagggagggcgcactcaggatgtaggcggagagatggggaataggtactggggagtcctagcggaatgtggggcccagctggagccgcttggcttatatttggctcctcgttgcctcgcagatttcctgctcttggatcttcaaaaatatttttttgttggacaaagaaaactctgaggacatattttggaagagctgatttctggaaactttccttggcagctttgatagtaaaattccgtacaggcagcgtttattgagcacctattacgtggtttgtaccggactttggaagagtctggacaggcagggaatccccgtttgcagtaatgatgagggctgtctaccttataaacaaataaggggcccctcccagtgccaagaatgagagtgatcagaccttcctcgccatagcatctgggacctctgcttcttacagacctgtgggaagaaccctgcaccatatcctgtaaatggggtcctcaggcagcatttatttttgcagtccaaaaatagtgaccaaacacctactgtcagctaggcgagagttggggttcttgcttcatctgtcttgacaccaactaacta

SEQ ID NO: 54929 - DNA, 1030 bp, Homo sapiens
gtggaaccagataaaagtttatgaagtatgctgagggaggagtggaaatctgaattgacttttgacagtggtcagggatgtggaacagaatatacgactaataaaggagggtagagggaacctagttcgtgaaaaacttaaccacaagtcagtggtgttaatcatttgcctcaagaccagtggctctcagaagtaggcaattttgcttctcagcagacattgaggaatgtcggagacatttatggttatcatagcgaggtggcaggtgctgctgtcatctagtggctagaggacagggatgatacataagcatcctactgtgcacaggacatcaacccccttcctcctaaacaaagaatgatcctgtccaaaatggcgatagtgcctgcccttagatctcagaataggtcttgaagggaggtggttcttgacatgggaggagtaataacattgagcttaggaagctgatgtaggagacttgtgctcaggtctgatgtgattagggtctgggcaaatccttattgaaagaaaggggcagtttggagggagatcatagcagatgagcacagtatgatagtggagtaagttgggaatcattgaaatcagaattggcattttagaggggccctatccaatttatttattttagtaaattcttaccctttctaggtaacttttgtttaaccccaggaaccgtgaacttctcctgaagacaggttattacacctttggactgtttgttgtatttttacttgagctgaagactgtctccttgaatttttttttccaatgattttcttcttttggagctgcctactctctttgaatgcaccaagacaatatgatgtccccttacccccagttgactttgctaatgcaaactagtcccaattcttttcacagtcttttattgggatgtggtttctcgatgtcttctcagtttatcggcatctcacatggagaatctggaattgaatatgtaattgagatgtgatctggccaacagagagtacagtaagacagctgtttg

SEQ ID NO: 54930 - DNA, 1763 bp, Homo sapiens
ctgtggctgcaggcagttgctgtagttcaaagcaaacagccaagctagagtaggagggacactgacggggtttgttcattagaattttgaacattaatttttgaaggaaagaaaggggagtacaaatagaataggaatagaaatattgtgaaattttctttataacagaacaaaattgggtcaggagaaaggactttaagaaatcacttaacatttatcattactttgaaagcaaatgccttttttgagtaaaagcaaatgctttttgagcatttactttgtctgcagtgcactctagtggggtgggaaacgaaagttagcactaaatattaacaacggctatcatgttagtgcatttcaggtggtccacagtgggccacttttctgttctattcttatatcagccatgaaggttggtgtcattggtgttccatttcaaagattacaaaactgaggctcagtgtgtttaaataacccactcaaggatacagtgctaataactagcagggagagctaaacttcgacctaggtctctttctcatccacaatatgaaagatgagtaagatatgcccctgctttgaagataagacctgcatgtaaacagtttagtataattcagcacagtttgcagtatatgttgtaattcttgtgagagctacattttttggacatttgctcagaaggagagactgattttgactggaaagatcaggggaggtctcacaaggaaaaataccttgaatagggccttgaaggatgacaaagatggtgacaggtagagaattgatgggagagctgagggaacgttggagcagcaaagcatggagttgtagaagtacagaatgtgtttgggaaatgctgctgggatggagtgagggatggaggaggaaaggaagccagagaagtagtttgggacagattacagagggcctagagtgtcctgctgaggaatttagacttcacttggttgcctttgaataaaggttattccattgaaggttcttgagaagggaaataattttgccttgatctctgccttcagcaattctggtggtagcatgggctttcgccagcactaggctgcatctaaggatcacttgggagtttcctaaatgtgcagattccaggagcacccctccacccccatgatttcagtggttcacatcttgggtagggcctgggaaagtgtgttttgaaggctctgcaggtggttctgagggcagcctggtgagggaagggttctagagggcattggggcattctagagaaaggtctgagctgaagctaattttgagtttgtccctgtatggatgattttttaaaccatgggagggggccagtcatcaaactttgtggaagttctgtctgtgtaggttctatggtttgctttttgtcctctgtaagtattaaacagtaatctctcagagcattgtcatttggctgaagtttttcacatgtatttcctgttcaaatctagaatgtgggatggctctaatccttatgcccctgtgctagatttctccttttttgttgctgtttcttttagaaggcagaggaatatatgggattttattgtgggctgtacctgtcttcaatgacaatctcttggagagcatgagctctgtagtttactgcctgggtttttactctgcctttctagccatgggaacatgggaaagttacttaacttactataaaatgaagatacaataatatttacctcctagggttagttgtgaggatggtttatataaaatgctta

SEQ ID NO: 54931 - DNA, 1871 bp, Homo sapiens
agtggggccagattatacatacgccactgacattttcatctgacctcctaaactcagcctttgagccccttcttttctttgggttttcctaacgaagtcttgttgaaaggaatattatttcccatggaactttactgatagtgtatggaataatacgatcatgctctgtgaagttcagacctgaagtcttaacattttaaacatgtatctatttgctattgcttacttagttcagtcttggcattttaggtttagaggtggttactacccattggacatccatagccactccctgcaaattaaaggggacacaaaaatgaaactgaacttctgtttttcttcacctctctgctaatttaactaagtcaattggctcgccctcatttgccctcttcacacctcccaaattaatgttatgtgcaaatttgattaaaacagcgtgagtaatttccaagttacttttgaatacggattgaattccgttccttgtggctttttcttcatcatactagtagatgtagccagtgtttttgtttctagcctgcttaacttgtgtggttcttggaacaacataagttttggttgatttaggatcctgatttcacaggatactgtatcaactgctttaccaagatcaaagtacatgggttcactgcattcctttcagttgctaattcagttgtgctgtagccaggcaatcctggagccttgaaatccaggattctggtcaaggtgaggaagcagcccttcctcctggccttttcattctgcaaataccttttctttccttcttaatatttatttattcagcaatgtggcccaggctctgcatccctgacttcctaaagctttcagcctagtgcccctagacaagtggttacattcttgctacaaactggaaagtctctgagcccctcaccccactcctccccacttcttttcttctgctgtatttatggcactgtacctcatgaactttcacacaagggaaagcaaactcaatccaattgggtcttatgggtaagaaaatgtgttggttaaagtagattctggtcagccaggctatcgaagttttagtatttactagcagtgtgactttgggcaaattacttaacatctccatgtccatgtctcttttctcatctgtaatatgaagataacaataactcctacctcatagggttgttgtcaggaatcattgaagtgttaatacatgtaaagtgcttggcatttattaaactagggttagttaaaaaattgatgaataagctattaaaagttcataataaagtttctggagttttcaggtactccgtttctctttcgtgctatttgccttggctattccactacaggcaaaggaaaggagatgaaatttaaagtatctaattttgtaaccttaaattattcatgaattgtttttcttcgtgtagactccattataatgtataatggagaattgtattcaagatatgatgtgtgtgacttattccttatgaactctgaaagtcatttttaagaacacttcttaataatgaacattatatttatttgactttttaggatccaacccttttacattgttgggctttttaatatgttatttaaaaaacaagattgcccaggccaggcgtggtggctcacgcctgtaatcccagcactttgggagaccgaggtgggtggatcatttgagtccaggagtttgagaccagcctgggcaacatggcgaaacccctgtcccttaaaaaaaaaaaaaaggggggaaaaaagaaaaattagctggatgtggcgagctcctgtagtcccagctactggggaggctaaggtgggaggattggttgagcctgagagaacaaggctacagtgagctg

SEQ ID NO: 54932 - DNA, 1468 bp, Homo sapiens
tctcctcctccacacccattagtcctcagaaaagctatttcttgaaactgaatttggagcttctaaaatggctttcacagtgttggtctcttcatctggggattatggtacttagggagtggagactttcaaagtgaaccttccacatttttccaaaatcttttgtggcataatttgtgcctacctgagagcgcattttttctttttatgaggttgtgattttaatatatatacatacacgtgcacacacacacgtgcgcatgcacacacacacacaaaagcataacagcggctatgagaaagaaacacttctgcatgaaacacagaaggagcgggcgaatagctgaccaggggaaagtatgagatggtgttcaggcctcatggtagttaggattaggaaatgtcaggggctgtgttgtattctccaaactgtaaactttgggagtcgtacagagtgaatgttaataaatatttttgataaggaggagggtttgggtttatagggagcctaagaaagagaaatgtggctgcccttcccccacagctggccactgctctggaggggagagtattagacatttgggtgtggacatagcagcataggcgaataccattgttagtctcccaccaaatgctcttctgtattttgttacctattaaaccatacaaactctcctatatatcattaaattatcactcagtacagtacttggacaaaataggaatagtctactgttaactgtttttagattaatgactttgaatttttcctaagagagattttaagaagttagatagtctaatcgcatgagtcccaaatataaaaaacaaaggctctgcaggtttaagttttcctttgccttttcttaagaatttaaatatttttcttcagaggttttccttgggctcttagataatgagtaacaaaaatgaaggagggataccaaaagatatttcaaaacataattgtgtccttaaaaacatggtaataattgacagggtttttaaaatgagagaagtttctagctaaatgccctgcttcacatccccactccccacactgagtactttgtggaaaatatgtggtagctgtttgggaagaagtattaagtttgtgaaaagacatgaagagttgccaggaccacggtaagcaaaggattgagagaaggaaaaaggtgaacagagctagaccctaaaaggatgctaagatcccttgagaagtcttttagtaagaagccctccttagactgcgagtgcctagtggacaggaatgcatctcactggtccttgcagtcttcttccccgcccctgcctttgtacttgaaggccatggtcatctgggtgcactacaattcaagtctgtgaggtgaggagaaaagggtgggtgaggtgtagttcatcgtctggaggcctcagtattgtcaagaccacccccccccttttttttgtgagtgcacaagactcttaa

SEQ ID NO: 54933 - DNA, 1211 bp, Homo sapiens
accacgcgggcagccggtgcggcggggtcgccacggccaggggagcgctgggtgcccaccatggcagttatgcaagcggtgaccccctggtcttgcctccccgccgccctgcactccttcctccccgctgccgacacttggatctctctagctctttctctcccctgtgttttcaaacaggaagtgcacggctgtctataacgtgctgccgggtctcaggatggaggagtgaagtctcctgtcgccgtggttccagcctccggagctcgcccaagccgcgtccccagagagcgccctgagagaacagggtggccgcttggtccaggtgcgcggggtcgggtctgggtccagggagcgggtcgggaagtctgcggcacggagcactgctagtgtcggatctgcatctccagctctgtgctgcagcttcacttgcccgccccccaccactggcttctcacccggggtctctgccaaactctggctgctgccgccctgggttcgggccggcggaaggccctgggcgtgcgctgcggagccgcctgcgaggactccactagggcgctttccaggctggactgccccgggctgcgctggagctgccagtgctcggggagtcttcctggagtccccagctgccctctccaccctctcctccagctgctgctgcctgaagcagcagctctttgttcctcccttactggtctggggtcatacacataaatgtcctgggaggcagggtggtgggagggtaaggggttgggacgtagggaagaggaagaagatgagttgtgggtgaagtgtaaggtggacaggagaaaagaatcttagtgtccatgctcagaaatcagctcttcagctgctgaaacagaggaccccggttccttggtttctgttttgggaaagccaggccatgccaaacagagggaattaatgatgcaggcacacaccggaaaggtagggaccaggaatgaggcacagcagcgagttctgagatgtttagtctggtgtctggcttgttaactccactgtggtttctgagccaggcctcctcgctgagacagaaggtactttaacatatgagccaggcatctttattaattccatttgtcatcaaagtaaaattgagagtgacttttctcaaattcaccaggtagattatactttcacttccacatcgtgttccatctcaaatgttcataggagaataaaac

SEQ ID NO: 54934 - DNA, 1503 bp, Homo sapiens
cttaaagttgaggctctctttagttacagttttaatgttgcaccattaactaaactgtaaaattatggtttaatttgttatactgcaaattaaaatttggagtacaattttcataagtgttggataaaatatttgtcttctcttcaataattggaatatttgtagtggcctataacttcccctctgtaaaactgtggtcaaaaccctcagggagaggagaaggtaaaggaggagcaaaagagaggaaatgagagctcattgttttgtaagggaggaatgaaatgatacatgtatggttccttaatacgcagtgcactgccttttctgtctgtcggtgagttgcagtggcttgtgaaccagccgtgcatctcttccaacagaaaggctaaaaatgaaagggtaactagctttgatgttaaatgccaaggaaaagttaatggccaagaggggactaggagtggagataaatgcaagttaagatttcattttttcaaaactttttttcccttcacgtatattataaagtaaaaaatgccttcttagtcaaattgtaaactgtaatgcagtggctcctgacaccaaaatcaggaagcttttatttaatattaaaagatttcaacgatcttaactggttcactgttttacttcgtatctcttataattgcagatgtttcatgagagttatttaatatcagccaagtatatattgcaaataatgacttcagcatcttcctgtatttgtaaaatagcactgcatgtatatatgaggtagggattcagcctacagacctcttgcagtaccctgaagtctacaggttgggaattgaggccaaagcaaaacaactgctccagactgaaaatgctgaaatggtgatgaaaaatgcataatatgttagccatcagattataaagattcccaggtggaatttttcctctttgttgtacattaaaaggatgatgtgttaagccctgattttggatctggtcatgtttccgggctaatcgtttttcatggtcagctttgagatctttgcagttagtcatggataactggatttctcttaagagcattttccctacaatacttctgcgaatatgccttccctgtttttgtagagtcaggactgtgaggccagtttcagaatcatgatggtcatagccactaccaccaccaccaccagccctatattcatttcccagaagctaaaagaggcttcccaatcttaacctttacaatttgtggtaagtttaaggaaagggagataggatttatccctgttctgcagtgggaaaaactgatgtgtgggttcatattgaattagtctctctgatttctgtgtgtgttgtattgacatgaatgtaagtcattctgcttgagataggttgagcagggcatggaaatctaatagggttatttcatgaagttcctttatttgttaaaagaaattacttcctatctattgaacaccatatttttcaggcattgacaaatagacactgatt

SEQ ID NO: 54935 - DNA, 1097 bp, Homo sapiens
atgtgtccatgtgttctcatcatttagctcccacttataagtgagaacatgtggtattcggttttctgttcctgtgttagtttgcaaaggataatggcctcccactccatgcaagtccctgcaaagcacatgatcttgttcttttctatgaatttttatgttcttttttatcaaggaatactactccttggtgtatatgtaccccatttcctttatccagcctgtcattgatggacatttaggttgactccatttctttactattggatacactgttttaattgttgcatgtacctttatataacatgattttattagcatgacttcttgttacatgtacatttatataacttgaccttattgttatgattgatacattaatataaattttaaagttcaagactttaagattattttgaggcagattccttgcccttatttgtatgtgttaactttttgcagctacacattttctaaaaacacatttctaaaagacacatttttctagaaatgtgtcgacctatctaggaatattgtttaatttccttacttggtaacataattttaatattgctgacgttacattttcttctgtttttttgtgtttttttttttgtcttttcttttcttcttttgttagcagttatggctccctttcatacttggtcatctgtgtagggcagtggtgtgtcactgcaaaggcttgtcctcctctgttgctctgtatgtgcttgtagagctatgaggtacattcctggtacggcttttgaatgaatgttttatgaggtgtgatgcttactgactgcatgggtgaatactcttgaaagtctcttaattacagatgtctctttattattgggacaactttgtcagtttcagcttgattttctccaagtttactttgctctagtcttctcagtttagtgggtcttattcttccccgtctgcaatttatgtcacactgaatgctaggtcactttatttggtaagtgggtgtttgtgtgcctctgcagagtacaatgtattttccccttgtctttctttttctttttttttttttgagacgagagtcttgctgtgttgcccaggctggagtg

SEQ ID NO: 54936 - DNA, 1248 bp, Homo sapiens
ttttctagtgtctgtagttcttcaggtgctttatggacacaggagagagttgcagtctttttagttaactgctgagatttaccaagcttgcacaaagtctgataaaatcataatatagaatgttctagggtccgaaacctgctgagacggataagactgatatctgtgggttgttggaattgttctcgtattgtgctttaaatgggatttattagctattctcttgagtttgattataacagccctagctagttacctgactaaacttacatgctcattagaggactttatcagtatggaagttctccatttctcattcagattcctctgtgctccccttagtagctgtcctaccagccttccctcttattcaattattgtaatataattggcagccaaactacttcatccattcaacaggagacatttgctgagctccaaattattaaatcttagtccccgcccctccgtcatccccacctcctgtgtactggtcattttgttaagttctgaggatgcaatgtgagtatgaaatggtgcctaacctctgaagatagactcataaaccactaactggaacttaacttttttataacttaaggcactttatagcaatatattgtgacgataatgatagagagtagggcacatagaagggagtgttttgttctttcttgtttgtgaggaaggaattcctgaaggaggggattttggtgctgaattttgagaggctgagatcatttaccaggccgagatggagaaaggacagactgaggaaacagcccaggttcagagccccaaagggctcagtgaatgtggaacatggactaggagtgaatggagccaagcgatggtggtacagaggggagaagaggctggaggtgcctactggcttgggttcttggtcaaacccatgtctagggccatgcatttcatttctgaaagtgtgaactttatcctgacagcattgtggagtcattaaaggtaaaataagtgttgcaatcactgttttcagatatgtgaaaagaaagcagggagcactttagtggctaccatcataatccaggcagacatcatgaggacccaaactaaggtgatgaaggtgagaaaggaaaggcgagactggattgaagaaatgattaggagaaataattagttattgattagatggaaagtaggaagggagtaagaggaaggaaaaagatgattcttgattcttctggttttgatgacttacatctgaaggtg

SEQ ID NO: 54937 - DNA, 1058 bp, Homo sapiens
cagaagggtccggtagagtgaagattgaatataggagattggatctgacagttaggtattcagtgggtagtcagaagacctctaaagcctaacactggattgtcaccagtgaggaatgaggaggagttaagaagtgggggcatcaaatggagagacagcgagagagcacaggcaggagagcgagcagatacacgcgggtgtgtacacgtttgcgaggagttgtgtgtatgtgtgtgatagtgattagagcttatagtttggttgagaatagtggtgaggaagtgactacaagtagaagaggaaatcattaatggagtaaagttccagaaaagataggggggccaagttctagagcacaagcatactcaaaggggttgttataaaagggaattgggacgtttattccattgggacaggagaagacgaggaagagatatgtgtggctgtaggtgaatatgcaagtggatgggaaagaagttgagaaagtttgttcctgatggcttggatattttcagtaaaggaggagatgaaatctgctgagagtgtggggccttgaggagacagctggaagttagtaacagttacctttgtaaaaggagcccagtgctttaggatgagtgatagctgtgtgtcattgaaggcccagttgtagttttgtcagtggtggttaggtgctgacggaggatttttttttttctgtttgatagagtactgtaatatgaatagcatgaatgaccttttacaatagaacgcacaggccctgcctgaaacattaagtttggatggtgatttaaagattggacaggaggagagaaggagcagcagacttaacattagggaacttgagttctagtcctagttcttccatttaatggaagacggggagttcttcctcctcatctttcaatggaggaagttgcatttgatgtcctctcaagtcttctgtagctctcagaacttctgtgagatttgcacatcattagacaaaaatgagtggagaagagagtaagagcagctagactcccatcacttatcatttatgggttcttctgatggca

SEQ ID NO: 54938 - DNA, 1112 bp, Homo sapiens
cttgggaaaggattgataggccctattttctacttgccttttcatccatttattttgtgataattcctctatgtttcctaatcatttgctctttgaaaaaagtgagagcttgtgatcagtcctgcacggaagccagtacacaatctaggtattagagcagtgcattgacagagaggctaccttccattttgtgcttccaagaggtggttgtaaataggaaagtgaaaattgttaaatgacaaaaattactttgaagtaaatttctctgcctgttttagaacttaactctagatgaagaatcagtatattttggggggcagtaatagtaagaccaaaaagcaacgtttttacagcagtgtcagaatatctatttgccaagtattatttccactttatggatggggcctaaaagccagatagtttgtttgacttgaaggtcactggttaatgagccttttattactacgtaggttttcaccggtgctgagcaagaaagcttacaaatctcctacctaaggcatgcttatatccgaaccattccaagataaagaaaatgtacaatttaagcttttctggaagaaaggaaaacctcaacactttctgatctctctcagatcaatagcattttaaactaaatcttttatgcgaaaagttaattaaggcaactccaattcctttcttaacagaaatggttttacatcatcctccatgaagtaactaaccaaagacaggcccaccttcatctttctccttagtaagtttattgatcccagggctctttactcttacacgtccaattttaaaatgtacacgtggccgggcacagtggctcacgcctgtaatcctagcactttgtgaggccagggcgggcagatcatgaggtcaagagatcgagaccatcctggccaacatggtgaaaccctgtctctactaaaaataaaaaaattagctgagcgtggtggtgcgcggctgtaaccaaagctacttgggagtctgaggcaggagaatcacttgaacctgggaggtggaggttgcagtgagccgagatcacgccactgcactccagcctggcaacagagcaagactctatctcaaaaaaaaaaaaaaaaaaa

SEQ ID NO: 54939 - DNA, 1048 bp, Homo sapiens
catttagaacagtgactggcacacagcaagtgcagcacaagcattggttggataaaataaagggctgcccatgtagtcttctggtctgtggcccctggaggaagaggcagaggcagacccaaaatgtagatcacgcagtacacaagtgggtaatgggctgagctgtgtgttgaagcagagacaggaagaggcggcctgggaacctcagtttctttttgcctccttagtgatcctaataacctggaatattaataaacttatgtccctcactttcaagatgctgaaaatgattatgcttcttttttttttcctcctagctttcagagagctcatggaaaccaagcctgtttatttgagatttttctgttgcagggtaggccagacatgaatttcctttcatgtgatattttctgtggtctgtgttatttagttcttcctttgttttcttgtgctttggtgtgaagaaagaagatgccctgtttataaagccttggtctttcatgtatcatgcattcttaaactaattccagttgctctgaccctttgagattttaaaattgctttgttccggtttttaagtacttttgaaatattaaaaatgttcatgagggagtgggtcatgggaaaaatttcccagggttgtttgttcttagaaaattgtgaatttgcatggagaggttttatgctgggttaaattctgccaggtgcattggtcacttgaacttgagtctggttcttttgatatttaaatccgtgttgttatggcataaagtgcagagctggaacctcttaaaactaaatgcctgctatgttgagctcttgccccattgtcccatcaaagaaaggtcttaaccagtacttgggtttgcattgaggcaccatgtcaatagtgaggatcaaaagattggtctgttctgttttttgtctttgaaccaagactttccaaaaagaacatagacttgttttgaatattgccgcctctgggtgtgagtgattatgcaagtcagtagcatttttgtttttttgttttgaaaaaactgttcaacat

SEQ ID NO: 54940 - DNA, 2003 bp, Homo sapiens
ccagctgtgttatctggatgtggaacatagcgttctgctatctgttttcagaaatgtcgcatatcccttccagggcagaccactcattgccaaggcataaggtcgaaaactgcccagtggggtggaaagcaaaggcagttggttagctgttggtgctttctttactctctacgaggatctttcaatggcagtgaccaggacttcattctgttatttgttatagaacaggcaagacatgaaccaacccagtcatattctgtaccaaacacatctgtggtccattctgctttccccagctttggtttcttcatttcacacgtccaagagaattttcttaaggataaccatcttattagaaatatgtctaattgataatgaaatgtctgtatttagctatttaactttgttctgggttctctctgcttacttaatgtgactgcatttccctgagatgaatgctgtgggtttttgcagtctctccccaactttgcccctcccctcttagatgaaggtgcatcactagagaacctgcaccactgtgtctcctacactgtgtcaggtagacagtacatgattagtaatgtgtgtgcaaagctttcatgaatgcttttaagaagttgaactcttaatattttgcttaatttccacatgtttaggataggattaatgtagagttgaaattaagatagcatcttgggaattttagataggaatcgtttgtgacccaaagtgaataaaaattgatattacaagcaggcttttaatccagaaaatttacttattctgtccagactgtgaacagttgttttgttctcaccaaaggcaattttggtgaagtgttcttagaaacagtgtgtacaggcttctgtaattgtacaggggagagatcatagagatccagggaacatcaagatactaattcaacctgtcctctttgaaaaatttgaccccctcccctgtaactcaacaacccctcaaagctgtcgatgcaaagttgcaaaataacaaaggcttctgtattaatttctgtgttacagccttctgggaagagaatgctgggagaaaaaatatttctaaatgtataattgcatatatacactttttaggttctccttgtatttttaatgacctaatactagaacattttgataagtttagttcttaaacagaactaccaaacacaaaagccagctggaggcagcaaatgactaggtggatgttgaagctcatgacttcctttcagtggcctcttctttgtatacagctccatgtttatgtccagatggactgactatattgataggttccagataaacaatggacacattagaagaggggtgttatcatcaaaaactaacaactgaagagttaaaatatgaaacatatctttgtcatgtaggattgaaaactatcatattttattgaatcaaatttatggcatgtttctcgtaaacctaaattttataatcctgtctgttaagttggttggcaaagcccaaatgttttcccttacattcctgaaacaaatttataaagtcaaagaatcagccatatcatagcaaatttagagtgccgtttgataatgaacgacctagtaggtcattaatcttttctatgggcagtgttttttttcctcatcagctgcctaaagtatttgggaaattgtatcttgtgggagttgccattcatcaggaaatgcttgttcatagatctaagccagaccacatgtagcagtaaatgttatttatcactatggaaaccaaaaatcacaaatgggatagtctaagtgttaagcattctgcttcctatggcagtaagtcatacccaaatttggttcacttcactcaaatatttgtgaggcacttaacgattaaagggtttgtaggtactttgtttaatgaataaatttctcctacacaaagctgaaaacatcataaagggaaaaactaggaggaagagttgccagtttatgtggcttatcaagctcataattgtagacccct

SEQ ID NO: 54941 - DNA, 1398 bp, Homo sapiens
tattgcaataatctgaattgtagatgttgaattgactcgtagccaaaaggtggcatttaaggagtataattgctgttcatagataaaagtaagaataatgacttaagcagtaatccaaaaatgttaagaagttggtggaagaagaggctggctgaattgatgagtgagaatgtttattcataaattcatttaattcttagttctactgagactttaccatgattgtcattgcagtagttcctatacagtgggaatatgttcctataatgggaatttgaatcattcagtgttgctgatctggttgtatctggacgaggcaacttctcttacctgttgtctcattatttagtggggggaatatctatcccatccttacttctcaagaataatatgaggataaaaaaaacctgtataaagctacaaaccaatattattttgtacaggttaagtagcccggtagaatcttttggaattgattgaaaatacaaatgcctttttgacaggcattgctgttggattttttttaacatgggagaagtttactagatttcaaattttaaaatatgcatgggattgaaagttagaagctctgaaacatttaactatctggtctttacaaaatatcataataggtgtccattaaatgttcttcattcactcattcatttattttatagtttttgatcatttgctgaatgccaagcagtgttttagaagctagattatacagttgtgaatataacaaaatccttatccttatgaagaccatatagtagatgagtctgataagcatgtgtttcatggatatctattagatatcctttaataagtgctaataacaaaattaagcaagataaagagatagggcaatgagagaagggggtgttacatggtcagagaaagcctttcatatacaacagtgtaacttccacctcttttaaggtcttctttatttctatatgttgtcatctgacactgtacccaacacatagaaggtgcttattaaatgtttaaatgaaatttttatttatttaacaaacacttatagaggacttactctatgccaagcagtgttctaagtgccttgcaaatattattttatttgattttcacaagaacgctttgtatactgtttcattttatgaggaaactgaggcaccaggatgttgaggaacttccgcaaggtcacagctaataatgaatgaatcagtttgtaaaggaatttaaaaaataaagattcttaaaggttcttagtgccacctcttgctttcaggaacaccagatagggtgggactccatattttgggatcatgttgggtagggagcatgtcagcccctgaggtccttttgaaaagctcctaatacctctacctcccaggccaggcagataccactctt

SEQ ID NO: 54942 - DNA, 1133 bp, Homo sapiens
gaagcaaggggagctatggtgtaaggaaggaaggaagtgtttatagtaataaggcaagtggaagggagaacctaagggggctcaagacatgaatggcctgaaaaggcatgatcatgccttttcttaggcatgaattgtgatttccatccattaacctggaacagcctcactgaacttcatttttagcttctgtttttcatttccaaattcatagttgagtggtcattggcctgatgacccttggcccagaacagcaaggccatgctgagggtgcccctggctatgaagtaagagatggagttggccctgttaactttaactctgcgagctgttcatgagtcttcatctggaagcagtttatccatatccactgccttggtgatggagtagtgcactgggaggggctgggactcctgaggccctgctcagcagagcagctgccagagagaggaagataaggcctcactgccatcagagttaggaccaggacctatgtttctggttgtatgctgcctacggagcttttggatgcactctgggacaggagactagaaactttggcagttgtttgagaaacaagttcctgtagaacagtagctatggctatttagcatatgtttgttaggtccccttatgtgctaagccctgtgctgtgccccaggaacacaaaggtgaataaggtagagatatccctgctgtcatggtaatttatttcttgcttcctaccattcatttgtttcattagctttgctgtttaagtactacgtgctgtgcactggactggctattggaattttaaaaattaatatgagtctactcaagggtaagcagataaattataatacctttatatttactctgtgagatacactgcaggcgctgtgagtccacagatggtaaatgctgtgggagataatgaatgcagaaaagggctcatcccctgccctcagggaggttatagtccatctaggagaagaaaaccacagtacctccagaagcatatcccgctatttaaatttttcactgtttcattatttgtatgtcaaactccaagtgtttttgtattcccagcagagttctggcgccaaagtgctaataaatgttgattgaattaatggataaataactgtgta

SEQ ID NO: 54943 - DNA, 1064 bp, Homo sapiens
tatacaatactgttaaccaatctagaaaccttatgcaagttttgccagttttcctactaatgtcctttttctagtccaggatccaattcagaatcccacatagtacttagtctcctccaagccatgatgatagttcctcattctttttttgttttttattttttttagagacggagtcttgctgtgtcatcactctggagtgcagtggggcgatttcggcacactgcaagctccgcctcccgggttcacaccattctgctgcctcagcttcctgagtagctgggactgcaggcgcccaccaccatgcccagctaatttttgtatttttagtatagacggggtttcaccgtgttagccaggatggtctcgatctcgtgaccttgtgatccgcccgcctcagcctcccaaagggctgggattacaggcgtgagccaccgcgcctggcctcagtttttgtctttcataacatcaacactttggaagcatactggccagttactttgtaccttgtctatccatttgggttttctggtattttctcatgattagattggggttatgcatttttggcaagagtaccacataagttatgtgttcttccaagttcgtcatatcaagatgcacgtgatgctgatatgttttattactggtggtgataactgtgatctgttagtaaggatgatgtctgccactccattatagaattattgttttctcttttgtaataaatatcttgtggagagatactttgagactatgcagatatcctgtttctcatacttttgctcactacttttagtgtttatcagtgtcttgtgcctgcaacagttattgctgtaatgtttgcctaacagtgatttttgtctttccatcatttcctctacatatattatttggaattctgctttaagaaagagctgtcaaggtgcattcatttttagtaataatgataaccacaataatgttgattataattataatggtacccaacattgttattatgacttgctttgtgcctggcacagtgctgagttcttggtttcacttttataacaccttcttaa

SEQ ID NO: 54944 - DNA, 1223 bp, Homo sapiens
tacctgataactctcattagagcaatatatgctggaagcagagggctcttgttatggactaagtgtttatgtcccccacaaagtgttgaaatcctaaccccagtgtaatggtattaggaggtagggcctttggaaagtaattagggcatgagggctctgccctcatggatgggattcatgctgttataaaagggaccccagagagttctcctgcccttttctcaccatgtgaggatagacagggaagtcagctgtctgcaatctggaagaaggccctcaccaaactcggctgtgttggtaccctgatcttagatttccagattccagaactgtgaggaataaatgtttgtcatttaaggcacccagcctgtgtaatctgtaatagcagttcagactaagacagccccatattactcactctccatctgagagtgagccgagcacatagcattcttggcatcagtagcacaagggtatgaagggaaatgcttgaagataactggaatgtatagtagaaatgtgattcctgtttatctctgagtgttaactttcagaacataggaaattgagatgctcccttaaacattcttttagatagcaatttagggaggcaagctgaacttaaatcttttaggaaattggacagagtcatagcccattgggtttagaggtagtataagaaaggttgctgacattatttggctaaagtgaatggagaacagagtaaaccaagaagatagtgttcatgtacatcatcagcacaatactgagtaagctgaaatatagaaaaataatgtatgcttactattattggaatgtgagtgacataagtaaatttcataaagggaatataagtcaccactcaaatagttgtttctttcctttccttaagatacaagtgttccatatcttacgggtgagtacaatattggctgatgtgatacggaaaattctgtcaagttcggagacagccatagtgttgaaagttctgagtgctttcaacactatcaaatagtgctcatattctttcattgtcagattccatgacccaagtgtgtctgtaggtgaaggtctcccacccccaccccacccactgatcactcagtaagcaagcaggctgatgtctcagtgcctacagtgagcagtgttaactgactcctgtacttgcttgtctgaggacagacaggtgtgctagataattaacattttttggaaacaaaatt

SEQ ID NO: 54945 - DNA, 1398 bp, Homo sapiens
aacctggaaggagttgaaattgctaaccttactcttaactgcaccattgcccagtccccagctgtcctcacctctgccccaccctttcattgccactgtctccttcatacttccctttccacctgacctgtccctgccaactccattctttcatgcctgcctctctgtatctggagggaatcctttggtgcccaagcagggttagattaccagatacgcagactaaacatgtgtttggggcaccagaaaagcagacaccgtgctcaaatattttttttaaaaaataatttgatatttgctgcttaaagaaataaagccgtgatcatgagaaaaagcagaccttagctggactttcttatacttattttatggtttattatttaaatttgatttctgtttggaggaacgctataatctttgcagtacgtcgtgcctctgaaggcttcgtcttcttcctcctcctaaacttgttgaactcagcctttccaccgaagcctcacagaggtagggagatgctgctttgctctacccttttctctgtactggcctcatgtgtgctgcttttagtatagtaacacatttctctatagcactttctaggtgagcatctccatgctgggggctaggccctggggcagaagtaggccagggagagaggcacaaggtgtgagacacactcttcctcctccagagtttataattgaaacatatgttttctccacaacaattaaatgccagaaatggccatacctatttgaaggcgtgcagaccagtctctggaagatgctcctgcagcagggaccttgaagagaagatggaggaaagtttaaccgtattaacaaagtgtgcatatctgaatagcctgctactttatttctaagccctaaatcccatgattgtggactgttggctgtttcccattttcagagctgccccaaaccagtttctcccagactcaggcattctctctgtgtcttcatatctcttctgaactgacttttgtcctttgagcctgccctctctgataagctgccgtagccactgagaagaatgaccaagttgagtccctgagcccacagaataataaaaggatgttttctttttctttttttctttttttttttttgagactgagtctcgctctgtcgccctggctggagtgcggtgacaccatcttggctcactgcaagctccgcctcctaggtccacgccattctcctgcctcagcctcccgagtagctgggactacagggcccggctaattttttgtatttttagtagagatgggttttcaccatgtttagccaggatggtcttgatctcctgacctcgtgatccacccgcctcagcctcccaaagtgctgggattacaggcgtgagccaccgtgcccagccaat

SEQ ID NO: 54946 - DNA, 1047 bp, Homo sapiens
acttccccctactcaggattcaagccagttctgtccaaggacaaaccagagagggcctaaagaattaaagtgggtggggcaggatgaaaacactaatagtagagagagctttctgagctatctggaaggatcgtcctcaccctctcccaatacttctgtcaaagttaaaaacatttcccccttagtttggctccttcgggaatccccaggcccagttgcagttttcattgcagctgtaagtgaccatctgaccactggtgaattcaagaaagttggaccttcaggctctttttggagttaatggagcatcctgtagtttaacagatgtgaaactgtttttagagatatcagctgcctgctggtctggttcctgggctgtgccttttcggttcagcccaggggaaagggaggaaggaaataaaatgaaatgagttcattcacttttcttccttaaaaggactgcaggaatacaggaggacaggggcatctgaactcagtgaattaacttgttcttctgtctgctccaggttatttcctttggttcttgctgacatgctttacctggagctctattggccactcctgcactgcacaggtattaggaccagactctgtaaggctgcagggagggatgtaaacaccttagcatccagagtcatgacttagtagaaaacacgtcagttttattatgagacctaagtttgagtcccagtgccactactattaattagctgggtaatattgggcaatcttggagttgaactttttgaacagttttttccctaacttgaagttggtaataacatttactttacaggattgttgaatggttgtgaggatgaattaaaatgttgaccgcgttaaagtcattttgtaagccatccagtatccttgctgttatagttctatgcacagctgattttttagttgcaggcaaacgaatttttacatggaagtacttgattttggaggttttaaataacccttttataaaggattgatagtttaaaatagttggttgtaaaaatgaaaaggaacttggaaaga

SEQ ID NO: 54947 - DNA, 1046 bp, Homo sapiens
ccaagcttacctttgtctttgttttcctgtagagtgcttaattatgagtcaaactacatgcaggtggtctatccgaatgagttagcatcagaatgacctgttaaaaagagttctaatatgttgcccagctggacattgaaaaatgcctgttagagttgttgatcattttgactttggtataattaatagtgaccttttctcactgccagtatttggttcaggttgggtgccttctgagcacccttctggaatgctgtacagttgtgagtgattcattctgttaacaaatctttattaagtgcctaatctgtgctgtgccctgaggatacgcagataaaagaaactgtcctcccattaggtggaggcattgaaacccaagtggaggaagacagggagacagaactgacagttctgcaagtatcatgagcagccattgtctgactttgcattcatttctggtcttactggctagaatctcctaataaactaccaagtaatccttttaactgaataagctacctatccaaggattagaatttgtatctgagtgtttttctctcatactaactttgagaactttttgagggttagtgaggtaagcaccagagcaagatactcaggttcttttccagcaatctgtaccaaaccaggaataaggactgacaggctcccagctgtctgtcaccagagcagatatttatgggtttatgatcagaggttcttttggtcccaaaaagtaactggaaaagaatgtggcaacttcctgggaccatggaaagctgcttgggtgtcagggatatgctatgccaggtatatgctagaagaaatactattaaatgtcagtaaacttaaaaggaaaatggtcaagtttaatctaagatgtccattttgcagatggaaagaagcagggaatttaaaaatgcaagcaaagctcccattacaaatcctactaactgtctcataaactggatgaagttaggcgataaagttgaaccaaattcttcactcagtttgggatgactttctctggagcctttattaaggtc

SEQ ID NO: 54948 - DNA, 4195 bp, Homo sapiens
taggacctgaatgagaaaactttagttaggagcaggcatagggtttttctcatttactcttttcatttgcatctctagaataatgtcttttgtcttcttgttttctaggaatgtttacccttgcggaagttgcatcacttaatgacattcagccaacttaccgaatcctgaaaccatggtgggatgtgtttatggattacctagctgttgttatgttaatggtagccatctttgcaggaaccatgcaacttaccaaagatcaggtggtctgtttgccagtattgccatctcctgtaaattcaaaggcacatacaccaccaggaaatgccgaggtcaccaccaacatcccaaagatggaagcagccaccaaccaagaccaagatgggcggacaacaaacgacatttcctttgggacatctgctgtgacacctgacatacctctcagagccacatatcctcgcacagatttcgcacttccaaatcaggaggcaaagaaagagaagaaagatccaacaggtcgaaaaacaaacttggattttcagcaatatgtatttattaatcaaatgtgttaccatctggcccttccgtggtattctaagtactttccatacctagctcttatacatactattattctcatggtcagtagcaacttttggttcaaatatcccaaaacatgctcaaaagtagaacattttgtttcaatattaggaaagtgctttgaatccccttggacgacaaaagcgttgtctgagacagcatgcgaagactcagaggaaaacaagcagagaataacaggtgcccagactctaccaaagcatgtttctaccagcagtgatgaagggagccccagtgccagtacaccaatgatcaataaaactggctttaaattttcagctgagaagcctgtgattgaagttcccagcatgacaatcctggataaaaaggatggagagcaggccaaagccctgtttgagaaagtgaggaagttccgtgcccatgtggaagatagtgacttgatctataaactctatgtggtccaaacagttatcaaaacagccaagttcatttttattctctgctatacagcgaactttgtcaacgcaatcagctttgaacacgtctgcaagcccaaagttgagcatctgattggttatgaggtatttgagtgcacccacaatatggcttacatgttgaaaaagcttctcatcagttacatatccattatttgtgtttatggctttatctgcctctacactctcttctggttattcaggatacctttgaaggaatattctttcgaaaaagtcagagaagagagcagttttagtgacattccagatgtcaaaaacgattttgcgttccttcttcacatggtagaccagtatgaccagctatattccaagcgttttggtgtgttcttgtcagaagttagtgaaaataaacttagggaaattagtttgaaccatgagtggacatttgaaaaactcaggcagcacatttcacgcaacgcccaggacaagcaggagttgcatctgttcatgctgtcgggggtgcccgatgctgtctttgacctcacagacctggatgtgctaaagcttgaactaattccagaagctaaaattcctgctaagatttctcaaatgactaacctccaagagctccacctctgccactgccctgcaaaagttgaacagactgcttttagctttcttcgcgatcacttgagatgccttcacgtgaagttcactgatgtggctgaaattcctgcctgggtgtatttgctcaaaaaccttcgagagttgtacttaataggcaatttgaactctgaaaacaataagatgataggacttgaatctctccgagagttgcggcaccttaagattctccacgtgaagagcaatttgaccaaagttccctccaacattacagatgtggctccacatcttacaaagttagtcattcataatgacggcactaaactcttggtactgaacagccttaagaaaatgatgaatgtcgctgagctggaactccagaactgtgagctagagagaatcccacatgctattttcagcctctctaatttacaggaactggatttaaagtccaataacattcgcacaattgaggaaatcatcagtttccagcatttaaaacgactgacttgtttaaaattatggcataacaaaattgttactattcctccctctattacccatgtcaaaaacttggagtcactttatttctctaacaacaagctcgaatccttaccagtggcagtatttagtttacagaaactcagatgcttagatgtgagctacaacaacatttcaatgattccaatagaaataggattgcttcagaacctgcagcatttgcatatcactgggaacaaagtggacattctgccaaaacaattgtttaaatgcataaagttgaggactttgaatctgggacagaactgcatcacctcactcccagagaaagttggtcagctctcccagctcactcagctggagctgaaggggaactgcttggaccgcctgccagcccagctgggccagtgtcggatgctcaagaaaagcgggcttgttgtggaagatcacctttttgataccctgccactcgaagtcaaagaggcattgaatcaagacataaatattccctttgcaaatgggatttaaactaagataatatatgcacagtgatgtgcaggaacaacttcctagattgcaagtgctcacgtacaagttattacaagataatgcattttaggagtagatacatcttttaaaataaaacagagaggatgcatagaaggctgatagaagacataactgaatgttcaatgtttgtagggttttaagtcattcatttccaaatcatttttttttttcttttggggaaagggaaggaaaaattataatcactaatcttggttctttttaaattgtttgtaacttggatgctgccgctactgaatgtttacaaattgcttgcctgctaaagtaaatgattaaattgacattttcttactatatcaccttttttgaggggtcttaatttactttgcttaattggtgcaatattgctttaactccgttcactaaagacaaacacatcaagtccaaacttgtaaatttagatttgctgaaatactgatttatttcctgttttaatttaaagtgcctcaagtaagcacctctcacaacagttgactggtactgctgctcctgagcacctcgtgtcatagattttatactcttacagacttggaatgcagtagaggtatgtggatttttaggggttttgtttttttaagaataagtaacaagaaataacacatttcttaataatagcttttttgacatagtttggagttctgattatatggtacatttttctaccagtaatatagggttgccaataaatagaaaatgttttctaaaaataaattttattacaacaaaataaaaattttaatgacttattaacacaacctccagtatcaccaccatttggaagataacacagaatcacaagtatcatttaatttcttgcccttttcagtgttgttctggtgttggtgggaaaataataggaaatgtagttcattgggtagggaaactcttacctttccctatcttaatgacaagctgtattttctgtgtttttgtgcagctaggcgtcatagccagacaaatcctaggagaatacactttttagataatgatttccttcattatctaactgaccagtatctaatcaatctcagaaaaatccaaaaaattccctgccacctgtttagatattagttggcagatgtttcataggccttctacaggactcttcaagagaatagaacagtttggcactctgacaaagtagtgtcctctcgctacaaaactggactcacttaaacactggacttttgtcacttctaagcacagcttgaaggattttgctgataatgggcaaagatggactcatatctttgctttcctccccagaactgaactctgggagtcctggtctgtggccaatggaggtgaatctttgcctgccatagagcctgtgaatgctctgagaagtattatcacaaatagaaaaggctgcatcccctgtagctgagtcaggaattgacgctggctctggcaccctggccattccttctcctcctcaaaggcttgag

SEQ ID NO: 54949 - DNA, 1120 bp, Homo sapiens
agcaagaccttgcctcaaacaaacaaaaagtgtacaaaatctgtgtaaatgaataatggcaggggtggagtgaacttaaagaagagcttcagggaagttttgtagttgtaaacggtcctgaacatttcccttccaccagccttgtagggcactgttctccctgcttggtaatgccaccacctgaaattagcacagtatttttagaaggatgccactccatcttagttgtgagataaggagtccagatcttaggatctttgcttttaggactggaaaacttgtcttcccttttttaaacaaaacaaaacaaaacaccttattgaagtataattggcatatagaaggccctacatctgtaaggcctttacatatgtaccttaaatatggtagcaaactacatctcaatgagctgcctttcttaaaacaagtgtatgttgtttttgaagggcaggggtggcaggatgccacagttcactttgcttttcagagaagagccattctgtaggaaccacaatctatgagataatccctaagtttggccactggcagccctgcccataggctcctgtttcctaaacactacttggggttcagtcacttagaactggttggtgttagatgccttcaaacagtatcaaggggtacctcttttacccaaatttctgttgactatcagcccttactaatttccttgaactctgaaaagttcacggtcagttggtttaaatgtcacattccataccactgtttgcaaataggaatactcagagagttcctgagaaatgctgactcatgcaacagactttaaatatactgggttttgacacctcaacaacagaaaaagagttgtgggcccaaatagactgtcaacctatgtgtcctcgtgaatttatgttggcatcgcatggaccagacatgggagaaaaacaagttagtatgtataagctttggcttaatattttcatatctttctacgaagtccgttgagcaccaatctgaagaagagtatttaaagtctgtttttaaatatgccatgtctgggtgagtctctcaaagtctgaaagaacttggtttccttgtggctgtttaattttttctcactagcagttagttggcgtga

SEQ ID NO: 54950 - DNA, 1035 bp, Homo sapiens
ctactaaaaatacaaaaaaaattagccgggcatgatggcaggcgcctgtagtcccagctacttgggaggctgaggcaggagaatcgctggaacctgggaggttcaagtgaaggtgagaaagagaaatcaagaatgtcaactagatttatgttttgatcaacacataccaggtgacaccatttcctgagaggtaaaacagcaacaacaaaaataacaacttgtatttcagacaaatagaaaattatgaagaataacttaacttctaaaacattcatttgtatgtatgctgatgcaaatttcatttagaatctgacgttaaaatgaagagagaagggcaaatgcatctaagactttagaatatttttggtaataatgtgttaggtaagaaaagaatatctggataagcgatgtaactactctggcaaatgatgttttacattataatgcaagttaaatagactattttgcctatgcctggaattttccagtggaggtagatgatttcttagaacagggatgagtggaaagttagggtatttctgaagacccactagtgaaatagcagtgtttctccctcagagattgttccctttttgattcctatgactaattctgtcatttgcaggagtttaagaaaaagttacattttttttccagctatgtctctaacacatttttctggcactgtttataagctcaaatttccagttgaaaggatggttaagattgaattactcttcaaattcctttttcctttcacagttgtttttccttgacgaagtctctttgtcactatcaaggttaagtgaagtcactattgaaggaaagaacagaaggaatttggaatgcttttccattaacttctgaaccacagtgacttattccttgagaatctccagtaaggcttagggtctttcggataagtcattttggagaaatgttttcttcttttgctgttaggttgacatggcaaaagaaataatattatttgtgttaacctttgtcctagtatgttattgctcaaagcaaggttgt

SEQ ID NO: 54951 - DNA, 1020 bp, Homo sapiens
atcacgccactgcactctccagcctgggcgacagagtgagacccagtctcaaaaaaaaaaaaaaaaaaaaaaaaaaaaaaaggacaagtctgtcaacaaacctggacagccttttgtcccaaaacattgtctgctttgtgagcccaacaggctttgtctcaggccattatatgttcttggagcccattaaattcccctaaaaatcatttactaacccccttacatcactcatacttccccatctccctttcttctaagaagaaaggcataaaaacatctagaccccaattcacggagaaagaggggataatatctgggattttcctccatgcactttaataaatttatatgctttcctcctattaatctgccttttgtcagctgattttcagcaaacctttagggggcaaaagggaagttttcctttggctgctacacagctctgaactgatgaggaagagctactgcgtgtaagagtctggctacgagccaggtgccttccatcctacatctcagttcaattccacaataaaatggaaaggcaggtattactgaactcattttacctataaagaacctgagaagcgaagtgacttgccccagctcattggcaagcagcagagctaagacaggaagccaggttttccgagtataaaacccaagcagagtcactatgctgtactgagacctcctattactgattatgaaccaaggtaattttatcctacttgataactcagatgtcacctcctcctgaattagtcacttttatatgctcctcttgtctctcttcttttctattttctccaagaactgagctgtgggacgcttaccctcatgatattcccttactttgagataactgcgattctctcacttaatggcaaggaaaaaaatacttggaatgtggcccctgaaaggtaatgttaaacattttatatacattgcaatcttgtttagtctttatacaaactcataacagaagtattatagatctattttaaaagtggggaaactgaa

SEQ ID NO: 54952 - DNA, 1153 bp, Homo sapiens
ctcagttttgcagataattgggttaatgtcattttaaaaattgtgcttgttttttactggatcggcatataattttgaattattgctaatatcacactaattcctttttgttaaatgtgtcttcatagattacacacactccgcctgcaggaatacttatcagggctttaatggtaagtatcctctttcagcttttctcttcatgcgcataaaaatatagtatcaatgtaaaaggccagttctacctatttcagtccttgttttggttcttgatatatcatttatgtgttaatattgtcttactatatatagtatttgaattggggaatgtgctatcagaaaatgttaggggttattcacattagtttgattttttttttggtccattttgtttgaattatgattattttaatgtgttccaaagggcctaactacattctgagtgatgaatcacaagacactggctgagttattttggttgaattagaggctttggtattgagtaatgtagactaagtggattattggcttggttctatatagcttgtattgtaatgcattttgaccttgtttttgaggtcattttcttcagtgtgtccaaatgtgttagtatataaagagctgtctagaggagcacatgaagaagcttgattgtttattgacatgagcatgacattagacttgtgactatagaactagatagaatcatgagaggtatgtagaatacaattggatgtcattttgatagttattagagttagggccctgccacacaagataataatacaaaaaaagaacacagaacaattaatgcaggttaaaaaacatatgaaggacttgaggcattaaatatcatgattgccagagaaatgtaaaatccaactttcgtacagaatagaatatattcacaaagtaaaactgaagcaaatgtatactaaagactatgccatttatgggaataattactgaacagttaatttttatttcattatctttaaagattaagataaactttggatttcatgtgggctaaaaaggcttaacatatagggagttagtactgaagaatgtatttgtgagctggaaattgaaaattaccaaaggaagtttaatttgcatccacatgtaagttatattgaaaactggaaaatta

SEQ ID NO: 54953 - DNA, 2341 bp, Homo sapiens
agctttttcttaataattaaaaaaaatcttttctaatgtggggtgctatgtaaattagcaaagcagtctaactagaatggattttactgaaccagtctaacatttactttccaagaaacattcaggacatattcctttaattctaattttaaaggaagagcatattgcaataataaaaatatttttaaaattatgttcaggttatttattgacaggtactacttacaccaaagcacttgtgctctaggctagaagcattgtattaaagccatgaatactatacctttgactagtcgagattgtatttatattttcctgttactactgtataaagcttaaacctacttaaacaactacaagctttaaggttgaccatatttcaggagaaggggtgtctactttttgaggcacaaaggttcctgctgaatataagtaaaactagttagtagacatgtgaaacagtcatccttctgcataaattgaaggatccggattccttaatgatggactgaatgatgcttactttccttctttctgcttccagtgtaccactatggtttatagtaaagaaaaattaagaaagtgaacagttgcaactattttgcttatgtgatagatgttttgaaaaatgtagttggaaataggaataatttttatatggttactaggattcagaagtaaatctatttagtgatctgtaaataattgaagtaatgtaacacttaatgttttaatatgtcagttattgcccttttatattgtgaatgtaatgtgcataagctatatccgtagatgttattgttttatctcatgtgtaattgtgggcctttataaaattgtgttgtaagatatcaagcaacttttgtaatccatgctttgggtttgtgagaaggaagatgatttatttcttctgttaactctcttaaaacctcgaggagactgtgtgctcccttttttagggtagttttatgtgataatttcctgaaggaaataattttgcaaataattgaatatattataagatgtattctttctcatctgccttgaaaattcatatgcagagggtatatgttggtgatcttttatgttttatctgtttatccttctagatttgttagattttctagtctacaagtaaaaagtgattgaggattgattaattgaccttggctgaagtttggcagattgttaaatttttataaccagagataattccccaaattttgactcctacagacacaatgaagcagtttgtgatatagattattgggagtgcaaaaggatctctctgtgtcacaaataacctacatctaagtagacttcaatttgtgtccctattgaaagccaaaatattgtaaatgttttgtaatttttaatattagggatagattcaaaaaagtttgaatagtttgtgaactttagcaaatgaccttttccaagactagggctgggcttaaataatgacagacaaatcttttcttcttcataaaatagaaaagctgctaagaagcagattttaaagctaagttttactaaactcaattcatatttataatctgactcagatagctttctatctggtctcacgttgaactgcccagccctaatcaaatgtgaacaaaagtagaactgtgcaaaccagtatggtataaatgaattttagttgataaatgtcatctgataatttgtcttttgaattgtctaacattagtaagcttacttttgttttttccctcactgtgcaacttttccaggtttggaccttatgagtcttacgactccaggtcttctctgggtgggcgagatctgtacagatctggctatggttttaatgaacccgaacaaagccgcttcggaggtagttatggtggtcgatttgagagctcctaccggaatagccttgactctttcggaggtagaaaccagggcgggtctagctgggaagcaccttactcccgttcaaaattgaggcctgggtttatggaggacagaggaagagagaattactcttcctacagcagtttttcttcaccccatatgaagcctgcacctgtaggctctcgggggagaggaacgcctgcttatcctgaaagtacgtttggaagcagaaactatgatgcttttggaggaccatcaacaggcagaggccgaggccgaggagtaagtacaacagaatcttttcagattcttttcactagtcactcttttaaaccctttcaagaccatcgttttcaactagaataaacactgttcatcccggtgtattttgaagcaaaagctgagtcataaacataatttttaggttgactgtaaaagtttttctagcacctcagaaaataag

SEQ ID NO: 54954 - DNA, 2019 bp, Homo sapiens
agattgtacaatgatttgtggtcagtgtaattttgctaactcacgcttacaatatgtccagttgctggttgttttattttccctcgtgttactagttttactcttgagaaataatttccacctgtacagatatgtttatggtttcttcttaggaagtaatattttgtaaattattgcttaaatgagtaaatatactagtccacagttgtttaagtttagggtacatagtgtaaacattatgctttatgttcttaggtcacttgattgacatgaaaatttacctagtaagtgtatgcagattgtggggttattatatagtttgatcatttaaagagtattgtatttttgttataatgtaagaatccttttaagtcagctgctcttaatattttatttgcagaggaaagtatttctagtaaaaaaggtagtagggtacacgtttttgactggttattagcttttgatatgtcagtgtagcttgttatacttgtgtagaaattttgcatttttaacagttactctttacttatgtaaaaatgcattgcacctttaatgcgtaattaaggaagattttcctgttgtgactttttaaattacctggaaacacaactaggttagataggcattcctgagcatagtatacaaatgtaagcaactgatacattacagttccactatacttcatgatcataggttaattgaaaatagttgggatgataggctttgggttttgaattgaaaatccattctagtttgaaaatttggaaaacacttaatattttccatgctgtatattattttagacaaagtgtgttttcttaatgaggcttcaaaagtaaatttcgttttcataataaacaagtattcctgtactttgtatttaccattctagtctgaatggacttttctttctttcctcctgttagtgaagtagatgagccaataggacctacattttaaatcttcacttgtacaattccccttgggtccttctcttcagattactcctccatctttatcttctaaaagtaagattagcagaataaatttctgtggacatgtggcctcttggtgtagtagatttggataatgacaagagaagaggaagggacacaaagagtcgtttggttgcatgactcttcatctgtaaacttttgtttcttgggcttctgggtcagaaaatgtttctctaggtaagaatgtgaatggaacgtcagatgcaattctttatctgaagtgtgtcttggaagttgatgcatggttatgctttaactctcctatttcatactaatgttccatctcgccttctcattccctttttcaacagggagaatactaaatgatttctggatcttttttacttcaaactacaaatatggtcttctttgtgtatcttagttttagtaaaataaagatttcttttagggtcttttcatgggaaaacatcaattaggaactctgaagaggagttgtcagagagttgtacaagtggtaacatttggacaggcacatatgttgtctataatctcaagtaattttgaaatgtaaaagtaaaaacatagttagcaaatattcattatttgttctactggaaataaaaatactaattcaatggatttgagtttatgtaataatttacagagtttttcaatgtgttttttcagaatggacatgtaaaatttagttacattccagggaattttcaggtgaaaattagtagatagttaacatgaaaattttatatgaattcatattttttcttggacaatatgctaatatttattgatttcacaaatttacagcatatgggtgattttggaagcattcatagacccggaattgttgttgactatcaaaacaaatccaccaatgtgacagttgctgctgcaagaggaataaagagaaaaatgatgcagccatttaataagcccagtggaacctttatcaagaaacccaaactagcaaaacctatggagaagataagcctcagcaaatcacccagtaagtaagaaaacataa

SEQ ID NO: 54955 - DNA, 1456 bp, Homo sapiens
gaaactttctgagagctcctacaatatgaacatgagttcttgcatccagggctctgcagtgtttactggacttccattttcatgctcggtcaggttactttagtgtttttcccaaagtatgtgatgcccaagatgattttaggtgataaggatattattgcttagaataaggataggacaaatgagcacatttaaagaaaaatatgtagcaaataatcacatagatgacaagcagatatgacagaattcatgatgatggtattcaaatgaatgaagttcatttagtgaagtttcagaaatactggatagtctcaaactccgatttttttggtgagttcaattttagattacaatcactaagtatacctcataagtatgtactttacgaactgatgattggaaagagagaatggaaaaatgaattttagcttttacttttttgtgtaatatcctagcaaaaactgatcctaaaaatgaagaggaagaaaagcggcgaattgaggctcggcgagagaaacaaaggcgcagaagagaaaaaaacagtgagaaatacggagatggatacaggtttgtacttagagtcagaaaattaggttcattaaaaaatgatttcctagaaaaagccaacacatcaattgtaatattaaaaagttcttaagattcaaatgaaaagacttgttcaaagatacagaggaatgcttttggtttttgatatttatatgtaatcactacttagaaaacataagaaaaaaggcattctattcatattggcaatccaaaagatatcaaatattcagaaataacagtattcttaaaaagaaacacttgtcattgagatttgactgtatggagtcatagtgattttcatgggcaggaattaaatattacaaatatgtaagttctttccaatccagatcccaaaggaaattctgaagaagagtaaatgagtaggtactggcttttatagataatcaatcattaaaaagctataatagttaaaaatatgtggtaatacacaaagctaattattataccagattagcctgtgaacagactgtaaggaagaatgtaatatttaataaagaggatattagaaataagaggggaattgggctaggcacagtggctcatgcctgtaatcccagcactttgggaggccgaggcgggcagatcacgaggtcaggagatcaagaccatcctggctaacacggtgaaaccccgtctctactaaaaaaatacaaaaaaaaattagccaggtgtggtgggtgcctgtagtcccagctactcgggaggctgaggcgggacgatggcgtgaacccgggagtcggagcttgcagtgagatgagattgagccactgcactccagcctgggcaacagagcgagactctgtctcaaaaaaaaaaagaggggaattggttgaacaatgaaataacaacaaaaatcagtttagagcct

SEQ ID NO: 54956 - DNA, 1050 bp, Homo sapiens
ttttatcacccaagaattccacaggagtgaattatgattgtctggtggtgtgccaccttgctttattgatactaccattggtttagaagcttgaggatggaacaacatgtaaaataagttgcagaactttggaacttgatacttcttgaggtttgttttgcctttttaattggtccaggcttgaagtggataacttatagatcccctgattcaatttttcctacccggaagctccaaggtgggctagaaatgcaaagtggtatatgggtactgtccaaatatgtacttaaatactgttttttttggatttaagctaagtttaattcagtcataaagaggaagaaaggaaatcatttatgttggtaaaattagtttcaatgttatattcttatgaactctttatagttgaataaagtaatatttaaaggaaaacttttttttctcttacagaatggcatttacatgttcattttgtaaatttcgaacatttgaagaaaaagatattgaactgcatctggaaagttcttcacatcaggaaacattagatcatatacagaaacaaactaaatttgataaagtagttatggagtttttgcatgtgagtagctgtttttgaagtgagaagcattttattgatatgaatttcttatgatttcatttttcactctccccatctctcacatttatgtttctaaaattttaatttactatttaaagaaagagttgttttaaaattaactcagaattacttgtgaattcctctataatagaatttgtatttgttatttcagaaattattacatttttcacagtttctgcgggaggtgtcctttaacaactgtattgatgtggagtcagctatcatccattaactggagttgtgctggttacattcattcgttatttcagttgagccctgtaacaattcatttttatcatgaaagattatgctcagagcagttaaatgactgttaagtgacaatgccaggaattcagaaataatgtaggagtttagcaaagggaaagacagttgggaatgttaaggaatgc

SEQ ID NO: 54957 - DNA, 1012 bp, Homo sapiens
aatacccacctactctggaagacctcttaaatattctagctccctttgatccctttctctatatgcttaaaatatactttgaaaaatgaataatttttgtaggttcctaatattttatgattatcttttcaattaaattataaactccttgagaaaagatgttaattcttatgtagcagatactgtatcttccatagaatgaacatagtgctaagcattatacttgagtgctcattgaaagctatttagattctttctattttgttttctaggagtgtatggtgaataaattcaagaaaacatctattcgtaagcaacagacaaataatcaaacagaagtagttaaaataattgaaaaagatgttatggaaggtaagtatttaaaacaaattattttaaaattctacatgtatttttatatatcataacctgtttaaatgtaaatgatagccactagagtgatatagtacagtcatatatacagtagctctgagtgagttaccagaaatgaacttctttgtcttcctgttctaatgcttacaaatttatcattacctgccattactttcttcacttcagtttgagaggaaaagttaccttttcctctagatgaaagatacttctctctgttctctgtttctgttattccttctcccaaaattcaagttatgaaatcttctgttttttagtctttccttctcttttgattccatctctggagtctgtaaatatgcttttacttaaaaaaaacaaaacaaaacaagaacaaaaacaagaactaaccaaacaaaaaacagccaacaaaaggaataaaagaaaaggaaagaaaaacagacactagttctcctaaataacctgtcttctttttctttttaaataaccatgcttctttaagcataacccacactattctctgcttcttcatctcccatgtattacattaagctaattaaacaactttctactactgttagtctactgaaactgctgtgacagaagttaccaacaccaa

SEQ ID NO: 54958 - DNA, 2808 bp, Homo sapiens
acatttatcaaatctgtttctttacctctcctttaaatactgtatttgttcaaatccttttctgttgtcttgacaattgtagtatttccgaagtagtttcattacttccagtttttcttatcttacgattttattacatgatctcattatttcaggaactttcagtggctcttcatcctctccaggatcaagttcaaattcctaggcgtggcacatacagctctttattatttaggcccttctttttttctattttcatctttagtctcttcttctctgttccagtcgtactaacttgcagaaagtaccattctcttacacccttcccttgcatatgtttataccttcacctgtaataaaccccggtcaccatttgcaagatccagaatacctttgttccttatgaatccagttttgacatcctttccccttttcttactcatccacattcataatcatggaaattcttattttactacaaaatcaatatttgttttcctttatattatagttttgggaggatgaatgtacaggcctcagagcatggttgtttaacatgattaggaactataatgtaattgtaccttaataattttagttagcaatatagtaaatctacatatgtagatttatgagatgtggtagaaatactcagcataaacctatgcactctgatctttattttggaagaaggggtataaataatcatggaaattaagtagtaaaaacttcattggtcagaaataacatatgaattatttctttaataattggatgtcttttgtaggtgttactgtagatgatcacatgatgaaggtagagacagttcattgcagcgcttgcagtgtttatatccctgctttacatagttcagttcagcagcacttaaaatctcctgatcatatcaaagggaagcaggtaaaattttcatctgtcttaataaagttgccagattatccatcaatcttttattgttctttggccatagcttcacacctatctgcaattttatcaatttatcaatctcatatggaaataactgtaagtatactcagagaggcagtatatagtggttaagactgagctctaaagtaagactccctgagttgttcaatctataacatgtgttacgcaagcaagttaacctttctttgtctaagtttccttatctgtaaaatgagggtagatgatcattctactcttatctgattttttttaagaattaaattaattaaaacgtataaggcatttaaaatagtgcctggtaatggtaagcattcaggaaatcgtagcttttgttgaactgttaactttttaaaaagtcagtacaaaacagttttgtgagagagtgtgtgtgtgttgtgtgtgtctgtgttttagaataaaaaagaaagtaaagatttgattattactgatacatttttctgatggttgggaaaaatacatttaaaaacagcattatcagctagcatctattcttacattttttagtagaatatccctgaaaaatttactgtcttctttttggtcagtatatttctgcttctctattggcttggctggttttatttagtcagatttacttcagacaatacaaatgtttatattgtgggaaatcagtttgtttgaaaagcatatttaaagattcagatattaaagccttaagttttaaatagaacatacccaagtgttaaacttttattttgtattgaagtgaacctcatttaattcagatttcttcaagcatttttgaacacatacaatcttttcttaatctatgtctttttcttctcttgatattcccttgacaccattttggcaattttctatactggtaactttcttcctctgtataatagtcttgaaataactacagcctagaggaagactagatactcttgtagtatgaaaaattattctttattttttgacagcgtgaaaattaatagttgggggctggggaggcagatgtggagtggaaagaagagaaggcagctatctagtagaatctagacttgtagatttgtgggactgagtgttttcttttgaagctgattggcttgaatcttcattgtttgaattcatagatttagactgtggttatagtagttgctattgctctatagtttgtaagaagataagtcatttaaatctaagggtttgagcatgaaatgctgttttaattatggaaatatttttcatggcatggttttcaagaaccctcagtgtgttctgttttttataggcttataaggaacaaataaaaagagagagtgtcttgactgctacaagcattttaaataatccaatagtgaaggcgcgatatgaacgttttgttaaggtaagattttagggcaaaaaccttttcaataatattgtagtattgcaataattaactggtgacatagtaaccttttgtgatacttgaatatagtataacatattaagaagaattttactcagtatcttgcatataggtaaaacatcttttttcctaattgttgggttggtcaagatgggagcagtgattcctctcttatcacctttgtagctctgaatcaatgagaaatacacaagcattagatagaaaatcaaaatgtcagctttattcttgatttaagaaaaaattgacttggagaatatatcttagctatgtagttgctgtggacttttaatatttcatttctgaattaggtagacttagatcctcccaatttctgttaccagcccagatggacagcaacaggcttctcctagtttaccacatggcatagaacagactaggatgtaccttttctgtcactagga

SEQ ID NO: 54959 - DNA, 2270 bp, Homo sapiens
taattttacttattaactaccagtgtaatgtgtttcctgtagtgactcttccaacctttaataacctcatgtctcagatttcattcttgctctctttgcttcccatattctttttcttatatatatatattttaagacagaatctttttgtgttgcccaggccagagttcagtggtgcgataatagctcactgcagccttgaactcctgggtttaaagccattctcccacctcggcctctctagtagctgggattacaggcacacaccaccacactcagccacttcccatatgcttatttcttctcctgcattagggagattgagaccattagatgtaaattcagtaagtgttctcatttctgccttagatatatctttccttcacctttattatttgtgaggaaaaatcttctttgcctttcatctttgttctaattccatcattatttcttcccttacttgcatctgatttttttcctgtttttttttttttttttctaatcttcctcaaatagacatgcttatgagttccctaaaccaaaaatgacttaacttttcctagactttggcccaccctattttatcatcttgtctcttcccagcatacttgaaatggtagtttactttgcacgtgctctttgcttcctctctattattcactctttaaactagtagttctcaaccagaggaatgtgttcaatcacccgtgaggctaagataaacaaaaagctgcctaagcccttttttaggctttctgaattagggtttcccaaacttcactgataaatatctccaaaaatgcttctcttattttgagacagagtctcactctgttgcccaggctggagtgcagtggtgtgatctgggcttactgcatactccacctcccgggttcaaacgattctcctggctcagcctcctgagtagctaggccacacccagctaatttttgcccgaaatgcttcttaaatatgcaagttactgagcgtctcccctggaaattttgattcaggcagtctgagattgatccaggaatttgtgttttcagcaagagttccagtacagactaaatgaaaatctcagggtgctggaatcagggcctgtggtttttgacagcttcataggaaattttaaagatacattcttggacaactgctgctgtctaactgtcacatcatacttttgaaactgctcttcctaagattactaatgttgtcattatcaaatctagtggtctttaaaaaattataacatattaaatgtatgaaaataaggggatagtacaataaatcctcaagaacccccattctgtattgatgattaactctagtgacctttttcaattgctttctgcttttttatatgtatcatttgacactgttgatctatcacttattcttgaaactctcttttatcaggtagtctttttactgtcctgggtttcctcctgcaccaagtgttccttcactttttttttttttttcgagacagagtctcgctgtgtcgcccaggccatgcagtggcgcgatcttggctcactgcaggctccacctcctgggttcacgccattctcctgtctcagtttcctgagtagctgggactacaggtgcctgctaccaggcctggctaatattttgtatgtttagtggagtcggggtttcaccgtgttagccaggatgatctcaatctcctgaccttgtgatccacccgcctcagccttgcaggtatgagccaccgcacccagctgtgttccttcacttctaacttctgctgctcccatgtatagtgtaggcatcttcatagggtttttattgcagcccttttttctacttaatccaccagtcccatcccagggccttcccatttaagaccctggcttcaccaatgcactctctgcaagcaggcaattcgtaaatgtaaatatcttattctgaactctcctctcttttgagttgcaaatttatagctgcctattagacatctagatatctgaagttataattatatatattaatagcatatatacacttcctccccttttcctttccgttggaatagtgattgtaatttacctgttctgtgaataatgtcaccacatcttttacatttccctggtctgggatattagagtagcctcctcactagtattccttcttttggttctctgcttcatcctacacattcctgtgtcattcatcttaaagggtagtgccaatcttaatattttcctgcttaataaccttcactgttacttcatttcttactacat

SEQ ID NO: 54960 - DNA, 1050 bp, Homo sapiens
agaagtaaggcatggtatctagtagattaagcgaggtacctgattttcatttgagttttaaagagattctgtaacattaatactcatataattaagcaaaatgtaaatctttgcatcatccctttgtttctaccaaaaaccacacttgtctttgtcatgtgtatatatgtgtgtgtgtgtgtgtgtgtgtatgattatttagaaatacagttaaggggaaaatatgacctttaagcatttcagttatggaggataaagtaatggcttcagtaaattatatgctcacattggtatggaatggacagtcaacaaatacttaatgaatttgttataatttacaatgaaaagtttcaaaatggcatttatttctcatgatatggcaagtaaaaatttcacttgccagatcatgtaataatgaatgtgctgattttgaaagccatttcttatgtttttagggtgagaatccttttgaaattcaagaccattctcaggatcagcaaatagaaggagatgaggaggatgaagagaagattgatgaacctattgaagaagaggaggatgaagatgaggaagaagaagcagaggaagtgggggaagtagaggaagtggaagaagtagaggaagtgagagaaggaggaatagagggcgagggaaatatacagggagtaggggaaggaggggaagtaggggtagtgggagaagtagagggagtgggggaagtagaggaagtagaggaattagaggaagagacagcaaaggaagaacctgctgacttccctgttgagcaacctgaagaaaattaaatataaggtattagatttaaaaggagctttacatttcggttctaatgtaaaaaagggtaagaaatttaatagcttaaaatatgaattaacacccatgttgcatgcattccacatattaaaatttgttttatataatttctaaatgtttaacatttgtttaataaaatgaaggcaaaactattttagtttagtttttatagctaccagacttagatccgataaattgtttgtataatttttaagctta

SEQ ID NO: 54961 - DNA, 1081 bp, Homo sapiens
catttgtcttatttcactgggagtggtgcagtacacactgtagttaaatttggaagcagaagctatggaacaacttctcccacccacagaatatactcacaccttttgttcttttgtggccaacccccaggtacagagataatcacaaaatttaagtttactgaattcccatatggcaacatgggtcttttatttatttttgcacactgccttggtaaatgttcatagaacaaaaagcctgattcccacttaatatatgtttatatattcatatatgttcatttagtgaagaattaagaacatgttacaactggaattatacaattgaaggaaattagagaaattttagtccaaacacctcattttatgcataaggaaattgagccaaagagaagtgacttgcctaagttcatagagtgagttaatcccagggttggatttagaactcagatcttctgactcttaatctggggctcttttgctgttctagctattatattggaaaatatttaaataatatccaacatttattgactacatattacattccagatgttattaatactctttacatttattaatcattttactctcacaacagccccacgaagtgggtactattattatactattttacaaatgcagaaactaaagcatgcagtgttaaataacttatgcaaggtcaaatggtagaatcggatcttgaaagtaggaattttaacagaaggtactccagatagatggagatttctttggttcttcttattttttccagcctacatcttttgaatacttgagaattcactcagtagctttctcatacataagggaatgatagtcttggtaattgcacttaccatgaattgccctaagtggaaattaccttgggctggtgttcagctatgctctgaacctcaggtatgcattgattatgctagttaagattatccaaataatccttgcttttctgtaagatgccccccaccacctttttagagatgattattctttacagttaactagttgtgaggtaacatgagttacctcccctgaactcaacacagaagctgtgacagagcac

SEQ ID NO: 54962 - DNA, 1098 bp, Homo sapiens
agcgatccacctagcttagacagtgcattacttgtaggctcttcagcatttgttcttccatttgtttattctctggccggttactgaaaaatattcaagcatttgcttttattacacccagtggtacacattgctgaataccaaccctgagggacctaaaagtagaaggaaaaaacaatttttttaaatgtcaggttttcatcttgcagatctgtttgcaaactggcattttgaggccataattaaaaggaagcccaggaacagtggcacaggggaatcacctgagacttggcagcctggggatcttgtaaagccatcatggctgcttcaggactcaacttattttatcgtgtgagctgatacagtaaaaacctaatctaagcattgctgaaattacccctatggaatagaagaggaaaaaagtgtcatctgtgctcagtgagatcacaaactggctgcaaacagctgctgaaacattaattaatctgtttgcaaataaattgtggatctgtactagctgaaattgctgttataaacaagctgggatgctgtacttatcaggtttacttgtattttaatatttttttacctatgctgtaaaatcaccagagcccagatacagcactgtgtgtttacttctggaagctctgagcaagtatactgatgttaccttgtagatacccagcttgaaagcaattcatatcaattgcgggacttttgtaggcttacaatactgtgttgaagcgtccacacttcttttaagtcagatttgttaatcaaagagaatgaaatattctacagtgcaaattgatgtggatttagcaattctgtaattttaaaacatttcgtaagtgtcacagttgcttaatttgttctaactaggctgtggcaaattctagttgccttgacccttaaaagattaatgttggttccctatgtttactcatttttaaaaaagtggtaggatatgtagctggaacagagaatctgagagagtttgtcttgccaaaatttgaaattctgatactccctgttccctgtttttctgtcctttttttcttgaagatgattttaattcaataaacactcacatctctt

SEQ ID NO: 54963 - DNA, 1070 bp, Homo sapiens
gcccgaggcttcccctcagtggggctgctccgcagggcagacgcggtgacccagggcgctgcgttctgcgctcctggagctggaggtagcgaggcgtggaggcgccgtggccccgttgggggctttgtgtgcacttggggctcgtgactcggatagctctggttcccacgttgcagttggggaggaggctagtggagagacccagtctggagggagctgtgcccaccgcaaaccccaggagagggcgtggagagggccggcccgccgggacggcgcagccaggcgatgccggggtcgcccgggggtcgctagggcagcgggtgacgcgctgtggagcgcggcgagaacgacggcctctgaccccggagcgctcgccaaggccacgccgaggtggctggaccctgcccctccccgctgccggcctgggccccagcctgcctcagagacttcgatttcagtttccagcaaaagtgtgtgccattgtgtggtggtcgtggaggagggagacccacgcgcctgtctatcgctggatgggattggaatttgaagaaaaaatgtccctactcctgttgcgggttcttgcctatctggccgcctccagtcccgcccacgagacctccagctttcattttcttcctgaactaaagcccgaggactgaggcccttcacgcgtagcgtagcccccacccccggtgcccaaagccggccatcgcacggcggttcttagctttttagtctctgtcacgctaatacatgctgttagtccaggtcagggatggttccatgcaggcgattttgacagcagtcatcataccaagctattaggaagcgtgatgtcagtgcgttctggaaggacagataatttataaaccagttcttgacatggtatcttacaaggaaacatctgaagccatcagtaaaagaggcattttaattcacacactaaaaatattttgtgtttagttaacatcgtgcaaatgttgaaagaggtagtagcatttatcattttgtaggtatttatcaaggtactcaaaaaagtccctataggaaggaggaggtttttgtcttat

SEQ ID NO: 54964 - DNA, 1008 bp, Homo sapiens
cctacttaagctggacttcttcagggctaaaggcattgataacatgtctcatactgtgtttcaagaattgacctgaattattgtggaacaaaatgatattgaagggttgtgagctgaatgaagactgcaaaacatattaatgcttattcagatgtctagtcacttggtcttcctaccctggaaaaccgctgaaactggtgtaggaaaaaagaaaactcatttaaaagagcagtaggccgagtgatggcagttttaacatttttaaagaacaaagcctattcagccagtctcatactgggccctaagcttctgtcttgaatgtaagctccacccagatacaaatatgaagggcgattatgtggaagatggtgatcagctgttctctatctcccctgcgttccaaacaataaatggatataagcctcagtgtgagggatttgggcaaggaatgaggaacaatcttgtaaactgaagtgggttaccgagtgaatcttattctatggaagtcttttaaaaactcattactatctcccacaacatttattgtctatctgtgacatgggtagccctgtagtaagaaatgtgatgagctacacaagaatgagaatcccgaacctggagaatgatcagtacaaacatcaaataacaagatagaagcacaaaaatacataatgacacaaataagagagcaatatgtatgtatcaatgtaatgacagcatttaactaattaaactggaaattttctcagtgctcttggaatactaagggagtcttcatttttagccttgtcagttgacacaatttttaaatgagcctgagtctcattggcatctctgatctgtatacagtttctggaagagccttctcctggagagaattttcaaacaaacatttggcatcaatagaatgttttttaatcaaactgtctgttttctatagaacagcctttgatttccagaagagtcaaactgtcttagagactgagaaccttagggcattagaccagc

SEQ ID NO: 54965 - DNA, 1058 bp, Homo sapiens
agtggagggagatttgtttaaacaagtatttctaaaagaaatatgtacatagttctggaaattatttgtggtaaggaaatattctttactccagttgcatttctcagacaataaagtggtgcatccatgctacctcctactttgtcaacaaagatgctatttaccctttacatttttgtatcataatagattttaaaaatctaatgttctttattgcaagacattcttttgttaacaggtttgtttctttttaatgttttacctaaaatttgacatgcttacaggacaggtttgcctcttactttatttaacattgtagaaatgtaattaataaacaatgctcactacacagtttagaatagacgttctcatttatattatcttccaaatttgatcagttagcaaaacttaatacaccaattaaaatatttctacatatgagaatgtttacaatttaaattttagaacttgttttggatgtgattatatgtacgaaaatcgtgtaacactatgctcatgctaagaaccgacataacagaattactgaaataaatgtgctgtgaggaatggaaaatatggtgcaggtgtcttggtcatgataaattgtgattctttttaaaaattttttccaaaaacaattaggtattttaatctgaaatcagattcctttacaaacaacaagtttttgtatgcaagcaccattttatttcatgtagtatggctaatactatagttgaaccaaggatatgcattgattctttgcttcgtatgtaaataaagttaaaaacagttaaaataaggagtattttggtagagtatatacatacctcactgccagtgaaattgctttcctatggtatatctccttaccagaaaaatctctaaataaaaaaaggtttaaagaaaattaaaatgtgaaacatttcttatttttatcattggtggtaatagttcacttcaggttgtgtttcattggatttaaattgtttatccttgccaggttacttggatcacagagcatagtttttctagaatcacctcattggtcaatataatgt

SEQ ID NO: 54966 - DNA, 1013 bp, Homo sapiens
ctggtcagtgatttatatctaggataatgaagtatgtgtgactgcagcaacatatttaaacaaatgatgcacaatgttgtacaggaatattacctgtattaaataggagtaaaacattttcattcataggctgtctaaatatcaatggttaaattactgagttttgctttatttttactccagaagtatttgttgagttcctactacatgcgaggctcttgactgagataactaataagatccttataagatttttctattccagagtttggttgtttagctttgaattacccattctttaatacctaacttgacttctagtagttctttacttattagactcttcttctaaggataaacagaaaaagactgtgtcctagattttacttttgaataggcaggtgacaggaagctgaaaccagtggcttcaatgagatttaggtttcttgtggttttgaattttctatatgacatttctgttatcattgccatttgactaaggaactatgtttactggttttgtaatagtagcatctattcttttggaatctggactttgaacaattcgtttcacagagtcattgaacagccagttccttctctcttacttagaatttttccagggaatttttcacatggcaggataatggaagaaaagccatttgggtaactcttctgttacatttgtatccctccccccttggatccctacagataaattcttaccttctcttcctgctaattgaccagcagcaccctggattgctatcatccctttgtccaaagaaatggtgtagctgtattcaaagacctataaaatgttatgtgctatctattgctacctataaaaaatacctttttttctttttaaaatcaggttgttttagaataaataaaggaaaagtcaattaatggaaaaatttcaagaacagttcacataaaattttggtctattttaatttttttttttaccttttcaaatcacattttaaaataagcagttggagaaaatg

SEQ ID NO: 54967 - DNA, 1087 bp, Homo sapiens
gttctattaagttattaatggagtgactatacatactggtttaccttgttgtcacacctaagtactagtgcctcttttactctcataagtgtcctggattgaatgataaattaatcatcctggttattaaaattgctaaagcatttaaaattaaggtaaagcatattctatcaacctaatctgcaatcaggaaaaaaaatatattttgaggtcaaaataagagtgaatttcaacaggtagggaaagggaaatacagagtagagagaatgttgttaaaggaagtagatctgtcagatgaatgccacaatgcttttctatggtagatagcatgttgttatcttttgtaaagaagaaacaatgatggtagcagtcagcattttaattgagactttattttatatcttgaccacatgtacaaacttacattaatacaaacacacaattccttgtgtactcacctaaatgtactttaatattttcttttttattatattctttgttgtgaaaaattaatgctggtcatgagccagtaaattgatttgctacccacttaagaagtcactatcatagattgaagacactgccctaactgcctctttctcttaggggttggtactgaccaatggtagtagtatcttagatgtcataactcttctgtggcagcaggtgaattttctatactcattctatccacatttttctctctagatcacttttgtaaatcaaatgctaacctctgggacttaaagtaattggaaatttctagttactcatttaaaattaatgcaagaaaaatatttttatatttgggaggggcttcatttcattatcttcagaacaattttgtgtgtgtgtgtgtgagacggagtttcactctagttgcccaggctggagtgcaatggtgcagtctcggctcactgcaacctctgcctcccaggttcaagtgattctcctggctcagcctcctgagtagctgggattacaggcacacgccatcacgcccggctaattttgtatttttagtagagatggggtttctccatgttggtcaggctggtctcgaactcctgactttaggtgatccacc

SEQ ID NO: 54968 - DNA, 2193 bp, Homo sapiens
atcctttattagaaaaggaaattatagggaaatttcaaaatgtagacttgattaggaaactaagcaaactaatgaattttcattagtctatagattagatctttgaaggggtgagccttaataatggcttgtgttgacaagcgaatagatttttcttttaatacttcttaaatatattaaggattaataaatttagctatgcacataagtgttaacatgcacatttctgtgttatttttggttggttagcccaaccttgcagatacctcttaatactgctcatctgtgaaaattttattagcttacttatatgtaatacgcttcttataacctacaaaatgctttgcactttcatttgtagtcttttaagctaccctgcttcagcaaatctcatttccctcacatcttaaaatataccctctttttgacatagatctacataaattcttttgcctaaaattctttccaatcattttatttctcttgctcttttttagatcactgcctcctgctttcttctagttgttttcccagcttttttgttcttcctcatgtcctagaacttagatccaatatgttcttgctttcaaaaaaccacttatatttatactagtgtctttcttctgcttctttgcattcttccttaacttgatatacaaatgaccagggatgaatgttgacaatttatattaaaaagagaggagtggggtgagttttagtctactggattaggcctcctactctgagattataatttttatataccctcacctttatcaggcttggcaagtgattgcagacattagaggtggggaacaataaaaataagagactatacaagtaggaaatcattattgttaccatacttgctaacttttattgaacatttactatgtgtcaggcactatgctatgcaatttacatgcataacatttaatctttacaacagccatacaagttgtaggtactggaattctcttaacgttttataggaaactaggacttaaagaacttaatttgctcaaacttacacagttaataagtagcaaggttgtaattcaaatcagggctatcttacctaatctttgtttttaatcactattctctaccttacacaggcggtctatttttgaatttcttatttttaaaataagaaattgaaataaaaataagcaatggaaaattctaaaatgaaggtgggtttgttcatttatttatttatttattttgagacggagtctcgctctgtcacccagattggagtgcagtggcgcgatctcggctcactgcaacctccacctccctggttcaagcaattcccctgcctcagcctcccgagtagctgggattacagactcatgccatcatgcctggcaaatttttttgtatttttagtagagatggggttttaccatgttggacaggctggtctcgaactcctgacctcaggcagtctgcccgccttagcctcccaaagtgctgggattacagccgagagccaccgcacccagcctgaaggtgggtttaaaatggggactattctggtgaagactgaataaataagagtctaattaaaaagagcagagatccaagaagtgcttaggcctaaattagactttagaggagttaatgttccattctgattattcaagcagattatgcaaatatccaataaggcaagatatctccagtccagattttattagtccattaaaaaaatgcttttacttcatctgaaaattctgcaaaacacaggattaattacttataaataactggtagtaaatctccatttaccaagaatgcacttatgaagattatctaaaaaatcttcattatcagagagaaaagtaatgtaggatgactgggaatatgtttaggtcctgaagaataaaagagggtgttattttaaaaatatgattaagtactaccaaaatattagaagtactaggaaatagaaagcgtgtgtttggcagtcctaggcaaagaaaaggaaaatgagaaactgaagaaagcctagggtcttattttccacacccagtagccacttttgagaaactttaaaaactaatgcttctttttcttggaaattctgaaacattttttccctcattaaaaaaaatcttcttgatcagtagagctatacagatgtctttgctgcttattcatgccaactaagaagttttttttcaa

SEQ ID NO: 54969 - DNA, 6331 bp, Homo sapiens
attcagtattttattcaacaaatattgcctgagcacctatggcaagtgatgtactaggttctagagatatgatagtgactagattacattcccagccctcaaagagctgacattctttgaagaaggcagatacttccaatgtggccatttctaagagcaggaaaaaaacaggttgcaagggaacttttcatagtgggggtaggcattacagtcatggtgtgaatggaccccaaacattcagaaatactgtttcctttaaaaatattgtacttttttctcataatgattaaatatcttatcaaaaatgcctagaaaagttttatctacattttatatgaaataaatttaaaacatatgtttatgctattctattgtaaaatgtgttaggccattgcactagaccaccagatcataagtgggataactgcttttagagaatgcctagaatttgaggccccacatatgaaagtttgacataaaccttcattaattttaactttagtaaagttaaaattcgctttactaaaatttagttaactttactaaagttaaaattatagttaaggttaatttgaataaggaatgaacaaaactatgaataaagcatttttacaattgatagaatgttgggagaacattaagcatcttgagagcaaagcagtcttttaaaaaggactatttcatacataaaacattgatgttgatagcaaatatgttcattcaataaagttatttactgaatggtgttttgttaccttcaggaatgaacttataagtgacaaatcttttacttctctgcaatatttgataatttatattgttctctagaatagagtgactacctctgataaacctacttaagtgaaagaattttctttgtattagcaatctccacgtgaggtttaaaattttttcagtctgtagcatatttatattgtttttgagtctgtgtatacatgtgtatctgtgtgtatgctgcttttccctagtgtgtttgtgtatgttgcttttccctagacattttgtatacatgacgtattggactgttgttgttgcctagcatgaagaacaatattaacctttgaggtgctttttaaatatttcaatatgtttgtgttctttcattcttggaaaattattagaatctcaatataaagagtagaaaattaaactaataaaaatatgtactttcaactctccatacattctaatagtattttttctttcatgcaaatctaaattttttttttccattttctagactaaatgtgttaaatgggcttgccaacaatatggatgatttgaagataaacaccgatattactggtgctaaagaagaactcctagatgacaacaattttatctcagacaaagagagcggagttcataagccaaaagattgtcaaacatcatttcagaaaaataatacgttgactctgcctgaagaactgtcaaaggacaaatctgaaaacgccttaagtggaggccagtctagtctatttatacatgctggtgctcctactgtttctagtgaaaactttatcttgcctaaaggagctgctgttaatggaccagtttcacactcctccttaactaagacttccaatatgaataaaggcagtgtttcattaaccactggacagcctgtggatcagccaacaacagaatcttgttcaactttgaaggtagcagctgatcttcagctgtctacaccacagaaagcaagtcaacaccaagttttatttttgttatcagatgtagcacatgctaagaatcccacccattccaataaaaaactacctacctctgcttcagttggttgtgacattcagaattcagtagggagtaatataaagtcagatggcactttaataaatcaagtagaggtgggtgaggatggtgaagatttattggtgaaagatgattgtgtcaatacagtaacgggaatttcctcaggtacagatggatttaggtcagaaaatgatacaaactgggatccccaaaaagagttcattcaatttcttatgactaatgaggaaacagtagataaagctccacctcattctaaaataggtctagaaaaaaaaagaaagcgaaaaatggatgtaagcaagataactcgttataccgaggattgctttagtgattctaattgtgtacccaataaatcaaaaatgcaagaagtagactttctagaacaaaatgaagagctacaagcagtagactcacagaaatatgcattatcaaaagtgaagcctgaatcaactgatgaagacttagaatctgtggatgccttccaacatctaatttataacccagataagtgtggagaagagagttcacctgttcatactagcacttttctttcaaataccttaaaaaagaaatgtgaagagagtgattctgagtcacctgctactttcagtaccgaagagccatcattctacccctgtacaaagtgcaatgtgaattttagggagaagaagcacctccacaggcatatgatgtatcatttagatgggaatagtcactttcgccatcttaatgtcccaaggccatatgcttgtagagaatgtggacggacatttcgagatcgcaattcacttctaaaacatatgattattcaccaggagagaagacagaagttgatggaggaaattcgtgaattgaaagaacttcaggatgaaggaagaagtgcacgattacagtgtcctcagtgtgtgtttggtaccaattgccctaaaacatttgtgcaacatgctaaaacccatgaaaaagataaaaggtactactgctgtgaagagtgtaacttcatggcagtgacagaaaatgaattggaatgccatcgaggcattgcacatggggcagtggtaaaatgccctatggtcacttctgatattgcccagagaaaaacacaaaaaaagactttcatgaaagactctgtagtaggatcatccaaaaaatcagctacctacatatgtaagatgtgtccttttactacttcagccaaaagtgttttaaaaaagcacacggagtacttgcattcatcatcatgtgttgattcatttggtagtcctcttggacttgataaaagaaaaaatgacatccttgaagaacctgtagatagtgatagcactaaaacattaactaaacaacagtcaaccacatttccaaagaactctgctttaaaacaagatgtgaagcgaacatttggatcaacctcacaatcaagtagtttttcaaaaattcataagcggccacacagaatacagaaagctcggaaaagcattgcccaatcaggtgtaaacatgtgcaatcaaaacagctctcctcataagaatgttacaattaaaagcagcgttgaccaaaaacctaagtatttccatcaagcagcaaaagaaaagtctaatgccaaggcaaatagccactatttgtatagacacaaatatgaaaactataggatgatcaaaaaatcaggtgaatcatatcctgtgcatttcaaaaaagaagaagctagttcattaaattctttacacctgttttcatcatcaagtaattctcacaacaattttatttcagaccctcataagcctgacgccaaaaggcctgaaagcttcaaagatcacagacgtgtagctgtaaagagagtaattaaggaatctaagaaggaaagttctgttggaggggaagacttggatagctatccagattttttgcataaaatgactgttgtcgttttgcaaaaacttaattctgctgaaaagaaagatagttatgaaacagaagatgaaagttcctgggataatgttgagttaggagactacactacacaggccatagaagatgaaacctatagtgatattaatcaagagcatgtaaatttattccctttatttaagagcaaagtggaaggtcaggagcctggagaaaatgctactcttagttatgaccaaaacgatggcttttattttgaatactatgaagatactggaagtaacaactttttgcatgagatacatgatcctcagcatttagaaactgcagatgcttcattgtcaaagcatagttctgtttttcattggactgatttgtctcttgagaagaaatcgtgtccttactgcccagcaacatttgaaacaggtgttgggttatcaaatcatgtcagggggcatcttcacagagcaggattaagctatgaagcccgtcatgttgtatcaccagaacaaatagccacaagtgacaaaatgcagcatttcaaaagaactggcacaggaacacctgttaaacgagttagaaaaggtaagttctccatggggatgatttgggctgataggtctgtgttctaattctgaagatttaaaagttttttttgaatttagtctttattagaatcataattttatgtttcagaattaactcattttagggtggtcagtttatataagaaagtctgatattactcttaaaaatttttttctagctatagagaagtctgaaaccacttctgaacacacttgtcagctctgtggtggttggtttgatactaaaattggattatcaaatcatgttagaggccacttgaaaagacttggaaagacgaaatgggatgctcacaaatctccaatctgtgttctgaatgagatgatgcaaaatgaagaaaaatatgaaaaaatcttaaaggcattgaacagtcgtcgtattattcccagaccatttgtagctcaaaaacttgcatcaagtgatgactttatatctcaaaatgttatacctcttgaagcataccgtaatggcctaaagactgaagctctgtcagtgtctgcatcagaagaagaagggctgaatttcttaaatgaatatgatgaaacaaaaccagaactgcccagtgggaaaaagaatcagtctcttacactcatagaacttcttaaaaataaaaggatgggagaagaaaggaattctgctatttctcctcaaaagatccataatcagacagcaagaaagagattcgttcagaaatgcgttcttccattaaatgaggatagtccgttgatgtatcagccacaaaaaatggacttgactatgcactcaggtaagaggacgtttatgactatgctatacacagtttaaatgcagttcaattatgccttctttaatggaatctatgtggaaaatactttctcacaatcttcctgtttaagctgctttttttttttacagagcacagattggttattctactgtcatttctgtataactcatcaattgatgctcattagcactgagttctctgtgcctcttttcttggtctgaatgtaaggtgagaacaaaagcagaagaaaaccacacacacacacaataaaaacaacaaacaaaaagctgatctgtaaaaataaaacttgctctggctggaggatggttgtggatgggaggttgatgttcaaaagcatagcattattgaaaaggcatacctctgtcatatttttgccagttctccaaggtgatcatgttttcaagatttagctgttggtttttccactgcttaggtaaaacaaaacagactcttaaagctgaatggattggtgtctgttgtgattaacccaaagaaacatctccctctccaattcctcattgtattgcggaatagtttggttttggagaacagttgtgaacataaaacatatttgtttggggttttaggttttaagatagtgctctaatggaacaggacagatgatttagcttagtgctggtgcaccaatagttttttccttttgaaaggaatattttgtatgtattggcaaataatgtggcagataaagtagccaaactttattcagtattgccaagtgtggtttatacttttagactagaaaaattttaagtgttttttctagatttctttttgaaggttaatgttgaaggtttatgtaaatggtctcatgattagagctctaagttgaatgtgtcagaggtaatagttaatggattaataacgactaacattactgtaaagtaatgttgtttatttgctttggggcagacattgtgatatcccgaatagttgtaatgcagttttgatttaaggaaagataactttgtattgtaagtggtctggaaagcagtttatcttgtatgagcttctgtttaatccggctttttctttcgaataaagagtctctgaaagtcaatagctttcaatattttttcagaagggtaaaacgcagggaagatgtgttagctgtgttgaccaaggggtagtatacttcagagatggaaagcatatttgtggctatcacagtaatgctgaagaaaccagttgaaatgtgttggggga

SEQ ID NO: 54970 - DNA, 1046 bp, Homo sapiens
aaatgaacatagggtttgtgaaaacctgacagatcctaactataattcagctagtgggcagcattataatttatttatagctgtgtaatatagcaattaatgaactaatatacaatgagggcaaattgtactatattttgcatgaaattatacaacacaacaaaggttggcattatgtagttaagtacccacaaaatgttaacctacttgcaataaatacaattaataatgtacataaaagaatgaaattaagctaattttctatcagaaaagaattattcgtgaacagaaagtggacagcatagatttgatgacagaaaggttgtatctaatctgaattactgagtgacctaggaagcttgctcagagggattacagaataattatgttaatatgcaattatcacctcatttcttctgtagtaacctcaagatgtagtgtagtgagggtgttatagcaagtgctgatagtttgcaaaaatactgatgtttgagatttctgagacaataagtctagcttgaggcatataagtgatgatctgtcatcttgaagacagatctgacctttgtacaatttttttagtgctcacagtatataactagaggcagttatagctgtagaactcattatgattttctagaaattgaaatatattttatgtagatttaaagttctgtttgcagctttttaaaaaggtgtgtgaattttttagacttttaaaaaccagttaaaagaaaaattctatggttatatgattatatggggaagatttagtaatggtgtctaaacagtgtttaaaaatcttaattgatatataaggagtccaaacatcagtttatttatcttaatttattagcttctgttttttaaacttaatgaataatgcccaccttcaaatacgttcctactttgttatagtaacctaaactggtattgatgtctctgttatatatacatttgactatacaaaggtagttgaaaaactatttgagatggtgtaaaattaactcaagtcaaatgctttcttgcctagatgccacataacc

SEQ ID NO: 54971 - DNA, 1054 bp, Homo sapiens
gaacaatatttactgcttttgaaattaaacaaattttaaatgtttataagtttattttaatataataatattccattacatgttaacataaataacagcattttgagaaaaatatacattccagaacaaaatttagtgagaagagtaccattgttttacatgttttaaaaatctctttaatgtctcacttaatagaagacagttggattcttatacttgcttcagttcagatatcatactttatatagcctctggaaaactccattgtacacttgtgagagaatggcagtgaaaaggcaaataaggtgttagtattattatgaaaatagttttgtttattgaagatcctctaataaggtcttagggatgccccctgggccccacaactcacacttttcagacctcatgtcctagagatcacagcatgcacccttgacctaatttaatcaaactgttaataaattaagtaaattagattagattgataatttgttaatttaattgttttgtttttgcagacagtgcaagaaacctaagacactttaatcctattcatttccttccatactgtaccccttactcaacttatttgccactatactcttgtgtttttaaattccatatatattttagccaccatgaaacgtcatcatcgttttgctatatagatttacctacatatttaccacttgtatcgctttttattctttcctccatcttcatttcttcatctgtgaccattttctgtttttgaagaacactttctattgtaccctttagtgtaggtctgtagtgagaaattctcttcatttttgttgtctggtcatgttctgtatttcaccctcacttttggatgattcttgtttaggattctgagttggcagttattttcttttaatgaggatgttactcctttgttttctctgccttctgtttctgttgagaaattgttagtcttgtcaatgtcctccatccaaaaagactagcaagaacacctgtagttgagcacattttttacttgttgcaatgagggagatcacacactaaagggagc

SEQ ID NO: 54972 - DNA, 1071 bp, Homo sapiens
gaaaatgcatgaagtgtagggtacagctcagtgaatcaccacaaagtaaacactccatgaccaccacagatcgagaaatagaatactgccagcaacccagaaaccccctatgtctcttttctcagtcactatccctgttttttctttcccaggttaaccacttgcctgacttaaaagaaaataacttttttttacttgtttctgaaatttttcagaaatatacagaagtattattttgtctagcttattttgttcaacattatgtttgagagttagaaattttgtcagatgtcgctatggttcacttgtataattttatcacaatttgtcatgttactgtaggaggtttgggctgaataatgctgctgtgaacattcttgtacatgtttcttggtgcatatgtgcaacatttatactaggtgtataccaagactagaatctgggtcattggtttgaccagtgtatgtatgttcaaatttagaagatgacacatgaattgttttcaaaatggttgtatcaatcacatcaagtatatgaggattcctgttgctctgtatcctcactaacactcggtattaatatcccctttaattttagtcttctgaaagatgcatttccctgatccaaatggaattgaataccctttcataaatgtactggttgtttgggtatccatttttgcaacgtctcttctcctatcctcaccaccttaacaaaattactattgagctttctaacttactggtttataggaactatatggtttatacatacagccctatttttcctattggagtttctgtacttttccttttgtttttaggagtttttatatgctctaaatacagactctttgttagttacatttaaaaaatatatacattccactttggcttgactttcaccttcttaatattatctgttaatgaaaggaaggtcttaattttagtatagttcattttatcattgtttgctcttattgttaatgctgcttgtgtcccatttaagaagtctttccttgctccaaggacatgaagatattctcttaggctcagaaactatgcttctcta

SEQ ID NO: 54973 - DNA, 3738 bp, Homo sapiens
ttacaggcgtgagccaccgtgcctggccataagcttggatctttttgtgcactcactggtggctaggggcaggctacccagaaatatgcaatgtgtctgatgaaaccagttgaagttaataaaaggaaaatttgttgtgtttaattcctataattgactgatatcagggctttattcatttatagtcagcctgtgttgtctgtgttccttcattaggttgactactaccttttagttgttcaaaacagcattagttgttcaacacagcatatgcaatagaagacatggttcccattctcttggaatcacagggaaggtttttatgttttatgttttggaacttaggaccattaggagagagaaatcaataatcatcagctaaatatttgaaagagttctgaaaggaaccgttctgtaagagcatttgtcaaaggaacttgacacagagtgggttgaggagagcttcacagagtaagtgactttaagagctgtgatctgatgagattatgagttaaggttaactagatttgtgcgatggagggctgaggattccagaccaagggaactacatgtacagaggccctatggtgaagaggaacatgttggggaatttgagaggaggacagtactttggatcactgagaactgatgggagtagaatctgagactacagtggagagataggcagggcccagcaaagccatttcaactgtataaaagatttgggattatatcctgagagaagggaaaatgtgttttacagagaagtggaaagatgactctgcctgtggtgcagaaaatgattagaaaggggaacagtagattctacttagaagtcagacatgcattaactttaagaaactctttctgcttatgataatgaacaaaaaagtagtcacaaattccccacctcagcctcccaaagtgctcctatcacgtgagctgctcagctcttacttactgctaccttaagaccatctcccaaaatgcctactagtccatgaagttggcccgttacccagatttttttttttttttttttttttgagactgagtctcactgtcacccatactggagtgcagtggtacaatcttggttcaccacaacctccacctcctgggttcaagcgattctcctgcctcagcctcccaagtagctggaactacaggtgtacgccaccacacctggctaatttttatatttttaatagagacagggtttcactatgttgcccaggctggtctcgaactcctgacatcaggtgatctgcctgccttagcctcccaaagtgctgggattacaggcatgagccacccgcacctggcccctgttccccagatttaatttagaccttaacctatggctcaaaatggaacactctaggcactattttggatgtcaagggtacatcagtgagcaaaatgtgtctcttttctcaagaagcttactttgtagtggggagaaaaaaacaaatgatcaaataataatgtatcaggtgttagtactataaagaaaaatatcagcagagaggggcatagagagttactaagagtgctcttctagtaactttattttggatggtctacgaagaactaagaaggagatggacacaaatgtgaaagaaatgatccgtaagtatatttggaggaagagcttcaggcagagaatattaagtgcaaaataaccagagcatagtcgagaaatagtaaggccaatatgagtacattgagaaagagagttggggccaggcgcggtggctcatgcctataagccaggcactttgggaggccgaggtgggtggatcacctgaggtcaggagttagagaccagcctggccaacatgatgaaaccccgtctctactaaaaatacaaaaaattagctgggtgtggtggctggcgcctgtaatcccagatacttgggaggttgaagcaggagaatcgcttgaacccaggaggtgaaggtatcagtgagccgagatcatgccactgcgttccagcctgggcaacaagagcgaaactccatctcaaaaaaaagagagagttagtgggagatggggtctaggacaaagtgcattggatatgaactatatgactcattacttatatcaaaattcagtccttttttgctgataacattttatgtaattaaaatagtattctgttattttacaacttttaggaactattttttgtcctccttttaaataagaaaaatatacaaaaatttcagaaaagaagagtagtgttaagggttgaattatatcctcctccaaattcttatgttgaaatcctgtccgcctctacttcagactataacctcacttggaaatatagggtctttatagaggtaatcaagttgaatgaggtcattagggtgggcttgtccagttatcactgatgtgcttataaaaaggagaaatttggataccgagacactaatagaaggaagacgatgtgaagagacctaggaaaaagatggctctctacaggccaagaagaaatctgaaacagatctttcctcacagcagtcagaaggaagcagccctactgtacttttgtcttggacttccagttcccagatatttcagccaataaatttttgttatttaagccaccacttgcaggactttgttaaaaggcagttctagctatacagatccagtatagctttttctgttatcctagcaaattaatacagttattaactaaaaagtaaaacttactctcctcactccttccccatacttaacaagggtaacagattgttatgaaacgttccaggtcttttattgtgtttgtgtgtatgtgtgtgtgtttcattaatttgtaaagcaacttatgtcttctaaggaaatgtggggaatttaaaaacaacaagcaacaaaaagtaaatgctacagcattatataatagttccttgccttccaagaaaatttttaactctaaaactaaatactatcacaagataatatgcacaactcttttccaaaaaaaaagacctcttctatttttaaagtttcatactaatatacttcacagtcttatttaaatttgtcaaaagattgatttttccattccagtataatattccagtatagctttttctgttgcttcagtgtggtattttggaaaaagaatttgttaccacttggtggcactatgtggcttaaaaatgaatcacattgtatgcaattaactatactgttctaggtaaatgattaaattcagagggaaactgatactgagcaacttaatatagtaaatgtttgattcttctgtaaataaaatattaattggtattgtagagttttattaaaatgtcatggaatataaaaatataaaccaaggcttagtttgttgggtagggaagtatatacatttttgatagaaacctcctttaggtcaggtgtcatttatcattctgtcttaatccccttctttgtctaaatgtgagaaaatagatttttaatattagaaacaaacatcttcaactttaatagtaattaatgttttccaagatatgtattttattttctcttatataaacttaagaaattgaaattttttcaaatgattaaaatatgtaaaacttaaaggaaaacagaaaaattaaatatattgaatgatgtcttcctgcagcatattgaaaaatcaagcagcccttttaaagatactgtatttgtttcatttaattagataaaggatcttgaagtataacaagaaagttattttgttcc

SEQ ID NO: 54974 - DNA, 2003 bp, Homo sapiens
aaggagatattcgcacacacaccattgccagagtcatttagattggaatttttcagaaggggactgaacattagtagttttaaaaaagtcttcaagtacagcaatatttaaaaattctctagattgttttggctacaaatacaagttgtatggggtgctttaaaaagtctataggccttggtaaagtggaatcaaattccaggggaggagttgcacaatctgtcatttttaaaagtttcccaagtttatctgaagcacagctaggttcttagtactggtctagaattttctcagcgacaagaaaggatagttagcaatttattttgattaagatcatttgcaagggccctgaatacaggttttctattgtatgggctgaaaggagatccatatgttttaaatgtcaattatacaggagctaagttgtttacttaaggaaattgacataggtgcttatccagatattaatctaattgctgtatagggttgcaataatatgaataggcaggaccaccaaatattttcttaggcaaacttgttcttatgtctaaactggtattctgctcacatctcagcatttagcataaagcatgttggagatgaccttagttttgtgttttcagaagatagaaatattcatgtatatcacagtagaacttaaatgcagtgtgatttaaaacatctcatttgttctgccaagttgagcatattagtctgctagggctgccataagaatctacagtagacctacctaatccgtgggggatacattccagtacctccagtggatgcgaaaacctcagtacagaacctatatgggctgtttttttcctacatacacatatctgtgataaagtttaatttataaattagacacaatgagagatttaaaacaataataatagaacaattaagtaaagtaaggtttacttagcacaagcactacgatacctagacagttgatttgataactaagatggctaatagatagggagcatttacagcatggatacacaggacaaagggatggtttatacataacctgggtaggatggagcaggacagtgtgagattacatcacactacacagaactgtgtgcaatttaaaaggtttgaattgtttatttttggaattttcgatttaatattttcagaccatagttgactaggtaattgaaacctcagaaagcgaaactgcagatgaggggtgactattgtaccacagactgggtagcctaaacaatagaaatttattttctcacatttctggaggctagaagtccaggatcaagatgtttgcaggcttggcttctcctgaggcctctctccttggcttgcagatggctgtcttctccgtgtgtccttacatggccctttctcagtgcatgcccatccttggtgtctctctgtatgtcctaatcttcttataaggacaccagttagactggattagggcctaccctaatggcttcattttaactttgtactagggcttcaacatatgaattttggggggaacacaattcaatctgtaacattgcatttaaagtgttgttctttatagtgaatgaattaatgagtggagttaaattatttggaattatcagatgctgcttactgaagaaaatttgccaaaaatgatgactttgatttttgtaatgaatatttaaccatacttttagaatgtaataacaagatgtggtgcattgagtcagatgtgtgacttttggtttgctgtggcaagtaaataggataaatgcatctagatgtgcatatatgcattcaaggtatactgataaatgtatctatttatcaatatatctatttatctgtatatattgaaaggtatccttaaagtattcaggaaaagaatcataaatctgaaagggagttacagtataccttcatgtcatctattatacaaagttatttaaaaaatttattcaacccactttaaatattactgtgatatttaaggaaacagtaaaaatttgtactgtctg

SEQ ID NO: 54975 - DNA, 1026 bp, Homo sapiens
gttttatttcttaagatatattcagtactttaatatagctaatactttactcatagacatttaataaatgtctatttaatgactggatggaaatatggcaaggcctcccagaagtgacacttaaactgaaacttggaggaactgttggtgattaatgtggataaaaaatgtggggaaggactgttagcagaagaaatagcatgttcaaaggatgagaggtaacagaaagggaagattgctggaactgaaataaatgtaagttttgaatgtagagctcaccgtggggtgtggatgtggggagtggctagtctcaagagattagacgagagagtaaggctgggctattttattgaggtttttataaaccattgaaggagtttaaatgtgaggaaatgactttattctatctgttttagcaaatgaacctaattaaaatggggagaacagatcacagggaaagctggattggattcaggatgactagttagtatggggagcatgctggcctgacttgagagtggtagaagtggggatagaaagatgtggttggatttgagagagatttacacagcaaaagagaccagctttggtggttaattgtaatggaggtgggagtaggagaataagaaaggagttaagtatgactcatgtttctagctgggcagtagtgctgtattattcacagataggaactgtgaagaagaacatttggagagaacaagagctacattttagatgtattaagctttaagtagctcaggacttctgagtagaaatgtcaggtggcagttagatatgagacctatctataactcgagatgtgagaatcatcagcgtgaaatcttaatgtccctcaaattcttttttttttgagacaagagtcttgctgtatccctcaggctggagtgcagtggcgcaatcttggcccactgcaatctctgcctcccaagttcaaatgattctcatgcctcagcctgggattactggcgcccaccaccttgcccagctaatttttgtatttttagt

SEQ ID NO: 54976 - DNA, 1538 bp, Homo sapiens
attaaataaatactgatctagaaagatgtgtgttttagtaattattttaattattgccattgccatactattaaaattaatgaaaacaatttagaattttttttaaaaaaaagaattagtttcaatttctcatttgaatagattattatttctcaaaaaaagcagtgaggttggggggcacttagcaatagtttcctaaagattaaaatgatggtattctggttgaatggtttttttatgttatatcaagaaatataatttggtttgtgttttttcatttaaaataatagtgtattgtagctatggttattcatgcctgaaacaaaaaattaaaccttggtcattgtgtgtatttctttcaggtttgatttaattttggatgagatcgttcttgcagcaagatgttaataagacaaaatctaggtaagtagaagactgctttgttaaatgtacatatcaaggtaggaataatacaaaaaaattatgtcttaaaaatgtggtgttgagttcagaaccaaagagtttttaaataaaattttgaaatgcaaataattgactttttgacacacttggtccagttgatttgatgggagtaaaattataactatcacattgtggaactaaatttttagtttccttcttttgtgttgaggttaactaaagcattcaagtttccagtgaatattctaaaatgttagaaaatcaagttaatgtttggttcagccactcttattgaactctgaccacttcagtaagacatttattgtgtcacttcattgttctctcctttgttgataaagtatatgaatagtcattgcttttgtgaattttgcttcatttttaatgttaaggaagcactttcccaaatgggataaatttgccaaattgtgatttctttctgttaatatagtattcaaaattgtaaattattgttttaatgttttcctagtgggtgtctctactgaatgacctctctaatatagcattctgattagctttctaaggctgttcacttttaaaaaattgaattggcatcatgtactttggtatgtgaaagaatgctttttaataatataagccgttgacatgttttaaaaagatacatttactatttattggtaagtgaatatggcttcaaaatggaaacaagggaaaaagaacattgaaaaaattggagttaacttggttttccctctaaccagatgtttcagctgtcaaaaatttgctgatctcaatgtttgttaaagaaaaaaaaagtctaggatgaaaagtgctgtagttcagtaatatgcactgaaggaaatctcagtcagtggtttgggcatgttttgaagcaaaattttgcttttattgctattatataataataacagtagtggtagtttgaagagtacttattgtgctctaaattctgttaagtgcttgtcataccttattgatcgttatagtacctcctcttgttgtgtagaaaaattttattttttgctttatagtgggctgtttttctttaggaataataatttacttctgtagcattt

SEQ ID NO: 54977 - DNA, 2039 bp, Homo sapiens
aaaaggcacagacatgagaattgtggaatgcaagcgttttccttggttagagtctattttaaatgcatataataaaaagtaataagattgtggcatgagctggagggatctaaagaagtttggattagaaattggaaataaggagttctactgaagatcattgaatagaattacatgaagaaatatgattagcagccagatacagcgtgattggagggagattgaagtgaggaaggccagttggtgattattatctttgtgagtgggaagggtatattaagagtaaggatgcatagttttaaataagtcaaatcaaatattgtggctcctcagtttgtagtgcagagctaaaataagaatgaaagaattttactatcttctggtattcaaaataaatggagatagagtttgcatatgacttactagcactaattgaggtatgcctttttcttaaaaaaactggcttggccttttttttctgttaagtttactttgaaaaccaataaagttatgctataatggtgttttcctaagtaaaaaatatttaaggtaactggtaagaagagcttgtacttgtatgctgaattttgagttaaaattctgtattttagccatggcttaagagacattataatttgtattggagctggcaggaaaacaggaaataataaaaattaacaatgtggactacatatttatatttgtttttaaatagatacttgttttaaaatttaggaacatttgggaatactctgcttttataggaaaataatgttcttaaaatgtagagtttttaataattcctaaattgagtgtaccttatggtttattatgggtaaaggtcatttttaaaatagaagaattagaaaaacaggaaaaatagaagtaatacagttttttaaatcctctttttttttaagagttaggaaatagaacagaagcttgggaactaatagttttagagttttaagataccacgttttagtataacatttacattttaaacattctcacagttaatataggcttaacttggaaatattaagcttttaggatttagtatgtagtagttctctgctggcactaagtctttccccttcgctcctttccaacaggtattgcccaagctctcataagccgttcttttctttctattatgattattattttgtagagatggggtcgcactttgttgcccaggctggtcttgaactcttgggctcaagcagtccttttggcctcccaaagtgctgtgattacaggtgtgagctgctgagaccagccttttcttttaattctgatggtcagtactgatgaagtcctttccagctttgggtacacagccttctgttattcctgctgtcaattttttgtctttctactgtgcttttcaaccttggttattcatgtatcaccttcatctgtgcgattattaccatttaactgcagcaagtaaagacgttaatagtgaggtttttgggaatgtggtaaaaccgggaggtatatttgactttgtccaagttatctgatgaggcagatcagctaaagcaaaatacagtgggttgctccctactatcactgggacctagagatttcatctacatctctgaaaaatggggtttctgtatgatagtatgggtgagaaggaatgacagcagaactatcaactgttttctgattatcctgatgaactagtggtataggaagcttttctgaaaacgctgctctgaattgcttgcttaagtagttgcttttttattcctgtgtatggctccagagttcttgggaatagccctacctccatttgtttgtagatgagagaaagctgaaccttctgctgtcagtggagaaggcctagaattagtctagaactggtgctatagggccctggaatgcttcaggaattggtggctgcagggacctctgaaggaattgtctaaaagtctgtataacaagtaagcaacactcatggtttcaggaatggatctcttgcctcatccaagttttcttctttgacattcaacctgaggatctctgta

SEQ ID NO: 54978 - DNA, 1804 bp, Homo sapiens
ttttgtttctaaacttcttatggcatatttgtcctccctcccaagggtagtgagaattgatgcttgaatccatctctcttttcttctgtccttgtttggcattgttatgaattgggaggtaaatcaggtgatatttggtactatggcccttttttccccccagtgacaaaatcagagaggtgcttcttagtgttcattaatagtaatcctttagaggttagttttatgacttgatattttgtttagaatgcagagatttgaatttgcctccaccgataacatagttgcctggcttgctgtcattacagtattctctaggcatatagccaggaagtaggtggaggaagttgtggattgcctccttatatagatggtttttggagcctctttgatggtagcttccaggcattatgtcagttagctattaggcattttaggttgcttattaaggtatttgggtatttctgattgtaattttagaggtaggaataaataggtgtactttttttttataggtaggcatctacctgttcaacagaaaagtagaatataactagaatgttaccttatggacagttgcttacaagtgtgaatggttaaagcccatgtaggagactttataaatggaaaactgaaatagaattgttgatcatgatttttacttttagtgcttgaatcagtttttttcccccaaatggaattaatagttgtagcattatttttcgtaaatactgagcagtagaaaccttattgtagtatagcagtattaaattggtgctttgcagataaagaattttttctgaaatgggtattataatgttgttaaacgtatataataaaaaatatatcttcacattctagtatatctggttttgaagaatgaatatgtaaattgcgcagaaatgggtatgaaaagactttctcattaacatttggattgtgaatgctcgagtttataaatgaaaatatttactctatataaagaagttttgtcttttggaatttgtaataagttcatttaatatactcttgctccagggatttcagtatttgtcttgaagaaataataaaatctcacctgtcaacttttcttattgtagcttttgtgaagtatagaaggctaaagcaaattggttaaattagacattgaaaaaagtatatgattattatctccaaaatattgagactttacacataacagcttttgggggctagatttagaaaatcactaacataaaacaattagaatgttcttaattatagttttcagaactgactatgtagaaaaaaatacactcaagtttgtgttctatgtttacatgttgttttgacaaaaatgaatgttatgtttgaatttagttttgggagatttcagtttttttgtattcagaaaagtcttgtttgtctggttgtatttcccccaattttcataacttttatttaactgggttagttgtcatacaaaattcagctaatgctccactaggggtagggttgcatatacatagagcacagatatggcttctactccaaagagctcatgatctaagatatagcttgaagagtacttaactatgaaacatttaaattactgagctgacaaaataaaatgaatgatctgtaataagattaataaagctttttgacaaaaataattttttacctagattttgaagaagtggtgtgtataggttggtggaaagggaaggagataacagctagggggaagagcatgttaaaaaagcacagatattttgggatgctgaggcaggtggagcacctgaggtcaggagtttgagaccag

SEQ ID NO: 54979 - DNA, 3624 bp, Homo sapiens
tttatctaattttttgaaaagattaatattttacttaaaagtatctctttcattagtttcttgaggaagatattaaatacagtcatgtgcagcataatgatgttctttggtcaatagtggactgcatttacgatggtggtcccataagattgtaatactgtatttttactgtattttatgttctatgtttagatacacaaatactaaacagttatgttacagttgtgtgtggtattcagtacaataacatgctttacaggagcatgttgtagcctaggaacaataggctataccaagtagcctaggtgtgtaagtaggctctaccatctaggtttgtttgagtacactttgtgatgtttgcacagtgaccaaattgcctaagaatgcatctctcagaatgtacatccatgcttaagtgatgtatgactgtaaaactagtactttcagagcaccatttattggggaggagaggggtaattcccaatttattgttggtttgtgaaggtgggtaaaaggcttcacagagttggaattaattgccttttgtttgctactgactcactaaatactttacacacagacacacacacacatagaatcacaattgcaattgtaattatgcatatataaagaggcaggatatgataaagtttgaaagtgtaagccttgaagtaaaattgacagggttcagatttagctgtgtgagcactaggcaagtggaattagtaattaccatcttcaaagaggtttagggttgatattacataattcatgtaaagtccttagctttctggcatacaatgctgagtaaagtaagtgttacctgttagagtaataatagttattattaccattgtttaattattctttctacattaacttgagattttcacctgtgagtgatttgcagttgtatacttttgctaatgtcccattttaagccatgccgataaagacaaggttgttatagaggaagtgagaggtaggcatcaaagtgtgccttctctgattctagcagcagaatcttataaccaggttaaatatttcaggaatgcattcccagcactgtcagcagatgagtagatacacttgggaatgagtacattttaatgaagttatttcccagccagtgcattggtttgtctttgttataacatgctgaatttcttcactctcctttcaatttttgactgtgaggccatgtggtgactattagtagagagaagaaggtgagtggctatgcgtatttgtaatgtacgtataaacccaagatgagagtgaggagtggctggtaggtagctagattgaggcgggtggaatataatcttttcattggatagtctgagttgggaatttcccaaacagcatttccttttgctcttttcctctccacactttgttttgtatatgtctgtgctggtatggtgttaaagttatcagttccccctctttaattttctttctaccaccaacctcctcctagcacaaacacggattttaagcttataagcaaatttgtcaaagacagctagtaaaaataattttaggttcatttgaggaggggtactagtatgaaattgtaagtttttcatttatgcttgaaaaatacagcaatttggaaagtgagggaggggaagtcacccataatcttattaccattatataattattagtattaaagacagatgacgttaattaagcatctactatattcttttaataatcctgtgatgtatatattcccactttacatgtgaggaaacacatccacttaataatggagtagccaagtttgaacctaggtatatcttgagaaggtctagagaggagacctttctgttctaccttcctgttcttcttacatatatatccttttacctagttgttacacaatttgtaagtttcatctcctagttttaaaacttagcattataaaaacatttttctccccccccttatttcaagtggtgtcgtattgctctcattgtctattcataccaccatataaaggctctttgtcttggctgctggacattggtacaatgatgttgaccaaaatggatgctgccctttactgagtgactaagatgaaaaaaatcaggcttaatcagaactaatactttatgggatttggattgctacaggtttaatcatgctatctatccttgctggtgggacatttgacttagaattgtatataagtaaaatatagatgaaaaattgtataatttatagctatctgaaaacaacttttttttaatatttgaacactttgaaatgccttacacttccttgttaaaaatcttaaagggatattaaaattaaatggcacttaattactattagtaattcctaatataatatttaattcataaaagaaaaaagcttaatgttgaattctggcactcatcgggaagatgacattatatgttaagagataatttgtggggcatagtaactatagttaatattgcatacttgaaagttgctaggagagtacattttaagtgttcacaccacaaaatataactatgtgaggtaatgcatgtgttaattagctagatttaaccattgcataatttatatgtatttcaaaatgtgttgtacaccataaatatatacaatttgtatttatcagtttaagaagaagaagaagaaaaaggtaatttgtgggcatttataaatagattgtataggtcagcactgcccaatagaaatataagttgagccacaaatgcaattttagattttctatagccacatcaaaaaataaaataaataggtgaaattttattaatggatttttatttaacccagtatctaaatactattatttcatcatataaacatgattgaactattttacattttttctttttttaaccatgttaagtcttcaaaatctgttagtattacatacttaaagcacatctcaattcagactagccagagttcaggtattcagtagccacatgaagttactgtattggacagtgcaattacagatagtaagtcctatggggtatagggaaagaataacatagaaattgaactgaaccgtaaaggatagctgagaacagaaaatgcttgagaagaatattcccataaagaagtgataggaattaaaacagcaaatacagtttgataccaggtaatagagtggcttgaatccagtttagggaatttggtttgggtgtgtatatgtgtgtgtgtgtgtgtatgtgtgtgtgtgtgtgtgtgtgtgtgtgtgtgagagagagattggaaatatatattggagggtgcctaattcgtgtctcatacatgagcacttgataaatactgaattaactgggtgcattggctcatgcctgtagtcccagcactatgggaggctgaggtcggcagatcgcctgaggtcaggagtttgagaccagcttggccaatatgatgaaatatcccgtctctactgaaaatacaaaaattagctgggcatggtggtgtgcacctataatgccacctacttgggaggctgaggcgggagaattgcttaaacatgagaggcggaggttgcagtaagccaagatcatgccactgcatccccacctgggcgacagagtgagactcagtctccaaaaaacaaaa

SEQ ID NO: 54980 - DNA, 2344 bp, Homo sapiens
agtttttatgggtcatataaggtgcttttaaattactgatttttgttagttgataagctgttttataattttcaacattatgtgagtggatttacttacactttcattttgtgaaaattagagtcactttcaggttatttgtagttataaagtggtctgtcacctgccaaccttaaacattttccagttttagtttgtcattcaagttataagagtgttttggttgaattgagactgttaatgggtagcaggaggagaaaagaaagtttcaaagagaatagaagtggtgggatatctgcaatctagagaaaggtcaggtccattttttttctgtcatcctaaatattgttttttagtgttacttatttagaccattttctcaggatgtgattctggaaggaaaagtgaatcttattcttgggaaggcttttcagtcaggtcttaagacaattgtagcttgcagcaaatggagaaattggcatgttgagttatctaaccctgattttatagagcacttgttttaaccattttttaaactgttttctaaatgttttaaattagtaaccttgtaaaataaaacgagaatgaagagtggatactgtaatactatggatacatattcaaatgagcttttatttacacttattaatctttctggtagagagaatgtctatttcgtatatggagaatctgtaaatattgagtaaagttgtcaggtatagcattgactgaagcagttctagaagtggtgtttttgattcaggtttattagagggaaataaatagctgctgttaatagtgcaagccgtttacaccattgagttttgggagatttgagaatcatggaactgatgctagcactagctcaccctgctggttggctaaaagatttctcctcttccccttaagaaacaaacatgaagatcacaggagacccagagggtagtaagactctaaattaaattctgtctttcttcagggagaggaagttcccatgaaaaaggtgttttcttgtctctaaggccttagttgctgcattataattttttttgcagatctgccaagttgaaccatggagttactatcctttctttttctttctttttggttgggggacggagtctcggtctgtttcccaggcgcgggtgcagtggtgcaatcttggctcactgcaacctctgcctctcaggttcaagtgattctcctgtctcagcctctcaagtagctgggattacgggcgccggccaccacacctggctaatgtttgtatttttagtagagatggggtttcatcatgttggccaggctggtctcgaactcctgacctcaggtgattcacccgccttggcctcccaaagtgctgggattacaggcgtgagccaccgcacctggcagtagttactatcctttttgaacttcctgggaactcttatgtgattatggaaagttagtatatttttattcttttaatttcaagataagaaatcctttgacaattgagagatgttaggaagaaaaacagccctgtgagagtaactttccaggaggaaaaaagcagaggatttcaagagtaagaggaggaggagcctgccagggcagaagtagcagcagtgcacacttctcttggttgggagaaagtgagactggattaagattagcgtttctgggagattttctttcccctctcctactaatcttggccctacctcttctgtctgctagctgtggtcttcccatttcatttggaatcctttgaactgagattttgtaagtaaaaataaagataaatgatttgttccttgaagcttaattctgttagcctagattttggtagaattgaagctgggttagagtgatgaaggcagattttatgtgttaagccttttggtatgtgtatcttttttttaagttgaaaatacagcttttaaaatactttatataggccgggtgtggaggctcacacctgtaatcccagcactttgggaggccaaggtgggtggatcacttgaggtcaggagtttgagaccagcctggtcaacatgatgaaaccctgtctctaccaaaaatacaaaaattagctgggcatggtggcacgtgcctgtagtcccagctacttgggaggccgaggcaggagaatcacttgaacccaggaggcagaggcttcagtgagcagagatgccgtgccactgcactctagcctgggtgacagagtgagaccctgtctcaaataaaaaagactttgttcaaactctagaaacgtaagtatattttgagccaaatagacaactgaaaattaaaaatacctaataaagtgttgattaaaattctttacactttacaaagc

SEQ ID NO: 54981 - DNA, 1072 bp, Homo sapiens
ccaccatatttggagcgtgcctactttggggcgggaacctccttgggagtgattaggtcagcgctgggggaggtgaccttgtttggtttctggcacccgagaacagtggtgcactgtttccgctgccctcgtttgtctaattggcccagacgctccaccagcgcgaagcttcccgggagctcctcgctggccacccccgcggcccgcagcccggcagaggcgggaaagcagcgcgcctgcgccgtgggaaccggggctggaggcgaaaagcggggagcggaggggggccgctggagccgagtagcgtacagagcggcgtgtgacgcggggacgccgcgtgctcccaacgtcgccccggtttgacgcacacggcaccaaactgtgagtttcaggggttatttggtcagattcgctgggacccgagtgggtttcgggcctctgggctgtggcagcggcgggactgagggtggcggaagaacttgggggacccggcctccggctctcgggcccggggagctacgccctaggctgggtcccagccatccaaaaggacgcattttgccgcacaggctaagatggcggcggcggccgaggaggcggagttggtgctacacaaggagcccgggccccgggttcggggaggcggcggccgcggcggtcgctgggggccacggagcctgaggtgagcggcggccgccgccgcggggcgggactcggcggggggatggggggggggctttccgctgcggcgtcggaggatccggtagcggacacaaaggggctgagctgggcactagacttgggggttttgtttagtcacatgaagccgagcagccagtgagcagtagggggaaggggccgagatcaggcggcttggggagcctggcggtcgccattgcaatgcactgagtaacggggcgggccgagagcagtcaccaacccctctcgttgaggctgctcggttgtggccagaaacgctggctctggcattaactgtctacacccctccccttacttgggacaggaccgcatagccctcccctccccccgtcctgcaagatcttatgcggct

SEQ ID NO: 54982 - DNA, 1047 bp, Homo sapiens
tataggacagtgttaaaacagagcttcgtatgatctaaatgtaggactgaattgcgatttggaagactgtaatacaacctgttttacggttgaagttgctatggtctcagtattggtaattaagaatgcagaaatttgatgatgcccaaattaaatttctcttttgtatctgtgttcttatctctactcaccacattgccttaagcttaaatgtagaaattgacactggagatcatcacttaagtattcaaaagcagaactcacagacaaaaaaatatgaaatgtttgtagcaataataaagcaccatatctcagtgtacagcatgaaatgttctttgaccgtaaaccagaccttagggtgaataagacagggtcaagcagtgcctgctcttgtacactcgcatgtgtaccttcatttctgctctggcacaggacctgggacatagtaggtatttgttaataataaatatttgttaaatagaggaattctagttgactgtatttttttttttctgaaagggtagccagatcatctttcccatctttgtcttaagtgaattctgtgcttgtctaaaagatacttattttgaccttttgtccatatattctttataaccccaccctagaaaaatatgacatcacatactttctgctttgatggaagtcagttatcccacttacctaaacttgaaactttaatcttcagctgatgctttttatttgttccccatatcgtcacctagctttatttctttttagtaagtatggcattgtgtcttctttccattcccatttccaccacattaattaatttccttacactttgttcctgatttacaacagtttctcacctatgctgcctgcttgcacttttccattcttcagttcatcttgtatgttggtgctagaataatcttaaaatgccactttcatccagtttcatggatactgttcctcttcctttccatttttccagcagttagctgtttttttagttcatctttcccttactagtcactggacacataacacagtaacacagtcatt

SEQ ID NO: 54983 - DNA, 1012 bp, Homo sapiens
tgaacttcagtgcctaacagtggctgggtaggcaatttaaacatattttaattgaacttgtatataatttataagattttaaagtagatatttagcagggatgaggggattatatgtgaattaaatacatttttcagtcaagtgtttgcaatttgctagcactttccttctaaccttgcaatagttagttaaatttatagtaattcttttagattggatttcccttgaggctcgacctgatttcctgtcttttatcactgctttttgtaaccttcctgccaaatcataaaccttggctttcatggtttacattattttgtaaatgtagggaactcacatttcacatttccccagctattgacgacctcatctaatattttatttagaataacagaatcatctggtatggtttctctctgctaggtcatttctgtcaacatatggacatgatttagaatcttaccctcctaaactgccctccttcttccacctgctccatcatttctttgttcccccttacagccagacttctcaaaaattatctgcatacattgttttcattccacacctctctttcactaaatacctattgcggctgttcttctctatgctaaactggaaactatagagtcaatcattactctaggcatcatttaacacaattgacgtgaacccttgtcttgacttctgtcctgccacaccctccttgttttcttcttccctcatttggcctttcattttcagtgtctttgctagctcttccacttctatctgacccctaaatattggagttcctcgtgcttgctcttaggtttctctgtattcttagtgtcctccatttccacatgatctaaagtaatgattcccaaaagtatatagttaatctcagaccttttatcttaactacaggtttgtgtatatccacctgcctatttaacatttccacttggtgcctgataaatatctcaaacctaaaagacaaacctaaaccttaacataccaaaaaaaaaaa

SEQ ID NO: 54984 - DNA, 1018 bp, Homo sapiens
ttactcaggctcaaaatcatagaaatcacctttgtcctattttcctcttttatgaagcagtgtaacatagtgattaagaacatatatctggagcaaaatgcctgggttcaaatcctggctcattgatctattagtttagtgaccttgatttatttattactgttaccatcttatctgctaagtcttattaatcttttcccttttttctcattctgctgcttccccagtcacaactataattacctcgtttgaattattatagtaacttcaaaactggtgccatttttgttttaaaagaaaactttaacacgagaacacaagtcacttgtgtttatattatgtgatgatgatttaagtcagttttctagcaatatgtatgcattgctaaaattgcggtttttaaaattaggcataaagtttcagtccctctgacctttcttctaaaagttccttgtgcatttttccactagggggcaagataatgtcatgggagttaaatactgctttaggaagaatgatcatgtagttattgctatgccatatctggagcatgagtcgtttttggtaggttttaatatttcttgaatttttattagctaaatatttaattgcaaacaatatttgtaactcatttcatttgtaactttgttttaggacattctgaattctctttcctttcaagaagtacgggaatatatgcttaatctgttcaaagctttgaaacgcattcatcagtttggtattgttcaccgtgatgttaagcccagcaattttttatataataggcgcctgaaaaagtaagtatgaagagttactagaaaatatttatcctatttcttttaaaaaacaattttattgtctatatttaaggtattgaacatgatgttatatatagtacaaaagttactattgtgaagcaaatatttatctcagttacccatcttatttttgtttttacggcaagagcagctaaaatttactcatttagtatgaatctcatatacagtacagttttatt

SEQ ID NO: 54985 - DNA, 1013 bp, Homo sapiens
ttaaagcattttatttgcttgcttaatacctcaaaagtttcctgtgatgtagatatatttgtgtttgattaaaattacttttgttattatataaacaatataatagcagttagaaggttttgaaaaagaaaaatgtcttccgtaatctaaaaacttaccatggagctggaatccaggaaacatcttgaatgaatagatgaatcctgctattcacttggattatgggctttgaagaaatgtattcattcattgaatgtctgttcttgcttgctaatgataacaaataaataaatgagaccatctgttcacactctagtcaggacaccatcaaataattataaaataacctgttgagtatggtaataaaacttattcagggtatttaaggagtatctaactatcctaacccaaagagattatgaaaggcaattcatgaaagaaatgacctcttagaatgtaaattgggctgagaagttagcatagaggcatgagccaaggaactcaagaaacagcatacaggaaactaaaaaagtttcattttggccagacgcggtggctcatgcctgtaatcccagcactttcggaggctgagatgggcggatcacctgagatcaggagtttgaaaccagcctgaccaacatggtgaaaccccatctctactaaaaatacaaaaatcagctgggtgtggtggtgcgcacctgtaatcccagctactcaggaggctgaggcaagagaatcacttgaacgcaggaggcggaagttgcagtgagccaagatcgcaccattgccctccaacctgggcgacagcaagacttcatctcaaaaaaaaaagtccaattttgctagaatattaagatgcaagttgaggaatggtgagagataaacctggaatgaggtagacaaggtcagaccacagttgttacagtttggactatatactgtagatattggaaagttaagtgaaaaaagtgacaatggtatatcctagatggatcattctggcaggcgtgcaa

SEQ ID NO: 54986 - DNA, 1053 bp, Homo sapiens
taattattaatacagtgtaataaggactagggaagagaatggaaatgtgtgttgtcaggttgtgtaggtttacggtagcagagaagcagaatgcatagaaggccttaactgatgggatattattgtaagcatatattggacttggatgtcatctccttagccacgcaagttcttcaagactgggatgtgcagtgtacttcatagggcacataagaattatctcagccttgctctggccaacaatctgaactcaagtgcccatttaatgtttattttccacgctcagttatagttaatactttccaaggaataagtgggattgactcagcttactaccatacaatacagaacacctcaggagacaaagtttcagccagcctacctcaagagtagctgggctgtcttgtgctcaaccccaggatcagtgggtcttaaccagagttgcatgtcagaattatctgagaatctttaagaaatacatatgcctgcccactcagcctattcttggaaaatatgattcagaaaaacaagatacttaggaaggctccagccttgttagtttgaaaaagcaagtgattctgactaagaaactatgggtgtttaagaaccactgcaaaaattactgcccttgcttatgcactagtgctatagtctaatctacaagaaaaacttagtggtggttgtgaagaaagcctcatcttaatagaggcttgccaaaatatgtttctacagtaaagtcagtccacgatttgtaactatcttgtacttattgtaagaaaattttatttgaagataataggatgaaataatacaagggaaaaaaagtgaccatgagtggaaagcaagattgatatcttagaaatggcattcttacataataatataacaagtatgtttattctcaactgagaaaactttcatctactattgaataacttcgtgagaggtttatgaacatgaagtttatcagccaataccaacatattttattgaagagcttgaatctcccccattgtaatccaagttataatcagggccaacaatggaaataca

SEQ ID NO: 54987 - DNA, 1640 bp, Homo sapiens
gaagcttgagaaattggcagagtcaagtgagtgcctggcatagcttagtaagtcactgctttgtacttactatctcccactttatctcccactatgcaattcaaatacaacttaaatatagcatgtggtgctctatctcatactgtgtgtgtgtgtgtgtgtgtgtgtgtgtgtccatgtctataaagcatatgtttgaactttcatgtttctcatgagagaggcttctgatatattcaaataataaaatgtttttttctgtttttgttttttcttcttttgcttttagggaaatcaatattatgtagcaaagaagttccagcacaagacttgagaaaactctgtgagagactcaggggtatggattctagcactcccaagttaacaagtgatatacaagggcatgcttctcatcaaccagctatttcagagaagactgaccataaagcttcttgcctcgttcaaacacctccaggacaatactcagggaattcatttaaaaagggggatagtaatagctgtgagcattgttttgatgagtataataccaatttagaaggctggaatgaggtacctgatgaagcttatgacctgcttgataaacttctagatctaaatccagcttcaagaataacagcagaagaagctttgttgcatccattttttaaagatatgagcttgtgataatggatcttcatttaatgtttactgttatgaggtagaataaaaaagaatactttgtaatagccacaagttcttgtttagagaccagagcaggattaataatttattttaacattttagtgtttggtggcacattctaaaatatagattaagaatacttaaaatgcctgggatagttcttgggactaacaacatgatcttctttgagttaaacctacctaagtagattttaggtgggttcctattaggtcagatttttagcttccctaattacctttcactgacatatacagaaaaaggagcagttttagttttaattaattaaaattaacagatgtgatgaggattaaatgaatcaaaagacttaatttgtagattcttttagagttatgagctaggtatagtttggggaaactcaacctggtgctggtgctcttaacaattttgtaaataaagaagataatttccttttctagaggtacatattaggccttttatgaacactaaaacaatgaggaaatgttggtcatggggcaaagtatcacttaaaattgaattcatccatttttaaaaaacacttcatgaaagcattctggtgtgaattgccatttttttcttactggcttctcaattttcttccttctctgcccctacctaaaacattctcctcggaaattacatggtgctgaccacaaagtttctggatgttttattaaatattgtacgtgtttacagttgggaatttaaaataatacatacactggttgataaagggaagctgcaggaccaaggtgaagattgatagtccaaatgcttttcttttttgagttgtatattttttcacaccatcttagatataattaggtagctgctgaaaggaaaagtgaatacagaattgacggtattattggagatttttcctctgcgtagagccatccagatctctgtatcctgtt

SEQ ID NO: 54988 - DNA, 1255 bp, Homo sapiens
aaccaaaagatctttttaaaagagagagagaggaaaaaaatcaccttttatttgtttgggtctcattgtcagaattattattcagatcaagaaatctgtgtcgataaaacctaatctcatattggagagtgaatgtcgttaagtatttctgaaatgtttctaaaaaatgaacatgaaaaaaataaggtattttctccctagcttctcattacagtatttctaattgcttcacactttacagttttaatacaaagtacaagctctacttttataacgtgtactacaagtttctttaaaagtattgttgtatttcagctgaactcttgtatctgcagtcttttgttatttctgcaggctacacccttaatttgcagaggccattttgttgtttgtttgatgctgaagctgttgttaaaatgccccaaactccaaggcagattgtctgtataatacgctatagcttttcaccatgtggtgtttaccagctgttactctgtattttaaaaagccagagatttcttctgtctaaactgtttctatagcattttctaaacaaaaaaaatggtttttttctttgccttgtaataagattgtaaatccatttcctgcttgtgttcttagtgggcatgattgtgagtgtgtgtggggtgctcacacgcgtgccagtctttttgtactgtaactacctcatggtttgaatgatgattgtactgctggttgtgttaacagagcacattttgttgggtgagtcctatgtgatttttttcatgtttgttttatctgggggttgttcatgaaactgacagatgtttttctaaaaaggactattatcagtttccaaatacaatacttctctcttctggtttttcctgaatgagcctgattttgttgctggttttcatcatctatgagggtaaaacgagtacccttaaaatccctgtggccagtttgaacacccctgttgtattcttttctctgttcagtgtgtcagctattttgtgaagatgcttagatgtatagttttgataaccacagttttaaatcttttatctgtgcataataaaaagatatatatcagttattaatatgtgtcttgttatcattaaattctaccctaaggctcatgtaacttttttcactgtgactttctcctgaatggatcgtctgctccgtgttgatgaggaagtgggaggagaaaggctaagaggtccagagcagagggaagggcggatggactagaagaagagtgcagcag

SEQ ID NO: 54989 - DNA, 1047 bp, Homo sapiens
aaaatgctgtctattttgttggctttagttagggactatctgaaaataaaatcagatgttaaaagccaaagctcatgaagctacagggccttcatccttcatatgactgtcattaatcttcctgtgggttgttatttccagtttaattgcagccttcagcaggtgaggaaccccagcagcttccaggaacagccccacggaaacatcaccttcaacatggagctatacaacactgacctctttttggtgccctcccagggcgtcttctctgtgccagagaatggacacgtttatgttgaggtgagacctgaaagttagccttgaccttttaggttagtgctgggctatagttccttagacatcagctaaaataccctgtacagacctcttcctgtcctacctcacagaccttcaacaggtctgatgagggattggctcagagaacgcttccagactgacttctgaccaaagcaggaaatttcaagatttaatacattatgctaagtgaagacagtattttgtagatgaatgttaacaaaaaaaaaaattggcaagtgtgaattctactggtaaagccctgtcctttgcttttggaacagtagttcagtagttgcagtgttagagttaaccatggaatatttcaaaaccacctcatatgttatcttttatttctttttttttccctgcacagtccccttagcccccagcagggcagccaaatccctgtgggtccatgccgccactgaaactgacttgttatcttttaaattgcactcacttttaagtgaaatgctatgtgctattataactcatgacatttttttttctagatcatgatctgagtatctgtataaacttatttaaactatttcctatatataatgttaataatcatgtgcaacctaaatctggaatctggagtgactacacaatattaggcagtggcggtaataatgaaataacaacatctaacatttgctgcagatttattatgtgccaaacagagttgtaagtattgcagcagttagttaactctttagagccatc

SEQ ID NO: 54990 - DNA, 1114 bp, Homo sapiens
tacaggaaaattatggtactataatcttatgagaccaccgttgtatatgtggtcccttgttgattgaaacattgttatgtggcccatgcctgtactatttctctctctctctcttttttctctgtctctccccacctgcccatttcctctctcctttcttcccttccccatttatttgagtattactatagaaatcatttcattacctacaaaggcaactgaatctgtctgtccacataggattggagggcctgaatgaataggacactcatattatataaaaagagttactcctttacttgaagacactcaatgcaatttaaacaatgacaccctgctaggtcgtgtgaaggtgccagtccaggcctggaaaggggagcagggttagggacagcaaggcaatgcatctgctagctgtcacaacagaggacaatgcaagcgagagctggcactggtcacactagtcaaggatgatgtctaacactttggggcaagatgttcaatctaaaattccagctaactctccaataggaactctccaaaaatgcagtcttggacttttagaaaaagtgaaagcagaaatcagagaggtaatagcaaacaccggggtttaggaaacaaaccaggacacaaggctaagctaagaagttaaaacgttcctaccaagatgcaggttggtcacgtcacttaaatcctgtcattcgtcacagtaatatccagatgctgtaaagttgccccaggaaagtacagcccctgccccggcagagggactgagcctggttggactcggcctttttagaatgaggtaatgccgatttatgttctatgctggctggacagattgtaaaaacctgtcattattgcctcttcccccagatagagactgccttgacaccccctttttttttcgagacgagtctcactctgtcgcctaggctggagtgcagtggcacgatcttggctcactgcaacctccgcctcttgggttcaagagattctcctgccttagcctcctgagtagctgggactacaggcatacgccaccatgcccagctaatttttgtatttttagtagagttttagtagagacggggtttcaccatgttggccagga

SEQ ID NO: 54991 - DNA, 1621 bp, Homo sapiens
atggctggattttagaaagctgcaaatggtattgtaccatagagcaggggtccccacccccaggccacggacctgttaggaactggggcacacagcaggaggtgagcagcgggtgagtgagcattactgcctaagctccacctcgtgtgagatcagcagtggcattagatttttataggagtgtgaaccctgttgtgaactgcgcatatgaaggatctaggttgcctgctccttatgagaatctcacgaatgcctgatgacctgaggtggaacagttccatcccaaaaccatcctctcctcctcggtctgtggaaaaactgtcttccatgaaaccagtccctggtgccaaaaaggttggggactgctgccatagaggggcctttgggtggccccgttaggtgttttctttgtgaggtggtgctttccagcctgccctggactctgtggttcatggtagatcattcgtactgacctggaccagggagcactggtaggagtatctgatttctatgaacagtgcttgctggcactgactcaagaaagaagacaggaaggaatggtgaatacaacttccattgagaaactagagtggaaaaaatgtgcaaattatgctaaaattgtaattaatctgggctgtacaggttgaatatctcttcatcctgaaagaaaaggggaggtcaccatgagaaaatgggattgagggaccataagaactttgtcatacctagttatacatttgtttttttctcttagaacttctgaaaagcttgaagccccagaagcaatagaatagagcttttagcatggttttgttgtgaactaaattcccaacagttcacctttagtgcataagcttaactttctttgatggtttgccattcaaattagattactgtggacagtgtccctaatattgtcactaatattatgatacagtatcagttttacagcaggtttgtgcatcatgaaggaagtcagaacgttttagtgagttacaaggaaaatagccatcaaaagtccatataggttactctgtggatgggttggggagccatcttctggtcttcatccagacttgattgacttaaaattgagtatataagagtgtaaaagatggtaagtgataggcttgaggcagagacacaggcctgcagccagaactggaaaaaaacccacaagtatgaaaagtataggcaaaactataaagcagccaggcacggtagctcacacctgtaatcccagaactttgggaagcagagatggacaaatcacctgaggtcaggagtttgagaccagcctggccaacatggtgaaaccccatctctactaaaactacaaaaattagctgggcatggtggtgagtacctgtaatcccagctactcaggaggctgaggtagggagaattgcttgaacccgggaggcggaggttgcagtgagctgggacggtgccattgcactccagcctgggcgactgagcgagactccacctcaaaaacgaaaccgaaaaaactataaagcacagaaatatgggaccatttggtagatatagtaactgaaatcacatcaagttttaataaactaattagtattcataatggcagccctacatcttcaagaaa

SEQ ID NO: 54992 - DNA, 1042 bp, Homo sapiens
gagggtggactgtgctcttggtgaacacgagctgtgtaaggaccataatgcctcttgattagaaattagcttaggtgatttacttgggttaaaaaaaaaagagagagaataaatacaagagatttattggggttaaaaacaaaaaagaaaaaaaaagaaattatctaaggttatttattggcctcttagatcctgtaagctacctaatgtaagaaaagtgggaagtttaaaaaataagtgcttgatactatgggcttaagtctaagttttgctttaaaaactcgtctatacttgtgttataacattactattattgaaaatatctgctttccaggctgaagtgattcatttattattctagttctgctttcctcctttgtaatttgtgataattgtgcttttctttttaatacaaaaaatggataaaaataaaaacttgaaaaggcaaaaacaaaaacaaaaacaaaacaacctcccaactgttctacacatctttaaaagatattagctgctgcctctgaggcttgccaacattaggcagggctatgtttccaggagttttagtaataagaaaaagaggcatgcatggagaattcagggaaatcagttttattggaagggctggagttatcactggccccttgtgccaggtgagaggggtgccgctgaggtgagctctggagcagggctgctggcattgatgccagtgggctcttggtggaatggctaacttcttcattccactgtctcaattcagtacccagatgtatccttttggaaactcgcctgcaaactgtgcacagatttctattgagaaacacatttcttttcctctctactggatgtacctggaattccaggtagagtccacaggaaaatcgagatgcttttagtctgagctattttcctgctcagaaagctctgaactctttgtgtctgtgggagagcaagctgagataccagctggttaatacttggtctggaatggtacaagctggcagccttgagtagaggctaataataccatattgtatttgtaatc

SEQ ID NO: 54993 - DNA, 1076 bp, Homo sapiens
ccaggctgtagtgcaatggcacgatcttggctcactgtaacctctgcctcccggatttaagggattctccctcctcaccctcctaagtagcttagattacaggcatgcactaccacctctggctaatttttgtatttttagtagagacagggtttcactacattggtcaggctggtctcgaactcctgacctcaagtgatccacccgccttggcctcccaaagtgttgagattacaggcctgagccactgtgcccggcttctgttactcttgaataacacttttcagctcctgtggaaaccattcctaaagtgcttctgaagtactcagtttttgtttttcaggacatgtacttgtagacaggattcaaagcagttaagaatgtctctgccaagtcgacaaacagctattattgttaaccctcctccaccagaatatataaatactaagaaaaatgggcgattgacaaatcaacttcagtatctacaaaaagttgtcctaaaggatttatggaagcatagtttttcatggccctttcaacgtcctgtggatgctgtgaaactacagttgcctgtatgtatgtcttcaactatgttagtttcaaaaaaagaaaactcctgtaaatttctgtaagacataactagtctttaatattataaaacatatttggccaggcgcgttggctcccgcctataatcccagcactttgggaggccgaggtggggagatcacctgaggtcgggagttcgagaccagcctgaccaacatggagagaccccgtctctactaaaaatacaaaattagccgggcgtggtggcacatgcctgtacttccagctacccaggaggctgagcaggagaatctcttgaacctgggaggcggaggttgtggtaagccgagattgtgccattgcctgggcaacaagagtaaaactccatctccaaaaataaaaaataaaaaaaatttaacaactgatttatttagcatcattaaagtctatcccaatgagtatttttttccaagaaaaaagcttatttttctgagcattcgcattcttattttaataatttgtgataa

SEQ ID NO: 54994 - DNA, 1013 bp, Homo sapiens
gttatttgtttgttttgtttggtagagatgggatctcaccatggctggtctcaaacttctgggcttaaggaatcctcccgccttggcctcccaaagtgctgggattgcaggcctgagccagtgcacccagtctggtccccagattttaatccttcctctttaattgtcaataatggcactatcaccacttaccaacttagagtcagcaaattaagggtcactttagaatttcacttaccatacatactttttctccttcctaaataatcactgacaggaagcagagaagggaaggcagtcctatacttacagcttttctcactattttttccctttccttgttgaagtgaggaaacatggctacattgaggctgtgtacagacgtacaaattaaaaatgtgagcttttgttctgcattctttgacagtgttttgtcttgccctcctatgctcactgctattccttgatgttccttgctctcttcttctaacctcaacctcagtatgatttagccagagaatcagtcaagggattgatggatggtagaagcttaaatgtaagtccctataatatgtaagtggccaggattttgttagtttgggttagttaacaaagacagcagctcagttttgatttgtccctcttgttcttcagccacgaattagaacctgtagactatgactagagagaattgaatcaagtgatcaattaagtttcacgcatcaggatgttccatgttgcagatgacagaaaactcagcccaaactgatttaataaaggaattttgttggcatacataagcaatagtccaaagataggtcaatcttttagtcatggcttgataagggctcacactctgtagttaatcttcacaataataataaatgaaatatttgcatgaaaacttaagaattaatgaaattgcatagtttgttctcctcacctcagagtcagacttactgcgtttcacatccctgttcccttggtagctattttgagtgtctggtatctta

SEQ ID NO: 54995 - DNA, 1032 bp, Homo sapiens
agcacaaatggactaagataggtgaatacagtagtgggcaaagatatgagatggaaagaagctgggccttggcatcattgagacttctccagtctgtccttcctctggactttactattcgatgggccaataaactccttaatgtttaagccagtctaagtcagattttcagatttgtaacataacaaaatatacttgaaactgataaaaatggttctatcaaataaaaaacactgtattttcacattaacaattttatacacacttttttttttccatttagcaagtactcatgagcatctgttagcaacaaggtgggttccctcctgatggttgtatggctaccagctgcagtgcttccttattcacttgaggggtgggatggggggaaggagggtgggaggaaagaacaaattgagtgtttgtagagtttctatttcaattaaagtttgagagtccaacacatttttgtgtaactttaaaaattacttatgaaaataatttattgaaaatattgaccaaactaagatgcatctatttggccattattttcaaggttctgaaagcttttatgctctgaagcatttgttttgtctagggtaaaataggatcatttaataagaagatactgaactcttgctgtatactgaagatacagtttttgtccgtggggagttcattgtctagtggggagaaagacatgtaaaaataataatgatgcaatgacagaaatgctataatagaggtatgtactgaatgtgatgggattagaggaaggagccattaacttggtcctgggggagtatgaatgtcattggctgctttccaagctttcactgtaatgggtatctttatcagttacttgtacctcctgtagtgtactggtattattgccagttttatatatcctgtaatacagaagtcctctgagaatgcataccttgctgatgatattgctatagtgatatgaagttttatttaatatttagagagtaaaatagttactgcaaagaggcaaaagattatattatg

SEQ ID NO: 54996 - DNA, 1049 bp, Homo sapiens
tctgctgttttattttatttattattattattattcttttttgagatggagtcttgctctgtcgctcaggctggattacagtggcacaatctcagctcactgcaacctccgcctcctgggttcaagtgattctcatgtcttagcctcccaagcagcttacagacacccgccaccatgctcagctaatttttgtatttttttattagagacagggtttcgccatgttggccaggctgatcttgaactcctgacctcaaatggtctccccacctcggcctcccaaagtgctgggattacaggtgtgaaccaccatgcccagctggcttctgctattttagattgacctttctacagttagtccaaattaagaaggtttaatattatatatgaaagtagcacactaaggaaactagcattctttctttttaagaatcaccaatgttattttattaatattttatattttgtcttttaggattatatattcatcaaacagaaacataaaaaactatgaagaggaaattcttaggaaaaagataatggagattgggatatcacaaaagcaacttgacatcagttttccaaagtgtgaaaactcatctgattgttctcttcagaagcatgaaattccagaggatatcagtgacagagatgatgatttcatttccaatggtgaggtattttttatggagttgtatttatagccgtaaaaataattatattctgatacagttagagaaaagcatacttcaaaaatatgctttactgattttttttttaataagcatggagaactgaaaacactagtattgttaactcccagtttttcccaagtaattggagatagggttattatgaataaatccatacataactcacaattctctttttagccattatgcctctacgttattgtccttattataatctataccaataaagaagctttggcagagtcaattctgtttcacaccctaacaaaaatggtagcctagttttatgcatattaaatggttaagaaatacataaatactataatacatatggca

SEQ ID NO: 54997 - DNA, 1049 bp, Homo sapiens
taaatacattcttagagcaagaatactttaaaaattagtcctactaaaatttccttctctagagcttctctgcataatccaggccattattctgcctggagtagtgaatctagttcagctaacattaggaagtattgaatagcagtgtactaaagcagcagcaaggcggaaattagggcatcttgatagagccagaagcagcattaacagttgaaattaaacttaatcaaaaggagaaaatagtttttggcatgttggaaaataacaaatttggcaaagatttttaatacaccataccatctacagcattatttttaaacctgaggcatgtgtcctaattaagtaggaatgttttctaagtttctgttttaaggtcagagtaattgtttaagcctcagatgcttctaattttactaaaatggaaatggctgacatgctgtgttcaagtcttctgagaagtagacacaaagatgggattagactttcaagaaatgtattaggctaaatgtatgtgagagaacatagggagaaagccagagaaaacagagctgctagactgcaacgctgatttgactctgagtgaaggagaaagagaaggaagttagatagaagcatcttagactgcagtggagttccaagaaaagttgggcaaggccattattggaaagttcccatgccaaaggcacccatcagagaagcgcctgttttctagggctagacctgccttattgtccttgctggcctcagtcattgtcaggaagtagcttctggtgagatgaccttgtgacctaggtggaataaatttccgagtgctgtagctgaagctatcagtcattatgcagtcaaagattagaggggtaggcccggtgcggtggctcacgcctgtaatcccagcactttgggaggccgaggcgggcggatcatgaggtcaggagattgagaccatcctggctaactcggtgaaaccctgtctctactaaaaatacaaaaaattaaccaggcgcagtggcatgtgcctgtagtcccagttactcaggaggctaaggcag

SEQ ID NO: 54998 - DNA, 1309 bp, Homo sapiens
ctggcctattattttttaaatagaatttcatagttctgtaatgtaggcatttatttccattatgatttacatgtaatgtagggatatatttgggagtgacagcaagcatttttccatctgcgtgcaactggctctgattattggtcacctctcctaccctttcccaggtcgtttaaattggtcatggtaggttttttgttttttggtttttttttcattgatttgaaaaggttttagattgttactaagtatgaagtgtaaatctgggaaagagccttgatttacactttagtatgagatagaaggccaccttgttaaaaatttttaaatttccaaaataatccatattaaattagggtttgctgatcagtactttgtctttagctacctttttatatttaaaaaattaaatatcaattatgtttttataagcttaaaaaattaaagaaccttcaaagaaaaaaaaagacagcaagggcattggaattaatgttttaaacaatcaaaatgcttagttataaatcccagcacttcaggaatagggggattgcttgaggtctagagtttgagaccagtctggacaacatagtgagaccccatttctacaaaaaatttaaaaatcaagttgagtgtgatactgcatgcctgtagtgttagcttcttgggaggctgaggtgggaggatcatacgtgagtctaggagttcagggctgtagtaagctatgatcacgccactgcattccagccagggtgacagaggaagatcctgtctcttaaaacaaaaaacaaaaaaaaaacccttaggtataaatataagcttataagttttattatgtagtaatcctgcctatgaatacaaacaaaacaaatagattattgtgttttaatacataaagatgaaaattttcataaaaaattacattttgaataatatgtaaatgtttacctgtgtttctcccccctcttccctttagggccattttgagtgccagatctagttattttgctgcaatgctgagtggctgttgggctgaaagctcccaagagtacgttactcttcaagggtaagcatatttttacagggccatttgactgcaaatgattgtaaattgtatttcatacaaagcactttttatgaatctgatttccctggatgttcaaggaaatatttctcatgtagaattcaacaaagtacattttctgaaacgggaagtaatagagagcatttattaatagaggtattgtgttaatctgcttatgcttctgtaacagaatatccaaactgggtgatttaaacaacaggtatttat

SEQ ID NO: 54999 - DNA, 1138 bp, Homo sapiens
tccgtttgtctccaaatggacttcttataaaagtttagaaattggcagtttggctgggtaattttaaatttagtgtgatatttagcaacattatttggcacagcataactctcgtatttctccctggtcctacagtaaattttctagatataaaatgtatattttagatataaatgtatattttagagtttttaatcatcagtgtcttttatttttataatcttaatttttctcttcaaaaaatcatattttaaaattaggctgggaagcaaaattaaaatatttatttttaaatacaattaatcagtggccattaattaggtaattacaaattattggcattctgtatttgttcgacaagaatggtttttaaaatgtatcatatttattactattccatagagcatttgaccttgtaatgtcatagttgatatgaaaaggctgtggaaggtgttcatatcaagggcattggtgttttaaaataacatttggttgaaaagatgagattttttagctttgtgttcatttataaaattttgttattaataagtcttcataaataacatgtacccaacgatcttaaaaatctaaatgatgacatcattgatctagcttaggagtaagtagattctgaaaggaataatgactggttgctatgacaatgtggctctcaccagctgctgatttgttgcttgaacacagggttttacgtgcaagatccaggctctgcgtgataagctgtggatcttcctggttcagtctttctatgctgttcgtcacacagaaagctggaagctgatgagcacagatgatcaacagaaaatccaagcaggtacgttagccttgagatatttcaattcttatgtaatgatcattgtgacagcagatattttgagggcattctgataagtgaaaaggttaacatttgtgtgcttctgttggataataggataactgaaactggtgctcatatgtttaggcagttttaataaatcatgctttttagctgttcttagaaaatgaaactcatttcctttatatatatatatgtttctaatcttactatacattagcaacaatgttctaggcaaatttgcttacaagcattcttgtgaagagattaaaagtgtaagaaaat

SEQ ID NO: 55000 - DNA, 1016 bp, Homo sapiens
gtggctcatgcctgtgatcctagcactttgggaggccgaggcgggtggattgcctgagctcaggagttcaagatcagcctgggcaacacggtgaaaccctctctctactaaaatacaaaaaaattagccaagtgtggtggcatgtgcctatagtcccagctactcaggaggctgaggcaggagattgcttgaacccaggaggcagaagttgcagtgagccaagactgggccactgcactccagcctgggtgacagagcaagactctgtctcaaaaaagaaagaaaaaagaaagaaaaaaaagaatgacaatatgatcttaaaatattatcctagaatttctaccaacttaaaaattttctttgttccctttcatatcaaggttggttctaaggaaaatgatgaagtaggtatgtttatcttcagtgccattttatttgtccctttttagcctatttcagctatttttaggatcccttttccttcgcttcctatagccagccagtgctatactagtatcttatttgtccaaaaaccaagctttgcagatgtagtgtattgatgtgctgtgcttcctaggagcttttaaaaaaaaatttttttaaataaggactccaagaagtaaaggattcttcccacagaggattaagtctttaatgataaaatttctggcacttggaataaggttgaagagagaatttttattgaaaatctttataatgtccctcaaattatgctatatagatgacttcggtgtgaggttaaaaaatgagctcaagtcctgattccatccctcatcagcctgagacctggggtaaatcacatacctactttaatcctcaatttcttgtctaagaaatagaaacagccacaggagctagttcatgggactgttgtgaggattaagtgggatgatgtatacaaaagatgtagtataaaacatgggagtaagccttctaaaaaatcatggatattatcattcctcagggcatcctgaatctttatagacattaatctc

SEQ ID NO: 55001 - DNA, 1073 bp, Homo sapiens
tgatggattaggagcatctggacattcgtcaagtaccaatagaaatagtataaataaaactctgaagcaagatgatgtaaaggaaaaagatggtacaaaaatagcatctaagattacaaaagaactaaaaactgggggaaaaaatgtttctggaaagcccaaaactgtaacaaaatccaaaacagaaaatggtgataaggcacggttggaaaacatgtcacctagacaagttgtagaaagatcagcaacagcagcagcagcagcaactggacagaagaatttactaaatggaaaaggagtgagaaatcaggaagggcaaatttcaggtgccagacccaaggtactcacaggaaacttaaatgtgcaagccaaagcaaagcctttgaagaaagctacagggaaggattcaccatgcctcagcatcgcaggaccctccagcagatccacagattcaagtatggaattctcaatttccactgaatgtctggatgaaccgaaagaaaatggatcaacagaagaagaaaagccttctggacataaactatccttttgtgattctccaggacagatgatgaaaaacagtgtagatagtgtcaaaaattccactgtaggtgggttttagcactgtaatttttaatatctcctgacagttaaatttccttcaaaaaacaaaaacctaaacctgtatttgggcttttatttagtttcagatgccaacagaatacttatgtatatgtacttatgcaaacagagaaaatggtagtccttcccactttaatatttcattttgtttatagtgtctaaccagtaaacttacacgtttgttacatatttaatgtattctctcttatgactcactttttcttaatttatagccataaaatctcgacctgtttcaagagttaccaatggaacttccaataaaaaaagtattcatgaacaagacactaatgtaaataacaggtaggtcttcattcagtgttttaacctatctgttagctttctctcaaagttaattatatactaactgctagctaaatatttttaaaatatcttttattttttgttaatgt

SEQ ID NO: 55002 - DNA, 1088 bp, Homo sapiens
cagcaaattcttggatagtgatgtaaaatctcaagaaagaccatgtcacttggatcttcatcaaagagaacccaattctgacataccaaagaacagctctacaaaatctctagactcctttcggagtcaagttctgcctcaggaaggtccagtgaaagagagccattctacaactactgaaaaagctaatattgctttatctgcaggtaatgtacagaaatagaaatgctaaatgcataagaaaataagtttataaaattttaaagttgtatgaagccctgaatgttatattttagtcagatagaataattacttaagcaacagattaaaattttaaatgaaaaatgtcttaatatgaaaattactcattctttattgttcacttaaaatcctaatgaagaagtaatatctagtaaaaattttgattgttatatagagctaacctactaagagattttaaatgaaagaataaaaagaaaaacttagtttgctgctatttagttatttatgtataatttaacacaagaattcttgactattagaaattttattatacattggatatgatttatagacttgatagtatataagaggcctgtgcaataactctagtaatatgtaactaaaagcactgaactattttaacaactagattgattattacaatttatatacattttacagagattaaaattttcaggatctgtctattctaaagttttcaaataaaaagataaatttcctaagagattatatttagaagcaatgataatatatgaaaaaagcccaggcttatttcatattgtttagatgattttctgtctaattgttttgtgttttttgtcttccttattatagtaattcagactaatgacccacatttaaaatatgcaatagtggctgactgagtagctattgtgtattataactaagaaaaatactgatcagtagtttcctgttcagcaaaatcggaagaataaggaggtctttaaagttgtactttttcgtttgtttgtccttgcttgcatcttcctttgcatgtgcaatatacaaataagcctttaggtgaaatgtatttatccctgcct

SEQ ID NO: 55003 - DNA, 1100 bp, Homo sapiens
gcaatgttaagtgttataataaagctgagtataaagtgtaatttggagtgcttggatgggctcctttgctctctaaggattagtaggaattcataaaaaggcacactcttggcagaaaaagttcaaaggcagtggggaattctgttctgtatggctagagagagaaggaaatggattggaagggcaggggatgaagttggacaggaaagtagaatccagagattaacaggatcaggtttgcattttagatgactggtagcaggatgtaggatggaatggagcattgtgacaaggcaaggggactaatgagtcgattgcaataataaaagcttgaatagggcagtggcagtggagacagaggagtggacgtgtttgagggatttaagaggtggaattgaaacccttggtgagtctttggatgtgggaaatgagagatgggaatcatcttaaaagacagttttctcactagggtgcctgggtggttgatgatgtcattaaccaaaaacaggagcaagtgtaggagtgaagatcagtttaatttgggacacactgagtttgagatgcctggggggacattcaggaggctgaggacaaaatgctgtggaatagtcagaaaaagaaaagcctgagacagagactgaaccggcacattcagaagtagaagtaggaggccaaggtgaggagagattaatgttttgtttgttttgttttgttgaagcagggtctcagtcacccaggctggagtgcagtggcgcaatcatcactgcagcctcaacctctcgggctcaggtgatcctcccacctcagcctcctgagtaactgggactacaggcatgccaggctaatttttgtattttttgtagagacagggttccgccatattgcccaggctggtctcaaattcgtgggctcaagtgatcctcctgcctcagcctctcaaagtggtgggataacaaaagttttttttttgctttttaaaaaattcaatgttagcaagagaatgataagtttgggagcttcatatgatgctttagaagtgtaaatttcctttctgataagcagctaagcaagctatatcaggaatgtagctttttggttgt

SEQ ID NO: 55004 - DNA, 2397 bp, Homo sapiens
tcccttcttgatttggtactttttctcccagagggtgcagaaacagatttactgcaaaactcagataggtgaggtgaccattaccaaagttcacatagtaaattcagaataaaatgtgaaacatctgcttagggaacctaaagtaataaaatgtcttttcctgtgattttatgatctatggctaattcattaagttacataaagatttttcatatttaagtgatttgataatgtgtagaaacaaaattaaaacctcctctttctagatgaatgaccagcactatgatttgatagcttttatgtacccagcattccatagaaatttgcaatgacagcacttgtgacttaaaactaaaaatctgtgtatgtaatttatgtgtttaggttttgttgttttattgttttccaggtcattttttttttcatatagaacatataatttcagtttcagtatactggaatggatattgagaaatggtttaaagcatttaaaaagtaatcttaaaattcagaaagcaagagatgatgctctcaaatattaaagataacaaggctttctttaaacaaggatgataattttcacaattgtatgatttaaacaaatggaaaacagtgataagttattactactcaaaaagatattaatggaaatagtttctattggcaaacctaattataaaaatatgaccaaagttttagcttattgagattgctgttgactatataaaaccatactgtaagtaacatatatttttaattaacaggattatggcttcattaaatttattgaggtatttggttatcaaagataatgaaaatgacaatcaagtaagtgaagtatttgaaaagaaactgtgagtatattcaaaaggcataaggaatgtttcagatattcagtacctaaagccaatatttaatatcttacccagatataaaggccgggaagagtgccaacaattattctgaaacctgaagttaattcccaggagcatttaccaccccacatccagctttcctttccctttccatttcctattgtacgtctgctttcttgctgaaagcacttagtcctgttgggtggataagttgcaggtcctaagtcaactaaccttgtggagctcaacgtacatatggtgtcttgttcagtttcctccacctatagctcatgagctgtataaaatcatctgatattttaatattgcctcatcagacatgacaaattgaagcattttcagcactaaaacagaatttgttaacagcaccttttagatatgtttaggaagttggattttttaaaaatagcacatcattagaagtattcaataaatagagaagtattcaataaatagaaaactatttgagggagatttgtcatacagtaaaattatatttgctttttatcttctctttctaccctgttctgatcattgctttccctatatgtgtcacctctattagctagaactacctgaatcatgtgttgttaattggtttttttttagtaattcatttttatataaagatgccaaagaaaattttttttaaattaggtaaatcgtgatttgggatgaaggtttatgagaaaagtagcagtctctttccttcctgacagatctatagtagattcagtgatttgaacccccgttcatccctcttcagctgaaaatagctatttgccatcattgactagtgcttactctgtatcaggtgctatttttttttaacattttgttgtgaaacttttcaaatgtacagcaaagttgaaagaattttatagtgatcattggtttacccaccacctagagtctatgattctactgtactaacttcatcatgtatctatcactccaccctctgtctatcactccgtcagtctattttttgatgtatttcaaagtaaactgcagacgtcagcatactttctccgaaatatttcagcatgtatttcattacattgattaaatatttgtctgtagtttttctttgaagtaaaatttacataatgaaatgttcaaattttaagtgtatattcactgaattttaactaatacatagatctatattactcaaacccatatcaatatagaacatttccagcatcacaagaggttcctcataccccttcctagttaattctgacctcgttgtgctactcacccctgccagggacaaccactattctgcccaagtgctgtatatcattcattcttcagagagcgtctcgttctcttgcccaggctggattacagtggtacaatcatggctcactgcagcctcgacctcctgggctcaagagatcctcccacctcggcctcccaaagtgctggggtaacttccaggcatgggccaccatggaaaaccaagaaaagtactctttatttttcacttttcatagat

SEQ ID NO: 55005 - DNA, 1080 bp, Homo sapiens
ggcatctttatataaaaatgaattactaaaaaaaaaccaattaacaacacatgattcaggtagttctagctaatagaggtgacacatatagggaaagcaatgatcagaacagggtagaaagagaagataaaaagcaaatataattttactgtatgacaaatctccctcaaatagttttctatttattgaatacttctctatttattgaatacttctaatgatgtgctatttttaaaaaatccaacttcctaaacatatctaaaaggtgctgttaacaaattctgttttagtgctgaaaatgcttcaatttgtcatgtctgatgaggcaatattaaaatatcagatgattttatacagctcatgagctataggtggaggaaactgaacaagacaccatatgtacgttgagctccacaaggttagttgacttaggacctgcaacttatccacccaacaggactaagtgctttcagcaagaaagcagacgtacaataggaaatggaaagggaaaggaaagctggatgtggggtggtaaatgctcctgggaattaacttcaggtttcagaataattgttggcactcttcccggcctttatatctgggtaagatattaaatattggctttaggtactgaatatctgaaacattccttatgccttttgaatatactcacagtttcttttcaaatacttcacttacttgattgtcattttcattatctttgataaccaaatacctcaataaatttaatgaagccataatcctgttaattaaaaatatatgttacttacagtatggttttatatagtcaacagcaatctcaataagctaaaactttggtcatatttttataattaggtttgccaatagaaactatttccattaatatctttttgagtagtaataacttatcactgttttccatttgtttaaatcatacaattgtgaaaattatcatccttgtttaaagaaagccttgttatctttaatatttgagagcatcatctcttgctttctgaattttaagattactttttaaatgctttaaaccatttctcaatatccattccagtatactga

SEQ ID NO: 55006 - DNA, 1142 bp, Homo sapiens
ttatgtatgttttaatgattttatattcattacatttagtttctgttattcatacagtgataatatgtattgttttgaatctaagtcctaaattcttgagatttccaaactgcagagtcattgagtctttttttgaataaaaagaattggaaagattttacagaataatcaactggaatatatagcattggttatatcaggtttagttagtttcttagcacttgctgttgaagatctattgttttgaagttaggaaataatccctgagtagatttattttggtcagatttagtggccttagccaaaccgaaagacagatcaaagatggattaaaacttttgatcaagttcttcaacagaatttctccttaatgatatgcattttaaaagtgttaaaatttcagtttttgctgtatttttcataagatgaagtatcattctaaaatagtttacaaattcatgataaattttaatattatttttcagaacagaagagtctgttatctccaaaggattggtaagatgtttgttcccattataacttaaatacatagttatgtcaacaaataacagctgttgacttcactatatatgtatctgcatatattttaatctgtaggagctgctggagaatagtttattgagaatagaagacaatagtctactttaccagtacttagaaatcaagagttttcttactgtacctcaggtaaataaaatatgtattctaatattgaaaatagccctttgcctgttctgaacttaaagtaaggtcttttctgattcctttcccactcttttctctgcaacctttgaaaactctggtgtaatgctgtccagtagaactttgacaatatgaaagccactagccaaactgaacacttgaaatgtgactaaggaactattttttttttttttgaggtgtagtcttgctgtgtcgcccaggttggagtgcagtggtgctatctcagctcactgcaagctccacctcctgggttcattccattctcctgcctcagcctcccgagtagctgggactacaggcgcccgccaccacacccagctaatatttttgtatttatagtagagacggagtttcactgtgttagccaggatggtctcgatctcctgacttcgtgatca

SEQ ID NO: 55007 - DNA, 1031 bp, Homo sapiens
ctgtccatgagccttctcataacatggcagcttagttctttaaagccagcaagggagagagtcagagagcaaagtttctgactctcagggaaggcctggaccccctttaaaaatatacctgattaagttagggccacccaactcaaaatctactgatttgggaccttaattacatctgcaaaaaccccttcacttttgtcatataatctaatcatgggagtgacatcttggcgcattctgttggttgaaagcaagtctcataggtcccactcacgctcaaagggagtgattacacctccccttggtgagaatgtggagtttgaatacacggggtggggggcattttagagtctgtgtgctatggtttccttttttatccatttcatagggttttttatcagcaattggacaccctttccccaaaatgatttttaatcatggaaggaaaaagagaacttggaattaccttgaatttgaagaagaagaaaataaacagttagcagactcaatggcttctctggcatatctagtatttgtacagggcatccatattgatcagcttccaatggtcttaaggtaagagttagtgtttggtttattcatgtattctaaaaggaatttcataaaattctcatttatctaatgtccaatatatgcatattaacacactaatacattttaaataaatagtaaaggctatttttaataagaatgatcccagctataatctgttaaagatagcagtagacaagtaatgaaagtggggagtgttgaaataggtgtaagggaatggtggggacaagaatcagaagatgataaacagggcttggttttgaagcttttgagaccaccctggaactagccaggtacccaggggtatcatcatcttttcactggattactgctgtaatcctgagtggatttatatatctacttttacttccttttaatttaacacattctcaacataccagaaagcgaagccttaaaagaagtcccttactgaaaaccctccagtggctttttattgc

SEQ ID NO: 55008 - DNA, 1029 bp, Homo sapiens
attgatgcttgtcttaatccatttgtgctgatataacagaatacctaagactgggtgatttataatgaacagaaattcattggttcacagttctggaggctgggaagtctgcaattaaggcgctggcatctggcaagggccttctagctgtgtcataatgtggctgaaggtaaaagggcaaaaggcaaaagtgggctgaacttgcccttttataacagcattaatctcatccgtgagagtggagcccccttggcctaattcccacctccttatggcagttaaatttcaacatgagttttggagagcagagtcattcaaaccatagcagtgcttatgttatttttcaagtaaaattaacttagatttgaagacctagggattttatacttggaagtgttgatttcatagttacctatttcttatgccttagttgtttcaaaagcttgaaatgccctttgctgacagcacaattctttgaacagtctgaagaaggtggaaatgatcctttcaggtattttgcatcagaaataatagtaagtacagctaatttaatctgctataatcttaaatgttatcccactatattctcagtactgcacatgtaaattgatacattcattaataaagaaatgtgtattttttgtagaacacacataaacaaaagatggaaaataaaacagcaataattttattatccaaagataaatattaacatcctccaggcttttttcttatatacttatttataataatacatatatataaatttttcaaagattttatatatatatataatcttgtaatctacctttttcctcttcaacagtatattatgaatatttttccattggcttaatagtgttccatggtatggacttagtataatgtatttcacctgtgccatatagttcaacatttggattgtttctaattttccattattgtaggacaactccaagttttctttttttaactgttaagtctatgataagtaacctagtaattaaatttttgcatacttttcaaatt

SEQ ID NO: 55009 - DNA, 1766 bp, Homo sapiens
cactgccaattagactgtgatgtgtcatcttgattcaagagttgttaaaatgtgggaggaggaagtgtcttataattccacatttgccgaatttcttgtcccatgtttagcatacttgatgagcgacaacttgatctctgttttagtgattcagaaacttcataacaaggcatattcaattggattagcattgtctaccctttggaatcagctatctcttcttcctgttccatactcaaaagaacaaatacaaatggatgactatggcctttgtcagtgttgcaaggccttaatagagttcactaagccttttgtggaagaagtcattgataacaaagaaaactcactggaaaatgaaaagttaaaggatgaattactgaaattgtaagtataattttaagaacatctcacagtggacttaagtaattgatagttcagttattttatgtttcttcactttgtttgacatgtaaatagaaatctagtttcagattttgaattttagaagaatgtggggttcagttgatacagcatgggaacttgagacatttatattttaaaaaattataggccgggtgtagtggctcacacatgtaatcccatcactttgggagactgaagtgagaggattgcttggggccaggagtttgagacgagccttggcaacatagtgagacccccatctctataaaaaaatttaaaaattagctagatgtagtggcatatacctgtagtgctactgcttgggaagctgaggctagaggatgggttgaatccaggagtgtgaggctgcagtgaatgatgattggccactgtactccagtctgggcaacagagcaagaccctgtctttaagaaattaattaataaaataattataaaaccaaaatccattcatttactttatattcttctttgtattgccttattcatcatagtaggtgaataatgaaagtgggggaaatagatacatgtagctcagggtgagtgtgggaaatagatataggtagctctgtggagaaattgtgttttactctttcaaaggaagcagcagaaagaccaccagacagaacatccaactggaccacaaaaatagtggtagagtatccacccaatagcattccctccatgggtactatagactaaacatctactgttcaatatggctgtagcacttgacatatggctggtccaaattcagatatactttaattataaaatatcccctggattttgaagacttgttatttaaaaaaaaaaaacagtaaaatacctcaatttttatattgataacatgttgaaatgacaatatttcagatatactgggttaagataaattattaaaatcatctctcccattcttactacttttttcatgtgtctactaaaagatcttaaattatatatggggctgtgttatatttctattggacagtgatagactagattaattacatggaccagtaatttttaaattttggctacttgggaggctgaggcaggaggatcacttgaggccaggagtacaagaccagcctgggcaacatagcaagacctcgtctctaaaaaatagaatataaaataatattttaattttggagactaatactatttttagcttcctacttgtcaggttaggacatttaaaaaaaaatttacagccagacgtggtggctcgcacctgtaatcctaacactttgggaggtcaagctgggagattgcttgagctcaggagtttgagaccagcctaggcaacatagtgagacc

SEQ ID NO: 55010 - DNA, 1661 bp, Homo sapiens
ttaatgtttattgtttggtaagaaagcttttggttcatgaaagtacatgcagaaaggaactcgttggagaaaagacccagtcttattgattggataggcaattccatttcaggatttcccaaattttctggataaaagaattgtctaacctcatattaacctcatatcggacccattgattcagcatctccagggagagacctgggaagctatatcttaacaagtagccttatcgtatagatgtggaatacaagctttagagaggtagttcaaggtcacatttatcttttggcaacattggaactagattaaaatctcagtcctctttcctttgtggtatgttccctaaaagaaaatggaaggcctagaatacaagtgattaaaattgaagtaggaatagggtagaatacagatcagttgtgactaacaaccttagaaagcgaccctgggtaaaaggctagtagagtttacagtcaatatttgatggccaagaaagataaattctgagaaaaagtatattataagaaactgtttagtgatcagtgcaaatatacccaaatatatattggaaggagagctccatctgtatgagttattgactatgggagctgggagcttttaaaaaaccagtcaagtgagatgataagatatggccagtcagaaagcaatgcaaagttttacctgttcaaaaaatacaaaagagattccagactagtctaaataggcttgcagcatgggattgaaaggtcccacctgctggagcccctgagaatctgttaaggcaatttcagagtggacaggtgaagctcaaaggaaacctgagcctaaagatccattgacttcttgctttttagttttatagttacttgaccatcacagattctgtgttttgctcatgcatattttttcaacaattgtataaataattttaatgttaagcaaaaacataattgtataatattttgtcgatacatgccttcttaaaaatagtaataatgtggctttaaatacaacttgtattaaacaggttcaattgtgaatatttttatagttatgcaatccaaaggaattattgttgggtttgcttgaactgattgaagagccctctggaaaacagatatcccaaagtattcttcttttgcttcagccattacaaacaggtaatgagaattttgatatcagagtacttcttgttgtatctctaaatgccttgatggttacctcaaaatgtcaatactacaccaaagtaaagtttacagctaattagtgagtactctgcttaaaccaataatagcaatgccaatgtgaatactgctgctcatagaaagattatagtatctggccagagtgggtacccagtaaatattctgttgaatgtcatactatttttcatgtgctatattgaaaactatacctttttgcctaaccttcctatctgctgcttaaatctagaattttctctctaaacatgtttcaagggttacctctgtggtgtctgcagtactaaatctgatagcattatggtagtctggaagagtatcaggcaaggcattgctcagcctctgctttgggaggttggattgggcatagcaaagctactactgaagaatgaaacgaggagatatgggatgataaggctccatggctgagtgcagtaacag

SEQ ID NO: 55011 - DNA, 1048 bp, Homo sapiens
tttcaaaaataaaagatactgttgtcatttagcttgtgtatagctatagcatcacttcttcctcatgcctcagaattatttcatttaactatataatctacaaagatgcagagactactgtggcagaaatttttttaataataactttttttttgaatgctcactatatgttgagcacttctctaagtgattttgctttattttctcctctaattctaacctctaacttatgaggaaggtactattgctatccctgtgttttcagataagattgatgaggcttagagagctgataaatgaacttttctattaaactaggaggaaataaccctctcatttcattttaggggaggttcattacacctgctcactacagtgatgtcgtggatgaacgttctattgtcaaactctgtggttatcctttatgtcagaagaagctgggaattgtaagtaactcattttttttaaaatataggcttttattattttcatttagcaaaatactttgttgtaagaataagaaataaaacctaaggtcatgaactaaaggcatggattggccaatgatatgatatgtagatgacttaatcttgtaacataacgttcatgtttattatttggattcttttgtaagctgtactttcttttctttaggtaccaaaacagaaatataaaatttctaccaaaaccaataaagtctatgatattactgaaagaaaggtgagtttaaaggctttcattgtggcaattaattttttttctttactaaccactatcctaacaaggcatggcaattaatttttaatgatattaaataggattctaaaagaaactttaaaatcttactggttagaaaatagtgatgttaaaagtttgattttatttgtaaatatttcaatcaaggtattaaaaatttttttgcttaagcttcaattaagacttgaacatttaaaagtgcatattggcacaaatctgggcaaataaatcatggaacagaatagagagtcagcagcagactaaccacatatgtagacacttgatatatgac

SEQ ID NO: 55012 - DNA, 1514 bp, Homo sapiens
atttataatgttcttttcagtctttttgcagcaatttttgttatcaagcatctaagttttttgaagcacaaattcccaaaactccagtatgggttcgagaagaagagaggtaatttaagtcattgtgtatatacatttgttcatatattctaataatttgtttctgctttttgagattagctgagagtaagtctagttttctgtaaaaagttaccattttatatactttatggggaaatggttatattttaagcatagctattaaggattttacacttaaaatcagaaaatgcatacatacaaatgttatttgtttgttgttttagctttaattgcaaaatcagaactttaactccagtgtcctgtgatgctagttatgtctgtgaatcctgttaatataataatcctggaggaagaatgttaaattttttcagaagttactgggtcttaggatccaggtgaactctgctatgagaaaggttagaaagttcaggttcatttaatctttataaaaatcagtacactattttatcaatttaaagacacaattaaaaagtaatttttttttttgtaaaaagagtttatgggcaatgctggagtttagcctcttgggaaatgatttaaatactggcaatgttttactagatgctaaagtcaagaaaattttattattgagggtgaaatggcatgataatataaaggtaacaagttatccttatggtaattaaactgtattgcctagaaattccaatgaaatgcttaatgagataatgcccaaaataaattcatgtttgaaagagtgtattatagcaacacaaggcagtgttacttgtggtaaggtaggacctatgctaaataaactaatgacctaaacataatgagatgcaggttagctaaaaagctctggctcaaaaaaaaaaaagcaaaccttgaagtcttttctgatgcgtaaggcgatgtaacaccactctcaattcaaataacatcaattatgctgacaacagcacctgtgatggcagacacctctgcctgccgatccaatcctgtgtggtttaggatatggaaaacttaacactgtgtggcccttgataattgagttaaacataattaagactaaattgttcatcatttcaccaccagtctgccagcttccttgttgggaaaataaaagactctggcattgttcgacatgactgggaagctaagagtacttttttacttatcctttttctcctttcttaatatttctgtcactagagctgcccagtacttccccagtcctctgagagcaacatgttttattccccactgaaaccagtgtttcctcaagttatccttaactttgcttccaaagatattttctctacatcttaaatttaaccctttgtgccaccctcatatctacctcaactgcttcaaaaccatttaccaaattacctttcctgccatctctgttttcttcaagcataggtattggtccttcctttagctaatttaaaacaaatcttccagcc

SEQ ID NO: 55013 - DNA, 1005 bp, Homo sapiens
aagagaaacttacttaaagttttgaaggagactttgattgagtggaagacagaagaaacattgaggtttttgtatggccagaattatgcttctgtgtgtctgaaacccgaagcctctctggttaaagaagaacttgatgaagatgacataatctcagatccagatagtcatttccctgcctggagggaatctcagaacagcttggatgagtctttaccttttaggggctcaggtacagccattaaaccactgccaagttacgagaatttgaaaaaagaaactgaaaagttaaatctgaggatcagggagttttacagaggacggtatgttttgggtgaagaaaccaccaaatcacaagactcagaagaggtatgtcttacagacattgagtttttccagatcgttaacatttggaaaactcaccacagcaaatcttggagcaggaaggatattgaagagttaattgttaaattttcaaatagtttctttagtcattctgccttttggtttacagtgccatctccactgttggcattactattttacaaataagttgacgtttacccctagcaaattttcatcagtgtgcaatatttttttctaatgtaaaaatagcctaaaatggtgggacaaagttttccctaattcttcatacaataaatgaagcctctgaagaggcttgctttttcttcttcggtattctttcagatttttacatggggtctgtgtgtgtgtgtttaatggaagtatatgccatggaatagacttggtagttacattggaaaatatttagcaagcatgtccattgaaaacattacagatcaaaatagtttgtaaaagagacttattgggaaataatggacaaagagaatggaaagcacattcagatagacctagatttgaacatctgttgtgtcatttactagctgtatgaaaaattagtttcttggtctgtttgctcatctgtaaatggaactattaatagcttctcttgctcaattgtta

SEQ ID NO: 55014 - DNA, 1016 bp, Homo sapiens
cttagtatcagttgataaagaattttctcagtttttctttgtcagaaaattattttactttcacttttgaaagatatttttctatattgaattttagatgagcagttattttctttcagcccattgaaaatatcattcccttgtcttttggcttacatttgtatctcttattgctactcctttgaaagtattgtgttttcttcctctagcttcttttaaggtttttttttgtaagttttggaatgttcccagttatctcttagatattgcttctattccattctgcctcttctctttagtctttttttttactgtatcttgtaggtctcttaatctcctttgtgctttacattatgtgtttggggagtggtgactgtgcttcattctggatattttcttattcagcattctctcttcagccatttctactatgcttttatgtctccccattagttcttacttttaaataccgtatttttctattctagggttttcattttgttattttatgtagtttccaattatctgtcaaaaattttcaacctcataatttttctttgaatatattaaacatgtattttaaataatgctgataacttcattatttagattccctgaggattgatctctgtaggctgtttcagatttttatcatattgtcgtgttttattatatgccaaacattgtatattaaaaattacagagataactggagactcaggatgatgttatcttcctctagaatagatttatatttgcttctgacatgatttgtagcagttccatgtcactgtaatgtaatcagagattaagatgatttcaaggtgggattcactccctgaaagaactagtctatttcctattcttactgttattcctagagtatggtctttccaagtcctggtctcatacttggggaaggttgcccatacccctgccttcttgaaggataccctgaactctttttattagaaaaactgctcaatttctcaatatctaattagaaaattagtgct

SEQ ID NO: 55015 - DNA, 1044 bp, Homo sapiens
tctgccatttctagaatggttaggggtcaaatgacataatgactgaactcctcataatatatttatagtatttgctaattttaatattttaatcccctacatttgtacagcacttagcagtttacaaaatctttttgtttacattttattatttaataaaggaggtattaatatcccaattataaagatgagaaaactgactctccaaagagggcaaatgactcaaagaagttcacaacagcctaacaactgagttgatactcaaatttaaatctaattctcaagtctagttattttcctactgtgccacagatacaaacttttgtgttttaatgtttattgttctgcttatcaaagaaagaatgtaaacttatgattctgttttgctttgtttaaaaatgtgattcagcatgattccacctttccactgatagactcaagttcccagaaccagattagaaaacgcatcgtacttgaaaagttgagtaaagtgtaagtatgtaattgccattccagctttgtagtagttttaaattaacttgacatttaagctcataatgtgtaagtattatcctcagattttgaacattttgaaaaataatgtgaaaagttcacatggatttcttcacttaagaaatttggatttttaagatattttatccaagaaatacaaatttttgtgtagaggacacagaggcacatcataaagaggaaggttgagattgtgggtttagaagaccaaactaccttactcccacctaatcagtgaagtcagggaaaaaatatcaaagctagacccatttaaatactgatttgcggtaaatgtgtcacagcagtttcagatgcaaataagatgttattacaaagttttaagggtctgttaagtcactctgcatgcatatccttagaaccatttcacactcagcaacatgagtttttgttcaactcaacgttgcactttagctttaaacttcccgtggtggaaattattgttcttgtaattagcccagtcataaatgacatttaaaaattgctatcttggtt

SEQ ID NO: 55016 - DNA, 1019 bp, Homo sapiens
acaagttagggataaaattaaaatacatattcatcatgttaaaactccattgacttctataaagtataattatactttaatgtgtatttccacccctcttctcccccttacagttttcacaattacattttagagaaggcattttgtcactggggaaagcaaaaacaggcatgaaggccagcattggataaatagccttacagtgaaaatatggagactttagaaacccagagacatgcacatataaagagaaaggacgaaacacatgcacacgttatttgtggagaagtaaccccacctttcagccttttagcttattgccactaacattgactgtaggcatacatgggtgtatgtcttttttaaaaataattatcctattattcagaaaattttcacatctactctcaaatttccaatggaatttttaagtcacaacttgtagacatttctggaattcatgtttaaaaacaaactgcttataagtctttatagctaggcaaaagattctaaatggcagttgtcacttaagatgaatataagataatatgttcagtagaactgttctttatatatgaatattgctaagttttattattactataatagcatttgtttaatccatgaaagctgttttcagaattcctcatgtgaactcttagaagaggatacatacatacacctatatataattgtattagtatgttgctataatgccacaagtctaactcttgttaaagggggaaaaaaatcaacattttgaccaaaacatgatagtccaggataacataaataaaactgagtcttgaattttcacacctttattcttaaaggaaataaggagttttggtagtaagccatcttctcctggtgactttcattgttctttcacagatgtattaacattttttaaatctgtgccaggtgcagtggctcatgcctataatcccagcattttgggaggctgaggcaggaggattgcttgagcccaggagttgaagaccagcctgagcaacata

SEQ ID NO: 55017 - DNA, 1055 bp, Homo sapiens
gagaaggataagaggtaaggatgtgggagtgagcaaggtgacagatcataggctatgctttttcatataaaaaatgaagatgggtattacagaagatattactaaattgtttctctgaaaagtcttataacttatgacatgaaactacattaaattatatgtgtcaacttcaaaacattacagtacctgaagtggacactgctttggctgtatgaccccagtaaggtagggtcagatgggcatctaggggactggcttttcctgcttatctaagtgatagaagttttcactgttaaaacttcattttattgctcttatttttgtcacaagtccttatgagcttggttgggtgaagggtcacccagaaaagaaccagcttccactttctttaattatgcaaactagagctaggtgactgagaacttgcttttggtctgcaagacatagggagttttgcaagccccaagggagtccagaatttcctgaacatgttgcaaggtggctggatggctttcttctgaagtcatgcaatattgtccttcactttggttatgactgcagaggtgctgggaagcaaaatgaaaactatcaccttgaagcaggcttttcttcataggccccagaggtgaggccagctcatttaaagggaatggcttgtgctgctgctttcatctaaaggtattttgatccaattccacctcccagctcctttattggtaatgttttccaaaacacagtatttttgctgagggaaggacaggcaaaggcctgaacatttagagagtagaaaactggctgggtgtggaccttttacaaaagttcatattttgctagtttaatttggaaaaggacacatgaattctcacagaaaatgagctttattggggaacaatacatttcatgaaggcatttctttatcaggaatcacacaggcagccccacgcagtcactgccccacaccttatccttcagcttgtgctgcacaggagaggagtggctgggattcctgactagggctttgatgagagtgcatgcacactggagcatgcttcttg

SEQ ID NO: 55018 - DNA, 1050 bp, Homo sapiens
aaaacattacccacttcccacaaatgatggtaccattaaatcgtattctgacttatggtgtcagtggaattctattttgatagcctgcttcttataagattagaaggggataattatattacctgtcattcaagttaaggcatcacacagttatcagtttgcatttattttctttgaattaatacaattaaaatatatgtaattcttatttcagtttgactacacctatcatgacacctaatccaaagacaaaaattaaatagtttgttagtatacatgaggataaaaccatggcaatatgacagggtgtggttctaacaagtacttcctgtacataaaataaagaccagttctatatctggtctttaatccaagtcaaacttttccttagtttatttttgtagtcttttaactgttaagtggtatgaattcttttggcttatgcattacataagcgccatccataaaacttgttctggtatgtatcaaggaccgtacaaataatcattgttggatctagaaatttcacccctaaaaatatatcctaaggaaataattccaaatgtagggaaagctatattcaaaaatcttttcattgtattacttaaaatagtaaaaactcgaaacaagctaaatagtaagatgagagtgattgagtaaattatagtaaactagctgatagaacttttttatagcaattgaaaatgaaagattgtatataaaaagcaaggaagatgattgtcatgatttttatttaaataatttttactataaaaagtttatattccatttaagaaaacaggaaaataaagagaatagaaaaaagaaaaataattataatattcgggaagaaaagcagactactcagttgtatctgtaatacgattataatttttgttaaataatagagcaagaatacttgaaagttgttttacagagttttattcttttcttatcagatatatgtagcataatttgtaatatagtcttatttatattattatttataatatacaaataatatagcataatttcttatacgtttatatt

SEQ ID NO: 55019 - DNA, 1993 bp, Homo sapiens
ttgctattaagcttatgatttggaaacgtaaaatttcatggtggatattataatcagaactattcaaaagggaaaacatgccagccattttatatgatgaagtctcttattccatagaaaactgtagaaagatatctgtatctttggagaaggagaaagaaaggaaagaactccagaatcccatcactgttctttaaagcatgcatcacagacctttaagagtatgctttattgagtaaaggttatagtttgactttaagataagaaattttctagaatcatgtttgaattctaaacgttgatattcttaagtaccatttctgattaggaattaggtgttaaaagaatcatggtaaggaaaccttaatccgttgaaactcttgtaatttggacaacaaaaaactagaaataacactcttttctttgaagatctgattcaaatacaccttagaagagtttaaaatctcccaggcctttaggatgcaataggatattatgccttggtttgactccttttcattcaaattaatgtaagtatgttgttcaagactttgaagcattgaacaatgttctcgatgaattttatttaattactgacattttgtgatatttgaatgttattaagttaaacacttagagttgagtatattcaggggagaaaagtgaatgaaatgactcataataagaaagcttgctcccttgggacagttaccttcctggtgtcattgccatcctgggttgacaagctgagagtagaggatacaagtgatgtgaataaaatggaaattgcattgagttaatgaaacagacacttttagatcaagaaaacacttcaacagcctttttagaaattggcacactcctatagtcccacctactcaagaggctgaggcaggaggatcactagagtacaggagtttggggctgtagtgtgtaatgatcacacctgtgaaagaataaccactgcactccaacctgggcaacatggcaagaccctgtctctttaaaaaaaaaaaaaatcctgggaaaagaagtcaaagatgtaattttacacaatttctgcccccaccgtcttttttgtttgtttgtttgtttgtttgttttttggctagatactaggtattcagtgtttgctgagatgacaggtttctactaatcagccagttatttgggaaggagaaaaactttttctcaattctgaacatgatgcagcttgttaactctccagatagtgcctttgattgaaaataaggtctacacctttttaagtatattatttctgacatcgtaagaaataatttagttccttattctcatttatcttttatataatgtactgtaatattcaggtttaaagtaaaataagtatatgaattatattttggtaaaactgtttcatgaccagcttgattaatgtatattaacataccagacattgacagcgaacatttcatgaaatcagttatttacttaccaaaacaatgagttttagcttgaaagttactgctgctctattattaacaaaactaagttttaaaaattaattttaattctactgaagtttaatttctggttaaaggtatagtggatgctatttatgatccaagtttttacatcacatccattgatctgcctatcccttctttttactccaaagaggagatgatagaataatacattcagtatactaccaagaagcaaagttataatgtgtttcattttgctattggaattttttattgtaacattgtatgataacctgaaatgtttacttgtgccttttctttaaacaattaaagttttccattttataagaatttctgtttccttcagcttttcaactttaaaagaggaggggcatcaaaacactgttaacaaatgggtggggcgcggtggctcacacctgtaatcccagtactttcggaggccgaggcgggcagatcacttgagctcagaagttcgagaacagcctggccaacatggtgaaaccctc

SEQ ID NO: 55020 - DNA, 2606 bp, Homo sapiens
tggtgttggttttcctttgcacggaaaatctggttcgatgtctttggaccccgcagtggcagatggtagtgagagcgaaacagaagacagtgtgctggagaccagagagagcaaccaagtggttcaaaaggagcggcccccgagaagaagagagtcgtattcaaccactgtctgaccatcactgtgacctagactatggatttatttaagggatcagttatcatatgattagggctttttggaaataatttgtttcatatgtacatatatatatatatatatatatatatatatatatatatatatatatatatatatattttacagtcttatctgcctttttatctttgccaaatctttaccactgatttaccattgccataaagtagactggtatatggttaatgtgtaaaacaaggttctaacagtattactgaatattaatgtttcttgtttagaaaatgcaactatatctatatgtgggaaccattctgaagttcaaaactatggaaaattgaattttcttcagacaaaactgctcttgtgcaatattttatgctcagtgagcaaattgtgtatttatgtttatcaatttgttctcaaggtggctgtctacagacatttgaccaagacatacatctgatttaccttgtgtttttttttttattgttgtttttttttttaagacagagattcagtctgtcacccaggctggagtgctgtggtgtgatcttagctcactgcaacctccgcctcccaggttcaagcaattttcctgcctcagcctcccgagtacctgggactatatgtgcgcaccaccacgcctggctaattttttgtatttttagtagagatggggtttcaccatgttggctgggctggtctcgaactcctaacctcaagtgatccacccgcctcagcctcccaaagtgctgggattacaggtgtgagccactgcacccagcctaccttgtctgtttgtgtctgggaggttttttttttctatttttattttttcatgaaaattattggtgggccactgaaagtccccacacacaaagcctttattctatataattttataaacacaaattcatgattatctgttttgagagttttaagttttgttttaatgtttaacttttatgtgcatatgatgcttccatgtgttggttactagagtagtaggttaactacagacatactgttttgtttgtacatatttataaatctgtaccacctaacattgaacatcattttatatgaagaacatacatgttgcaaaatgactgctttcagcatctaacaggacttctgtaaataataggttaaaagttaaaaataaaacactaatgttttaagagctttagtattttgcttagcattcaatactagcagattcataactgatgcctgttcaaaaacactgttggtggaatcttttatttcatgtgtatgtaactactaaatttttcatgactgaagaggttatagcacatattagttagtgctaatattctactgaatataatttaagcaatgggctaaggtccaagaaacatagcaattatatctacaaataatctattaacatgatcttcagaatctctagtttttgttctatagataaagccataagaatcctttcctaccagtttttcctatatcatttagatattatttcctagaaaacaggatgcctgtcactgataagttagagaaaacacccaaattatacttgcactatggaaagacgacatgaatatgttgactgggtactttctactctcatttttgttagcctatgaaaaaaaaaacattttgttaacctatggaaaaagccttggaagagaaaagtagaattcagtatgtatggaggcacagttttgcacagtatgttgcatgcggcaaaaaaaaaaatatgaaatagagtagaagagataaaagtagttttctgtcaaaaactaggagttaagccttcaggtacgttgtggactaggctttccagcaaggtttttgtagctatttgcttgcctgagaaatgaaattgaaaacatacccctgcgtgtctgtccttaacaccaggctaaattctggtggttaaataacttatctgtggttacaagctagtaagtagcagagccaagattttttttaatatagagacaggtgtctcactgtgttgtccaggctggtcttgaactcctggcctcaagtggtcctcctgcctcagcctcccaaagtgtggggattacaggtgcgagctactgctcccagcaagagccaagattttaacctagatctccctaacaccaaagcttttgaaagggttcagctgaagaatttctcaattctctgttttgttttgtttttatttttgttttttgagatgaagtctcactgcactcaggctggagtgcagtggtacgatcttggctcactgcaacctccacctcccgggttcaagcgattctcctgcctcagctcccaagtagctgggactacaggtgcacgccaccacaactggctaatttttgtatttttagtagagatggggtttcgctatgttggccaggctgatctcaaacttctgacctcaggtgatc

SEQ ID NO: 55021 - DNA, 1007 bp, Homo sapiens
ggaggtccactctggaccctgtttgcctgggtatcaccagtggatgctgcagaacagcaaagattgctgcctgtttcttcctctgaaagctttgtcccagaggggcacctgccagatgctagccagagctctcttgtatgaggtgtctgttggcccctactgggaggtgtctcccattcaggacacacaggggtcaggaacccacttgaggaggcagtctgtcccttatcagagctcgaacgctgtgttgggagatccgctgctctcttcagagctgccaggcagggatgtataagtctgctgaggctgtgcccccaaccgccccttcccccaggtgcttcgtcccagggaggtgagggttgtatctataagtcctgactggggctgctgcgtttttttcagagatgccctgcccagagaggagggaatctggagaggcagtctggcctcagtggccttgctaccactagggctttttcaagaatcctaccgtctgttcagtatagttcatgtgcctgctcttgtcaagtcagagtactaagttctaggatataaatatgattaagaaataatccctaccatcaagggtctaacagaagagagagaatacatccacacctaccaattattccatatttttctaaacagtgcttattttaaatatttagctctaatgtcaaatcatatgatttagaaaaaatttatctacatatattcaatcatgtgttaataagtacaatatttatgaaagtatttatgaaaatacagtaagcataatttttatgaaagtatttatgaaaatatgcccattgatttattttaaatactataaacattattttaaaatggcttataaaaatgctaatagtttaacaatatcagcataatactagaaaacaaaaaaagacttttaaaatgaaagaagcaggtttcttgtttgtttttattttgttattggattagggatttggttctggctagtctttctattattgtctaaatggtca

SEQ ID NO: 55022 - DNA, 1056 bp, Homo sapiens
tcctgacctcaggtgatcctcccgcctcggcctcccaaagtgctgggattacagacatgagccactgtgcctggccaagcttctgtttttataggaaaaggaaatgagacttacggaaaaattcattgtcttagatatgacattaaaggcacaagcagcagagaagaaaatagataagctgaacatcatcaaaatttaaaacttttgtgcttcaaagatcaccatcaagaaagtgaaaagacaacctagagaatggaagaaaaaaatcaaatcatttacctgataaggggcctgtatctagaatatataaagaactcttacaattcaattataaaaagataacccagttataaaatggataaaggatctgaatagactgttttccaaaaatgatataccagatggccagtggacatgagaaaatatgcccaacatcagtgatcaagggaatgcaaaccaaaatgacagtgagattccacttcacacttactaggatggctataataaaacagataataaaaatgttgcaaggatgtagaaaaattggaaccctcatacacagctgatagaaaggtaaaatggtacagccactttgaaaacagtatatagcaggtcctcaaatggtaaacatagagttgctatatgacctagcagttccactcctgggtatatacccaagtaacatgaaaacatgtctacactaagacatctgcataaatgttcatagcagcattattaataatatttagagagtagaaacaactcagatgtcaatcatctgatgactggataaataaaatgtggtatatccatatgatcaattatgaggcaataaaaggaatcaagtgctgacacatgccacaacatggatgataaatttttcaaaaatcagtcacagaaggccacatattgtatgatttcatttatatgtccagaatagataaatttatagagaaagaaagtagattagtggttccttggggttggaggggaagagaggggttttaagggatgacagctaagaggtgtgtggtttatttatggcatgataaaaat

SEQ ID NO: 55023 - DNA, 1036 bp, Homo sapiens
tgaatcatgaggtaagtgataaattttgatcttcacatattgctttcttccttcctctgtattgtaacaacactttattactggttataagactgacactttcatgctgaatatcttctgtgaattattggttataattaataacatttttgaaaattgtctttttagcaaggatcttctgttctaatattggggatttatttcccttaacctcattagcatgacctagaatgataaattaatattttcatggcaaatattttatttttttattgtggtgtaaaaactcttgatagtttgcatagatgtcaaagttactttaactaaactaaaattttgcttatacctatagaatagatttgtggtatttaccgttgcatgcagaaggaagtctttttactcttgtcttcttttaccgctcatgatggtattactgagattgcaaaaaaggatacttgcctaatatcagttaacagatttcttagtatctgaatgctttttaaactggtactaccttgaatctgtgagattcaactcacaaaattttcagttttaccaagtactatactgagtaatttaaagtatttagtatgttttgattagagagatatgttaatgtggctcgaggtcaattttcttatcctttattattttctgttttaatgataatatttggctaaacactaatggaataccatctttcttgttttgaattatttataaaataatgtttattcacagtgatgagatttgagagggtagtataacctttatttgtttaaaaagaagaagaaagagaaattttgaccactagatgaatttaaacctcacaggaaaaagtttagacgttaccctttcctggtattacacccttcagttaaagtctgtatgttttgggtaatacctcctggaggtagtcagtctaagagttaattctaaatgaagaagaaacaaaacataaacaaaaacagtaaatcttagatgtggctcagtttaatttgttttgaaatttggggaatcattcctgtaaatatca

SEQ ID NO: 55024 - DNA, 1127 bp, Homo sapiens
tacatgatatgagtatgatttgtttttagaagtttcaaatgagtcaccttgaagtcatggagaggctaccgcttaccacatttaccattctgattaatttttcttttggcaaagtacaaatcagtaataacctactaaagcctagtggttgctattgatatttcagtaaggtgatgttgattaatcagagtgattacttaccaagtgttacagatttactcaaattattgggttttcttctactatagtaatttcatatgcagtaataatttgcttaagacattttgcttcatatgtgcgttgaaaatatcaatgtagaacttaaaatttgtatccatgctgcaagttaatgtggttgcctctgtgaccgttgaacatagtttcataataaagcctggaaaaaaaaaagcattatttaaccttttaaacaatcaagagattgctttttaaattgtctctaaaaaggtttgattttttacgaaagagagagcacttgaatatatctttatgtaccaccgtgtctctttttgttagatttttcatctgtgggtataatataaaatattcttaaaatgaaagctttacgcttgtgtttgagactaagcaacttgcattgtgtcatgacccttctaataccacaaaccttctgtaatactactcccggagaaaaacccacatcctatgcataaccttagatttattttgaaatctctatgaaaaagaacagagagagattactaattgtttctgttacttcctttagaggtatgatacctatttgtaacccatgttgtaaatgttaatagccaggagtaaaatgttaaaatatattaagtagtggtttcctatcctaaagttaatatgtgaaaatttaataactaattataagtttcagtttgttatattagatatctggaaagaatgtaaaaaaaaaaaaaaagagagagagagagaaggcattggtacttccagtagcttatacttctaataccattggccagtacaatactagaaaataattgcaaatttaaataagccatctttttaaaaattttattcctattctgattttttccttctattttagatttctttgtattctttatgtaactgatgaaggtggatga

SEQ ID NO: 55025 - DNA, 1112 bp, Homo sapiens
gttattctaattttaaaacccacatgtgaagaacagattaagtttctaatttaaatgaagtattggtttcaattttgtagatatttatggggtacttactatgtgcctgtcactattctaaacactacctggattagtgaacaaaatacaaaaatccctttcctcattgagctttatggtagaatgagaagttagatgaaaaaaataaatcttatggtgtgaaatttagacagtggaagacaacggagaaaaatgtgagaatgagaagatattggtattagggatggaggactgttgctattttcacaatgtggtttataaaggttcattagaaggggatatttatttaaacaaacatttgaatcagatgaggcatgaagatttgggggaagaactacttactaggagaatagtacaggcaaagggcctgacataaggagcaagtctgaagtagagtctgggtggagtgagacatgggaattagaggaagtctgagaggtaaatagagccaattatgtaggacctaaaactttgacctttcccgactcagatggaaaatcattggagggttttgagcatgggagtgatcagttagatgacatttaagctgttaaaaagatttaattgaactgattcaaaaaatacttgtaagaattcatggtatttagtttggagggaaatgaggttaaaaaattaagtttcctcttattactggagttttccaccatctaaatgctatttattatttgaagactttatttttacattaatactaaatggagctatctctaaattccatggagtagaacaaaacatagaaaagtcaattttttcctcagttagttaaggaaaataggtgagaattaaacccaagccttctagtatttaacctgggattgagtttgtattttggttattataaagataagcatattgatttttgtaactatgttaaaagcttctgtgggctaagcacatctataaaattaacgccactttgttacaagtaatggaaagtttttcatttaaaagagtgtaggtctactcaaatccaacttttggtttttttcctggtacccagtaacatttacccattttgattagtttgccca

SEQ ID NO: 55026 - DNA, 1051 bp, Homo sapiens
taattattccaggatactaataataagagtaataatagctggcattactgaacacttggtacataccaggcagtgttctaagccatttgaggatattcacatatttaatcctcacaaaaatcataggagatattggttttggggttttttttgttgctatttttgttattgttttcaagacagggtctcacttcgtcatccaagctgtaatgcggtggcgcagtcacggctcattgtaacctcgacctcccaggctcaagagatcctcccacctgagcctccaagtagctgggactacaggcacatgccaccatgcccggctaatttttgtattttttttctgtagaggtggggtttcgccatgttccccagactggtattgatctcctgggctcaagcagtgcactcaccttgacctcccacagtgctgggattacagacatgagccaccaagcccagcaaaatattgttaatatcttcattttatagttgagaaaactgaggcatagagaaaattttaaaatgagattttgttgtttgtatgaaaacccacttttgaattttttccaggaataaaaggaatttcttttcttcagtatttcaacatactgtcatggtagttatataagttttcttaatagcatattgacagcttcctgtgaatttgcttattatacaactaaagttactattagttccctgttcattacttaaaatttttcagttgtttcccctagcgttggggacaaaattcaaactctggccctccttgtaagatccttcctgctcgaattgttgcctacttttctagctttatttcccagttaccccgacatatatatacccggtacttgaggcccagtataccagttaagaatccttcaaatctgtcatctcattttcctccatgtttttctccctcctcctttgatcttgctttttatttcaaaagtcagcttttctttttattattatactttaagttttagggtacgtgtgcacaacgtgcaggtttgttgcatatgtatacgtgtgccatgctggtgtgctg

SEQ ID NO: 55027 - DNA, 1002 bp, Homo sapiens
cctgtttcaaaaaatatatttattaaaaattaaaattaaaaatagaaaaaagcttatagaataaagatataaaaaaaattttatacacctgtacaatgtttgctaagctaaatgttataaaagagtcaaaaagtttaaaaaattggaagtttataaataaacttacagtaagttaatttattattgaaagaaaaaccattttttataatgttatagtatatttacaaattttcttcatttttaaagctgaataatattccattgtatgtatataccacattttttatctgttcattcattgatggacatttagggtgcttccatgtttgagctattgtgaataatgctgctatgaatacaggtgtacaaatttctgttcaggtccctgctttaacttcttttgagtacgtagaagtggaattgctggatcatatagtaattgtttaatttttttaagaaattgccataccattttccacagaacctacaccattttacatttctaccagcaatgcatgaggatttcattttttccgcatttgcaccaacacttgttaattttctgttgttgtttttataagtaccatcctaatgggtgtgaagtggtatctcattgtggttttgatttgcatttccctaatgatgagctatgttgggcatactttcatgtgcttatttcgcatttatatatcttctttggagaaatggctattcaggtcctttgcttaattgaaccaggttgtttgttgtttttgttgttgagttataggagttatttatatattctcagtatcactttcttatcatatatatggtttgcaaatattttctcccattatgtttgttgccttttctttgttgatagtgtttttatcacaaaagtttttaattttgctgaatcaacgtacctgggttttgttttgttttgttttttttggtggtgttgactgtgctccaagtccattttttagtgaaaatttatcatatttctatattatcaaa

SEQ ID NO: 55028 - DNA, 1050 bp, Homo sapiens
ctaaaattgcctgtctttcttctcaggtctctcttttctccaataaattctttttttttttttttttttttttttttttttgaagtagagactagagacagggtttcaacatgttggccaggctgatctcaaactcctgacctcaggtgatctgcccgccttggcctcccaaagtgctgggattacaggtgtgagagccactgcgcctggccaataaattctatcttaaatatacttaagatctgcaaaggtctttttatgaaacccttttattcagatgataatagtgcctgattaataggattttctagggattaaataaaataatgtgtggaaagtgttttatatatcacaggcctgaaataagcgctcagtaatattagctcttattttgatactgagagtatttgttgcaatataattttttatgctttagcgccacttagctcgtactactgggagatggaaagacccacccaagaaaaatgctatgaatgagttacaagatgaactgatgaccattcgacttagagaagctgaaacacaagcagaaataagagaaataaaacaaaggatgatggaaatggaaacacaggtatgatgggaaagcccagtatctttaaaaagtatcattagctgatcaagggtttgtgcacagattgtatcatccctagaacagagataaaaggtaaagatatgaagctgtatagaccgcagttttctagcccaaatgaagatggcaaaaaattattatattggatttcagagatttaatccttctttgacccattcaacaaagttcaaggaagtcaaattttatttgacttttttgggtaaaactcatagcattgccctgttgcatgacttgagaaggaacaccatgcagagcaaaatttctcaacctcaacacttttaacatttttggctagaagatactttgttttacggagctggtccatgcgttgtagatgtttagcagcatccctggcctctacccactagatgccagtaacggctctcctacctcaggttgcgatgaccaaaaatgtt

SEQ ID NO: 55029 - DNA, 1057 bp, Homo sapiens
catatcttttgaagaagatttctacatttctaaggacaaatacaattttgttattttggaatttagatggttcacattattgtaggtaccctgttttttttctattagattaaaatatatttttcagtaatctttacatgtcttctgtagtatataacagtactatcaaatagcaatataatgtgtcacatatgcaatttaagattttctaatacccacattaaaaggagcaaaaaaaggtaaaattaatatttttatttacctcagtatattcaaaatattattttaatgtaatcaatataaaaatcattgagatttttttatttcatattaattcttcaaaatccagtttgtattttatacttataacttgttttaatctgtattagccacatttcaagtgttcagtagccacatgtggctaattgctatcctatttattgtgcagtgtaggtctgtaaagtcagaaaaaattctttgtatctggatggatggacagataaaaggagatgtttatcttatatgaatcagatttgatcagcgtaataactagttaccaaaacccaataatgtggtcatctttatagatatcaaaggtgggcttttttactcattggagaagttaattggaggagatacattggaaatattgggtagatggaacttctcctatttagttgcccttaatgtaatataactgtattatgtggttgcattgtttttattgtatatacatgtttatactttcatgaaatttcagtgtatgtctgtaacctttagcataaatgcagttccaactacaacgaagattttgtgctacagctagagaaggaattggtccaagcccgactgagtgaagctgagtctcagtgtgcattaaaagagatgcaggataaagtcttggatatagagaaggtaagaaacctacacaaatgcagtcattcccaaattagaggggatatgtgatatttattaagtacttactgagcaatttaattgacttggtgtttttatacattagaagccttacatattagttactaagaggaaaaggaaa

SEQ ID NO: 55030 - DNA, 1071 bp, Homo sapiens
cccaacattactatagctttttgtacttgattggattagttggtttatgccaatcaagaattccattctcatatgggcctttgagtttgatgttttcttggggatcttctaatataaagtctttgcaaacaaacctgtgctacagttgccagggctttaagttgagggcaaaaaaattcttccagtacccacgaaataactgtgatctaattaaataaattatggcacatctagtttggatgtggtcattccaaaagaatgcctttttcctaattgataaaaggtaagtatttgctaagatgatgtgtctgttgcagatgcacttctcgtattgaaatattgtttcaatagtatcaaaattactagaagaaataatgtataatgcattgaattaaagtcctcatttgcacatctttttttggtaactggggcaggagagtaccatgtattaagcatctggttatttttaatagttttgatttgacatctgttttgttcctaacatattaaagagtaaaaataactgtgctttattcatgctagttcagtagaagattgttttttatgactttattttgaaattttgagttgccacattttctttactacataaattaaatgtgaagtgatagacaatttattttagaaagtattttataatgatgaattacatattgcttttgtacagaagcttttctatgggcactggcttaaaaatgacgacttaagtgtttgcatcaatattcatgttttatagagtaggaaagcaaatgggaaagttgcgtgcttccgtggttaatttctttgtgcagcatctgcgtcttctctacttccagcaattatttctatgtatatcttttttttttttttttcttgagacaagagtcttgctctgtcacctgggctggagtacagtggcatgatcttggcttactgcaacctccacctcccgggctcaagccattctcctgcctcacactccctagtagcggggattacaggcgtgtgccaccatgcccagctaatttttgtatttttagtagagacagggtttcaccacgttggccaggc

SEQ ID NO: 55031 - DNA, 1076 bp, Homo sapiens
agagtaaagagaactatctataatgatagttcaccaagaagacataacaatcttatttaagattgtatgtgtttaggaatgtatgtcacctaatatatgtatgctaacaggaacagtaacttgaactgatagaactgaaaggtagagtgaacaagttcaggtcttcgacatccctgtctcagtaattgatgaagcaagtaggtagcagaagacctgaacagtactatcatccaacctgccctgatagatatttatggaacactgtacctaataacagcagaatacatatcctttcaaacatacatggaagatttatgaagatagaacatattctgggccttaaaaggaactttatcaaatttgaagtaattgaaatcatacaaaggatcttctctgactctaatatcattcaattagaaattaataataggtatctggaaaatcccctaatatttggaaattaatacgtttttacccatgggtcaaagaggaagtctaaaaggaaattagaacatattttaattaaatgaaaatgaagacacaatatctaaaaatttgtgggacacatctaatgcagtgcttagtggaaaatgtattaagtgcttataatattaagtggaaaatgtattaagtgcttattaggcaagtcagtaagtctcaaaccaataatctaagctcccaccttaataaactagacatataaagaaattcaagctaaccaagcagaatggacaaataataaaaagtgtagaaatcagttaaattgaaaacaaaagtagagaaactttgtcaaaccaaaagctggcttcttgaaatgatcagtaaagttgacagatctgtgtccagactgatggaagaaacaaccaatgtcaggaatgacattaactttttacaggtgtggcccagttgtcttatttcatattctagatttgtctaattccttcctcgtggtgtcattgtatttcttgtcaactggactcagacatctagattatagatgatgttgtaaacttctttttgctttaaatcaggaaggcacatgatataaattgtgcccattattagtgatgctgagt

SEQ ID NO: 55032 - DNA, 1528 bp, Homo sapiens
cagttctacagcttgttcaaaaagtttatagacaatgcacttaattaaaaaaatcccaacacttctcaggccagctgacccctctttgtccacagctaagaatggtagcagactgttatattaccgtttgtagaaacaagacaagctgaagctaaatggctgaacattacaggggaaacaggactagcctcacagtgcacgctctaagctacgacccctccaaaaggcattgtcccccacaggctcagcgccaagaaacgagcaccaagagtttgtcttggttgttttgttctttttataaactatatatatgtacagttgataacaggatttctagccaataaccgtatagttaataccaccttacaaatgttttttaaaatgtcagaaatatctttaaatgctttgtcacaccaacagcaaagtgcatagagtgaggaaaacatgagattatcttttcgttttggggatgtttggaaatatgtacaactttgatacaatttcagagtgttccagacacacatgaccacttcaggtaaaccactgacaatttttagagcactctgagagactgcaatatgattgtgatcaaattctgtaattaaacctaatgagggcaacagacatttctcaaacaacagatgtgtcaatcatggccctcccctactctaaggtattcacaaggagacagatgaacagttttttattcatcatcaccttcttcttcctcttcctcctcctcctcctcttcctcacatcttctttgactacttcttccacctttttccaaggaactttaagcaggaccctttgcaccagacttgccgttagacttaaagtcagcaacatccttctcgtatttctccctcagcttcactgccttagtgatgcaaggctgcttttcactgacatttaagttatcccacacctcacacagcttttttgctacatctctaataaagatgccagggtttgtggatttgatcttggggtgaaattctgaacggtgcaggaagaatacagacatgtctcttttggagacatgaaggtccttcttcttgcctcacttaactggttcacaatcctgcaccttccaagcatagcatactttatctgcctttgtcatttcaccacatttaggattctctttgccagacactgtcttccacctctcagagcacttcttggaaaattctgcaaaattgacagagacctctgggtttctcttatgttcttctctgcatgtctgcacaaagaaggaataagcagacacctttccctctggtttcttgggatcacctttagccatcctgactaaattgcttcttccttcctggtcacctagcaagagggaaggtgaagggggcaggaagggtgcttggaggagaggtaggaggtcaataacattttttgagggggtggggggtatagaatttctccctgtcgcccaggctggagtgcagtggcgcaatcttagctcactgtaaactccacctcctgggttcaagtgattctcatgcctcagcct

SEQ ID NO: 55033 - DNA, 2672 bp, Homo sapiens
taccaaaagaggaagaggaaatatttgactgagtgcagtggctcacgcctatgatccccgcacttcgggaggctgagacaagaggattgcgtaaggccaggagttcaagattggcctgggtaacatagcaagactgtatctctacaaaaaattttaaaactagctacatgtggtggcacacacctgtagtcctagctgctcaggaggctgaagcagaaggaccaactccttgagccgaggagttggcagttacaatgagctacatgatgatgccattgcattctagcctgggtgacagagtgagaccctgtctctattttaaaaaaacaaaacaaacaaacaaaaaaatttgcttgttccaggtaatgaaaacccacttggaatttgtgtttggtatcttctggaaacacatgattttcaaccacctatccttgtttttatatatttttcttaaggtttaaaaataaaaacattcagtaaaaaatggttttaaactttaaatgtccattttaattagcaatgaaaagtagatggaatttgggtatatttgtttcttttttcctaattttatcacttttatttctttctcttatatttctatctgaatttttccttttgtaggaaagtgcttccttggcagatagattgatacaggtatagtttttgttttgttttagttttttaaaacatcttctctaacttctaaggaaagtcctaaacctcgaaattcatattttaatgcatgcaattttacatgcgtttttctagaaataattttttgggtggtatatgtgggtataaatttaattttttgtaacaaggtgttatcttggtttatttttgcacgttttaaagctaaccttattttttaaagtatttatttcaaaatggcaataagtggattctgtgaaattaactactattcattgaaaattttagtcctgcatgtacaactcagtaatattgcatgaattaaatttttattgactgaaagaattgttcttgtcaggtgaatttttcgtttagtttccgaaaatttgctggagcaataacaagctgctagctaatgattacgtaggctgttctattcgctgaggtgactttttttttttttttaacatgtcaaagtaaataactaaacctcacaaaggcagtctttcttgaatctatcctaaattgctttacacacacaaaaattatgtcctaagggacaagtgacaagagcccaggaggctgaggaaaactacctcataaaacgggagttggccaccatcaaacagcagagtgatgaggccagtgctaagctggagcaagctgaaaataccatcaggaagctccagcaccaacaacaatgggtaaggagtctggtagtgcttttctcatctttctcatcccccttcctttcaatcattttttttttcatagcacagattttgtgctgttgttttaaataattttgttttagactttgaacttttaaattatacaattttatgttctgtgatatttaggggtcttattgtggcctaaggactcctgttctaattttttttctgtctacatagttttgttagaaataggtaatattttctttccttacactgtgttttaagtaatgggaaataagcagtgtatgtcagaattgcttttaagtttttagaaatctgttttcataataggtatcattttgctaacagtaatttttaaatcccaacttcagctagtttttgttcattgtacagatgaaacattatccagcatgcagaatatatgcagttatctcatttaaagcttcgacagtgtggcaatttgtgtcttacgaaatactattgcttagacttcctacatcaagacattgaattatgggttaaggtgtatgcctatatttcaaagggagagaagttgcaaagatgaaaaagattaaccctttaaaaattatcttaattaacctagggtgtatttctaattatcttaatcaacctagggtgcgtactaaacagctactaattgtacatctagcctcaggtatcttttgcagcttagacattttccattggcaaattcagacaagggcgatcttaatcaggaatatgagggtaaaagaaaagccaactgtttatctttgaaaacatattatttcttgtttcagttttccatcctcaagtaggcgctagattgtaataagtaagcagaagaagttgtgttaatcctggaactctatgcagatctggaaggcaaatagagtgactgcaaagtaggacgttctttttattcaataaaattaagaaacagcatcgtcatctcggtacaaaaaaatcagaaaaccagaagcaaaaagaaaaattggcagttgaaagggtcataaacatctttttttttctgttattgaagattgctaagaaaaatgaataggagagtgacaaaataatactaaaaagaagggaactcatattttgctccacttttgtatgtaatgtcaataatatcaaagcattaaaaagaaaaaaacaattgtggatttatattaggaatttacctgaaataagttacttcaatgtgattttctaaagaaaacacaataagtattgtttgcatttagcataagctacagtcataatacattagaatcatgaattaaattttttacattgtttttcaaatattgagactta

SEQ ID NO: 55034 - DNA, 1042 bp, Homo sapiens
catagatcttgtcatatgtacaatccatttctgaaatttcaattaatcctgtttacttatcagatttctggccctctatttctttcacttccttattcgtgctctccccattctgctttatcaagatctctagattgaggtttaaaagccttcttctgatatgaacaactgtgcttcctctgcccttttgtttcctgtattcatgtatccaattgttattgcatagttactgagattgctgacagtaaattatgtttccagtggccttccatgtatatttatattgactttgattaattatctcattcctcacagtggttacttcaaaccttaccattcttcccaaactcccatcccctttttgctatatgtaactctcaccagattaccttattcctaattcagcagtcatttccaaacttcctaaacttgctgtcttccagcttgtagacttagctatgttctttttcttctctttttagaatacagtatttttttttcctttataatgctaattcagaatacgtgatgttactcatttccatctcttccaggtctttgctccattaattattccttctctatcttcaacctctctctctgttgtttcattttcttcaatctaagaagataattttgagttctgacttagaagcaacaaaacaaaaccttcctcaacatagcatttcattttccttttatgaagcttagctgtgaaggaaagaatagattttactcattagctacagatcacattctatttgctttttttcacttgggaaaattttcagacataacaaaaatagaataataaatatccattgcttattgtctgtatttaacaactgttaatattttgtcatatttatttttttcaaagtatttcaaagtaaatattgttaatattttgtcatatttatttttttcaaagtaaagctcagaaattgtgacacttcactctttaatacatcagtattcatgtccataaagtaatttgcctcatttaccacattgcttccaccacttaacagtagttccataa

SEQ ID NO: 55035 - DNA, 1050 bp, Homo sapiens
atttctgtagcatccatcaccatctgacatatatattagttgatttattccatgtcttgtctgtctccctccattagaaattcaggttccttgagaatagagattgtgtttattttgttcactggtgtatacccagagagagaaaagtatctggctgtaaatcagtattttgggttgaattaatgaatgaggcaagttgaggcagttggtttcagaggttgtaagatttgtttaacttctcattcttggtgatagaatgggagactagaactttctgattcttacctcattgctcttaacattgcagcacacagccactcaaacaatgtttgtggttggctgtgtacttagtttaaatatcattggtttatttgtgtatcagagaacattaacctatgttgtttttttttcttccaatgtagatgccagaagaagaagctttctgtgtatttgttaaattaatgcaagattatagacttcgtgaactttttaaaccaagtatggcagaattgggcctttgtatgtaccagtttgaatgtatgatacaggtaaaagtgcagtgttgataaaaaggcatattgcctttatattttttatatcttgttctgagtgccaactaagcaaatttaatgttaaaagcattaaagcacttgaagaagtaagtgttttaattacatgattgttttttggttggttaatgtacaatttgacccttcaaattaggtagatcacagtctaggacttgactccagttttcatattcaatccttaagcatttctgccaaatgtactatacaccccttacctaagcacatgaatttccttattatatcctattattgttacgtagtctaagctctcttacaggagctttatgatattacactgacatcagtccatttacttggagactgtctctttgagtcctctcctctgcctttttacttttattttatttttattttttgctagcccgtaattttttttcctgtaatgttttcttatgttgctagtttaagactcaagttatctagtgactgtatgaaggtg

SEQ ID NO: 55036 - DNA, 1050 bp, Homo sapiens
gcctccctagtagctgggattacatgcgcccgccactacgcccagctaatttttgtatttttagtagagacagggtttcactatgttggccaggctgatctcgaactcctggcctcaggtgatccgcctgcctctgcctcccaaagtgctgggattataggcatgagccactgtgcccagctcaattttacttgatttttaagccctgttacaaattcctttattttattttattttattttattttattttattttattttatgtctttagagctagcaagtttggattgggaaattgtcaaaataaaatttcatgtaataaaacatttgctttttaaatatgtataggataacatctataacaagcaagcaagagcttttctcaaaaataaatgttttttaatctgtctgtcttgccaattttaggttttttggagaaggaaggtataacttaccatgtattttgaacaacttttttttactttttaggcttactctttagtagatcgtgaggttggttactgtcaaggaagtgcttttatagttggattgttgcttatgcaggtaagttaatataagtattaaatgtccaatgaaattttttattaagttggattggagagtttaaaaagcatctttgttttattaaatgtaagtggatatgggtattttttcctaggcataatttgaatacaaatatttagtttgcattttaaaagattaaacatgttaaaataacatagtaatatcttaccaccaaatgaaatttcaacttcatgatagatacatttttactgtaatattctactaaagcttgaatctacagtagtttaaaatcttatttgttaacatttaatgaagagtaatctttttctaaccaaggaggaaataattaaagtgttggtaagaaaatcttatttatattgtacaacatctttagagatttatagagaatttaatttatcatggagctaaaagcttgttatgcatacctcactgcatgccctaaaatagtggtactcagccacttttaccccctagggatataa

SEQ ID NO: 55037 - DNA, 2172 bp, Homo sapiens
gggctctgccttacttttaagccttagacacattgtaaacgttttaggattggttatttcatagatttgttgtacctcttccaagtataagttcttttttcctgaagcctacccaaatacttttctcatcagatttcccctaatttgaatttttaatggagacgaagggaaattataatggggctagtagctcaaaaatttttaacgtaatttgctttttcaaattttcaaactgctataataggtgaaaaaaatatagcagtaattttattgatgtgaccaaaatttatttaaattatgtatattattaaaactatattttaaaacaatggttaaattgcagtaataaagctctaagtatcatcaatgcctcttctaatatcactgtccgattagatcttgaacagtttttaattatattttagattgttagaaacggatagtaagtctttaagatctgtaaatgggtcaagaagaaacagtggctcttctcttgtgtcgagttcatcagcctctagcaacctcagtcaccttgaagaagattcttggattctttggggaagaattgttaatgaatgggaagatgtacgcaaaaagaaggaaaagcaagttaaggtattcatgttctttgttgaagttcttattcttattccatagtgcgtcagacataacttaatagaggattgggaaaaaaaccccaaatacaacttccaagctatatattaaagaggtctgctttatttgttttcacttacttgtacccctaaaagttttaatttgtagacatcagttgttacagaggtcctgatcatatagaaatatataactgaaaattattttatttacttattattattttataaagactcactttgttgctcaggctggagtgcagtgatgcagtcatagctcactataacctcgaatttctgggcttaagctgttctcctgcctcaggctcctgagtagctatgattacaggtgtgtgtcaccacacctcgctaattttttattttcctttttgtagagatagggtcttgctttgttgcccaggctggtctcaaactcctggcctcaagcagtcttcctacctccgcctctccaagtgttgtgagctactacacccggcccgaaaattgttttagaaattaaattctctcattttattgattcagaaatgaagttgtgatatcctgcattcttgaataacagtattttcctttttttttttttttttgccttcaacagccctttgaatgttgggtactgtaccatcattcacagctctgcaggtttcaagtccattaccttaagaggtcacacactgaggtgaaatgatcattattaatcccctgaccagaagaggatacacccagggcccaatcttacccttgacttacagggttccctagtcttattataaagctagctttgtgagttacaaatttaatgatgtcttctacttcattccaaccccctaataagtcttccttggcttgcaagataggacacttaaataattcatttttgtaattttattttatttttaggaacttgttcataaagggataccccatcactttagagcaatagtttggcaacttttatgcagtgcacaaagtatgccaattaaggatcagtattcagaactcctgaaaatgacctcgccttgtgaaaaattgatccgaagggacattgctagaacttaccctgaacacaacttttttaaggaaaaagatagccttggacaggaggttttatttaatgtaatgaaggtaagttttatttattcattttttgaaatgaaatgaattcctggaaggttgaaattatacatttttcatgatgaagcatgacctcccaccacaataatcagttgctttggcagtgaaattggttttagcatcatttttgccttaattcttatgctacattactatctagtatagagaacttgttagaacatttactacgttatttagcattagttgatggaaatggaatagcttaaaagtcacatatcatagagggatcctcatgaaaaggaataattcaccatctgtgaagttcaaaacctgggatgtgggtttctcctatcatatctgtgttcctacagtgagcaaatttttctgctttctatggccagcactgttaagagcacttagcccttga

SEQ ID NO: 55038 - DNA, 1027 bp, Homo sapiens
acagcatatctttaatttgatatttttgctctttttcatttttgaaacatgctggttgatttttgtcactcctgatgggtctcagtttggaacactgttctgatttgttcatgctgcagaactgaaataaacagtttgcaaaagctggatattagggtattgttgctaaaacaggttttacctttacttcctcaaagagaatattctgatgatggttattaagtaaatcctaacagaattattaagttctcggtaatgaatacagtgtaactaaagtatatgcaacttttatttttgtccttaggtggcgacagacaaagttgcagaaaagctgagctctactctctcatgggtgaagaacacagtatcgcatacagtcagtcagatggccagtcaggtggcaagtccatctacttcattacataccacatcctcatctaccacactatcaacaccagccctttcaccatcttccccatcacagttgagtccagacgacttagaactcctggctaaactggaagaacagaataggtgagtgaggttgcttagcttttttctctccaattatacaaatccagccattcatatttacttacactagaatttttttttctattttttggtttcttatttatcaaagttatttacagaagtgttcatcttttttggggggagattggtcttaaaagagactaacattttcttctggctcaaatagctttagagatttgttttcttaatatagcaaattccctaaatccttcttgaattttatcaattttttaaaaagtaaatgaaactataactttataattttaaactctctgaacagtctcctttggtaaaagcataaaataatttaatccagtatagatatctgatttgtggtttagagtgcaaaatcttttcataaattattcatagaaagcaaaatatccttttctcctaatggtattaaatagaatagttttctgctctgctaggaatgcatattccggactccgtttgtttccttaccatgtta

SEQ ID NO: 55039 - DNA, 1028 bp, Homo sapiens
aattttttgtatttttttagtagagatggggtttcaccgtattagccaggatggtctcgatctcctgacttcgtgatctgcccgcctcggcctcccaaagtgctgggattacaggcgtgagccactgcgcccggcctattcattaattctttatgccaccttttttttttttttttttgagacagagtctcagtcttcgcccaggctggagtgctgtggcgcgatcttgcgtcactgcaacctccgcctcctgggttcaagcaattctcctgccttagcgtctcaagaagctgggattacaggtgtgtgccaccacacccagctaatttttttgtatttttagtagagacagagttttaccatgttggccaggctggtctcgaactcctgacctcaagtgatcctcccgcctcagcctcccagtgtgctgggattacaagcatgagccactgtgccccgcttcttttagccaacttttgttgtttagtgtatactagctgctgtgctcgtcattagggagggaagactagtaccctctcttattcagaacaggaaaaaagaaaaaaagatgcttttaggctccaggtcagctcccttctcagctgtgctgctaacctgcaatcctgacctcagtaatgatctcctgatatcttcagcattgtgttgctctctcccttttatttccttactttgtatcttttcagattagaacatatttttcttgtcatgacaaaggactctccaaaaattaatttcccctcatttatgcaaaataatacatatttaacaaaatttggaaaaagaagtataaataatattaaaaatcacaaagttaatgtcttatattgaattttattgtggtaattgcttttggcagtttctgttacttctgttctctttatagtttagccagagcaaactattaaaactcactttggtacttgtatgctcatgtttatagcagcatgattcccaagagtcaaaaggtggaaataacccaaatgttcctcagcatagagatgaatgca

SEQ ID NO: 55040 - DNA, 1027 bp, Homo sapiens
ctcagggttatggtgaagattaaataagataatgaatctaaagtcttgtcacagtgcctggctcataataaagcatatagtaaatgatggtggtagcagcagcagtaatgtgtcattgtgtacatgttttgtttcctgaaatttagctgtaaggcaggaaggatcagagagagatagaaatatgttatatgcctacagataatattaacttggagaaacatgccatatagacatctaagaaaagataattgtcgtgttaccattatttcctcttttttccctttttctgtaattcctactcttgtgtttttttatttcttctgaagccagtgctctgtgtatctttgcaacttccatctctctctgatagttgttagcttaaataagtgaaagacataacttgaaattcttctttttggatatgttttaaaacctatattccattttaatatcaagtattttggtaatacttataatatgcaagacattgcatgggcgtttattcccatttacagaattggaacaacaattcttataacctgttaaaagattgaagataggtattacatttgtactagtcttaaatcctactgtaataagatatttgtaccaaccttaaatcttactggaactaagccatttgtgatagcacacatctgtagtccaagctacttgggagactgagccgggagcattactagagcccaggagtttgagaccaacctgggcaatatagcaagacaccatttcttaaaaaaatcttactggaactggtgtgaatattatttttaactctccacatattaattcagttgtatatcaggttttttatgggctcagagtttttaactccttgaaaactccttaaagtgggagacataacgatgtatgcagatacaaattaatgaccttttatatttgcattgatacagcattttgaaatttgagcaaacattttaggatgtacttctcagtttgatatattgctatttattttggaggcaaataagaaaagaactgtggatgc

SEQ ID NO: 55041 - DNA, 1240 bp, Homo sapiens
tttattagagatggagtttcaccacgttggccaggttggtcttgaactcctgacctcaaatgatccacctgcctcagtctcccaaagtgctgggattacaggcgtgagccactatgctcaggcagggactaccctcttatatgtggtatccattgactgaaatgttcttatgcggtgcatgactgtattttacttttgtgtttgtatataaaattcaagatatcaatcagatgacatggggaatttttactatctctcatggtgttacgatagtccttcctcattggaagaatgtagattgattaattgttgttagaacctgttgattgtgaccccctaagtttgcttgcaaagtgtcatctcatttctcactaggtattgctactagcctggtatgtttattttgcatttttagctgtttacttcaagagagctttctctgcttgtactgtttgcagtttatccttttaagtggccaaaaccaatgtgggtttagtgccttgttcattgttctttgtgctcatccaactcacacagttaaactctctgaaaagtgttccctaaagttagttaaactggctattatctgggtttttgttgttgtttttgctatttagtgtcttgtaagtttgttatcaggactcctcttaagtaactgctagctcctttgttcttgaaagggaccttgatgagagataggaacaaaacttgctttattatggataatgctttttttgtttgttcataggaaagcgtaagcactgagatagaaggaaggatggggattttgtctgagttggtgctcaaatgattatttgctgttgtctttggcctgaatcttttgtatgtcagaaatgaatccagtatgctcataaattatgctagtgactttatcagaacagcgttagcagatactgtataaaagtgtagctttaatgattaattatataatatatttgaatgaaatacatgagaaaggtagaagaaaaatgtaatatcttcaggcataccagaaatcaggatagtttggaaaactgagcataatttgatggtgaaaagaccttgaagtaaattgaaaatgaattttggggataagtcatgaataatgtaatgtctttgaatacagtagtcctcccttatctgcagttttacttaactgtggtcaattacagtctgaaaatattaaatggaaaattccagaaataatttgtaagtttttttttgtttttttttttttgga

SEQ ID NO: 55042 - DNA, 1376 bp, Homo sapiens
tcaccatgttggccacgatggtcttgatctcttgacctcgtgttccacccgcctcagcctcccaaagtgttggggttacaggcgtgagccaccgtgcccggccttctttttcttttcttttcttttcttttttttttttttttttttttttaaggctgagtctcactctgttgcctaggctggatatattctcctgcctcagcctcccgagtagctgggattacaggcgtacatcaccacgcccggctaatttttttttttttgtatttttagtagaaacggggtttcaccgtgttggtcaggctggtctcgaactcctgacctcaaatgatctgcccgcctcggccttcgaaagtgctgggattacaggcgtgagccagcgcacctggcccaggtggtcttttttctgttctaaaatgataactacgatttccgagaactttgtgtcaaataaatcttagaactaagttattgaagtatagagaaaaagttcacaattctaaatgtgcaggtggtctgggtgcggtggctcacgcatgtgatcctagcattttgggaggcagaggcaggtggatcacttgagcccaggagtttgagaccagccagggcaacgtggcaaaaccccattttctactaaaaatacaaaaattagctgggtgtggttgtgtgcgctggtagtccgagctacccaggaggctgaggtgggaggatcaccaaagccggggaggtcgaagttgcagtgagccttgatcatgccactgcactccagcctgagcggcagagtgagaccgtctttcaaaaaaaacaaaaacaaaaaacatcgcaggtaatgaatttttactaagtgaaccaccaaagatcaagaaataggacattactagattggagtatgtacgtaggagtggcattgttggttttataggtacgtgggtgataaaactctagtattagaaattgttgaacattttcccaaagtggttctaccaattagcagggaatgttccggttaccccacatccttgctggtgcttgtcagttgaaattttttttgctagtctagtagaggtacagtaatatatcagtgtggtttcattttgcattttcctggtactgaggttgagtatcttttgttgaccatttatatttcctcttgtgaagtgcctgttaagtctttttgcccagttttcgttgatatgcttatttttctctcatttataatgctttattctggatatgagtcctttctaggatatatatgtattgcatttttatttttttcagtctgtattttgccttttcagtcttttaatggtgttttttttcatgcctggagattcttaatttgtgtgtgtgtgtgttttttgtttgtttgtttt

SEQ ID NO: 55043 - DNA, 1053 bp, Homo sapiens
gtgggccatcccatgtcttatcattattaattcaggtgcttacaaaaggctctttgagaactgttttaaaggttacccaaagaatcttgtgacaacccagctaaaatgatataaaatcagttttaacataactgaagtttttagattctgattccaaatgtcagatggtgacattttacctttctctgactttatgccaaatttagtttaagttttagcatctataattttcatttactgaacaaatatatatttaacaaatatgaaaatacaaccatgaaacaaacaaaatcaaatcctggacttaaggagctaatagtaaaaaattcaccaatataactacccaattacagtttcatgcgatgtgaaaggagtaagagaccaccatagggaggtcagaagatgcttctcagaggtggatactagagccgttgtcaaaggatgaggactgggagaactttctgggcacagagcaaagcatgagtaaaagctctgttgaggccaggaagccggtaaatagggaataaaagaggctagcgtggctggagcacagacagcagggtggaattggtctgagcagtgagaagaggtggagaggtgggcaaggcacctggccattcagggcttggttagttaggagggttttttctaagagaatgggaaagtgtttaagtggtttaggctgggaagtgacagggtcacactgttattttgaaaaagtcactctgcctgttgtgttgagattagagaggggataaagggaatatgggtaaaccacaagaagactaggtcagtaatccctccacccccactccccaggtgaaggtagcctagactagggtggtgatggaggaaataggagaggacagattcaaggaccatttgtaagggaaaaaccaatagaatttgctgacggatggaatataagaggggagaggtacattatcaaggatgtagcttagttttcttatacaaggattgagttgcaataaaattgttaattgaaatttctttaaataatggcacaacctaaagttatgcaaacatatgcct

SEQ ID NO: 55044 - DNA, 1186 bp, Homo sapiens
gagcttgttctttcccatagtcatggcagatctagtctccacctgtgcacaagtatcaagagataaacagaattgtgtgtctcttaataatgttctttcctaagatgatgtcagagtcttctaaagaatgcatacggtggaggtaaagtggtaaagtggtgaggttaaagctattctttccttttttttttttttgagacaggatcttgctctgttgcccagggtgcagtgcagtgcattggcgtgatgtcagctcactgcaacctccacctcctgggctcaagtgatcttcccaccttagcctccctagttgctgggactacaggtgcacgccaccatgccctgctaagttaaagctattcttataactccagtgcatggaggccatagctttttatttgagtacctttcagattcatattgtagaaagtaatgagcctagtaatgaatagctgtcactatttcattgtgagccttcatttaaaaaaaaaaaccaaaaaaaaaaaccagttttgaacattagtaggagttgaaatggagtgttatgtctcctttttctttaatagtgctaccaataggactttctgatgagtggaaatgttctatatttgtgctgtcagacagtagccactagccacatgtgctattattgagcacttgaactatgtgagtgtgactatgaaactgaacttttaagtttatttatttttgagacagggccccactctggcacacaggctggagtgcaggggtgtgatcttaactcactgcaacctccacctcttgggctcaagtgaccctcccacttcagtctccagaatagctacagttgtgccaacatacctagctaatttttttatttttatttttgtacagatagggtctgactatgttgctcaggctggcctcaaactcttggcctcaagtgatcctcctgtcttggcctcccaaagtgctgggattacaggcatgagccaccatgcctggcttaatttaagtttaaatgtaaatagtcacatgttgctagtatctctagtggttgctgtattggacagtgcaaacctagaatgtaactgagatggtctagttctctaaaaagctcccagggtgagggaggaatattgttcacagtgggtttgacttctctggtgagttccttctttgtaccttgggttgttttttgcct

SEQ ID NO: 55045 - DNA, 2584 bp, Homo sapiens
gcaagcagtcgacctcagcctagctggggaacgccagaatggaggggggctgcaggtcctcgggtcccactcgacctccgagtaccgagtacttcgtgggttttccaggagaatgtcggagccggcaagtcttagatttaggaagcttgtgcccgtgggctgagcaagtggcttttaagccaaaattgtcagtggagcttggaggccgaggggtccctgggccccggaagctcctttaacatggaatacgtgcctcctgcctcttcctctagagtccgtcgccggatgagtttttaattattggggtagggccccaagggtgggatgaaatgttgctttagctgatggggaacagtgctgttttagtgggggaattactgctgaatgtgctcttgcccagttaagctttgtggcaggtaatttaggcttttgaaaaacataacatgggaagcgagagaggtacgtagttgttatttgaggctaggttttcgaagtgggacatagcgtgttccgaacaaaccgacgtttggcatcactgattgctgtctggagcagtgcttcgcaaaagtttggcacaattaccggtgctggtccttgaagaaacaaatatggaaattgaaagcgtttaaaaccttttgaaagcaatataacaataattttatacctgttaaatgtaataaattggggcctgcattttgtatgtttcttttattccatatttctctaaggattcatttttattgttttatgaaactactagtctgtgacatggaaggtagaggaaaaagattcttgaccctagttgcttgtgaaacctgggattctacaagtgacagttgtctgtttactcttgaagttcaagtgttactttgttacatggttaatttatgtcaaaagtatcataggctaagacatcaaagttttaataacattcttttttctttaaggggtttgttaaagttgttaagaataaggcctactttaagagataccaagtgaaatttagaagacgacgaggtactgtcacctttttgtgtttacaatattaatctgctttgcagatgcagtggagtatcctttctacaattatttttttctttcagagggtaaaactgattattatgctcggaaacgcttggtgatacaagataaaaataaatacaacacacccaaatacaggatgatagttcgtgtgacaaacagagatatcatttgtcaggtaagttgtattctagacagtcccctttttttattgctagagaaattgtgcttgggaagcaaagcacatggtgtgtgtgttagaagggctgtctagcacctccaaaagcatccagtgaataatttttccttttagtaggtctagaattggaacctgggaacttggtactttaaaaaatgctcttggttgcgctcatgcctgtaatcccagcacttcgggaagattgcttgagcccaggagtttgagaccagcctgggcaatatagtgagagtttgtcttcacaaaaaatgtaagaaaattagctgggcatggcggggcgcacctgtagtcccagctactcagtgggaggattgtttgagccccgaggttgaggctgcagtgaagtgagatcacacccagccctccaacctaggtgacagagcaagacactgaaacctagtttatgtgtgtggggtggggagattagaagtaagtaagaagttcttgcccatcccaattccagtagaagaatagggtttgtcctgatttttcctatatggccttatatgccacttaaccactgaaaaggtagttgtgaattaaacagggctttaagattgttctgcttattctttgaaataggttttaataaaatgtacaaaggtggctcccgcatgaaagacctttaggaagtgtcagttttgctcttgtactaagagcattctcactggactctgaaagctagaatcctgggcttttacaactaggagaaattctgagagttaagatttattgatattttgcagcaggtaggcacacctgtttcctgggcaaatagtttgttgattgtgaaggcattgtcttcctccgtacccaagttcagataactaaacgttaggttcctgagactttgctgactttagttatgtttagttcaaaagatgattgaaatatttgggtattcctctttgactttttaagcacctctaatttactggtaacccagctaagagtcttaagcattttaagtgatgttcatctgtgtccatcaatgtttttttattcccttgaaaaataattaagatgtagtaagacagtgaaagcaacagattactaacctagtttctctcttactatagattgcttatgcccgtatagagggggatatgatagtctgcgcagcgtatgcacacgaactgccaaaatatggtgtgaaggttggcctgacaaattatgctgcagcatattgtactggcctgctgctggcccgcagggtatgtacaagatgattttaattgatgtagtttgtggctgattgcttggagagttttctgcaagatgtttgtacatggataagatagcttaagttgtgcttcaggagagtgc

SEQ ID NO: 55046 - DNA, 2705 bp, Homo sapiens
agggaacattgtaagtataagaatcaagtttatgcattctcattgattgctgcataagtcaagtgtggacatgtagcaaagatgcaaaagtcataaaacaaaattgtttcaagtgaaattgaatgttttaagttttttttttaaatagcatttaaaaattcatgagcaagtggatctggtgaaagggtgggtgtggaaggaaattttcttttccagatgtcagtggtccttacggttatgacataagctattttaattttagagcagtttgaataattgaaaccagcatttacattggtttcttgaatagcttctcaataggtttggcatggacaagatctatgaaggccaagtggaggtgactggtgatgaatacaatgtggaaagcattgatggtcagccaggtgccttcacctgctatttggatgcaggccttgccagaactaccactggcaataaagtttttggtgccctgaagggagctgtggatggaggcttgtctatccctcacaggtaagaatactatttaagaccttggtgcctggaccgtggtacttccctgtttttaactagttggactgtggagataaccgaattaaagtagctatcaattgaatgcctgctgtatgcctaggtaccatgcaggaggaacctagtagggcaggaaggaattatagcccattttataaattaagagtctgaggcccagagttatttgtcccaagtttttcgggccagttattgaaagagatgggattgaaaccactaccttttgcatatgacttaattcttattagaaatgagcaactccatcctctttccccatgcactttcttttttcaatcagaataaaaatgatttactgaattatgcaaaaaggtggatcctagaattttataagaagtttgaggaaaaggcttatgaaagatttctaaacctgcaactaggaataagattgtaggccattttgggaagttaagtaggttaatttgtagttccattggtttaatgatattttttgttgttgagtctgtgcatcttgatttattaacttcttaggaatattttagcatttggtgatttaaccaagaaatagtaatttttggtaagcctaaaatacaacccaactgaaattttgcttttatgatgtggaggtgggtggggggagttagttgcaagtacaccaagagcattctcacttgacaatttcattaactgtgatcttggacaaatcacttattcccatgtacccactgaaaattaaaggatttagagtataagttttgaaactccttcctgtgctgatgtgctggatgactaattttgtagtggtggaaagccttggtaatggcttttaaaggtttttgtagcatgaatttcttttctgtcctggaattcagagatgagctgctgaatgatgatatcccactaactgagcagtcagtagttggtcctttggttgcatatgatgcgataattgtttcaagacgggactgatggcagctactaaagtaaattcttactagtaaactaagttaagtgagtctatactaaaatatgaataactttattttagtaccaaacgattccctggttatgattctgaaagcaaggaatttaatgcagaagtacatcggaagcacatcatgggccagaatgttgcagattacatgcgctacttaatggaagaagatgaagatgcttacaagaaacagttctctcaatacataaagaacagcgtaactccagacatggtaaaacatttacctaaaaatgcctatattggttaatttatggaaataggtttattacttgttttgggggcaggtaacattcttatataggtgtgtttcttgacaacatgagctagacttgtcaacattcttttagtaatcttttagatgctcaagtgtgggagacttcaagcatctgaagatttggctaccttttatgctttggctgttctgtatttgtagatgtcatttctgtaatcatagttgtaatctgctttgttggataagaggtgctagataataaacttcacttattttgataccatctgggaggaaagctcttcatagcatatgtgtgctatattctggactttcccattatctcagacatgtacacaggaaaagagatttgatcactgggtctgcgtgatgttgtagaaatgaggggagccatgtttgcaagaatgagtcccaaagtgctgggcttacagatgagagccattcctgacccaggttctttttcgttagtgtgtagtagcttctattttggcatagctattggttaggaaaatttttaaaaacagtagttgggaaatgaccactttctgttatttctatgctttggacacagtgtaaaggctgaataaacaaatagcttgagtttctgagttaggaaaaggagtagttttttatcaataatgtaggtgcatgttaatttttactgcgttatatttctttgttacttatgacttcatcctggtaaagaggtcatttacttttggattatgattctactagtcttgcaaaatttacttcctaacctatatctttatgtagtcatgtcatacttgctcagaacttttcagactcccagtttgtgctttcagatgtttacttcctaatgctttcctgtatatgtgccttccttcagctagactactttttggctaatgtatttttctagctggctca

SEQ ID NO: 55047 - DNA, 2252 bp, Homo sapiens
tgcagctttttttttttttttttttcagtgagttttagaacaaaattgccctggcggggcatggtggctcacgcctgtaatccccggacttgggaggccgtggtgggcagatcacctgatgtcaggagttcgagaccagcctggccaatatggtgaaaccctgtctctgctaaaaatacaaaaattagctgggcatggtggctcactcctgtaatcccagcgactcgggaggctgaggcagaagaattgcttgaaccctggaggtggaggttgcactgagctgggatcgcgctactgcactccagcctgggcaacagagcgagacttcatgtcaaaaaacaaaaaattgcccaataaaatatctgatcggttggcttttcaggaaaacttctgacatctttctggtctagaggccttatattaccactagatactagggatagattggtggtagtgaaagacagaagagaggtccttggtacataatgctgggaattacttttaaaggcctgtgagataaagatggaaaacaaaagtctagggattgtgggatgacagatgaatttgcttgttggcctgtgtccagtccttggtctcagttaagctatgtcagtgttgtgactcttggtcccatacgttcatcatcttaatatcttaatacttttggcacttgttcttgaatgaaagaatctaggtcagacagtatttaaaatgagaagcgcaatatttgtttctgcagacaaaaatttgatttagagtgactcaagaagtgtggctgaatttctcagaagtacatgcagatttttctttttgttttcttactttttttttttgaggcaggatcttgttctgtttcctgggctggggtgcaatggcacaattatagctcattgcaacttcagacttctgggctcaagcaattctcccacctcagcctctcgaggtagctggggttataggtgtgcaccaccatgccctgctaattttttttttttttttttaatttttggtagagatgaggtctcattctgtcatctaggctggggtccagtgagctgtgattgtgccactgcagccttgacctcctggactcacgtgtagtcctgtagctgggactacaggtgcatgccaccattaataattgccacctggctaattagtttttttatggagacaggtctcactgtgttgccttagctggtctcaaactcctgggctgaagtgatcctcccacttcagactcccaaagtgcttgagattacaggcatgaaccaccacacctggcctgatttttttcttgagtaagatggagttctgtagtgataattcacattgcataaggtgaaaattgggaatttgttaggaaaaggtgagttacatttagaagttaaagtgtttaccaacattgatttagtttagttccttttgagaatctggcttagaaggacaagataagttatggttgcattaatatagtagggcacatgaaatgaaaccaagtactgtttgctttcctttgtttcagatggaggagatgtataagaaagctcatgctgctatacgagagaatccagtctatgaaaagaagcccaagaaagaagttaaaaagaagaggtatgtcgtctttttttttgtcttttcaagaaaacaggttgggaatggttcccacgtggggcagactgttggtgtaattgtgcaaactcgatcactagctctgcgtgatgtggcagaagcgaagggaaccaggtttgcaaaagtaactgtggtgatggaaatgtgttagcctcagacactactgaggtggttctttctatcctagtacagtctaagtactggttactgcatttttttattggctgacaagttgctttttgttgatctttcatgttttgatctttaaatggaatagaaagtaatacttaatgaacatgtaagcataaagtgatgtgatggcccacaaatacaatgtatagtaattaaatcaatgtatttaacatattcacctcaaatacttaacactttgtggcaacaacatttgaaatttattctcttaattgtgaaatgtacgatattctatattcatcatgctgtgcaatagaactaaaaacaaaatcatactcctcctgttggagattttatacttgactatcatctgcccattctttgcacccaccagcctctgtaaccaccattctgctctctgcttctgtgagttccattgttttagattctatatgaatatgaagtatttg

SEQ ID NO: 55048 - DNA, 2101 bp, Homo sapiens
gcaatgaacatgggagtgccactctcttggacaaactgatttcaaaacatttgggcaaatacctagaagtggtattactgaatctaacatgtcttctatttgacttttggccctatggtagtaggacatcacagaagttggggtttgggaaagttagcttaagatcatacataagtaaatgtatttgaacttggattatttaaccttctgattgcaaagtcttaaatattctctatcaaaattaaattttattaaaattttaaattaaatattctattctcttcagttatagtttaaaaaatatatattcctatcttttgtaggtggaaccgtcccaaaatgtcccttgctcagaagaaggatcgggtagctcaaaagaaggcaagcttcctcagagctcaggagcgggctgctgagagctaaacccagcaattttctatgattttttcagatatagataataaacttatgaacagcaactatttctgtgttaagctcttattcttatgaaccttataggaaataccctgaaatattttggaaaagcaaaggagttgacaggtttttttctccaagaaaacaagtgtaactaactttttaagaaaaaaagttgttatttcttgggcttctgttttacctgacaggagtcattatcccttatgttgtatgatgaacagctctccctaaaaatttggcaagcaacagaccaaccatcagtgggaaatatttcttccatccatttattataaccagatgatgaatgggaaaagtaccttaaagtaaacaaaactggtgctaatccatggcgttgaaggaaagttttgagagaaagctgtccagtgatggtcacatagatttttaacatgttccactttaggtaggcgaaacctttgagcagaaaatagtggttcttttctccaaaaggtgtttaattttatggagatgttgaaaggtacatgccaaatctgagtatacgtgtgaaaataatatgaaagaggagcaaatactaaaccttgtatatcaagtttacatggggaaaaaaacattagataaataaatacatttacatgcctctttaagaaatagccctttggcccacaggatatactgtttgaaaatggaaagttattactaaaaagtctgctataatttattttagtcttgcacttacagtcccactttcacatagttcaaaatcaggatatgtggatcttgattgggccttaagatgtcagttttgaagggctcagtcagctgcgtgatactaagatgggccctttgaatctttaggaaagttcatccatttttagtcaataaaattggtgtactgtcaagtataagatttcttgaagtaagccacttgaaccattgtgaagctacacataacttgatgtctgaatgaggttaaaaatgggtgtataagtctttaatacagtaaaccatgctattaacccaacatctgttttataaagaagcaagtttaacctgctttgcagtcttaatttctgttaatgtgcaaactttaccatgctaagacattagtaaatttataaattttcttgttgaacagcagcttcaatgcaaacacaatgcttccagcattggtattttggctaaggtaaatctacaaatcactcactgttgatgtttatggaatgaagcttttcacagcattggtttttaaagtcagtcaaaatagttacacaatgaatgtacttcggagatgtaacagggcttctaaaagggcaggaatgacatcttggggacctgttgatcctacacctgccattacttcagtgatcacatactgatggcttctcaggcctggggggaaggagttttgtgtaactggccggaatttgaagccatttttttttaatgctcaaaattgttctttaaaagtggcaggtttcttaaaatggtaattatgtccaaatgaactaagagtcattagtgtaggaaattttcttccacaataatgtttttaggttatttagtatcaaagaatgttccatttccatttgatttgctgtgactttgagagcaatacaagaataaagctgcttttctaattcttcacgaatttcacttggagcaccac

SEQ ID NO: 55049 - DNA, 1720 bp, Homo sapiens
aataatgcccgtaaagaaacttagtatgttgcatgggaggtatttttcattccttctgtgtaactagccaaattcttgacaggcaaaattgggtgaccaaggaaacctctctgaactggttaatctcatcttgacggtggctgatggagacaaagatggccaggtttccttgggagaagcaaagtcggcatgggcacttcttcaactgaatgaatttcttctcatggtgatacttcaagataaagaacatacccccaaattaatgggattctgtggtgacctctatgtgatggaaagtgttgaatatacctctctttatggaataagccttccttgggtcattgaactttttattccatctgggttcagaagaagcatggatcagctgttcacaccatcatggccaagaaaggccaaaatagccataggacttctagaatttgtggaagatgttttccatggcccctacggaaatttcctcatgtgcgatactagtgccaaaaacctaggatataatgataagtatgatttgaaaatggtggatatgagaaaaattgtgccagagacaaacctgaaagaacttattaaggatcgtcactgtgagtctgatttggactgtgtctatggcacagattgtagaactagctgtgatcagagtacaatgaagtgtacttcagaagtgatacaaccaaacttggcaaaagcttgtcagttactcaaagactacctactgcgtggtgctccaagtgaaattcgtgaagaattagaaaagcagctttattcttgtattgctctcaaagtcacagcaaatcaaatggaaatggaacattctttgatactaaataacctaaaaacattattgtggaagaaaatttcctacactaatgactcttagttcatttggacataattaccattttaagaaacctgccacttttaaagaacaattttgagcattaaaaaaaaatggcttcaaattccggccagttacacaaaactccttccccccaggcctgagaagccatcagtatgtgatcactgaagtaatggcaggtgtaggatcaacaggtccccaagatgtcattcctgcccttttagaagccctgttacatctccgaagtacattcattgtgtaactattttgactgactttaaaaaccaatgctgtgaaaagcttcattccataaacatcaacagtgagtgatttgtagatttaccttagccaaaataccaatgctggaagcattgtgtttgcattgaagctgctgttcaacaagaaaatttataaatttactaatgtcttagcatggtaaagtttgcacattaacagaaattaagactgcaaagcaggttaaacttgcttctttataaaacagatgttgggttaatagcatggtttactgtattaaagacttatacacccatttttaacctcattcagacatcaagttatgtgtagcttcacaatggttcaagtggcttacttcaagaaatcttatacttgacagtacaccaattttattgactaaaaatggatgaactttcctaaagattcaaagggcccatcttagtatcacgcagctgactgagcccttcaaaactgacatcttaaggcccaatcaagatccacatatcctgattttgaactatgtgaaagtgggactgtaagtgcaagactaaaataaattatagcagactttttagtaataactttccattt

SEQ ID NO: 55050 - DNA, 1037 bp, Homo sapiens
aggctaatataagataaaatgctaatgtcatacaaatttagctctttcaaccccacagtttttgttttcattttattgtgtaactgtaagtttctcaaacacattttgggcctgataatgctttgctgtggggggctacattgtacattgcaggatgtttagcagcatctctggctgctaccccacaagatttcagtagcagcctccagttgggaaaccaaacatgtctccagacattgccaagtgtcccctgtggggcaaaactaagtccatttgagaatcactgccatagtgtatttacaaaaattcttatcatgcttttcaggaacaaaattaggaaaaaagcaacataccattactagctaggcacacaatctgccgaacaaaaaactgctgggcagtcattgtgaatagttcagcataaataaaaaggtcagactacatttcttaatcaaagactacattatctaggtaattggtacagaacagaccactagaaacattttagtgagtggcacacagggaaattaaattggttaatagctacagatgtaatttatggctctttcttcaatcattatttttaaatgtgaggctgcaggatctgcagatattaaaggacgcatgaaggtccttttactactttgtgttacccccaaatcacagcaattctcaatggcatgctgaaagaaaaaggtgtctcactccttttatcattttgtctacaacaggtgatgcccagtgccctgctgggaacatcatcaatctaacttcctctcaaaaatgtttggcattctttgtcatgacaagtaggcatcgggcagtccagttcatagggtttttctccatttaaacatatgccagaggaagtagaaaaacgtagctatttgataggtagagaaaagaaaaatatttaaatattgtcacagaaccattatcacaccttaaaaaactaaaataatcctttactatcatcaagtatactgtcattcttaaaattttcaattgtcttataaatgtcattttttacaggtttt

SEQ ID NO: 55051 - DNA, 1108 bp, Homo sapiens
gaaagctaacacctcatcttggtgacttgattttaaaaaaggaagctaacatgttttggcatgaataagatagctgtaaataatggcctgattaactctgttatctttttttttctctctttttctttttcttggtcttactctgtcactcaggctgctcactgcagccccgacctcctgggtttaagcaattctcctgccttagcttcctgagtacctgggtatacagatgcatgccaccatgcctagctaattttttttttttatttcatagagacagggtcttgctgtgttgcacaggctggtctcaaactcctggactcaagtgatcctccttcctcgccctcccaaagtgctgggattgtaggcgtgagccactgtgcctggcctctatggcttatatatatagatacatgatgttgtggctggtagtctaatgtattaggtatagctccatcagggaaaaagaagtgcatattttagattattaaatctggcctctgacttttagttttttataaccacttgggttttggagaaaatttgagtgagaatgttggactctaagctctagatctttggactcatcaagccttggataagagggtatgtgggtcttgaaagtgatctaatatgttttttataggtatctaacattctatagtattttgaaaattacacctatatattcatataacactttagttctctgcattttcccctttagttctgagggaattttttggacctataatgagagatcttcttttaaaattacattaatgtttggcatatatattatatatatgttatttgtaagttatgaatataatatttgtaagttatgaatcatataaaaaactaacgcccacaaacctatcacaactttagtgttaagttagtctgtgttagtaagtgctggggatggggcagcaacttaaacattctcgtaacaagtccacttctcttcctaataagtatccttatatcgatacatttcattccttatttttaaaatgtgtagtgttgtgattaaaacaaattgaaaccaatgacaacaaatgttggtaaggatgtggagaaactggatcactcatacattgctgtt

SEQ ID NO: 55052 - DNA, 1418 bp, Homo sapiens
gagtccctaaattctgtttcagttgaagccaattagagatagactttccatggactaataacgaaaagagtctcaagtaatatgctggagattgtagtttcgtttttgttttgttttgttttgtttcgaaatattccatcatttctgtgtaacactaagcctgatggttggatttgagtttagcagacctgccccagatggaagcctgttaagacactgggaattagattagaagttatgctcatcaactatgcagctgtagattagagcagacgattccactagtacatatgttgacagaatggggccagtggtggttcatatacctgtttgttgtcaaataccaggtctagatgttttcctcatcctcaaatgagagatcacatagcaatatgggacttataaaactttcagaacaaagggaacatcattatgaagatttagaggaagagcaactctctgaaaattatttattatagaaatgtaagaaattttgaaacttttctagcatccttagttgattcaggaagatatagcctctgtggaactgaagtataaaagtataaggaacaggctgagtgaggtggctcatgcctgtaatcctagcactttgggaggccaaggcaggcagtaacaaggtcaggagttcgagaccagcctggccaatatggtgaaatcccgtctctactaaaaatacaaaaattacccaggcgtggtggtgggcgcctatagtcccagctactcggaaggctgaggcagcagaatcacttgaacccaggaggcagaggttgcagtgagccgagatcgtgccactgcaccccagcctgggcaacagagtgagactccatctcaaaaaaacaaaaacaaacatacatacacaaaaagtataaggagcaaataggctgagatgaaaagggaacaataagcatggaaagctacaggtaaactggacatgaaatagcagtgaagatataaactgaagacagtgttaaaagcaggattcaccctgaggtgtactgaagcaatgatgtggaaaacagatttgagaaattttctcagaatgcagaggaaaaaaaaaaaaggagatgaaaactgtgagggagatggtagctatggatgacagacttttctacagcaccagtgccagaacttgtgagccaaagttttcaggggaaaaggttgtgactagagagtgttgtactggctgcattttgtttcattctcgaaggttacagacattcatgtatgccagggttcaaaatatgctgtgcacatagccttcttggagaactaaaacaaatgaacaaagttttaattgactgaaagacaaatcaaaatgaacttaagaataggatttatgttactaaacaccttcagacttccagaggactgccagcaagtatagggccctcccgagt

SEQ ID NO: 55053 - DNA, 1004 bp, Homo sapiens
gagttcaagatcaatctggccaacatagcgagatgccatctcttgaaaaaaaaaaaaaaaaagacatggagaggactgctcccaaagagaaaggcattactgctgtgttagtaaaagaaaaaagtccttcaaagtttagttgataatgatatggttgactgtgagagaactggaacttctaattattatcagtcttttccaagtaaaattcttcatgcaagaacgtataaattggaggttctgaaatctcagttgtttcagggaagccaaaagcatgcaaacttacagaaaagcatcagaaaaactaaaattggccaacatgagatgaaggagtgaaccgtgttagccaaagagcattcttcactcttggatcaaaggcagaagttgaaaaatgcaaataatgtgacccgcaagttgttgaagaaatacatcaggcaaataaagtacttgctaacagatagactgataacatatttgcaataaaatcttgggccaaaagaaaatttgggtttgaagaaaataaaattgataaaactttcggaattccagaagactctgactacatagattaaaatataccagggtggtaaagaatctacgagctcgcaaatatgtaaatttttaaatattatccaactaggctgggcacagtggctcatgcctgtaatcccagcactttgggaggccgaggcgggcagataacttgaggtcaggagttcgagaccagtctgaccaacgtggtgaaaccccatctctaccaaacatacaaaaattagccaggtgtggtggcacatgcctgtagtcctagctactcgggaggctgaggtaggataatcacttaaacctgcgaggcagaggttgcagtgagctgagatcacgccactgcactccagcctgggcaacacagcgagactctgtctcaaaaaaaaaaattaaaaattttaaaaatcttatccaactaaatgtactgaactgtcttttacctgtaacagtgtttatcattt

SEQ ID NO: 55054 - DNA, 1048 bp, Homo sapiens
ccaacatattttcctttttggaattctttttgctctattaaagaggtttttaataaattaatttcatcaggcagttttaattctgtttactattcataagcatgggaactgattaatattcggggtttccctttttctatccaagtccctttctaaccattaggtcatgacagtttgccaagcaaaaaatcaaaagggctactgcaaaacacattactactgagatttgcctgaaatgtttgaatagtgttaaatggtgccatggacactgcagataccactgcttttcttatgattcttaattttaggattaagacatcatgcgactcatctattgccaggaactttagttattaggttcccataaacccagagaatcctatttctcttcttggtgatatataaaacagaactttaggtgcccacaaaaccatggcttcttcactcacttttcccctacaaaatgagttcaaaagaaaggcgaatgcaaagtatatattctgccaggcattatgccatttattttatatatgaagtctcacataatcctcacaataatctcattgtgcatatttgacaaatgagaaaattgaggcttggagtagttagtaacttaaccaaaatcacacaactggcaagttggcagggtgagatccaaacatagacctgcctaacttcaaggtctgggctattctactagatacagcactcagaaaaagacaagggttccttatgtcagctgggcaagaagtgatcagtaaatattttatccaggtgcccataaaaattagaggccaatgcaaaggaaggaattacaaattataaacaagatcaatagaaattagggagatacagatttcacaggtcatggcagaaactaggtgagctctgggggtgggaggtggcgtttgtaacaggctagggaggagcatgtgggcagagaatgaggtcctgtcaggacatagtcagagaactgtctgttcatcccatcctgctgcctttaaatgggtgtggcctgcctgtgcaacaccttccaaagaagtgtatg

SEQ ID NO: 55055 - DNA, 3125 bp, Homo sapiens
ttctccaagttgatcaggttggtctcgaattcccgacctcaggtgatctgcctgtctcggcctcccaaagtgctggaattacaggtgtgagccaccgcgcccggctgcatctgctttttttaagtcaaaattttcctcagccaacgtatgaaggtcacttaagacgaatttatgagagacgatgatgagaattgaaataaagtgaaacctgaaaggtagtaggtaagtagatacagtgagggtacagtaagaagacagacttaaaagattaggactattattcaggagaagcagaggagtggaagggtatgaccacaatatttaaagtattgaatggtattggataaaacgaatatgcttatttgccaaattctgagatcacaggctgagggaaccccttttgaagtatgagccaaatgagcttagaccacaaaaggtactttttcagagacagaaaaaatatggtgttcactatccctgtggcataatatgggacaaaaatataaaatggctttaaaaatattttgacgaaattataaataaagattccacacgtggctactaagaggagctgggttgtatctaggtgtaagttaaagagacaagcatacaatctcacagcttgtcagttgggacccctgtaggcagcagaatctgggcaggctaagggtctgcactaataaacaattctgttttcttaaaccattttgcaggggactattctcagatttcattacaactaggaaggactgcaaagcgggtaaacagaaaacaacctttcatcgttaggaaaaaaatcgtctgaaagtctttcataaaagcagctcctgataaggagtttgggactggacagtgaatcgctgaataaaatttaatctcgacatcctgggtcttctcccctctgaaggaaattctaacagcaggccttaggatgaaagtagaggaaacgtgcttcagttaaggttttctccagggaaaagaaatcggcccagcaagatgcacagagcaccgttacgaccacgcacaccgaaggtcgcacacgacccttttcctgtataacagtgccagcctgccgacgatcaggagcgcagctttcactattgtgttagccccggcggcggaaggactgagcctcactgcaacgttaaagagtccttctttgttcagccccagtcggggacgcagggcgcggtgttcctccgcgctcgccgcgcagtccctgcccccccgcggctttggagagctgccattcggcaccggagtcgctccgcgctcccagaatgcaccggcagtccgcgggaaaccaaaatggcgaggggctgtattgaagtgggctgtgtttgaggccggtgtaagaacgctcattctacccccaacccttgtctccaaggacctcggtttgtgcgtgcatatgtgccgggtacccggtggggcgggtgcccagtaagtgctcggactcgcaggggaagcgcccacggggacggattggttgttttttcctgtatgaagcggttggcaccactgaagtgaccgaatgaggtgagagaccttggcctgggaaccgactcttccggaggagatgggggttgggggaaggaggaagaaaggaagcaagtataaaagggaaagatggaggaccaaggtgggggtgggggctcctgtatgtgggtgcctttgcatttatgtgtatattgaaaagaatggatgaagaggagtagtcagttgagtgttgggagaaaatagggactaaaggagcgaggaggtcgttgggggagtctgttggaggaacaagatgaaacgttgagacggggaagctgtgtttggagggcaggaaggaacctgggggcgggagacggttggaggggcaggatgaacctggtgacgagggggtggggagccgagaggaggagccgttgggaaatgggggctgagggaaatgtggggagcagagtggagggctgcctgggaccttagcagtgcgcaaagggaagtagcagcttggaatcggagggtggaattgtatggaattggagtaaagggggtcgagtgtaagtgctggtaaggataaggggaacacactgaagtggaggttggaagcacaacctgaaagcttaaagggaagcggtgggagggaaagtgagatgggggaaagctaggtagcttatatttggagctcaccaaaaatatgaggcttttcttgtgtttaattaaacctaactcatataatctacgtctaggatgtagatttgtattgtattcatttttacaactgaggtaattacggctcaaggaattttaaccaatttgccaagatttcttaacatatttcggtagtgccagaactctaactctgtgttttacaatctggtgtccttggttgctagaatttttctttggaagcaattagagggaacagatggatttatcggggtaatctgactaacagcaagggtttgtgaacaatgggaaaaggcttatggaatgttactctattctttaaaacatttaactttggttaaagatagaaaccatgtaacactaacttaaatgtgaaaacctagctaggcctgtgtgtaatacataggaaggcaccatgtgaggtcagtacagagctagaaatatgtaaatagtacctgatttaatttgacttcagaacctccggtagtaatagtagttactttctccttcagatggattccatgtgaccctcctgtatacctagcctacaagctggtttcaatttccatggtttcattctctcttgggaattccttttttttttttttttgtcagtaaatttcaaagatagttgtatgtagaagtagttaatgtggataaaatgtaattaaattcacaataacctttttaagatttgaaaatgctttaaagggagttgttttgactgatggctttaagtgccctatagtttagttataacttgagagggaatacaaaatgacttgttttttcagattcctaaatataaaaatgtatttgaattcacattttaaaattagttcacctgcagttttttaaagtgctaaaaatgttctaaatatttgaattaagaacacacctgcttcctgatactacatttataatgttagtgggtattaacggaaatg

SEQ ID NO: 55056 - DNA, 2517 bp, Homo sapiens
gctgattctgagccactagtagcaacccctgaccatgggtttcagcaaggtgagggatgagaggatgacatttacagatggtgagagggggatgtttgtctatattgtaaacagatggacactacccacctatacccagttgtccagccgctcaggtaaagaatgtagagagggtttttacattgataaggtcctgaaaaagacctccatattttggcagagtttatcagtctaagcgttgcctccctacctgatcacactaaggcaaagctgaactctctacaaatcctgcatcatgtgtgaagagatcccatgtggatttatataacctcaatcttaactgtcactggacaactaagggccactaaatagctgaggaaagcctgctgcatcaaaggagagtctaaaataaacagaaaaacaaatgaaaggatttaccaagggctggacagtatgattgaaagaagaccttatgcctagacacatcattatgaaattttaagacattaaggataaatgaagatcctagaaactttctgaggaaaaaatggtaacctataaaggagtaaaagtcagagtggcatcagatttttcattatgaatgctgagtgtggtagaggaatagtatcaaacttccgagggaagttttcaacattcaatattttcaacattaaattctgtatctgggaaagtattggtcaattgtgagggtgggattgaaatagatatgcaaggtttatacagccttctgttgtaagccactgctccagcaaaagaatatgggatctagaaagcagagtgataaggggaacttccaagatgacaagagcaaggcttagaggatagtcattctagattggcacaggaacatggagagctttagaagcaggagttacatgtggaaaaaagatttgaaattatcattgacagtttgaaacaggaggcaacaaagggatatattaagcaattttgggaaaaattgaaagtgaataagaaaggatatttaataagggcataccacttatctttgcatgaccaatatttacacattgtacaataagtaaaacttactgatttaatgaaaatagttcaataagatttgtagaggatgagaggtaggaaataggagttggcataagatgtgaattatcaacttcaatagcaagaagtcagatttgaagttgatcagtttaaaaagagaagtataaacacattatttgtaaatacgagggtaccttcagaaggcatagttgaaagagttaaaaaaaacccacttgcctctgagagtaagactggaatattagaagtggtggagtgaggaactattgattttcaccttaatttttttctatactatttgctatttttataaaaaagcatatatgtggcattatgtttgtttgtttgtttgtttgtttgtttttgagacagagtctcactctgtcgcccaggctggagtgcagtggcatgatctccgctcactgcaacctccgcctcccaggttcacgccattctcctgcctcagcctcctgagtagctgggactacaggcacctgccaccatgcctggctaattttttagtatttttagtagagacggagtttcactgtgtgttagccaagatggtcttgctctcctgacctcatgatctgcccgcctcggcctcccaaagtgctgggattacagccgtgagccaccacccccagctgtttgtattgtttctaaaactaaggagtagagctggcctttaagctgcttgctttatgctttctgtcctttaggttcaaccctggttctctttgacattctactttcagggaaaccttaaccagaaagaaggcaacgagtctcaggcttcattttacatacctgtctcaagagataaaagagaattccttcttcatagctttaatgcagtgccaagcttaagcagattacctgttgcttcccttatacctgggccttactttggccctgtttggcctcatgaatttgactatatctgtatgaaagttttcaccaaaaatagcacttttcttaggttatattatatccttcacatgctattaacccacatatttactacttttcccagggaagggaagaaattgtgggcatgggaaagatggcaactaagaattgagatagttctttatttagttcactaggagaacagattgaggaatggattgggaagaattaatccattttccctaaaccacactatttctgaattaaacatccagttttcaacttcttgaatcagggtcttacttattctggggtagtaaaccaagaaagagttactggcttgaacacttggtctcaagggaagaaacttatttgtccaggcaatctctttcaagatgtatatgactagcagtgatccagtggtagtgactatgagccctctctcccaatctttttattgagttaaaatacatgtaacaaaatttactatcttaaccttttttttttttttttttttttttttaaaaggagataaggtctcactct

SEQ ID NO: 55057 - DNA, 1179 bp, Homo sapiens
agaccagagtcttgctcttttcacccaggctggagtgcaatgctgcggtctcggctcactgcaacctccacctcccgggttcaagcagttctcctgcctcagcctcctgagtagctgggattacaggtgccagccatcacgcccggctaatttttgtattttaagtagagacgtggtttggccatgttgaccaggctggtctcaaactcctgacctcgtgatctgcccgacccgttctcccaaagtgctggaattacaggcgtgagccaccatgcccggccatgaatgtgttgaatgtttaatgtagggttagggacttggtaatctcagtaattttttcctggaggtttgactgtgaatggaagggaaaaaatgaggaggtggtgggaagggggcataaggaatcaagggtaactataattaggttaggtctcatttgagacacagcacaccagaaatattaggagaagcagggcataaacactaggagatggaaaaataaaaaaatgtttgataccttatgacctaaggatgtgctatgcagcaggagtagtacagtggagagtaagacagagacagaccttgccatcctgaaagaaggggataatttattgaaataatagcaaagcatatgaaactgggaatgtttgcaatttttatttttgtacagtttctactttggaattctaggtcttaacgcagacctgccatggcattctactgaggtcatttttcacccatgattgattaattgttcaggctttggctattttttttttttaactgaagggatgcaaaatccctcaagtgaacactgaacttaaagccttttttttttttttttgagacagacttttgcttttgttgcccaggctggagtgcaatggtgcgatcttagctcactgcaacctccacctcctgggttcaagacattttcctgcctcagcctgccaggtagctgggatgacaggcatacgccaccacaccaggctaattttgtatttttagtagagacgggttttttctccatgttggtcaggctggtcttgaactcccagcctcaggtgatctgcccacctcggcctcccaaagtgttgggattacaggcgtgagccaccgcatcctgccccttaaagcttttttcaaagttgattgctaatagagttattcccatactgt

SEQ ID NO: 55058 - DNA, 1035 bp, Homo sapiens
cttggaatttgttgagctgcttggatgtgtagataatgtttttcagcaaatttgggaaggtaccagttatttctttggatatctctaaaatgtatttctttcaaactgaaacactccgtacccattaaacactaactccctattccccattcttcctagccgttggccgccattctgttttccatctctatgactttgagtgtctaggcacctcatataagtggaatagttgtccattttgtctggcttatttcacttagcataatgtcttcaaggttcatccgtgtttgagcatgtgacagggtttcccagaatttctgtatttttagatattgaagttagatattcctaatacttaggaactttttgaaacttttttctttaatttccctgctcattttatttttactaaacttttatgctgtttttagaattattatctagttttacatgtcactgtatgtttaattagtgaaaaatctaatttggaaaagtgaaaccaaacactgctttgttacctttaagaaagctgatggtggtatgctttgctgtttatggaatgtctgatacataagttataatgtaatttcacagtatttaatatatatttttttcctttaagtactcttatagtgtactttcctttttttttgtttttttgttttttgagacagagtcttgctctgttgcccaggctggagtgcagtggcatgatctcagctcactgcaacctccgcctcctgggttcaaatgattctcctgcctcagcctccccagtagctggcatcacaggtgtgtaccaccacgcccggctaatctttgtattttttagtagacacagggtttcaccatgttggccaggctggtcttgaactcctggcctcaggtgatccacccgcctcagcctcccaaagagctgggattacaggcatgagccaccgcacctggccttatagtgtactatttgtctataatgtaatgaaattgctggttctcaatgtttttttttttaaactctcagtctgcatatttgct

SEQ ID NO: 55059 - DNA, 1474 bp, Homo sapiens
ccttcctttgagtgtgaagagtgtgaataacaccagctgtcccttgaagtcactggttaatgtgtcttaactgcatgtggcataatcaagagattaaaatgtaattcacttttattctttacctaaacccagtcatgagattcaagacattatttgctcatgatcatggcctgcatacctcaacataaagctgttattttgatggcagctgccttgaatgtgttatcttggagtgtttgctgagtcttggcctcacttagagtaggcaatgaatggatattgagaattgttatcattttgttttaaactgctttgtttggagagtatttatgatttgaggtactttttatatttttgtcttaaggtttttaacaaatttaaaactttgattaacatataaaatatcccactggtataaaataagctctacaagtaagtcttatgtatggtcttttattctctaaacagagactctacaggggcaggtaattcactggtccacaagcggtctcctttacgtcgaaaccaaaagaccccaacatccttgaccaagctgtctttacaggatggacataaagccaaaaagccagcatgtaaatttgaagagggtcaggatgtcctagctagatggtcagatggcttgttttatcttggcactatcaaaaaggcaagttactttaatgtatcttttgctgtttttgcagtaagcatttaataatcttaaatttaacttcatgtttttaattttaagagatcaccgttaagtatttctctgtattgcagataaacatattgaaacagagctgcttcatcatatttgaagacagttctaaatcctgggttctctggaaggacattcaaacaggcaggtgctactatttctcttgaacatgatttaaattaaaatttgattttcttcaacttgtcatattatgatgttgtctgttgaatacagtgtatttagataactcagtattacttcctaggagaggttaaaaaatcagcatagtcgttattatagaccataagaagaacaagaatactctagaggacagatgcatcactaatttatacctgtaagctatgttaagacccttctaagaactttgaagaaaaatctttagtaactaatctcagtaacggtttgggattcaattcaactgttgcttgcttatatttgtagaaagcaagtgtttattgggagcatactgtttgtcagatgatttgggaaattaggacatataaaactgatttagaataatagaaatattcgttaataagaatggtttaaaattaccatttagttatgggttttttatgtttaaatgggaaaatgaggctatatttgtgtgccaataaaaatgaatgaaagtatgccttggtttggttataggtatgcttcttgtgatgatttctattattagaaaccatgattgtttcatgcttttagcatctgctaaatatagatgtttta

SEQ ID NO: 55060 - DNA, 1179 bp, Homo sapiens
aaatgaatctgaaacctgcgttatggcatatttcagtgaggagtgggtttagtagttttcttccctgtaagaaatctgccaataatgtatatcaaaacttaataaattatatttgtctaatgagtttcttttaaaaattttacataaagaaaaatattagtagtcaacagggtgaaatatatcatgttacaactattacataaatgtaagagggttttgaatcttagcatctaatgctgttttggtttctgtgaaatgatatactcttgcattgctggtggcagtgtaaatttctattttggtggtttagcatttgcattaaatgcagaagtttataattatctaatagactcctttctagcagtttattcataagaagtaattcaaaaaatactaggtgaaaaatgtttcctgaagtttattttaacaacaacaaaaaatttggtatttctaagatgaaatggccaaggctttctagtcaattggatttagagtaaaggagactatagaagattactaagctatataggaaggttcttgtaaacttgatggtaaaaaatatatacatatatgtttgatttcacaagtaaaagttaattcccagctttctcaggattgtttcttgggtcactacccccttttctgaggaattgccttccccatcattagtccaggtagttacagtgagagtcaggtcaggcacctcccctcgcggggctgttgttccatttccagggaattgtaaattttcacagagagttcccaggcttaatctggttgctctcatgatcggaaccataaacccagaagctatgggagaccaccttcaacgaagtgtaccaagaagcaaacagctgggcgcagtgccttatgtctgcaatcccagtgctttgggaggcccaggcaggaggattgcttgagcccaggaatttgagaccagcttgggcaacacagggagatcctgtcgctacaaaaaaaaaaaaaaaaataggcatggtgacacacacgcctgtggttccagttacttgggaggctgaggtgggagcattgcttgggcttgggaagtcaaggctgcagtgagctgtggctgtgccactgcactccagcctggatgacacagcaagaccctatctgaggggaaaaataaaaggaagcaaacaaagcagaagagagaggatg

SEQ ID NO: 55061 - DNA, 1861 bp, Homo sapiens
aaaaggaaatgctctgaattgagcgagaaagaggtagtttacttatcttccttactttttttctttaatttcatggtattagtggtgtaggataagtgaatgtatgtacatgaatagataagtattctataaagtagctctagtgttcacaaaccttctctatctgctgtcgcccatccctcatctccaccttcacctttaagagtgggaatatgagaaatgagtaataagggaagatgctcaagagcaatttaaattatgccttctgccaaaaagcagattaaattatgaaagtaggcatgttaagttaaaggtagaaagaacacagagagcagagagataccattcgtgtactttgtcttgtgaagcattatgatgtacttagcaaacattgcgcatatgtgctgctcactgagtcataaaagtggttttgttttatggaattttttatgactctcttttttaatgtgttttaaatattttaggagccactggaagtggggaaatggtctgtacaatatgtcaagaagagtattcagaagctcccaatgaaatggttatatgtgacaagtgtggccaaggtaaccattgatttcttttaatcttgttacatactgaatgactatgttgaagattaatgactaaaaatactttacattgataatttgaaattatcctttttattaattatattaatgtaggaaataatgctaaaatgcattcttgaaattgtgttgaaagtattaatgaaaccgaatttgctttatgctttttttgatattaaggatatcatcagttgtgtcacacacctcatattgattgcagtgtgattgattcagatgaaaaatggctctgtcggcagtgtgtttttgcaacaacaacaaaggtatattttaagtgttttgggctaaagctctgatggaatttgtaagacattatcaacataatgattgtgtacactgaaagtttgttggaatgaaatgagcaatgaatgctgggtagaaagaggtgctatttatttgactaatgatgcttaagtgactttttaatgatgctttcacttatttgatgatagtaatacgggaattggtgcagtaatttgaaagaagaaaagaaaaatagagattattattaatcagacagtttgtgatatggtaaaagtttggaaaggaaatttctccagaagtgtcagagtcgtttttaaagtatagaattgtgtttaaaattttagccttcactctttcacatttttttccctctaatgtagaggggtggtgcacttaagaaaggaccaaatgccaaagcattgcaagtcatgaagcagacattaccctatagtgtggcagaccttgaatgggatgcaggtcataaaaccaatgtccagcagtgttactgctattgtggaggccctggagagtaagtaaatacagttatgtaattccctttaagtaatttttatttacttatctatttttcttgattatggtgtgtgagtgatggtgaattgcaactgcatgaacacatcagtgaagaaaaccagggggaaaatctattattttcataaaaaaataattttcatctagtttttgatcatatccacacattaaaatatttgtataagtcttatattctggaaatttaaagtgaattataaatattgtcataaaattaactattgagggaaaacatttactgcaggggcccagtatcagtagtttcattggatgtcatatttaatgtgattgaccatttagaaactggtatatttaatattataatttaaatgggagagtaaaagacaagttttttaagacataaaatcaacatggaactttttcacagatagattactgctttcttc

SEQ ID NO: 55062 - DNA, 2864 bp, Homo sapiens
agtttgaaatattatgggaatttccaaaatgtgacacagagacataaggtgagcacatgaacctagaaaaatagtgctaatagactgaatcaaggtatagctctgtttggaaatggtgccttttattattttccgataaagataaccgtatcaaagtttggaaatggtgccttttattattttcaaataaagataaccatatcaaaaccacatactagctgggtgtggtggtgtgtacctgtactgccagatacttgggaggctgaggtgggaggatcctttgaaccctgaagtccagcttggtcaatgtagcaatgtagccctgtctcttaaaacaaacccaaaatccatgtgctaactgaaaagagaagatatatttcttagatgaagattcaattttagcatctttagctttctcaaacagatctatagaccatacattgaaatatagctaaacctgtcaaaaagcctttatacctggtagagtcttagattagatttatgataatgttaagcaggtttattaaatcgttatattctttttattatagctgacaagaataatagaaacacagtaaagatatgaagtggaatgtttataatctgaaagctgcctaaggccatttgatatttggggcaaacaacagtacctctgaatctgacctctcctggggtttagagagttgatgtgaaaaaaagcccagaggcctggcatggtggctctcgcatgtgatcccagcattttgggaggccgaggacagaggatcacctgggcccaggaattggagaccagctctggcaacacagggagacctcagttttacttaaaaaaaaaatttgcctagcttggtggtgcatgcctgtggtcctagctacttgggaggctgaggtgggagggtcacttgaactgggaggttgaggctgcatgagccatggtcatgctgctgcactccagcctggacaacatagcaatacttgcctctttaaaaaaaaatagcctaggcttgtgttttaacagagctcatttgactagtgtaggagccaggcatttttgactagaagtagtagtgtatctttcaagagcttataaaatttcatgaataaaagagagaagagggatgaaatagctgatactataagcctttttgggaaaggaaatatttacagtaagtatagtagaaatgtgatgctttaattagaacagtattgtggattaggccactttttttttttttttttttaaagaaatgaacctttcccttaagacaggaattttagtgttaacttttttgttttttttaatagctggtatttgaagatgctacagtgctgcaaatgtaagcagtggtttcatgaggcttgtgtgcaatgccttcaaaagccaatgctatttggagacaggtgagaagggcatttgaactttactggctgatttttgtcactttttaattgtggttatatttgtgatttcagatttcctaaagatagtttcaacagtgatttggaaaggggttgtctcagagggaaaatattaaataatatacttaaaatatacgtaatttttgtgcttttggattttattccagaatgcttttaagtattgtcagtgattacatttgctcctattgacccatagtactctaaagtattctcattggtaccttcctttaaagaacctcaaagggatagtattagaattggaaaagaccacagggccttgttaaagacacaactatactttagatatgaaaaatttgtaaaagcagacttaatgtactttctatattagaagaatgcagggtagcacagtgagctccaggaacaaaaagctagaccactaagtttgacatctgaaaacctggttttaaaaatcttggcttatgccacttaattttctttctgaccttagggaagttcacttgtctctttcgggcttattatgttattttgagcgttgaattaaactatgtatgtgggggcagccatcacaattcctggcacacacaagcgattagtaaactataagtacgtgtgagtctgtgtgtgaactttgaaggtctccaatggttaaaaacaaagatcctttctcttcacatatgaactgtttcattatttgttattggaaaagaacttccttcaatcacagaaagcattataatttaaattatattttgttttgagtatcagtctttatatcagctgtaggttattcacttggtgaatattagctataattgttagtttatctctgatgactcagtataaaactttttcttttttttttttttcttagattttatacgtttatatgctctgtctgcagttctggaccagaatacctcaaacgtctaccattacagtggtaagtgtggacctttctgttaaaagaaagaaaagccattttcttaaacctacaagttgaaactttctatatacatttacttggcttaagtaaaaataggttatttatgcttggctttatttcttttatttatcctcatgcctgatgtcatcttcactaagtaacatccacttgtattgctaaattaataaggctgttcagtgttgaatgttataaatgaaactttcagatatcctttagacctaaattcttactcatatttctagttcttttgaacattcagaataccatacagtagaagagagataggtataacaaatatgctaatttctgcttcaatgtagtaattcttgtgtgttggaagtgtgatgaattttagaggtttactaataaaatgcttacagtaagtacttacaaatctttgttgtattttacatattttatcaacagataggatttaacccatgaatcaaatagtttggttaagtatggtatattctgt

SEQ ID NO: 55063 - DNA, 1321 bp, Homo sapiens
ttttaagttatatttttttaaagccagaccctctttgaatgcacttgaagaagtaatttgtggccaggtgcggtggctttcgcctgtaatcccagcactttgggaggccgaggtgggtggatctcctgaggtctggagtttaagaccagcctggccaacacggtgaaaccacgtttctactaaaaatacaaaaaaatttagcctagcgtggtggtgggcgcctgtaatcccagctactcgggaggctgagggaggctgaggcaggagaatcgcttgaacccacggggcggaagttgcagtgagctgacgttgtgccattgtactactccagcctgggcaatcagcgaaactctgtctccaagaaaaaaaaaaaaaaaaaaaagaagtaattcatatatcttctagtttatagttgctattcagaataagtgaatgtttagtcactattttctagttatttttatgtgtagtgatttattgtattgtgaatatgactatccacctaaatatttctctttgcattttaattactgttttataaggaaaccgtgattttttaacagtaaccaaaaacattgttttgtgtatttgattattttcggattccagggtagatatagcacacctatgcctttacaacctaagtgttattcataagaagaaatactttgattctgaacttgagcttatgacatacattaatgaaaactgggatagattgcaccctggagaggtaggtggtctgagaactaacttcagtagctacttgatgtcttttttgttttgttttgtttttcaaaaaacaactgagacacatgtataagtcagacaactaaaatagaattttatttttagttctggggacaaataagtttggtatggatatcaggaccagccttctcatcctcctgtgtgtttgttgcctgttgactctggaaatttgtagaaggaggaggtatattatttgattctttcattttctgaagtgaaagtcattgtagttaaagatagaagggagggagaaatctttagtattgggtatcttacttgtagttcaacctccttttcttctaagttttctataaacttagagatataaccaacattcttccttcctctcttgttggtactcctttatatatttctgacttgtaggaatggtgggatctaataatattgttagaaaaatgagttgtagagtgaagctgcctgaatagaaaattatcccctctcattctgacatctcattttgcttctcatttttgaagtgtaactacctatgctggtttacagtctttttttaaatgaatttaaaagtaat

SEQ ID NO: 55064 - DNA, 9919 bp, Homo sapiens
attggtagttgaaaggaagagttatactgtaagtattagtgtgagattagtatctggagaggggggagcaaaaaaaaaatattcttttggagatttatataataaacctcatggtcagatggaaggtgtagaatatgatgctcttctaatgtagattatctgatttacactataatggttgtacttttagtttgcaaaacactgaaagagggaagtctttggcacttttatggtagctaaaatatgcagttctatgcagagtagtcatggagtgctgaaggaacttagtagataaaatttctgagaaacggtagggagtaaataccaaaagaaagtagagttcattgcgatcgtcagaaagtaaaaaagtgggttttagaaattaggaagttagttttgctgttgactcagcaaattttcagatttttcagatatatggtttgtgaagatttaaaaggcaataaggaaaatctcttattagaataagtcatgtatacccttggtttcttttttgatatgattagcaacgctggtttgtcagtgtttttttttttttttttttttatggttagcaaacactggtttgggcatgatatagacatagtataacttgatttcagatgagatattaaaatgtgaactggttaaaatgaaaattaaatggatttgtaactaatggaaaaacagtaacaaagtcggtgctttggaaacattcttgagggagactcttatggagggccataggggttctgtctttgtctctaccttcaattctagaaggatgacagaatcaagagaaaagatctggaacattgagatgaaaacaagatcaattaacagcagttataaaattctgctttagccataaacacaaacagtacatgggtatgataggggatactcaatttgatagcagttcatctgataagatttcacagttggggtggggaggggggaccaggaagaagacagagttagtcagaagcttaatatgaagtaaccatgtgatatagctattaaacattttaacctaatcttataattagacataataattgcattcagatatttgaagagctgtcttgtaaaagaaggaatgaaagagctctggggaggaagattttgcctacttatggaatgggcttttttagttggtgccttatcagcttttatcagtggcactaattaagccaaggtcgaataaatatctgtactgtaaaagagactgcaatattggtggaaggctgaattggatctagggtctcattcaagctttaaagtctgattctattattcctcctttaaaattgaaattctctatcattagacccttcagaaattacagtaggagttggtggtttgatataggggaatgagtacctaactcgtatttaacatgttttttttttttagcactcagcatattggcacagagtgggctctcagtgagtgtagaatgaatgggcttatcacttgagttcaggttctagctctctcaccaactagacaggtgaatttgagcagttttaacctttatatttgttaactcgtgtaaaatagaattggagtagatgacttacaagttttttctagctccagcattctatttggcagatttgttttctctctcacttaaagcagttctgaggcttgggagtttcaactggtaaagaacatactggctgtaattttgaaagtcaactgtgatattttggaagcagcttttttttttttaaggtgtttgtagcattaattcaggatggtccttttgtaatttaagatttctttgctaatatgccttagtcaagaagaggcagaaaggtctctgagaaaaagccctattggaacaaaatagggtttttttctagaattaaatatttagattttaaaacagtttgttatgatgaaaaattattgagccatttagagctggctaaagtctataattgttatgaaaagatctctcaattttacagtattctaaaaaattatagagattatcggtttatgcttaatgttagaggtactggaaaatggtatgtttcttactactttttgtacttcctattgatatctgttaggaacttttatagtaaatattaaaataattctaatgtattatttccctaggttaaagaatttttgaaaaatttaataactaataatacagtcccatttttgtggtgttttacagtttgtagttccttcataaacatatcgttggattaatgtaatgaacaagtaactagtgtaggatttatacttcattttttataagtgagaaaataagccttgagaggttaaatggccctaggtcacataatagtcagtgaggacttggaattagaacttagatcttctgactaccaatcagtacacttttcctctgcatcacattgcctctatctagcacctgtatattactaattgatgaaattgtagtgcgttaaattgtttcttgatacttcacagctggcagacacaccaaaatctgaaagatatgagcatgttctggaggcattaaatgattacaagaccatgtaagttgatttattttatgtatccctatgagggagacatttagtaagtataaggaataatggcattgtttaagaattgtgggattgatgtacagaagaagtctataccattttaaactttataatgtcctattctattttagttagattaaagcagtgattctcaaggattggaggagggaggagtaatccttctcctgggaatggtgggtgggagacatatcggtatctctgggagaatttagcctgttccattgaaaaagcatattcagtaataacttccttctataatgtaatgtactgaaagtaaaataaaatcttgttagctggtgggaatattcaaaagatagagaatattgtagggaatacgggtttttaaaaagattgagatctgtggttataatagttaacaccattagttacagaaaataatatttctagctgagtagtctaagataattaagtgatattatttgatatattctcatacagatctacaggtcttccccctaccttatttttactttttttttaactcaccactatactaacaaggattcccttctttttaaaacaatgtatctacatttcttagaaacatttttaaatgcaacaaattttataaatgtatgtgttgactccagtgaaattttatattataaaatttttgttggcaataagttggtgttttgaaattgatagtatttcttcattaaataatgtaattaccagtggctggatctttacaccagctcaaaaagccatgaggtacctgatatgaccttgaagtataataaaaaggaaaaaagactgtaaaaaagtcataaggtacctgagcagttattgtgctggtaaaaatgtttcatgggacagtgaattctgaatttcagtttagggtaccagaaatatatctgttcctgttatggtagtaatgagggatcccctttcttaaacctgcaaaaaagtagaacattttggttgggcgtggtggctcacacctgtaatcccagcactttgggaagccgaggcaggcagatcacctggggtcaggagtttgagaccagcctggccaacatggtgaaaccctgtctctactaaaaatacaaaaatagccaggcatgttggtgcacacctgtattcccagctacttaggaggctgaagcaggagaatcgcttgaacccgggaggtagaagttgcagtgagccgaattgagccactgcactctagcctgggtgacagagcgagactctgtctcaaaaaaaaaaaaaaaaaaattaaaaagagagggagaacattctaaacaactgatggaggttcttgtggccaggcaagtttcagtagagctgaggtagatggagttgcttgggaataaggaccatagagactaaaagaaaggtctaaggagcatattttgcagaggcccaagtccataataaactggaataacccttctttgccccaggttatttccatttccagatccggcactctagatactccttttattttctgggcctctaggatttatctcctgctttctttttcaatgctgtcacctattatttctgactaaggtttttctctttataaatccactctgagatggaattcttttttccctaaatcccttttgaaatatttctaacagatgacactaaatatgggaaagcatattgggaccaaaaatataccattctttgttcttctttcttcctttaaaaagttagttgccatgtttaaaaagaaaagtggacatgtgctcttctcctttctggtcctatcccttcctccccatcatatcctactgtagactggctctggggcagataaaaatcaaggaaagcaaggggaagtgaatttttgtagtattgggtgggctttcaagtataagggccttatatatgaaagttaagttagggtctactatgtatatgtgttcagtttttaaaattttagttaatttttttaaaaatttaggtttatgtctgggaaagaaataaagaagaagaagcatttgtttgggttgcgaattcgtgttcctcctgtgccaccaaatgtggctttcaaagcagagaaagaacctgaaggaacatctcatgaatttaaaattaaaggcagaaaggcatccaaacctatatctgattcaaggtaaaagttgatctgtggcttagtttttctctttagcttatttgtaactaaaaatgtatgttatttagtctccttagtatatttgaaagtacaagtggcagttactctgattttttttttttttttttttggtctatcatatcttgcttagacaaggtatgaagagttgatgccagatgcttgtttatttattttaggactttggccttccagaaatagactctattgattttgttagcaaacagcttaagagtactagcctgtttgtttgttcacttttcattgattgattgattgattgattcattcattcagcacagttttcaagtgccttattatctaagttttcaagtgccttattatctaagtgctaggcagtacaatgacagatagatttttcttctgccctgatggggtttacaaaggtgataagtaaaatagttacagattatgctagtgccatgtaggatagcatactgttttagactttactgtggatagagatggggcctttgtactttaacaatgtggcttaaggaaggactatttaagataatatttaaattaagacttaaagaatgagaatgttataacaatgtgaaaaacaaagggaaaaactactccagctagcagaaacagcaagtgcaaaggctttgaaacatattctaagaactcacagaagactggtgtggtataaatgaggatgagagagtagcatcaggtattggaaagattaggtggggcttgatcctgtgtagggtcttgtaggtcttacaaggaatttgggttgttttctaagaataatggggaggcatgtaagggatttaattatcttttagaaatacttggccgggtgcactggctcacacctgtaatcctagcactttgggaggccgaggcaggtggatcacctgaggtcgggagtttgagaccagccttaccaatatggtgaagcccatctctactaaaattacaaaaattagccgggcatggtggcttttgcctgtagtcccagctacttgggaggctgaggcaggagaatcgcttgaatccaggaggcggaggttgcagtgagccgagatcgtgccactgcactccagcctgggcaacagagcgagactctgtctcaaaaaaaaaaaatattgttttggatgctgttttgagaatggatagtatagaggtaagaataaaagcaggagaaaattaacactcaattgtctaggtgagagatagatgatatgagggcttgtgcagaggtaggtggtaacactcaaatggagagaaaacagatatgaggtctttattggaggtagaattaattggatttgctaatgaattaaatttctgaaaataaggaatcaattaaataatgcccagatttctggcctgagcaactggtgggtggttaatcaagatctggaagaacagattttggtatggtgaatgaagcattcttctgtttcatattcattgaatttgagattcttatgagggacaaacacacacacacacacacacacaccctcatacacacaggatgatgtgaaatacaggcaattggatgtgtaattcaggagctcataggagaggtctgggcaggtgatacaaatttggaatctgattgataaaagctatgagaatgagtgaaattaccaagggagcaagtagagagagaagagagggtggtctgggatcatgtcctgatatcatttataaatttggaagaggtgaaataagcaaggagactaaaaaagaatgatcagtgagatgggaggaaaccaggaagtttgatgtcatgacaaccaaaagaaaggtagtgtttcaagagagataggtatattaaagtgtattgaatgctagtgagaggtagattaaaatgaaagaaaaatatttattgcataaggtatcattttgttattagtgaccttgataaaaggaatttctttgaagtggtacagatagaaaccagataggactgggtgaaagtatgactgaacccagcattgccaaatttacgtgtcaaactgggcttctcctgcgtatcagggacacaggcagattcaaaataataacagtagtaaaggaaaggaggaaaataggaaactatctttaaggatcctgaatgagaggggagaaaatggaaagggtatatgtcatcaacacctagaagctttcctatgtagggaggccgacaaatggaatggcagctgaagagggggataggactagtcaaatgatggttttttaaaatagatgggagatagttggaacctgtttttgtgtgtaagtaggaatgatccagtggagaagaggaaattggtataggagagtagaagccaaaagagaagggatgtagagcctgaatgtgggactggccttttctagaaggagaagcatccttctgttgaaatggggtgaaagagaagatgggtacagatgccagttctgttgtagattgggcagttggaaattgaccgaagttcttgcctggtagcctccattttctcgatgaaatataaggtaaagatagctgagagacttgtacagagaggggaatttaagggtcaattaagggtatggaatagtcatcttggagataaggaaattgactgaagttcttgcctggtagcctccattttctcgatgaaatataaggtaaagatagctgagaggcttgtacagagaggggaatttaagggtcagttaaaggtatggaatagtcatcttggagataaggaaaatgtcattacaaagccttgacaatgagtccagttatatgaagtttgtaagaaattagctactaattaagttttctttgaatgaaggaaagaatgcttattctatcactttcagattttgtcactcagatcctttgctagcagttgcccatattatgaatcagaaaaaaaaattccacaagctttttcatttctatcatgattgtgataggatattccctttgtggtagctatcaggtcatctgatgccaccagataaggattcagctgctttctttaaaggcatcctcagttccttctggaccttgtgtataagttgttccttttagtttgagattactttctttagtccaggagtcctttataaatattatgttgatcattttacaaaagaaatggatatcccatccatcttattcttgagacttttgattatagcgtctggttctactttgtccttctagttcccctactttctccttcctcatacttccacctttattccctgaccttttttggcatctggagggataagtttttttcctactttctccattcatctctttctaggctattgtatagtgttcttttttctctccttaattgaagtctcctggacaatttcctcatagccctcactccattttattagcttggcttgtatacacatttgtcactttctaactatattgtgaactctttagcacagggaacacctttgtatccatattatctaatatcatctttatatggtagctattgctgagtaaatgaaatagatattctttctatatatatattttctttttttctataattagtgtctttgcctattgcacttttttccttcctattgcttggtatttggctttatgtttaaaaaatggttttctaggtctttctgatttttccttttgaatgactccctgagaatatgaaggatttcttactcctttctcctttacattctgccactctgggcttcattctctttctgatagtgtcattcaagaatctacatatatatctaaaggcagcctttatgactactacaatgttaacatagatatttcctgactccatgaagttaactgctaaattcatagtcatttttagtagtaaatccttgaaacatcctccaagttgtaaccacctaaaattaaactatataattgagcttttaggagttttgaaatcttccatccagtataattgtctggtttttgttgttgtttttaaatctttaagtggtatatattgttcagaattatattaaagaggactttctttaaacctttcataatgtaaatatctttaaagtcaagaaatatttatttggattagaatatattatctgtgcacttgactaaacttgtggattcaactaatatttactttttattaccattaatataaaataataaaatatatgtatatgtgtctagttacatacatagagtcaatgtctttgttttctttatgcagagattaaatgcataatggttttccatttcagggaagtaagcaatggcatagaaaaaaaaggaaagaaaaaatctgtaggtcgtccacctggcccatatacaagaaaaatgattcaaaaaactgctgagccacttttggtaagaggatatgttggtatatgttctcaagaagaaggatgcatgaaataactgagaagctagtatttttttcagcttactttagagacatgctttaagtatatatttttattttccaggataaggaatcaatttcagagaatcctactttggatttaccttgttctatagggtaaatagaaagttattttctccctttctaggttttgtcttttgagtagatattaatatttgtttgttatataatatagtcgttacacaatttaaattcttttgtctcaggagaactgagggaactgcacattcatccaatacctcagatgtggatttcacgggtgcttccagtgcaaaagaaactacctcgtctagcatttccaggcattatgggtagatattttacattcttattttttttactttttttactctagatttcttttctttgtaaagtgttgattgaataattttttagcaattgaaagtgatgtaagttgtgtctatcagctttttgagaggtaatccatatgtagatcccaatagttgttaatattcatttgaaatatttttgctttctagagtacaaatgtatttttcatgtttgtgtggaaatttgctgtgtacacagagaaaaagtataccattgtttagaagctgtgctcgttaggctttttaatgcctctgctacacaagtgttctttgctttaggaagatatgatttttttttttctttttaagagacagattctcactctgttgcccaggctagagtgcggtggcacaatcatggctcattgcagcctcaaactcctggcttcaaacaatcctcccatgtcggcctctctagtggctgggactacagattgtgccacc

SEQ ID NO: 55065 - DNA, 3512 bp, Homo sapiens
attataaaatcataaaataattgaatttctgtgctgaaaaggacctcacacattatccagtctaaccccttcactcattaagttcatgaacatagagattgagatttgaatttggccaagtaatagagttagggatagacccaggatactctgactgctagtttgtgcttattctgattctggtgtattacttcactaggcctagaactggtaataagagaacctctattctagttccactctttaaggacatggagcagtgtcatagatgtagtttgtgctcattaattatttgttctaatgaacaaatgaatgagctcttttaaatgatgtgattattggcaatacctgatttatgagtagggcctcttcgtaagaattttccttgttggcctcctaagtaaaaaaattaccctaaacttactagtagttaaggaagaaaagctccacaaagttcagctccaagaacgtgacaaaatctaaagtaatgagcccaagtgatagtccatttatatagcatttattgtttgggtttggctcatttttatatcatcaaggatatatggtatagtagagtaatccagaaaagagaacatattgtatgggcataggatgctaaaaaagctcagtagacaattctggccttctctgttacatagattatctgactccagaaaaagaacgcgtacaggaagatcttggcctgctgcaataccacatttgcggagaagaagaggtcgtcttccaagaagagcactccagactcagaactcagaaattgtaaaagatgatgaaggcaaagaagattatcagtttgatgaactcaacacagagattctgaataacttagcagatcaggagttacaactcaatcatctaaagaactccattaccagttattttggtgctgcaggtagaatagcatgtggcgaaaaataccgagttttggcacgtcgggtgacacttgatggaaaggtgcagtatcttgtggaatgggaaggagcaactgcatcctgactgtaggactgaacattatgttcactgcactctgattttctgtaggtacagttcaaagccctaaaggagtctggcttttactatctttcttaaaaaaaaaaaaaagtcaaaaaaattcaaaaaaggggatgatactagccttaacatgtacctgtcaatgttatggatattgtcataaaaaggtatcttttaaaaatcagaacagagacttaattttttaaatcttaagatttgtagaatgtttctaggataggatattaaaaatgattgaaacccatgcatggtgttagacaatttttctaattattccattgagtcagttttttgtgattagtgattatcagagcaaacatcatgtagatagcacaagtatttggagaaacgttgtttgttttgttaccaaaatgttggaaaaatttatttcaataccttttagatttcataaagtgcagtgtatataatgcctactgaaagactgtaaaatattgaaattttctttcaagcaaagtgtaaaaaaatatattgagcctgtaaattgctctgtgactagacttcattgtcgtcttaatatattcttgcatgtgcatatatatacacacgtgtatatatatgtgtgtgattatgtgacctatgcaatacaaattatgggaatgggcagctttggagtatatatcccataattcttttttcaggaatagttgcagtatttacacagcagcatttcttctcaggcttttattgggtgctgttgcttgctatgtatgaagagaaatgtgtcagacaagtttagtgtgttctgaagaagggtgtgaacaacagtgttcatgggcttttagaatgcttttcacttttagtccttgtaactcagctgttcagtacctaaaacaaattcaaataatatgaacattatctcctactagaagtaacgttttcaagttttcatggcacattatgattgtaaatgtctctcatttttaacagtaagtctataggagtcccgtgaagattcctgaaatgtctgtagtaactgttagtcatgtttgaataagtgtagtatgaacaaagtattttattgcacagggttaacaaacagtatgttgccagctgaggctactgctgttttattacaacattacctcttgtttttataaagtgtaccaagatttaaattgataactttattttacttgtaaaaaaaaagtttcttttatcaccagtgttacagttgtcttctgtttctttttgttttgttttatttgttttcctttttagccaaagagtgaacagaagattttcttattttggtggctattcattttacttttaaaagtgattggtggattttagactaattatgggggaatttgccaccaaaataaaaaatatgtaaagtgtagtgattacagagtggttaaaatgtgggttagtacttatttattccattaattgattatttgactgtttataaagaaagttgctttatttctttaaacatcttcaaaagatgatcctttcttgtcacattatagccaaaagaagcagagaacttcattgtctgcatttggttcctggttggccaggtataaatgagctttacaaaagtgcaaattaaaaactgttacttctgtttacctccaccaaaacttgattttcccctagctattaatttaaggttgcctttcctgcagctgcaatattttgaataacacacagagtttgtgttgatttttgaatgtttgtttatatctaggggtaatgaaaaatgtaaatcccgtgtatccttattcactccacctgtatcatattatttcattttccccaaagtcctttaattctaactgaacaccagcagtatttttagaaatttttctttaacatacttggaagatgatttatccagctgaactgtctttagacgtaattattgtgaatgtctgttttattttctcatggtggttcacatggctctgatgttcagtttgtatttttggaattgctttacttagaaattaaaacagaccaacattaaatgtgtgtattttttaaagagctaatgagttttgcttctgtatttgcttgaaaatacacactagtgcagtagttgactgcttttatttagctagggtggtaaggattttctaattccactgctagtatgttcacttgaattaatctttataaaactttgctttcattttcttcatccctcttataatattaataactatcacatgttcatcttaagtggtcttaaagtacgtttagtgagcatgtacactttatatttgaaagacaatatatctctattgtgtccccaaactttaaaaaattcagacttaattttccaactatgtttgcttcttacatagaattgttagggttcatataaaaggatttcctgggccaggtgcggtggctcacacctgtaatcccagcacttagggaggccgaggcgggtggaacatgagatcaggagattgagaccatcctggcta

SEQ ID NO: 55066 - DNA, 1071 bp, Homo sapiens
gaggccggagaatggcgtgaaccctggaggtggagcttgcagtgaagcagtgagccaagatcgcaccactgcactccagcctgggcaacagagtgagactccgtctcaaaaaaaaaaaaaaaaaaaggatttcctgtacttttaaaataagttttgcccctaggcatataaaagatgtggaaacaatataccttactcattgtaattccatttttattcaaaacaaatacatttttataaatattctgctactaagtgataaatgtgtattcctagacccttagaccaccaaactagagccagaatataagctatcagagttactctataaattctaatataggggtgatgaagccagctcttgctacatatattctttactaaatatttaacagaattgaatgttcactgatgtgttagagttgaaggtgcccccggcttttttttttttttatttgcaagatatgtccaagtatgcatggttgttttctataatgtgtatgttgagtatatctctattatctgtgttgggggtagaactaactgttttgggccactttattgagtttctactaggtactattaaattttggttggaatatgatctgacttaggcagttctaccagactgttttacattgtggttctagagttgtttgaatgaggatgtgatgacaaagaagatgctcatgcagcgttgggaaacagttttgtttttttgtttttttaagccctgtttttgtggggagatttttcttagttatatttgagtacctcaatgaatgtacacatcacagtcccctttggttttttttctgtggcagttgatcagtcatgttcaggaaaataaaaactggacagtgaaatgtaaggtaagaactttatctgattatggattcttttctaattggcagcagttagaaaaccagacgtctgtctgatacacatttggagatggaagaagctatgaaagcaaactaataggttctctgtaaaacaagtagatgggctccaggtacaatatttgtaacttttacaaaaatgtcttggagtaatagctacattgaaata

SEQ ID NO: 55067 - DNA, 1025 bp, Homo sapiens
aattagtgttttaatcaataagtggcacttgaatatgttgtcattaatattgtaaaatgtaagggtttttttttgtatacagaatttgggatgacaataagccgataagagattttgtgagaggtatccttgaatattagcttttttgcttgaggagacatggaagcttaaggaaatgaagcttgttggaaagagttttggaagggaaagcctgtgggttcatcaaagacttgtggaagcatggttttggtttctgtatccctttgtcaccaagttcctgccagaatccaagagcgtattctgtaacaggtctgttgatttttaaaaggtttattgtaattttgcataaccttctatcttggatattttgtgttattttaacttgctatgaattttccaatgaagaattgtgtcattagagacccattctttataaactatagtttgttctgtaagcaacttttaaaccatctgaagaccagaaacattgaaaataccttttcgttgaagcatttcctagaaggtattaaatatttcatgcttttaaaaacaccatttttataacatactaacctttcctacctttctactgagagattatgaagattcattattgttcattgctataacatgttgtgctactcacgggaatctggatgtaggtgggggaatcttacccttaacacttaatgacttaggctaggtggtgcttttatatttttctgcttttcacatatcttctgttggaatccctatgttaataatccatgtttatttattcatagtgcactgagcagctttctactctcccacatagcttctgaacattattaattaatttgttacaggctggaaagaattaaggctttctgggacaagtaatcacatgaataaagttcaaaccttttacaaaccacagttctgattttttagactatgagggtttgagagtgatttacttctgaaaaaatgtaaatggcttaaaaatattgttcaccactggaaagatatttttttcagtttgt

SEQ ID NO: 55068 - DNA, 1169 bp, Homo sapiens
ttctgccatctagctttttgaagtctatgggggtcttactcaagtactagtaatttaacttcatcatgaatgaactataatttttaagttatgcccatttataacgttgtttatgactacattgtgagttagaaacaaacttaaaatttggggtatagaacccctcaacaggttagtaatgctggaattcttgatgagcaataatgataaccagagagtgatttcatttacactcatagtagtataaaaagagatacatttccctcttaggcccctgggagaagagcagcttagatttccctactggcaaggtttttaaaaatgaggtaaatgccgtatatgatcaattaccttaattggccaagaaaatgcttcaggtgtctaggggtatcctctgcaacacttgcagaacaaaggtcaataagatccttgcctatgaatacccctcccttttgcgctgttaaatttgcaatgagaagcaaatttacagtaccataactaataaagcagggtacagatataaactactgcatcttttctataaaactgtgattaagaattctacctctcctgtatggctgttactgtactgtactctctgactccttacctaacaatgaatttgttacataatcttctacatgtatgatttgtgccactgatcttaaacctatgattcagtaacttcttaccatataaaaacgataattgctttatttggaaaagaatttaggaatactaaggacaattatttttatagacaaagtaaaaagacagatatttaagaggcataaccaaaaaagcaaaacttgtaaacagagtaaaaatctttaatatttctaaagacatactgtttatctgcttcatatgctttttttaatttcactattccatttctaaattaaagttatgctaaattgagtaagctgtttatcacttaacagctcattttgtctttttcaatatacaaattttaaaaatactacaatatttaactaaggcccaaccgatttccataatgtagcagttaccgtgttcacctcacactaaggcctagagtttgctctgatatgcatttggatgattaatgttatgctgttctttcatgtgaatgtcaagacatggagggtgtttgtaattttatggtaaaattaatccttcttacacat

SEQ ID NO: 55069 - DNA, 1068 bp, Homo sapiens
ggctggagtgcagtggcaccattatggctcattgcaatctcaacctcctggactcaagtgatccccccacctcagcctcccaagtagctgggaccacacttggtgctaccatacccatctttttgtagaggcagagtctgtctgtgttgtccagcccagtcttgaactcctgggttcaaggggtcctcctgccctagtctcccaaagttccaggattacaaggcatgagtcactgcacccagcctcattttttaattaagttaaaatttctgagcattctttaataataaaattattttatttatctccaggaatccatcaacagcatcaagtccagactaagcaaaagtgggcacatacaaactctgcttagagcatttgaagctcgtgatcgaaacatacaagaaagcaactttgatagagtcaatttctggtctatggttaatttagtggtcatggtggtggtgtcagccattcaagtttatatgctgaagagtctgtttgaagataagaggaaaagtagaacttaaaactccaaactagagtacgtaacattgaaaaatgaggcataaaaatgcaataaactgttacagtcaagaccattaatggtcttctccaaaatattttgagatataaaagtaggaaacaggtataattttaatgtgaaaattaagtcttcactttctgtgcaagtaatcctgctgatccagttgtacttaagtgtgtaacaggaatattttgcagaatataggtttaactgaatgaagccatattaataactgcattttcctaactttgaaaaattttgcaaatgtcttaggtgatttaaataaatgagtattgggcctaattgcaacaccagtctgtttttaacaggttctattacccagaacttttttgtaaatgcggcagttacaaattaactgtggaagttttcagttttaagttataaatcacctgagaattacctaatgatggattgaataaatctttagactacaaaagcccaacttttctctatttacatatgcatctctcctataatgtaaatagaataatagctttgaa

SEQ ID NO: 55070 - DNA, 1353 bp, Homo sapiens
ggattgcttgagcccaggagttcgaggccagccttggcaatatggcgagccactgtctctataaaattaaaaaaaaaaaaaaaaagaggaaactgtcacttccgtcccccacccccgcccccgcttctttcagacggatgtaagattagctgtgtcaagcgatcttgagacaggagactactacataaagttatgacttctttccaaaatgaggaatctttttcgactacagcccattgtatcacatacatagggtataaaagaacacttgtccttcgtttgatgggtgtgcgtgtgcaaacctacaaacacattgttaattagggccgaaagatgatgttgttaaggtcggtgagtaggatgatgtgcttttctaggtatgcatagtcagtgaagatagccttttttgggtaactactgtaaattgaagttaaggacattcatttgacagtaaatgtcccactaggaaaatgaaaacattttagtatcaaatatattcattgctactgcagaagagttagggagttctttcttttttttttgagaccgagtctcactctgtcgcccaggctggagtgcagtggcgcgatctcggctcactgcaacctccgcctcccaggttcaagcaattctctgcctcagcctcccgagtagctgagattacaggcgctcgccaccacccccggctaatttttttgtatttttagtagatacggggtttcaccatcttggccaggttggtctttaacttttgacctcgtgatccacccgccttgacctcccaaagtgctgggattaccggcgtgagccaccgcgcccggactgggagttatttcttgcatggcaatacacagatgttgaactaaaacctgatttaagatgaaatatatagtaccaaatggtattatagaatttgcccaattttctctacccttttctccttcaccatcctacagagagctagagatgttgaataggtaaagcaggatggggacctgatttattgacttgtctgcgagagtcttgtcacttaagcagaagcaaatttgtggaaacaaaaaagggaaagaggatagaaccagtttgtctattaagattacatagtatctcatttaatttcctgccactttctttccataaggtgggagttttctttttaatcttcctccctacatctgagaatttttgagtggggaataaatgtaacataccattctaactggatgagggaaggaaggacagtttagtattcgttaattcattcaaaatattgagcttctctaagtacattgcggtcctgaacgtaatgcacaggacttttaaccttttggaacttgggatgggatcagaatg

SEQ ID NO: 55071 - DNA, 1027 bp, Homo sapiens
acagtgaaaaaggtaaatgggatctgaaagaggaatgtaattttaagattgcgcagaaagctctgtagtagtggagattataaagctttagttttttattgtattaattacaataataaaatgtgatgctttattgtgatttttatatgcaaagaaatttagtagtttcacaaccctagagatactcatccactgaagaaacaaaagcttttcttcatttctatgagttgacctgccaaatgttattttgatccctgtggttgtgacttgtaaatgtgtctttttaaaattttataactattgggcgtaggaggaggagacagcttttatctggtaataaattcccttctaacaaaatatgaatgtaatgataccatttaatcagatgtccagtacttgtaatgtaattatgaaagttcaaacacctcatattgaaattgatatgtaatatgtaataaagctacaatgcgacataatttaatggtctttgcatcctaatgacttggattcaaatcttgatttcaccatttacagtttgtgtgactttgagcaagttatttaatgtctgattcttagtttccttaacatgtaatgaaaataattaacaattgttaggaagatcaggtatgcttacaaaagagaactataataactagaccctggctaaaatgaaaaattcattcattgaaattgtattgaattcctttatggctttacactacagataaattcattattattgattttttgttttgttttaaaccaccatgaaagatttcacaacatttaaaatagaaaactaatgagttaaattctattcatgtgagtattttgactgaaactacagaatctttcagacaaggtacaagaaattcattttttttttaagaaatggaatctagttcatcagactactataataaagacaatgaagaggaaagtttgcttgcaaatgttgcttccttaagacatgaactgaagataacagaatggagtttgcagagtttaggggaagagttatccaggt

SEQ ID NO: 55072 - DNA, 1032 bp, Homo sapiens
aagaaagaaagaaaaaaaattttgtctttccttttcagcatttatactacttattaccttttcatatttgctttttgcagtgggtagaactgtcagaaaagttgttggatgtgggggtgataacagtcatctttatttagtttctgaactatacaggaatgcttctggtatctgactataaaatacgatgtgagttattacttcagatatatttatcatctggtggaagtattcttttattctttaaaaaactcttaattaacaagtgatgaatatgcctttttctctatctctttttgtatattgtttctcttaactcattgatttaaacaaatataattcctaatattaaattattcttgcatacctgggataatctctttagtagtcttaaacaaagtatcctttattttatagagaggcagaaaataagctggaacagagccagaaaatggtaattgaaaaggaacagagtttgcaggagtccaaagaggaatgtataaaattaaaggtggacttacttgaacaaaccaaacaaggaaaaaggtatgtgtttttaaagcaaatacatgtttttgaaagggaataaaaggaaatattacctatttaaaattctagttaatttttgaagtgaaaaaatttcagagatttggcaataaattaacttaatgttcttttttatctattaatttttttaaattttccattaaaatgtttatatgtggaatttatgttattagcatcctggattgggcttaatttctacaaaactgataacgattatcagtttaatgatacttatttctgaaattaagttctatggcctatttgaaaccagtacactgagtttaaaatactaacagggaaaaagcctgtaaattaatattacctctaataaaactaaataaaatgttgaatgaactctttaaaagaaaattttgcctcatagagaaagaaactcaatgcctgtgaatgtgtgcttggatcttcctttagaaatatataaatagtacaaaaatatctattttgtat

SEQ ID NO: 55073 - DNA, 1284 bp, Homo sapiens
atttatttgacctttgcaaaggtcacagaatttactgagtatatttaatattctagacaatagactgattctgtaatacctaacctttgaaaatgtatcatccagcctcaggctatttccctaatctgtcttttccagatagggaaaaaaaaaattgccaacacataagaatttatatatatttcgacatttatgtttattattgttttgtgttttatttttcatattgatagagtgagaaaatttttgtagtatgatctacattcttcattttatactttaagcctaatactcctttttagtgcagagaaatttgtttctctccaattattccttataattaaagattactttggaacttaactcttcaaatgcagagcattcttcacttttattcattatctctttttaaattttagagctgaacgacaaaggaatgaagcactatataatgccgaagagctgagtaaagctttccaacaatataaaaaaaaagtggctgaaaaactggaaaaggtaaaaggcagttgtgcaaattcagtgttttgtattactgtctatattccaacagtaaaggtaggaataattaaaatatgtttatggttgagacagagagtaatttttatgatcttacaaaatcatttaaataaacaatttgtaaatgttagttaaggatgatgttcaccaacccttttattatcaggagaaacttttttatccaaagagggaaaagagtagagagaggagaaggaacaaaatacagagaaggatggaatgtgttaacagagactggagctaaagaagtagaaaaaagaaattcatttttatcacttcaatgaaaatgaagatagattatgtagctttcaactggtctccctcagtctgctactctgagaggggcttgcttctgcctctcggaaggttccttgaactgatttgatatagaaataatagtgagtttattacattcatttattatattcatttattatctttaagtaatatcacatggtaatgaaatgtgtatggaggaacaccacagttggatattcagatattgagctcaaaagagaggtctggtaaagagatactaatatgggagacttccatcttgagatagcaatgaaagcagaggaagtttatgattctgatccaagaaaggtagaaaggcagaggaaggaatgttcaggtagaagggtagagtaagaagatgggtgttcatttattaaacaatcatgaaattccttttacatgccaggtactgtgctagtctctgggagattc

SEQ ID NO: 55074 - DNA, 1090 bp, Homo sapiens
ccctctaaaatgtctaagtttttcctcacagtatctcccagtgtgccattaagacttgttgatgcagtatttcttaaaagaatccttgtaagaacagaaagtcattgatgctgggctcttaagctggttgtacaattatgtagagccagtttactttttctcctgttttaggaatccaaaactttgttgataatgtgaaatgctatgtcagggattttgaagttagatttcctgtcttatataattaaacagggagcagaaatgcttttaagacagtagggctgtccttccctaccatttactgtgagacactaggaaagttatataacctttttgtgcctcagttacctcatctgtaaataagaagtaataatagtgccaaccatataaagttgtgagtgcctggcatgcagaaagtaggtatttagtaaatgtgagcaggtattattttagaattaagcttcaaaaaattttaaaagtgagattaaataaatatgattaaaatgaatgcatatatattttattttcatttttattctcttttcttcataggcagttaaaagaagaaaataacaacggaaaagaaaaattaaggatcatggcagtgaaaaattcagaagtcatggcacaactaactgaatctagacaaagtattttgaagctagagagtgagttagagaacaaagacgaaatacttagagacaaattttctttaatgaatgaaaaccgagaattaaaggtccgtgttgcagcacagaatgagcgactagatttatgtcaacaagaaattgaaagttcaagggtagaactaagaagtttggaaaagattatatcccagttgccagtaagtatgtgtgattacgtaatggaaaagaagaattttactaaagtgttttagaaaagactatcattttgtggttgctttattagcttctaatttctttttctctatacttttagtcatgaatttctcttctgtctaaatctctattttttttcctgcacttaccattctacacttttccccagtttctcagatgccatatataagaatggcacagaattttttttaaacagctttgttgaagta

SEQ ID NO: 55075 - DNA, 1030 bp, Homo sapiens
ttcgtgatccccctgccttggcctcccaaactgctgggattatgggcgtgagccaccatgcccggccttttatttttttgaaacgaagtttcactcttgttgcccaggctggagtgcaatggcgagatcttggcgcactgcaacctcagcctcctgggttcaagcgattctcctgcctcagcctcctgagtagctgggattacaggcatgtgccaccatgcccagctaattttgtatttttagtagagacagggtttctccatgttggtcaggctggtctcgaactcccaacctcaggtgatctgcctgccttagcctcccgaaatgctgggattacaggcatgagccaccacgcctggcctaaaatgtttttataataatggtctaccaccttttctcttttagtaatatttgtgaccatatatataaatgagattaagaagaaggtaagtaaacctattcaggaatttgtaatcaataggtgtaaaatgaaggaaagatcaggggaaactataggtaaatatattatggttggtttcagatatgaatgtatggtagactagatggtagacttaccaatgttaaactgttatgaactgtggaattatgaaccaaaaaaatctcagaaatcatctgattcaatactattttattggtgaagaaacctagacccaagaaagtaaataacttgcccaactggtaagtagtagaatttaaactagaacataagatcttagctcctctgatatctgctttcccaggatgctgtttatttgcttggatttttaatgtactgtttgcttttgaaattagaaagtaatcatatacagataacaattttaatttggcattctcatttgtgtatcaagaattatttcatatatggtcaggcacagtggctcctgcttgtaatcccagcattttggcaggccaaggtgagaggaactcttgaagcaagagttcaagaccagcttgggtaatacagtgagaccctgtctctacaaaaatgcaaaaattagctgggcatggt

SEQ ID NO: 55076 - DNA, 1049 bp, Homo sapiens
ttctttgtgtaccttgtcagatcccaattatcttcctctctcctcagaaatggcaattattctgaaattcatgtgtatccttctcgtccatgttttaaatattgtcacatatcgatgcatctagaaatatatatatgttgcttagtgtttttatgaaaatactgtttgccactataatttgtttttcactcaatattgttatgagatgtatccatactgatttatgtgactcaggtttatttcttttaactattgtagttttccaattatcttaatatttcttaatgtatttatatattctcctattgatggacattaagttgtttccattaaattcatacagtttttaaaatttgaagttctgaataaaaaagcaaatgcatctcatttacataagtttacatatgtttgtttttaaacttgcagttaaaaagagaattatttggctttaaatcatatctttctaaataccagatgagtagcttctcaaacaaggaagaccgttgcattggctgctgtgaggcaaataaattggtgatttcggaattgaggtacaattttcagattctgcagttatagcaaatagaatgttttttattggtaattaagacccttaattggccgggcatggtggctcatgcctgtaatcccaacactttgggaggctgaggcaggcggatcacgaggtcaggagttcgagaccagcctgaccaacatggtgaaacctcgtctctactaaaaatacaaaaattagccaggcatggtggtggcacgcgcctgtaatccccactacttgggaggctgaggcaggagaatcacttgaacccgggaggcggtggttgcagtgagctgagatagtgccactgcactccagcctgagcaacagagtgagactccattaaaaaaaaaaaaaaaagacccttaattgaggaatttaaaaaatatacagaaaagctcagagaatattataacaggtatctgtgattccacaactaagaattgaatcttcttaaccaggattgattctccttaaaatttgtggtatttgt

SEQ ID NO: 55077 - DNA, 1049 bp, Homo sapiens
tttttcactcagcagtatttaaaaaattcattcatattgagatagagtagattaacaaatggatttgtgtaattacttttaatagctgtataggattctgtcctataacagtgtcataatttatttgttcctttataggtatcttgtttctgttttctgttacaaacagtgctgcaaaggacatccttgtacatgttttcttatacatatatatgagagtttctgtagtatatattcctaacagtgaaattgctgggtcatacagtgtgtacattttcaattttactaaataccatcaagtttgtaaagtggctgaaccaatttataattctacagtggtatatgggagttttcatatcctgcctaaagagttgactaatattagaattctaattttttaaatcaacttgaaaggtgaaaaatagtacagtatgagtttttttatagaatctttctaataatttttcccttcttttcttttgtgccagaattaagcttgcaataaaagaggcagaaattcaaaagcttcatgcaaacctgactgcaaatcagttatctcagagtcttattacttgtaatgacagccaagaaagtagcaaattaagtagtttagaaacagaacctgtaaagctaggtggtcatcaagtaggtaagtatattgagttattttaataaattatattcagagttttggatgatagtttttttttaaaaaaacttttatttaaattttttttttaatttaagttcagggatacatgtgcagatttgttacataggtaagcttgtgtcatggaggtttgttttacagattatttcatcacccaggtattaagcctagtaccccttaattatttttcctgatctactccctccttccaccctccaccctctgatagaccccagtatgtgttgttcccctctatgtttccatgtgttctcagatgatagtttttaaagaacaaatttatcaactgtttggtttctattatcaaacatacttgataatctgttactagttgtggtctgataagacagcaaaagttatt

SEQ ID NO: 55078 - DNA, 1685 bp, Homo sapiens
ttctcattagctagtttggagagaaagacgatggggtcgggaaggattcactctttggagcttttgaacctgcttctgtgtgcagtacataaaaatgttcttaatgatctcaaactgtccaaataaattttatgattaccttcagtttaaggaaacagggcaacttaaaaaaaatttttacaatgatttctattaaaaaatggaatttaaaaggtggagaaggattcttacatttctggtacaaaggaatagtcttagctacctagaaaaatgagtgattcagaacttttctcctctttgttacgtatttaatttagagagcacattacttattctttgatttccttaatgaatgtctcattctctgtcccttttagtactctttagatcagaaactaaactttgtttatgactaaatctttcaactatttaagtaggtttttattcttgaagtcctattcagaacaattttccttttatgtttattagcagaaagcgtaaaagatcaaaatcaacatactatgaacaagcaatatgaaaaagagaggcaaagacttgttactggaatagaagaactacgtactaagctgatacaaatagaagctgaaaattctgatttgaaggttaacatggctcacagaactagtcagtttcagctgattcaagaggagctgctagagaaagcttcaaactccagcaaactggaaagtgaagtaagcttggaattagcttggtatatatgttaatttttgaactagaacaaaaggtattattttagggttttataaaaattatatgtttacatccagatttaaagtttttaaaaaatggtaccacataagttataaattgttttaaaattatatttggaaacctttgtattttaacttattaaaagttaaagttattaaaagtaggaaaaactgtagtgggtaaaagtctcaaatttggtggaaataatattgcattgcagcctattatttcttccatagtataagttaatatggttaatatacatttataaataaagactttggattatgctgttggaagaaaaggagtgataataaaggatttcaaattttagcaaaccccaaaccacctaggaagcctgtttaatatgcatatttctgggtcctgttccagcaatttctgattcagtatatatgggcacaagagtctgcttttttcttttctttttctttttttttttttttcttagagacagggtcttgctctgttgcccagtctggagtgtggtggtgtgatcatagctcactgtagctttgaacttctaggctcaagccattctcctgcctcagtcttccaagtatttgagactgcaggcatgtgtcactatgtccagctaagtttttttattttttatttgtagagacagtcgctgtgttgcccaggcttgcctcgaactcctggtttcaggtgatccccacctcagtatcccaaaatgctgggattactggtgtgagccaccacacctagccggaatctgtatttttattttttgtgtatttctgctgtttaaagagtctgtatttttaaacaactgcatgtaaacctgaaacaactacgcaaggaattacattctgaaaaggggataatgagtgttttgtgaatatcttgtcttcattttcactgaggacaggataagggtgcctcattaggta

SEQ ID NO: 55079 - DNA, 1033 bp, Homo sapiens
ctttgaggaaatgccacactgccttccacaatggttgaactaatttacactcccatcagcaatgtaaaagtgttccttttctctgcaacctctccagcatctgttttttgactttttaataattgccattctgactggcatgagatggtatctcattgtggtttcgatttgcatttcttgagcgatcagcaatgttgagctttttttttgtatgtttgttgtccacatatatgtcttcttttgagaagtgtctgttcatgcaagtgatttcatttcttccttaaaaagagagaagctgaagacaatttggcaaaatacaaaaatctatgtaatttcaattatagtgtcacatgtatttaatatttaaaatgtttcaaaattttaaaatatttaatatgaaaattctgttttcatgtttagcttgaagctcaactagagaaaaaggaccaacaatttaaagaacaagaaaagactatgtccatgttgcaacaagatataatatgcaaacaacatcatcttgaatcactagatagactcttgacggaaagcaaaggggtaaaatcatccttataaaagtgctatttagaagttgactaatattttatgtctctataacttgcctttaaatctaatcaaatctgcatacttatacttttcttactgtttttaggaaatgaaaaaggaaaatatgaagaaagatgaagctttaaaagcattacagaaccaagtatctgaagaaacaatcaaggctagtatgctaatactttatttttctttctttccttttttttttttttaacagacagaatctctctcatttgcctaggctggagtgcagtggcatgatgataactcactgcaaccttgaactcctgagctcaagtaatcctcccacatgagcctcctgagcagctaggacaagcgtgcttcaacatgcctggctaattatttttttctatttggagacattcttgtggcttttttacttttctctgtaaattgtaaacattgtacagataaaaggcaattcaga

SEQ ID NO: 55080 - DNA, 1013 bp, Homo sapiens
gttggccctagtttatcttgtcaattgtggctcccaaataaccatttcctacaaattcatcttcttactaccctaggcttttgccaacttctcaccactccctttcgcagggccttgcttctgagcatactcccttttcctggaatgcccttctaaacttgtccaactcttgtttattcttcaggattccataccttggttttctctttggtttcctcatttgcaatgaagaattagtttactcaataaatatcttctataatggcattttatatcctaagtaggactgtatattcactatttgaagcagtcaggtaacattaggagataaatctgtaaaatattgagtatatcgttttgtgttttttttttttttttgctttttttcctgcttaggttaggcaactagattcagcattggaaatttgtaaggaagaacttgtcttgcatttgaatcaattggaaggaaataaggaaaagtttgaaaaacagttaaagaagaaatctgaagaggtaaattaacatttactttatatatagcatatatttcaagtgattttttttaagaagcatgagatgtaggacaaaatatatatatatatatatatttcttttgagacagcgtctccccatgttgcccaggctggagtacagtgtcgcaatcttggctcacttgaacctctgcctcctgggttcaagcaattcttgtgcctcagcctcctgtgtagctaggattacaggtatgcactaccatgcctggctaatttttgtatttttagtaaagatgggatttcaccatgttggccaggctggccttgaactcctggcctcaagtgatccacccacctcggcctcccaaagtgctgggattacaggtgtgagccactgtgcctggccaaaataatatcttttatgtatctgatataaaaaagtatttccaataaaatgtaaattccaattttattttctttaaagagcaaacatttcaatgcaaaatagaatataccttaaaa

SEQ ID NO: 55081 - DNA, 1028 bp, Homo sapiens
cagataaaaccatggctgcctatgctgttccctccttctgggagaggtcagacagaacatgctcctttttatagcagtaaaatgtggcaatatctgtttctgcctagggaagcctatttatgactcaaagttcagggtttttattgggggcttgtcacacaggaacaatgaccagcctacaagtatcaaaaattccagaattctaaaggaaggcatgtttcagtgccccagccaggcaaaacaacctcatcacttaggaacatttttaaagccacatttccagacaccaaccaagagcaatcctataagcaagcccttccagtacatctccccattagaaaaatgaatactgtccttccaatgacaaactatagacatgaatgcaattgtcccacatgacaagtggatggttatctaataaggaggacagctttgacattttattgccatttatttgaaacattgcattgtattgagagatatatatatatatttgccaggtatattgtttacagaaagagctaaagataaaaaatcacagtcttcaagagacttctgagcaaaacgttattctacagcatactcttcagcaacagcagcaaatgttacaacaagagacaattagaaatggagagctagaagatactcaaactaaacttgaaaaacaggtatatattattagcccaagattgttttatttgtatgaaatagaaatttttaaaatcatgaatagatttttcgttagttttttaaattgctgtttggccagatgccgtggctcgtgcccataattccagcactttgggaggctgaggcaggcggatcacctgaggtcaggagttcgagacgagcctggccaacatggccaaacctcgtctctactaaaaatacaaaacttagccaggcattgtggcacatgcctgtaaccccagctactgaggaggctgagacacaagaattgcttgaacccaagaggtggaggttgcagtgagctgcaatcgtgcccttgcactccagcctgggcgaca

SEQ ID NO: 55082 - DNA, 1062 bp, Homo sapiens
tatgtgaagtatctttattattagaaagtaagccttgctttttatattttccaaacattacttcttggtctatatgttgatttttatgatacatcttgaaactgataagctaggttacatatttataaaagtatttttcttctgaatttaaaatgtttactgaaaactgctttacaaggtgtcaaaactggaacaagaacttcaaaaacaaagggaaagttcagctgaaaagttgagaaaaatggaggagaaatgtgaatcagctgcacatgaagcagatttgaaaaggcaaaaagtgattgagcttactggcactgccaggtaaaatgtgaatatgttttatttaccttcccacttcaatatcagtggtatctgagttttgaaatcagataatgttcagtggagcatttgcttgaggaattaatgtctccatagtctgtgttcctattgcattttgtttgtatttccttcatatctctcattatgctttttactgtattacagtttaatgcttttaaccttcctactataagtttcttaaggcaaggatcatacctggtttattttagggtcttacacaacaactggcacagttccttatacctcataggcactcagcaactgttaattgtgaataacattaaaagttgtaggcaaaaatgtaaatgtactcacatagaggaaactttcaggcaatccaattatataggggaagaatgacaatataaaagtggttctcagccttgagtgaatattaaaatcacctcaagagcttgtaaaaaaacatactgatgactgggtcccacttttagattaaataaaacctaaagattctgatttaatttggctaggctggtcccaggcatcgatacttaattggtcaagaaaggaacccatgagctgaaagcagtacccagcctcttcagatctcttctactttgttgggaagaattgacataatttataacataatcagcccacccttctaccaacaggagtcaagagtgaacttaggcactggcactaaaaccacatgtccccaggttccctctcctccattga

SEQ ID NO: 55083 - DNA, 1051 bp, Homo sapiens
taaattagggtttaagagggcttagaatttgtaatatttttatattagatttaagtgcttttttatatgtaaggcatcgttttgagtaacatcctcatgagaaatactatggttaaatgcctcattcaattgtaatgaagtcacaattgttacatgtaaaagactttgaaacactcctttgatctgtgtatgaaaaaatgtggatatgtatttttaaaaattcttataatcattcaatcttggagtcctgggagtgttttagcaattagcttaaattatctgtaataccacagtgtgagttaacttttacccttttagaataccctttattaaattaattgtattgatgtcaatctttttctttatctattattccttaaatttgaccctttcaatctgacttgattgcatatattattttgcttttaatttatagaagaggtaacctggttgacctaactttttaaaattatactcttctactatctgctttgatctttttcctttgataaattgtagagaatgcaagatggagattgaagacaaaaagcaggagctccttgaaatggatcaggcacttaaagagagaaattgggaactaaagcaaagagcagctcaggttgatttttcttgattatattttaatggagttttctgttatgacacagtcacacaggatttgagaggtcaccaattttttgtaaaatgggcatttttatagcatatcttttctctgcacatagggtttactaaattagagatatgtcatctctctttatcttgatatttttctagcaagtagattttgaaaatgaggattagcttagtatctgagccttttgatctcttatattaccccgtatcagaagaagctaagtgttggaggaacaaaaatatttggaaggcgttatttagcactttttgtccagcataaaatgaagtctgaattatttgtcatttatgaacacaactatattttattgtttctataatgtatatgggattgaatgtcactatgtattgttaaaaaaaatgcatatggggctcatga

SEQ ID NO: 55084 - DNA, 1022 bp, Homo sapiens
aaatatttttctgatggtctaggtataggcaaagacagtgtcttatttatctctgtatacaggcctttgcatggtatctttcatatagtaaatctacaatatatgcttatttggttgacaaatatttattgagaagctgctatgtaatagaattgaggagtcagctttttttttttttttttttttttttttttgagactgagtctctctctgttgcccaggctggagtgcagtggctcaatcttggctcactgcaacctctgctttccgggttccagtgattctcctgcctcagcctcccaagtagctgggattacaggcacctgccaccacgcctggctaatttttgtatttttagtagagatggtgtttcaccatattggccaggctggttttgaactcctgaccttgtgatccacctgccttggcctcccaaagtgctgggattacaggcgtgagctaccgtgcccggccgaagagtcagctattaataagatacagtgttttgtctgttaggaactccatcaaaagaatggataaataaataattgtacattgagaccaagtgcactgagttgccagatgaagtttgatgacttcatatcatcagtatgcatgtgtgttgactggtgaattcattcctccacttgctcttttaaaaagtgaatttagggtcaggcacgatgactcacacttataatcccagcattttgggaggccaagttggcagaatcatttgagcccagaaattcaagaccagcctgggcatcgtagcagtgggacccctgtctctacaaaaacattaaaaaactagctaggtgtggtgatgcatgcctgtggtcccagctacttgggaggctgagatgggaggattgcttgagcctgggaggtcaaggctgcagtgatttgtgatcacgccactgccctccaatctgggcaacagagcaggagcctgtaccaaacgaagaagaggaagaagaggaagaagaggaggaagaggaagaagaggaagaagaaggagg

SEQ ID NO: 55085 - DNA, 1018 bp, Homo sapiens
accttaacccagctgtgtggattaaatggtggattttaattatctataccaatatattctctgtctttgacatagataatcaaatgttaacttctcttttctctttatgttttctgtcataaatgttacatttaaaatgataaaagattatatggcttgtgtatgttacagtgatgtaatatatatcaataagagtcccaattatggtatttttgtcattttctcattagatttttttcttgaatatcagtttcacagtgggtgatactcattgtatgttaaattttaacatactcattgtatgttaaaggatttagttggaaggtggaaatttacgtattaagcaaaatcagaataagaaataggttatctatatatttcattctgaaacctacaaataccttatgcttttcaggttatgaaagagcaagaacagtacattgccactcagtacaaggaggccatagatttggggcaagaattgaggctgacccgggagcaggtgcagaactctcatacagaattggcagaggctcgtcatcagcaagtccaagcacagagagaaatagaaaggctctctagtgaactggaggatatgaagcaactctctaaagagaaagtaatccctattttaaataatcttatgtatctgaaatcttacaaatattagcattttttttgaactgtagaatatagttctttcaaaaatgaactgtattgcacaacagtgtgaatgtacttaatcccaccgaattatacacttaaaaatggttaaaatggtcaattttgtgtgtattttaccacaattttagaaaataatgaactgtgttatatatagataactttgtaatataaccaggaagtccttcagaactgagttttggctaaactagttctcaaattgagttataaagcacttttagacttttaagtgagttcgagctcttacttgaagaaaaaataaagctaatcttttttgagtaaaaatttttacatttgtagtgactcttaaaaatga

SEQ ID NO: 55086 - DNA, 1113 bp, Homo sapiens
cacctcccaccaggttgctcctttgacatacaggaattacaattcaagatgaagcctggatggggatacggagccaaactgtaacatagctctaaaagataagggctattttttggaacagaaccacaataccatgatcacacctaaaaattgacagtgactccttaatatcatcaaatacccaatcattgttcacatttccccaattgtctcaaaaatgtctttatagtttatttgttcaaatcagtacccaaatagagtccattgcatttggttaattaagttcttaagtaaattgaagattatggattcctttgttccctttttcctctagtattcattgagaaatcagatgtttgtaactataaacagaatttactttttttaaagaaaaagtaaataaaagtagaaagcattagactgttgtcgaatccagtttccttccatttttttattttttttcttttccaattctggggctatatagatgatttcacatcaagagaaccatgcaaagtggaagatttctgctgactctcaaaagtcttctgttcagcaactaaacgaacagttagagaaggcaaaattggaattagaagaagctcaggatactgtaagcaatttgcatcaacaagtccaagataggaatgaagtaattgaagctgcaaatgaagcattacttactaaagtaagtaaacatataaaagtaataaagcatatctatgaaaacataaatgtctgacttatttacctgtcttagtagtttatagaggactatatgaccaaatattggcctgtttgaataaaaaccatttgatttagaagatgttgaatttaggaaattattaagatgatgtacatcttattaccgtagaagatataatttataaatgttcaaatataaactcatctaatcataatgtttagagggttttatacttgatgtacctaaaaaaaggtagaaacatttttcaaaatcagcaaagttcttttaaaatcataaagtaggccgggcgtggtggctcactcctgtattcccagcacttcaggaggccgaggtgggcagatcacttgaggtcaacaagggcaaagacaattttttgagagccatga

SEQ ID NO: 55087 - DNA, 1455 bp, Homo sapiens
atttatcactttaagtttttgaaaaatttctaatgcactaaagctttcttgtaatgagaacacaaaaagcagaatagcttatctatttattccctactggaaattctgaaaggggtctttttgtgtctatatgtgttagattaacaaaagatagcgtacctctacatctttgcagagaaatttttaggtgtaagatttcaatcttgaatagaaattgatattgtcattaacaccaaaaatatatatataaggagaatctagttttaatggaatttcttagaataagcatatttcaaaggaatatgtgtaattttcccaaagtgaacctatcttaagtaaaggttttaaacagagcttggaaaactctcaagaattataaacagaattcctatagtgggacaaaggttgactttctaaaagtctatgattttctaaggagttcattcatttaacaaaaatgtattgagcacctactatgtaccaatttatctgcaggaatcagaattaaccagattacaggccaaaatttctggacatgaaaaggcagaagacatcaagtttctgccagccccatttacatctccaacagaaattatgcctgatgttcaagatccaaaatttgctaaatgttttcacacatctttttccaagtgtacaaaattacgtcgctctattagtgccagtgatcttactttcaaaattcatggtgatgaagatctttctgaagaattactacaggacttaaagaaaatgcaattagaacagccttcaacattagaagaaagccataagaatctgacttacacccagccagactcatttaaacctctcacatataacctagaagctgatagttctgagaataatgactttaacacgcttagtgggatgctaagatacataaacaaagaagtaagactattaaaaaagtcttctatgcaaacaggtgctggtttaaatcaggtatgtattttatacactgtaaactgtaataatttgtttccaaagaatatcattttattacttggaagaaaattcatatatttaaatgaaaaactactaatatttgaagaaggaagattttacattttatacattaagtaaaatcaataccaaaagacattttctctattgcatggtgtgagacaatacggggaaagagagaggcagagggagacagaacaggaagtagaacgaaaaataggaagatagacatgaaagtgcttaaaaataaaaaaattaaaaaactgaaaaaaagaaaaatggtaagaaatatgcagtgagaggaatccagagaaagtaggttctgaggtgaatgttctcataacttcgtcataatttactgttcatttgggctctgtatgtcaaaataagttattgctggctatcactgatccttggaaagttgatttactgaattagccattatttaaaagcatgaataaggccaactgt

SEQ ID NO: 55088 - DNA, 1115 bp, Homo sapiens
tattttatttattttattttatttttttgagatggagttaccctcttgtctcccaggctggagtgcagtggtgcgatctcggctccctgcaacctccccctccaaggttcaagtgattctcctgccttagcctcctgactagctgggattacagacgctcgccaccacacccagctaatttttgtatgttttagtagagacagggtttcaccatgttggccaggctggtctcaaactcctgacctcaggtgatccatgcacctcggcctcccaaaatgctgggattacaggcagtgagccactgcacccggcctgcattttatattcatgtggttcattattgactttttatgattcatatttttcagtagactaaatatttctcactctcgctttaaattatactcctgttattatggtagacttttaatgctaaatcagtttaggaatatttcaaatattaatctattattttgcattattctagggagaaaatgtgtaattcaaagaagatactgatgtgttgaaaaaatggaatttttggtactgtgctgtttacttattatatgtagctcatacttcatagaagctgttattttgcttttgaataaattttatatttcaatattttaaaagaaagcccttctaaaacttaattatatttttaaagaaaatttattattttatttattgttttttggcttaaacttgctgctttcttttgctttttatataaaaatcattgttaaaatgcataagtacattgaggaatgcaaatttttttttttttttaatgaaaggcctcacatatttattactgaacccagccaaccaatgcgttcataacagatgcagagagacaaaatatattcccaacaaaacatgtcaaactctccggatagtggtgacattttcagcctgatatggtaacatgattgtgaccttcagacagcataaatatgtgtgccatctcatgtgcaattccttatagacccagcttggttcttctccattgtctccttttggttttattttattaataaaatcctgattttattaccagttttcatctgaatccactggggaatgggacaattttgcttttgtttcttggc

SEQ ID NO: 55089 - DNA, 2501 bp, Homo sapiens
agagggaaagagccagagggaatattgtgggtttttcacaatattggttccactttttcaacttcttcagttgaatcaaaggtcataaattacgtgaaataaaacagggccatttataagagatccaagtttgagaaatttcttagacctgtgtagttagaaaaaagcaatctctaattatatttacctatagagtttatgttctccagatgtgtgacaattacatagtacttggacagtatccaagtatgataataaactgtctgaaattggcctaatctacatttaaccaaagtgtatatattgtgggtttgtaaaaaattgttatttttttttatgttttgggtgtttaggctagacagcaacaagcagaattggcccaacaggaatggcttcaaatgcagcaagctgcccaacaagcccagcttgctgctgcctcagccagtgcatctaatcaggcgggatcttctcaggatgaagaagatgatgatgatatctgaaattcaccagctgagtttctatttcttctataaatgtttttccctgcacaacaaaaacagtgaaagaaatgcttatctgtaattttgtatgcatcttggtggacttgtcattggtattctagggatgtctgctattaagtttcatctattgtgtgctatacatgtaaaaactgtctctttgaactattgaaaatttaaggttcagtataatatcaattttgaatttttaatggtgtttatgaaattttagatagcagcgagtccttcgtttgatcaataaacagtgttacagataacttcaagtttataaaaatacagtgaaatttctacaaagctctaaatctgcatttgcatttcctctgcccttttaactaaactaaaacttgtgaattttaaattattaaggggggggtgctgtgtgaatcagtagacattggattgggttggtgaaagagttcagttctgtagtatctgaatttgtcttttaaaatgagtacatatataggcaataaatatatatgctcagatcaatatacttgtttagaaaaacttcaagacattcaaaaactaggaaggagtatgtttaatagtatttgtataaatttggtggttatgtttttttattttgtttctgttttgtgtagaggtaaaaactatagttttattacagcataattcattttgagctccactatgacatttcaaagactgcccagtttggaagtctgtcatgatttttactctttcactccaattcagtaattgttgatagtattacttacctagtccatccatactcatattattcaaatatataggtggtacttttgaaacaattacattggttctcttggtttaactgaggtttatgaatattcaaacctttgctgggggaaagaaatgaaagttaatgagcatgcttgctatgagagagggatttttaatttaacttgtagttatagtttacttattgtttttagaattacttttacattttcccaactagatggcctagagtccaacattaccttttgagatgacattattgtctccataattgagtgatagctttaaaaaaaagattagttttgcttaagaagttatgttacaactgatcagccctatatgaattaactgatcagccctatatgaaacataagttgtgttataacttatcagccgtatatggaacataaatagtttctacctgcttgttagagaagctttaatttggttctaataaatacagtatggtagtgtttataggaatccaggatgttgaagaaatggcataatgtctatattttggaaacagaaaggaaaagtcacttaagatagtattaagtaattaaattcctatgtcagttgccaaatcttttaaacttatgtattcaccaagcccaaaaatagattgtggctcccaggattccaattttaattggagagctaagtaagtaaagttttataactgttaggtttcttaatgatcatattttgcagttttagtaaaagggaaatattgttatacatttattaaatatacttcccccatgaagtgaaaaggttaattttgctgaatgttttaagttgaagttacttcatggatgtcatacccatgaagtgcatttggatgagatagaagaaattgttttttaaaaagtttaagtaccaaaggtagtctagtctagaacgataagttaatacgtgttggcttttctaatttgtactgtaacatccttatactttctattttaagtatatctgtttcttaagtaaacaacttagatattttccacacctttttttttttttctgatgcagagttcaggttaatattttactgcatctgataatgtattatacgtttgaagcctagtgacttttcattttgacattcttgtgatttcatatgctgtattcttcaagcaataaaattgtgatgtgttttataaatggtttttatatttaatgttctatagagagatttctattattaccatt

SEQ ID NO: 55090 - DNA, 1019 bp, Homo sapiens
ctttccgttctttattctcacttgttctttctccttcgttctctcctttcctttcctccttgcctttctttggcacaggaggctccagacaatgcccagtgtctggccaaggtacgggcggagggtaataggtcggagaatttgctcctggcgccggcgcggaagggtcgaggtgtggagggcagtgatttctcaggtgcggagggcagtgatttctcaggtgcggccgggagaactgggggcgtgggggcgctgtcccgagagccgcctggcctcagccactcccctttttattccacctgtgcctgttttccgtgccttttgttcgcgaggatctcgtgaaatcactgcagagaaaggggagaaataacttttgagtatgtgtgtgcccagctagggtgggagtgaaagccaatgggttaattgaaaggcaaaatgttttcttatttttcacgtctactcatagattgggaatcttagaactgtgagactttagagtccatctagtgaatgctttacttagccagccaggaatctcttgtgcaacattctgtacaagtgcttacccagtctgaaaacacaccacccaagagaaaataccttaggagccccttcattccgtttcttagatagcattaattgttcttatattggggaggattgcatggtaaatgaattacataaagtttaattcttttacattggttagtttctcaggcattattggcctttttcccttacactttgtgcattctataattgattatagtgaattatcaatgaaaggaaatgggtatagttttattttaaatttttaaattttttatttttttcatgcctaccagagtgcattcattcgtttttataattacaaaatattttaacttttgcctacttaaatgacttgtgcttcaaaggaaactaaaatgtaagtagaatacttctaaaaagtaaacataggaaaacagtggaggcatgttatttagatttaactcttaagatttttaaaaaattcactt

SEQ ID NO: 55091 - DNA, 1085 bp, Homo sapiens
tatcaacttggtgtctgaaacttagataagcagaacttggtgtagaggactattgttgggactagaagaaaccttagaaaaatttgagtatgcttcctctttttactgttctcagttttgaaaaaggattatacttctaatggattgtaatgtaatacaaacaacctgtactgtgctcttgccattgaggaatttgaggttgggaaattctctcgaaattttggatttagaaaccagttctcctattatttcatatttagaatcacattactgtcccaaagagttaattattgagaatatgttgttacagaaaaatgatatgtagccatgcacttaaacctgagtctgtttcttgtaacaatcattggaatttttattgctattttaatgcttcttaagtcttatgttaaatttgagaaaaaaaggaattcaatagaacggctctaatactgactttgggggacttttgtagtgatgtgctgagtggatcgtgtcagactttggttgcgtagttgttaggggatatgaattaacttgtaataaatttgagctgtgcttacagggatttctagtgttccaaatgagtaaataagttagtgaatatatactacagtcacagttttgcattgtattctgggtaataccaaggaaagagatgatactgtcttcacttcttcaggatgcgtggtaacatcttaggcattgcttattgtgttcatttctttattacatagcaagaatggatggatcagatagccaaatatgaattaataatttcacaaagcacagattttgaaattactagcttttttttaacagatagggacattagagattggaaaagacctatgtttagtaaataagttttacttattaagaaataggtttttagtttttgaggacctagttaaagttcgacagaaaaaatctgtgtatgggttgtgaatgtgtgtataaatatgaaaaaaatatatggctgagcacctcacattcatatgatttactgaaaaatttgctacccaaggaaaatgctggacaagtctggtagttagaagatggattcaaatatctgatttaatttataa

SEQ ID NO: 55092 - DNA, 1028 bp, Homo sapiens
tgtcagctagtttgtagagaggaaatagtaagagaaatagtaatggcttataaatgtcaaataccttctgtgtatatcaacaagtgctgtcttatttaataatcttcaatctttaaacattttcacttcaatagcaaaaaaaaatctgtcttggggaatatatctatagaatattaaaaactggtaggaaaggttatgtaaaggttttgttctatagaatgtgaaagccgttccatatttcagttcaggccatgtctatctaatacacctgaaacacgtaaacaggactgatgcttgttcattcaacagatgtttatttcatgcctattatggcttcagcactaagctaggctttgtggggcatactaaaagaatcaattagatatcagcatgagcctcaaagcaaccctaaaacaactagaaagtaatagatggactttagggctatgaaaagtgacttttcattctaggtatcacaggaaaatctttaggaagactgtcatttgacctaggttttggaataagaagggttatgcaggtgggggttcctgacaggttcctagagggcagatattgtgtcttactcattgcttattcattgtctgattcattgctgtatcctgcctggattagcctgacattagtagggtctttaataaatgtttgttggactgacctgagtctagtgttgcgtttgacttgaatttgagtgcacaatgtctgaaagtagtgatgaagggtagactggaaccaggcaggcaaagaggttggtctggctgattgcttgattcatgaacctcttgtgtgtgtgtatgggtgtgtctgtgtgtgtgtgtgtgtgtgtagttacacatttgtatataatcaaaccacttttcagaccatttaaaaattcacagaagaaaatcttagtttattggtagaagggattacctcttgcttctgaatactttggtggcaggaggggaatacctctgggttttagaagatgaaagtgtatttattttagcgccgctgcaagaatattt

SEQ ID NO: 55093 - DNA, 1053 bp, Homo sapiens
gagacgggatttccccatgttatccaggatggtctcgatctcctgacctcgtggtccacccgcctcggcctcccagagtgctgggattagcggcgtgagccaccccacctggcctgtttattttgctggagtgcagtggcacagtcatagctcaccgcagcctcaaactcctgggctcaagcgatcctcctgcgtcaacctctcaagtagctaggactccaggcatgtgccaccatacctagctaatgtatcttttgtagagacaaggtctcgctgtattgctcagtctggtcgtgaactcctggcctcaagtgactttcctccctcagcctcccaaagtactgggattacaggcatgagccactgtgcctggctctatgccacatgccattttataagggacttgagcatccatggcgaataccaatgctggtggacaactatatttttacttctatatcagtttaaatatcagtgctttttctggaggtgagagggtgttcactgggaaaaatgcagttagtttagatccccactcttctgctttaattcctagtttcatgagctgatttatgtactaagagtattctaataagaaaatattttagaatatttgaaatatcaccttctaattgatgacaatgataaatgctttaaaactgcaaattgtgctttaaaaataataaaagtaatctgttagtgttacagataattttaatattgtcatctgtgcctttcggcattttcctttttttcccaaaataagttgtattaacttctatgattggttttacagaattttcattgactagttctttgaaacctcttttatactatagggggatgccgtcgggcattgtgagatgttatctacctgggcatgggggtacacccctctagtctcaactatttgggaggttgaggcaggaagatcgcttgagcccaggaatgagtccagcctgggcaatataatgagacactatctccaaggaaaaataatgtctgactgctttttgtaatgtgggagtcagcatttagaatctgtatggagcc

SEQ ID NO: 55094 - DNA, 1027 bp, Homo sapiens
tgattttgaaccattttattttattctggtcaaaaatctttctgaaagatttttgaatttgggcaagaaaggatcttataatttggaacattatctgtgtgccaagcactttgctagatgttcttttattttttattttactttcatgccggctctgcgagataagtagtggtattcccattttacagaaggtgaaacttaaggttaacttttgtcatgtaaagctaaactctgatctagatttgtgtgactccaaaactttttttatatgcctctaatggatgtaatttacctagagatttattaatcctctagtgggggtcgtttccatcttcaacaagcatttataaaatactttatagaaagcactgtgcctagttctgggtatacatccccaactgccttgtagaaattgctacactggataggatgtcttaacttgagcttaacgtgtatttgaacagacatttgtattagtctgtggtcctggtaggaaacagtactcaaaaggcttaactgaggagttttaaataaactttttataaaggtgtgggcctggtctgtggagccagcagtggtggatggtgcattaccctagagctagtaacagttgggagctgctagtagttaggccttaagggcaaggagaggcattggttactagccccctaagcagtagctgtaggcagaaagggctgcgtgacgggatctatggcctttagtaggggaatataggaaatttacagcagagtggtggaggaataaaaacttggatttctaatcctagtactttgggaggccgaggctggtggatcacctgaggtcaggagttcaagaccaacctggccaacatcgtgaaacgccatctctactaaaaatacaaaaattagcgggtgtggtggtgcatgcctgtaattctagctactcaggaggtggagacaggagaattgcttgaaccggaaggcggaggttgcagtgagctgagatcacgccactgcactccagcctgggtgacaaagtgagactc

SEQ ID NO: 55095 - DNA, 1104 bp, Homo sapiens
gagtgggcagagggggggagttcagaaaaaagatgtagcatgtgcaaatactcttaaacaggagggtgtctttctcaatgaaaaatgaaacaaacaaaaaaaatccattgtagccagagcaaaacagacacagagaaagatgtgttactgaagttgataaggtgaccaccattcacaggacacttaccatattagttcgtttaatccttccagtcatttaagatacataaattgacatctctccattttactaatgatgaaacaaggcagagaagttaaatggcttgcccaaggtgacacagctaataaatggcagagtctatatttgaacacaggcagcctagatacagaatcagtgcccgtaatatttgtaccatattgcctgacatgctcacttgcattttgaaaagatcactttaactacaatgtgaaaaatagattagaggataattagaaagcacactgagagatcagtcaagaggctattgcagtattaaacaaatggtaattgtagcttggagtagaatgatggcaatagagatacagggtagtagatggctaattattacaaagtgagtgtatcctgtgtgaataaatgaaaaacgaatgaatgagctgagacacatgtataatatggcagtgtgctgtcttactgtacagtgtttataagcaacaactgctgaattatctgttggaataaaaacgaggtgaatgtaaacctatttagatttgtgttaccaccaactaaggtttttgtcttaaatagatggtagaaaaatgtgttaatctataaaatagtagcttgtatatgttcattctgcaaactttcgggtgcacttgatgctgtaaagctcttctatttctcattagacctttaaatactcttcagcacaaaaatgaattgtagtacaaagctattactgcttctcagaaaatgaagaatgctctaaagataaatataaatgaattaaaaggaagagattattcactctaaaattgaaaatcataaccttcctgaacagtaaaggcagataagcagaataaatacttgagtctaatttgaaaaatccatatttctatttcagatgtcctactataaccata

SEQ ID NO: 55096 - DNA, 1049 bp, Homo sapiens
taaagacaagtgattatttgataactctcctttccactaagtatatttttactcacatccctagtgccaagctcagcactcatttttttgttgcattaaatgaatagtaatagctaccagtgccaagtactatgttaaatgcattatttatatttcgtttctttttttgaagtggagtctctctctgttgcccaggctggagtgcagtggtgtggtctcagctcactgcaacctccgcctcccgggttcaaacgattctcctgccttagcctcccgagtagctgggattacaggtgcctgccaccacgcctggctgattatttttgtatttttagtagagatggggtttcaccatgttggccaggctggtctcgaactcctgaccttgtgatctgcctgcctcagcctcctgaagtgctgggattacaggcgtgagccaacgtgtctggccacattatttatatttcatttaatcttttcactttagaattgtgtaattactccagttttacagatgtggaacaggaagctcagagatcaagtgctagtaaatgacactgtgttagatggcagatgcaaagaattacaaatggattctgtacttagagtttttagtatactaaaagctctaagtgaacatggaaaatgttagcctactgttcatgtgtagttattacagcattgatgtttggtctcatatacctttattgcacggatgtaccactattttggtgtaatacagttattttggaattaaaaaaaatcagaatcacttgcatgttgagatgtgcccagctagttattagagtttcagatgtaaaaatgtcactcttctataattccataattttcaagaagatgaagaaaataatgggtaaaatatggctctgtagcagaatactttttttttttttaaagtgctttaccatttaccagtctttcacatacattctcatttgaccctcacaacaaccctgtaaggtaggcagcataggtgttctcatttgacagttgaggaatgtgaatctcagagcaggtaactgataata

SEQ ID NO: 55097 - DNA, 2973 bp, Homo sapiens
gtttttcttttacaacccatgctcaaaatattagaaaattttgttaacattaccttcggaatatatccaaaatcttaaccacttttcactaccctgctgcttttactctggaccaaactagctcatctctggtctggattattgcagtagcctccttaaaaggtctctcttgctctgagttcggggtgtgtgtgtgtatgtgtgtattgtgtgtgcgtgtaatttttgttttgtttgtcttttttaaaaagaaaaagcctgtagcacccagtatacccaagcagtctcccatccaaatactaaccaggcctgaccctgcttagcttccaagatcagtcaagatcagatgtgttcagggttggtgggtctgtggaccttgagctagtttttaatcaacatggaaactccagtgatctatttaaaaacttgcattgggtcatgccaggtttattggaggttataccctccaatgtatttccaactcagggttaaagccaaggtccttatggtggaagatggggcatataaactggcattctggcgctcacacactccaatatctactactctcccctcttgctcgctcagctgtggcttgcttattcagctttttgctcttcctggaatacatcaaacatatgtaggcccagggttttaaccattttaacaactgaacttgtaactgcactagttctccaggtaagcagaagtattagggttatggacagtttatccgaagtaataaccaggaatgcctaataaaaacatgcaggtattgtggtaaaaaatagagttggtgaacaaggagttaccttctgactgtttctcttttagtgaagtaggaggcaaggttattagctaagagtgagatggttaggagatggtgtaaatttaaaggaaaagaataaggtatgagatagttggctaggataatgaagtagtgaatggttttgagctaagtagtattaaagtcccttaggtaatagacatgaatttcaaagcacaactagccaacctggttctttcttttcttttttccaactttcttcagcagcatgaggaagggttagtaaaaatctaaccataaatcagggttgaaatttggcaaagctagagaggggcaaggacagtgagtatatttggaaggagtgattataatgacggcttagggaatccaagctgtataaaggtggatatgacgacaggagtgggtgaaggataataataatgatgtgttgggaacaatgggttgtggtctctgtggggccaaaaaattgttggacttggggtatttcagggagtgacttgacagggtagctgtctgagaaagatattcttgaaatttattgcagggaagtggagtgggagaaacaagattgacattcttcctacttcataaggcagttattgctattgacaatggagatgaccatgggaatgacttactaaggtggagtggaagtgaaaatcacagagaagttaaaaaaaaaattgcagtagggtattggaaagatcgtttgggtagattttgaagtcactacaaccttaatttaaatttaagaaaaaattaaatgaaaagacttggaggagtttcccaaatatgcgagttttcccctatctttaaaaaaacaacaccatgagaaaccaaaaataactaaattgattttttaaaaattctacaatatttctcaattttctttgaggatagacatggttgatcctgaatggaagttggtgttttagctctatgagactgaaacaaaaagtttctgcagtccataagagttaaagagggagaaaagtcagttgtgttagatctttaaaaacatttttggtggtagtttggtattcagaagtgctggaggaactttggcagaaagtcagagccatagagcaagtccaaactaggacagcaaagtcattattctgctttttagtgaagaaagtatttttaaaatgatgatgacacttggttttttaccaaaaagtactttattggtacttcatttggatgcaaggctgtatcaaagtaattgggaaaacaaggattgaatattaaatagtgacttctaaagtgatacataaaatagttttttttaaattaaattacattaaagacatacagataaaagcaagaagactgagtaaacataatatttattgcctcacattactatacggtagaaccttgtagcaacatataattcgagttatactacataatgtggacatttatgttggtgctgatgccagctttaatttagaatattttccttgtgtttccaagtaaatacagtaaaataactttaaatattttacaaaattaaaaaagaatgcccaaaggaaacagaaaatgagctttcttgagtttacatataagatgataagatttaaattagagctcaccactgatacagagattcatttcacacaagctatggtaagaatgaatgtgttggaaaaggaagtgagaggatatttaagacaaggaaatgaggaagttgaactctgagtaagtccaactagctgaaattactaactagtaatttattccaggttctatctggaataaatccataggaataagaacagtgctaaaggtagagagaatagggaagtgatgcctctttgatgacttaatattcttctttatttctaacttacagatgatttcagaatactgctcaccttcactcctttagtttgtcatgatcttttcccttgaccttttccatagtcccaaagtatttgctgatgtggagccaggaggatgtatgatctcaggctttgaaactaaagaggttggaagatgttacttttgataatctaagacttcatgactttgattcttacattttattatttacttaattatttttaagagattgggttttgtactgtcacccaggctggagtgcagtgtgcgatcatggctcactgcagcctcaacctcccaggctcaagcaatcctcc

SEQ ID NO: 55098 - DNA, 1061 bp, Homo sapiens
taaaataaaaattgataatttataagattaaaaaaaacttcagtaatgtggaatatttaactgtccaggacaacttagacctcaaagcttttgagatggccagggttttgctagtgtaacaggactcatctaatcaaatggcagacttgtttgccttctctctgttctgagactgataataaccattagaattttcacttacttgcaaaaaagggatttgagctccagttcattgaaacaagggtggctagaacccacaacttcatgatatgaaaagtagaattttgtattgagaaagtgggttttattatgtactgatgctttacaaaggtgatttgaaggaatgaagcacacttaaggaatttggcacatttccattctaaggatgattctcaatagcagcgattctcaacaagggcagaattattggagtgttgaagtatgaggagtaatgaagagttgagagaaggcatgtttaatttgaaatgatctacattgagatttgctgctttggatgactacttagtaaatgattggattatcagctgctgtttatagtatgtcttttatccaaagggaagaggtttgccttgtttgtttcctcctctttaatgggaaaaattcttttggttaactccccttatttttgctagtgcagaggataatttctttcatagtgaggcagcacttttttttttctcctaaataatattatattagtccattctcacgctgctaataaagacatacctgagactgggtaatttataagggaaagaggtttaattgactcacagttcagcatggctggggaggcctcagtaaacttataatcatggtggaaggagaagaataagtgccaagcgaagggggaatcccactgtaaaaccatcagatctcgtgagaactaactcactgttgtgagaacaagatgggggaaaccgcccccatgattcagttatctccacctggtccctcccatgacacatggggattatgggaactgtaattcaagatgagatttgggtaaggacacagccaaatcatatcaactatattcc

SEQ ID NO: 55099 - DNA, 1056 bp, Homo sapiens
agacatagttatatgcaattgaatcatgtccattttgattgatggaaaatggttacttcagatcacttggtagagtgttttttgtttgcaaagatatgcaactgaaatcagtcattcttttaataaacattgtatttgtataacagattaagatttctaagtaaaaaaaggagccatatatatgtgataagtttgtatcattttagttttttctagtaaaagtaattgtattaagttctatcatagagatagtgctgtatgaaattatattccccagcctccaccccagagcatacataaatttttggttcagatgtggcagtatggtatagtggaagagaattaggctggaagacaggaagtgcacaaactactcttattttggcaagcagacatctctgaattcctttgatcagagattatattatgtgcatttctctaccccataccaagcctacctggtacctctggaactgggtgattaaatttaagttgaatgaataaataattaaataatctgtgtttcagtttagtttagaaattaggatttctgaccacatgctgaacctttgactacatagcagctttctattaatactggagtttggtgtcgtgtacatcattgtgatgtggtcattaagttggtgttgtgtacatcattgtgtctgctaagaacagtcctaaatatttcgggtaggcttagatacagagcaatccaaatatagctagtctgtaagaagtgcctttcacctcccgccatgagtctgaagcctccccagccatgtggaactataattccaattaaacctctttttcctccctgtctcgggtatgtctttatcagcagcgtgaaaacgaactaatacatagtctctatctcattttacttttctcatacctctttatcagaatttggtttctgtgtcactcttttgtccggctgaaagattttgcattctcaccagcaatacacaaagcttccagttagtccacatccttgttgttttgcaagtagccaccctaatcggtgtgagttgttatctccctgtggttctg

SEQ ID NO: 55100 - DNA, 1064 bp, Homo sapiens
taggatgattgtcaaatttttggcttaaatgtctaaattctagatggatggtagtgccactaatgtaagaaaagaggtatgtaaaagaagattaaaaagtagataaatttcattttagacttgttgaatagaggtacctggggcagatggactgcctatgcaactgccactcctcctcctatagaagctttattgaggtataattcatatgccataagattcatttgctaaagtctacacttgagtgttcttttagtgtatttacagagttgtgcaaccataaccacaattgaattttagaatattttcatcatcccaaaaagaaaaccctgtacccattagcagtcatttcctcctcctccatgtgctagcaactgttatctattttctgtatctgaatttgcctattctagtgaattattctgttgatcatgttttccccttcttcctttttgagttcttttgtagaaaggactgtaggtcatgcccaattactagtttgctaaccatgactcgtcccattctttctgtcagtctagtatctgaaataattaatttatagcagatagtagctttgctgatatttgggtgaattagtaaatcattcataacagtgagttttgttagtgtttgggtaaccaggattaataaccactggtcaagagtatttattcagagttccttcatatgactttagaagggtctctgcttcgttcccctcttacttttcacgttactacttgcaattctctagctcatatttgatgttccagcaacattgaacccacttacagttcttaaatgctctgtttttccccacttctttgtctttgctcattagatcttctctaatgagcagaatcctcccccaggggtttccagttgcccaattcctgtttatctctttaggcttagtcagcaaatcagaaattttagctttttacccctggggaaccctctttacagagccctctattgttcttaccatattatgttatgtaagagtgtctatatatttgatttctctagaccagagatctctgaactttttattgctcacctgt

SEQ ID NO: 55101 - DNA, 3240 bp, Homo sapiens
tttaaatcatctctagattatttagaatgcctaatacagtgtaaatgctatgtaaatacttgttaggctctattggttttttaatttgtattactttttatagctccattgttatttacttacttgaatatttttgacccgtcgttgaatctgtggttgtggaaccctggaatacagagggccaattgtactttgtttcttctattcttcctcttaactattttcttatttgatagtaacatcaaccaaattgttgtgattccattcatatgaaaatacagaaataacctttctttctccaggtatcagtattttaagaacaaattgtaagtaatgattacatattatgatgctaatggagtagagatcatattgctgtcttaattgttttatatcataaaattcatgattgaatgaaattgaaaacttagactatttcaattgtaacaatagttgaaatttttaataaactttaaaaaatcttcttcctatagaaatctggttaagaagtactgccccaaacgttcatccaaagatgaagagccacggtaaattacatacctgttcattaatgcatattaaaaaatttaaaaatacttatatttttattatttagtaagatatattcttagctttttataaagattttataaagtttaatttaaaaattaatgtttatgaaagaaggaactactgtttatcttttatgaggataaatactgtagtgggcttgatcaacagttttctagaatagtcagatacagattttcaattaaaatgtagactaggactccacttgaatgatttagtctgcagaagaaaaggatatttttcatacttggttgtgtagttgttggcttcgtagattcttgcttttactcttatagatagtaaaacaatttgactgattggtataaagggatgttgaaaagcactgagagtttttgcattagaaataaattaaaaggttagaaatcacttatgagtttttttgtggtcttaaagaggaatatgtggatgactgtttagatggagaaacaagaggagactcgacttaaacaaacaactctgtatataattgtcagttgttaggattctcaggtttagtgttaatggagtcctatctgagctgttaatcttcatctgtaagagagtgttccgcagtatgttcaaagtagatatatacattaatacagtgattctctttgtttctctccttccctcacacacgtttttacccttatttttgaccctttacccgctttggtgtcaactataatggcacttcacttccattcaggatatgggcaggcatacaggcagctgtgtccagagctgatagcaaaattgttctgtagatcagccatcgagatgcatttggcaagcacatcatctctgcaacaggttcagctaccaagcctaggaatccaaccaagttcattcccaagctcaggccagtcagttggcaacttaagagattccagtatgccaaaagagcctgcaggtagtattcttattattttttgaccccaaatatccctttactaataaatgaaagactacttgaagatatacaaacatgtatgacttgagcttaatgcaggatttttttccatatgaagttaatttagaactagtagctgagatttaggttgaatatgctaaaatttgcgaaatgttagattcagtccatacctcaccaacatttgtaatgaaaataaaagtaagtctcaccattttgaaatgtttttgccaggtttacctcgtgtgtagccttttttaatatccttaatgagttaaatgactatgcaggacagcgagaagttgtagcagaagaaatggcgcacagagtgtatggtgaattaatgagatatgctcatgatctgaaaactgaaagaaaaatggtaattcttacaattttcatccaattgcaatagtatatgaaatagtcacacagaaacactttgttttctttaaaatgtgtgttcagcataaactggtttttctatttcactacatttcttctagctaaaaattatcacaaaatactcttgctaatttatgatccttttggatttaagtttggcaaactacagcctatgggccagacccaaccaactgcttggttttgtttgctagttgccacaggctaagaatgatttttatatttttagatggttgaaaaaagaataatatttcatgacattgacaattatatgaaattttatttttaatgtccatacataaaattttattggaacagacccacattcattgacttttatattgcctgtggctgcttttgcatcacactagcagagttgagtgtcacagagactgtgtggcttaaaaagcctgcaatatttatctgaccttgtataaaaaatgtttgtcatctactattcaagacaatcattatttttctggaaattgtatctgttttcaaggttatatgtaaagtgttaagacaatatcctataaaatgcatttttaggaagttttgcattactttcttcctaagtcttggtaaagttatataattagtaccttgaaaaaaataaagtgaaaagccttttggggactttagactttagtgtttaaatgtaattatttttatttgtttttgttttattttttatttttattttttttggccgtggttataatcttcagcatctgcaagaaggacgaaaagctcaacaatatcttgacatgtgctggaaacagatggataatgtgagttatgacattttcatggttaacataaaatcttgtagactagattagccctaaatacttttatgcttcatatctatttgagtttaatgtttctcagtgtattattaataatttgacattggtattattgtataatagtcaataaagtgtaaatggaggatgtgaggtcattttgtcatttttcttgttgtcctttataactctatacttaagaactctgtaatcttcaatcattgtgaacatttaaggagattcttttttttttttttttttttactttaaagtagttactataaagtattaatagaggatagaagtaagagggaaaaggagatatatcttagaagactatttcctgaggactgagaataatcaaggttctttttctacctttaacttaacacttgatgtctcttgacttcatttttagcatgtgaaaaatgaagagagtgaacgagatgatatgaaatgtttcttccagttcagtcattgtataatttt

SEQ ID NO: 55102 - DNA, 1935 bp, Homo sapiens
acattttttgagtgagatatataataaatattaactcagtcatgcctatgttatttttcctcatagtctgtaattaatgtctgatatttaaggaacgtggattggttgtaatagtaaaatttattttctaatttagaaaggacaaattttacttagtgcgcagttcatttccacacaatacacagtggcacattttaaagttatttcttttttctctctttttaaaattattatactttaagttctgggatacatgtgcaggacgtgcaggtttgttacataggtatacatgttccatggtggtttgctgcacccatcaacccgtcatctatgttagttatttctcctaatgctctctaaagttatttcttaaatgaagttagcctgattttattttctcagtgtgatattttaatttttttaacagagtaaaaagaagtttgaaagagaatgtagagaggcagaaaaggcacaacagagttatgaaagattggataatgatactaatgcaaccaaggcagatgttgaaaaggtaagaaatactccaaaccaactttaatgtcaaaatattattatttgcataaggaaagtagtcacgacatttgtatgactacagtattaggatttacttgagatacactgtatctaagtctaaaatatacaaatatttgccaactttaaattatacgtattggtctgagaaagtaatatatgttaatttattacaatatcttagctgcattcaaatttagaggaaagacgtagttgctactgggattgagtttttagcctattccaaaataggttagaaagctaagatgtgttgatggggtaataattagttagagaataactgttgtaatttgactttgtacaagagatcaagaggaacagaactgtattctaaataagcattccttaatttgactttgtacaagagatcaagaggaacagaactgtattctaaataagcattccttaaagtatctgtggttctacacattggtggaaacactgttgaatgttgcattattcaacaatcatattattatttagtttcactgtgatttaagttccatattttagttggatatagttggatcataaatgttttactgttaacttttttaacaatctgaaaatattcctaaagctacctgtttttctcttctgattaaaagcacactgtttcaagctataatgttttcatttgtttgtttttttatctggatttggtaaggagagtctatattagaatgtcttattgctatcagggaatactattgtaatgagagagggaagaatattgtaataaggagaccactctgacagtaagatctgcaggtgtctttaaatataaaatatattttaaatgatattaatagttcaaaaaagttatgccacgtcattattcttttgatgtcaggtgttggcttcttcattgataaaatctagttttagtataattttcaaaaaagtgaattgctgtgattttgttgttgataataatttcgaccattttgcccctaggccaaacagcagttgaatctgcgtacgcatatggccgatgaaaataaaaatgaatatgctgcacaattacaaaactttaatggagaacaacataaacatttttatgtagtgattcctcagatttacaaggtaaatcttagatatgaagttaatctagttttagattaactggtgtttaaatataaaacttgtaagtcttagacatcagaatctttctagattcactagacatcagggttggggtgagagattcctttatgattatagatttgaaaacaagtgttttctaacttttaagtcacacattttcctacgtatctactattagtgttataaacagtttactaaaacaatgacatttgtaagatacatttaaatactttaagtattttgacatgacaaagg

SEQ ID NO: 55103 - DNA, 1160 bp, Homo sapiens
tacttgagagaccgaggcaggagaattgcttgaacctgggaggtggaggttgcagtgagccgagatcgcgcaactgcactccatccagcctggcgacagagcgagactccgcctcaaaaaaaaaaaaaaaaaaaagtctcagtcttgtatatgttatgggccagttgctttaaaaaaaaaaaaaagcaccagaattttgtcatcaaatgaaatgttttctggaagcataaacaagaactactctgattgaatagtaaaaggtgggagtgctatggggcagggagctgatagccagtaaggggtccttttagaaggctagaatcccagtgtcatctggttttaggaaaacaatactaagtgccttactattttttttctttcttttgttgtttagcatgtcccaggttttaagtattataagtcaatagcacttgttaaaaggtattaacaacagtgtaactatgagggtagaaatatttaatttttgatgggggatcactaattgaactcctttagaatgattgaaaaattcagttttctctttttaaaaaaattcttgattattagcaactacaagaaatggacgaacgaaggactattaaactcagtgagtgttacagaggatttgctgactcagaacgcaaagttattcccatcatttcaaaatgtttggaaggaatgattcttgcagcaaaatcagttgatgaaagaagagtaagtgctaaataattatctttgaatgcatctgtttggtttaggtgtgcagtttaagttagtgaaatgagttgagaaagggataaagtaatctgatgtgtggttctaaattatattctgtagaagaatgtcttgcaatagattcctttgagttctgagattcattctacatgcaaaagttctaattctttcttaaaaaaaaaaaaaagatttctaactctcttctcccactaagttttcagttcttatcaaagagtctaacctaggaactgtgtgttacaaattgtgttatactattatattagtttagtgaaaatttagagaagtatgtggttagagttgcctttagcacttgagctggatcaagaaatgtgggtagcatatggagtgatgaccaatgaggaggaggaaggagggcattatgtgcagatgaaacagcatagccc

SEQ ID NO: 55104 - DNA, 1637 bp, Homo sapiens
aaagctaccaagtaaaaacattttatgaatattataaattaattaagttgtaatttgcaagtatatttttcttttgggattaaaatactttgagtttgttacacattcatgggaataaattatttaccttaatgattattgtggaattatttatttaaacttatatttgttgtttttttgtactgaaaaagttatgaaagctgatgtagaattatgagcaagtgaaacagttttaaaacctagtttcttttgtataggactctcaaatggtggtagactccttcaaatctggttttgaacctccaggagactttccatttgaagattacagtcaacatatatatagaaccatttctgatgggactatcagtgcatccaaacaggagagtgggaagatggatgccaaaaccacagtaggaaaggccaagggcaaattgtggctctttggaaagaagccaaaggtaaaagtcataaaattcctatatgctaatcagtttaagtgtaccaactaaaacaatgtgggtattgaatgcaaaatgatttaccattaatggagaataaatattttcaatttgaatgattcagttaacctttcacttatattaggaataccttaacagtaacagttatttatggatttaacatttgactaccgcttaataatgggtaagagtattaacaaagttgttaatatctagttaagttatatgcttttgaagtttcatttgtatgtagtttccatcagaatttttaaggaaacatgatctaactaaaatagcactaaaattggaattctcaaatggaatgaatgaccacagccataatacatgtcaagttaggttttatagatcctactactaaaattatttttatcatccatatgagtttttaatgggaaaggttcagtcttggttaattgaagtttaaaacaatttctagtttggtaagagaatctcactcttaacttcttgttagaacccaccttctgatgtgctctttattttagatagatctaggtcagcatgtgagcaaatgaaatagatgggtgctttgtctttcttatcaattaagtggttgtactcgtgtcttattagtaaggagaatagagaaatacttttaatctgatgtgctgtatttattaaagtatacttgattattttaattcattttttgatcatggcatatgagtgtagataaaattaaaatttaactcattataatatacctgtatctttaaaagcacaattataattaactcatgctttatttatgcttttaatcatattgtccagtcaagaagttgagaggtgagacctgttttaagtcagatcgaggtagctagaagagcttagatgtacaaggaatactggaattaaaaaaaaaaaggtgaaataaggatgaaatagaaacagcctgagaggaaagccatgaatgtaatgaaaatttttttgcctatttttggtaataatcagttacagttttaatattttatgtgcgacattacctgtttagataactttaggtgtagctgccagctttatttcttgacaagtaccatggtaatgctaatattctagaaattagaagagaattttaaaatctaggccatattgctttctttgacaatataatttgtg

SEQ ID NO: 55105 - DNA, 1054 bp, Homo sapiens
gaaaagtccccatggatgagtctgtatgataactgtaggcatgcctataatcacttctaaaagctctgaacacttgtttgaaagactttgagaaatcatatttgggatttctattgcctgagttacaaggctagaactcattcccatgttgcttccctatggcagtttatttattacttatttttaatttaaaattgttttaaagagatgtggtcttgctctgttgcccaggctgatctcaaactcctgggctcaagcagtcctcccacttcagcctcccaaagttctgggattacaggcatgaaccactactcctctggcaatttagactacactaaatattatattgttacataaatcatgagaaattactatgtagtagtcacgtttttgtaatcatttgtatatcctatataatgagtctaccaggcccagttaaaatagtcatattttacactatatagtcatagtcatattttccacatgtagtcatagagatgcgaggtaagtgtaattctaaggaaaaaaaaaactcaggcaattagagctatgaaccctggagagaagcttaaatatgtgtcatcttattttttttttttttgaataagtttgtaggtagaattttataactgtaaaacttaaaactatttgcttattgtttctcacaaattatagatattcataagttatttacgtaagatagcataagttatttttgtagggatctagttttagaaggctgaaatcccctcccagatttattattagctataccactccagagaagaaagcagtgtgaaagagaaaatatgacaaaccaactaggggtttagaggacagagcagggaagaaagtggattacaacttggaggttgagaaatttttttcttttgattaccgtttggtatttactagatatttatctcaaaaattaacctatagagattttttttccacataagaattttctcaatatagaaaaattcaaaaagaagaaggtaagctttagtaagcctgcttatatgtttttacatggaattttcagtctattaag

SEQ ID NO: 55106 - DNA, 1048 bp, Homo sapiens
gtacattttaaaagattttaaaatgaaagtaaaaatgttaccctcatctaaccatggtatatttaaattcaaacagtactttgaagtataaaaatgtaggtaatagtgttttctttaacacactggaaagaacattctattttttaatatttcacataagatttctttttaaatgtttaatcttagagttcatattcaacttttcaaatattagtaatttgagaataaagagctatagaagtgaaatccacttacataaaattcactttaaaagaaaatgcatgattacaggtagaatgtttatttttaagttttagttaaacatagaaaatatctgcccattatcatcaatgtatgctttttttttttttttttgcaagtaatttactttcccaaaatgtgcttaaaatggtttttctggcataattgtttggattgtgaaatgtacgtgatttattttagtattgtgaaaaagaataggctattgcatcttctgtattatggtttcctgtgaataatttaccatttctttctgttttccattgaactattcagtggtcggtgaagatggtaagccttatgtgctgatctatatactgtgccaacattaagtaatctcaaaacattgttttgtttaattcaaaacaagtggtaaattacatcccacgttttcaccttgtgtgttttttctttttatagtttcatagtccagcatatgccagtactcttgatgtcataagattagaaaatgtggttaattgtcatcaacccattaagttcttaaatgtcattgaatggagtccttgtcatgttacagaggagcgtaaaattgtggttaaacattttttaaagattacatggtagagccacagtttgttatgcagaaggaaaatttagcaaatattattttgcttaatagcctttaaaaaatcgtataaatttgatttgtagttttatccccagagtcattagatttttccaaaaaaagaaagaaaaatttcaaactagtatcattatggagttagtccttggttcttctgtgctattg

SEQ ID NO: 55107 - DNA, 1058 bp, Homo sapiens
gttgaaatgcatttcttcattttattcaataatttttcaagatttttagaaatatttttaaaaatctaaattaagaagtttatttttggcatatatatatactagttttcaaaacttgtactccttttctgtaatcccagctatttgggaggctaaggcgggaggattggttgagcccaggagttcgaggctatagtgagccatgagagctatgatcactcaactgcattccattgtgggcaacagaatgagaccctatctctacaaaaaaccttcaactccaaagtagattaaatatgacaaatttatgttgcaaattaaccagtaaatctaaaggaactcaacaaaggaaatttcaccattgatttatttaggccagattgggttgattgatatccttgtttctggtgattggtaaatgaaaaaaaaaaaaaaaaaaaaaaagcaacacttaggatgccctacttttttctagcaagcttgttgaatatccataatctacaggccactggggaaagaggctagggattctgttattaattaaatgttacatttaattatagctcatcctaggagtgagttttctcttttctgaaagtaagtgactcattcttacacatggtgaaataaagctatttagcatatgttacaggcataagtggcccaaagagcaagatcgtatttgttttgagagctccttttagcatcactttaacaaatttgaatatttatattcttttttcttttctttaccttttttttttttttttttttttaaaagacggagtctcgctcttgtcgcccagcctggagtgcaatggcgcgatcttggctcactgcaacctctgccttccgggttcaagtgattctcctgcctcagcctctcacgagtagctgggattacaggcgcctgccaccacgcctggctaatttattgtatttttagtagagacagggtttcatcatgtcggccaggctccagtctggcctcaaactcctgaccttaggtgatccacccgcctcagcctcccaaagtgttgggattacaggcgtgagcc

SEQ ID NO: 55108 - DNA, 2734 bp, Homo sapiens
gtggaacataataatagaagttgaggatgaagaagtataggacttgtgaaaaattctgaatgcttttctgtgaagttctgtaggtactacagtccccagttattgagagaaggggtaacattattagctctgtgtgataaaagataattgaaaactgtatgaagagtaaatagtataggaaagagattggaggtagaagcctttaacaatccaggtgagagatactgagggcctaaattaaggcatgaccatgggaatagaaaggaggaatagataaaagaatcatttcaaagccaaagtaggttgtactttcacctgattggatgctggagaagagaaaacatggaggaagcttaaaaaaaaaaaaaagatttgtagctatagatttaattgcaacaataagaaaaaagtttagggcaaagataaagattttgtttatgttgatttttgaaatgtgaaaaatccatattagaagtgtccagttgggtttaaagatatgaatctagaattcaggagagagaggtctggagatatgcatttgaaaatcatctgaagatggatgatattaaaacaattaagagatcatcctccaacaagactgtaggaagagacgagaagaaacctttgtcattttatgtaatacacatttaaaggttgaacaaagaaggagaaagaaggcagtgagggagattgtgagaaagcagaggtgaggaggagggaaaagaaaatgtaacctataggaagtcatgaaggaaaagagtattaaggagtgttagtcaatagtgtcagatgttagagtcaaggacagctaattgaggcacaaccgattgtaatatgattagagaataggaggtaggttgagaggaattggcaaatgactgactttgggtgggggcaagttaaagctgccattcctatttctagcagaggtgagtgggaggacaatgatgatgtatgagctaaggaacactgtggaatagtgtggctgagttggaatataatgagtttgatttgggacatgatgagctgaagaatattcttccagcccttgattttgtgtgtgtgtgtatatgtacatataaataaaattccttgtttagaaagcaggaagtaagaaatgaactctgttctcttttggtattctgattgtcttcataaattagtaactctatatgttatcacctttatgcaaattgtctttaatcaggtcatgttagacaaacttaaaaagatgtgactctacttaagattaagctgcgtacgagtccccagagtccaataaaactcttttatctggaagcatatgaagttaatatttaattctggggttccttctcttttttagagatgcactcaacaaaatgaaagatgtatatgagaagaatccacaaatgggggatccagggagtttgcagcctaaattagcagagaccatgaataacattgaccgcctacgaatggaaatccataagaatgaggtagatttgttattcagcacttgtcaagataaattatttttataaacttcattatgatagattggtttttgttagaattatcttcaaatgtttatatttaatgttagggtttatgatctaaaagtattattgtgatgtgtgttatttaatctcattaaagttttttatttagacctttatataagattaaacatttatactatttttttgaatcagctataaagttgatcctttgaccagtttggaataaaggtttcacatctctaagaattacataattataaaaacttaaacacattttaaatgtagatatcttatgagcttttaaacatatttattgagctcagttgtttgcttattttttttcctaaggcttggctctctgaagtcgaaggcaaaacaggtgggagaggagacagaagacatagcagtgacataaatcatcttgtaacacagggacgagaaaggtgattttttgtattttatttgtatttcttctccccagagttttctcacccttttgtcctaaactttatacaattcgtttttttcttccaaatttaacaagttaagcttttagtaacctcagtcttttgaacctaagtaattttctttagtgataattacaggtgaagtaggaaagttcatcttgctattcaatcctagtttgtcatgcatccaaacacagagctaggaacatagaaaattcttggagctacagtctgagggcctaggctcctcgggcatgggaaggtttcctaaggttcaagtggaattagggtcgcttatgccaaagaaaaattttactatcaaatagctcagagttttgtgaagaaaaaaaaatgtattgttagtttggaccagagcttccaaaagacactttgctaagtttctgtaccacttgtgacatttctttcttgatgtattatatctttttttccagactaaaagtccacaaattaggattcaccttagagaaaaatgtgagaggcctagtaacaactcttagttttctacttaattacagtgtaatctgagcaagttcatttttaatgctccctaagtctcaatttcctgaaatataaaatggaggttaaaatatccaccctttaggtttgttagtaaaaaagtaaataatacacataaagcacctagtagtaaatagtggtaatagtagtatcacttcttgaaagagtacatatctttaatctgttaagagatacccacaaattactggtttttgttattaggtaaaa

SEQ ID NO: 55109 - DNA, 6825 bp, Homo sapiens
tccagattcagaatagaaacaatccacctgaagcgtgtgaactaaacatggatatgcatggatcccttaaggaattttaggatgataaatttgggatgatggaagacaagggtctagaacgtttttctgttttatgtctagaccgagtgatagtgaggtgtatttactgaataatactttgtgcctagaatattgtaatcttgtaatttttttttaattcaggaaattcagcaaagcagcattttgtattagaagtaatttgtatacttgacatttgaaaaaaatagggcttaagtggaaactgtgtcattaatatttaatttttggaattgatcctgaggtgatcaatttataaataatatatagaattctcatgtttatgatacttgatcagagataattttttgttttatagtcctgagggaagttacactgatgatgcaaaccaggaagtccgtgggccaccccagcagcatggtcaccacaatgagtttgatgatgaatttgaggatgatgatcccttgcctgctattggacactgcaaagctatctacccttttgatggtatgattttcttaataatattgtatgtaaaaaaattggttctttaaaagtatttacatcaagtcactcactgtagtatccttatttaagtaatatatgttgtcagaaaattattatcccatttctttagtatgcatacttttgttataactgtattacaaatgtagatatttttcttccgtacatggaattaaaaggaaattgcccacgttactagcatcctaatacagattattaattaattatcaattttggtcagtgcagaattttcaccagagtccttactgtgcacatgtcctaaacaaagtcgaggcagcttgaacatgtagctcaacccaggaagcgggatgctggcggatgccacttcatgctcttccttgtagcttactaacattaagagacaggtacaaggcatagctagctgaatgccatcatcatatactgagtccgtaggccacctgtttagatgaaagtgggagagaatgtagtagctactgactatgttatctcttactctatgaaagttgaagaacaaactctggaagggaagtaaggcactgaggccttctcctgcagatttttagttcctctttatcctggactgtgaaaaatactttccctcaactaacaggagaactgagcgacactttcataaataaacggttgtaaaatggtgcttgatttaaggtctttctccccacttcgtgttggtttaaaattgagcaaagtctctagttacttcttattagaaaatatattaaatttaagaccttgcagccaagtgcagtgatgtgtgcctatagtcccagacacttgggaggctgcggtgagaggattgcttgagcccaggagttcgaatccaacctgggcagtaagaccctatctctaaaacaaaacaaaagaaaacaaacttgctataatgtaatctagagagtagggaagcaatttggcacgtgttaaatgaagattcagttgtgaaaattgttactgctaagcaggttgggcgtggttggggatagagagtgaaagagttgtgtatggccattctgtttctaccatctctagagtcaaacccgtatttttctctgttctcccttcagactctcttttttccttctttcttcctgctcttttgctatctggttactgttttcctaatccatacctgctgaatttttttagatagactactaaaatttgggaaaagagttggaatagtgacataggaattagaataccctgtcaaatcatgtaatgtcactgtgactcagttaacttcatccgttacatgggggtgatgttatccagccctgcgggcttattatgcagctcaaatgagagaatgtatatgaaagtgctgggtaagccacaaagcacaatagagatgttgctagtgagagtcagtagttccaggtacattgaaatctagtagggtttcattgtattttgtgcattgtattagtaactttaaaaaaaattatcacaatgcttaaattatgcttgtgaaaactctcatctaggacataatgaaggtactctagcaatgaaagaaggtgaagttctctacattatagaggaggacaaaggtgacggatggacaagagctcggagacagaacggtgaagaaggctacgttcccacgtcatacatagatgtaactctagagaaaaacagtaaaggtgcagtaacttatatctaaactaaccaggcacctttgtgccatgtgtgacataggaagagtaacataaaatgaaaacacattcaacaggttgaaaaaaataaggaaacttaaagggcatccaagattaattgttcactatgtgagctgagtgtaggcttgatcttgtgaatattaccacaagaaacattttgtggcactttactgtttgagtaacgttggtgtgaagcttaattgatgccttttgctttatgtcccgcttaagtctgtgtgaaggatttgtgtttttctgccttacaaatagaatttgatttattgggcaggaattcatggatagtaatgctctctgccccctttacttcagaaaacacagtgactttagtgaatttgaatagtgaaactgctctgaaatgctatggaaagccgactccccaaagagtggtttcttctagaagtttgaatttgtagctacagtttccaagaagaaaaatagtagttggataatttagtaaaataataacatcattttcattttcttacctattcttaactttggtttcctaaaggaagaaaatgagcaggtagcacataatctatttaagtagatttaaagagagtttcaaaataaatctcctggtctagctcttaggtgaataaaatagattttgtttgagacctcaaaatattttgaggttagctggtaattttcaataatttacaagcttccttccaaactaatctcatacttttgtatgtttcatcttgaaaatatcttttgggaaataccactttagtgattatttagcatttagcagttacacataggaaaatacacagttacatagaaaaatacacatttgaagatagaggaaaccttgaatggaggggaagtgttgacaaattttaatttttaaaggagaaactttttgactatctgggttagaggaagatatgtgtaccgcctttagggcattttgttatttccgctgaatcattagttattaggatagataaatttttccaattagtttcagcaagcgttgttggaaacactgtgcagtcaaggattgtgcagtgctggttgtgtgaccacaccctgagtcagtggtgtggggaagtaaagtgtgaagaagcagtaagattggtttttaattttgcccatgttttaaattttcctggtgttttcggtagctgactataaaatgatagagacatttgggacaggcactttaaactgaacaccccttttggttttaccaaaggtcttcagtaattgttcttttctttttcctcctggactgcaggttcctgaagagggtttctgaggaaatgggcaagatgttgaaggaggttacatgcagctgcttttgggggagggtattagagttgtcaggctcaaagagagtgagagaagcaagttgcatgagtgcatgcagacatgattttttttttactaacttcattagcatttccatacattgtttttaaaaatcataataccaacccttaagttcctagttcacagttattcccacaaaagaaaaagccaacaatagtgtaccatttttctatttattttattgctgtctaatcaataaagaatgcagagctgtcaaaaaatgtgtcttacattagctgtcccaacaggattgtcttccctcccagctctgttttaattggcttttagacccactatctgtcagatccttgccatctgtcagtgtctgcctgcgccacctccgtgcttgcttaacatcctgttgcatgtctagcgtgattgagctagatttttcaggcatgtctttagattcccttgttcttgtcaaagccttgttttgttttacatttgtagtgcaaatcactttgtcaaacatctccagcactaatgtttccatcttagtatttgtgcacactgctataacttccccactgcaaacattccagttttggcattacgaagaagtagctgtgaacctgaagtatttatgataagaaaaagaaaacatctctgctgtagcctacagcccagttgaaagaactctttgaaacgtgatacatcttcagcacctcagtctgggaagaatctagtcagcactgaaatcctggcataataaacacagaagatattcaccacctcaagacaaaggactattgtcaaaagtcagctgcttccattcaaatgctgccttaaacttgagtgcctaaatctgttgattgccaacactaccactacagtatcccacaaagggctttatgtgtcagctcagtgcgacctgctttaactctgcagcaccgctgcagctgccgatgtagcctcggtaggtggctattagagctctaccatatacagtggtgcatcttcaaatttatgcatcaaactaaagacatgtccaagtccattttaatttcctcagtggttttatgagaagttttatgggcctcccccaattgtctttttattttgggttatgacgatcatgtttgataattacaatgatagtctctttccacgtgatgcttttgtttgaacctgataaaatttagtgaaactttgtaatgatctatgtgcacttttacttgtaaaatggaatttctgtatgtttatacttgtaaatatgattgttgttagtgctcctgttgctcatggtgtcctgcctcgcatttgtgattctgttaatgacatgtatcttaactaatttcttagtggtgttgtaatagggagatggggcaggtggggggttatttgtaccactgaatcttcattaatttggttctttactgttttgaggggagaaagaacgtgaaatggtttgtgtattattgaattttaagcaatattttagaagctgtgtgactgctttaataactttttcccagtgttatttgaatcatactacccgttatactaaagctgaatgacaattgtgtgaaagttactgccttcataagatcaagtcaccactgttacacagctgacatatagtgtattacctttgcagctagtaaactataaagtttagatattgaatctcgttacagggttatttatataatgtgacattattcagtactgacagactacatgaagtagttttaaaatctagtgctatttttattttaaaggttagcaatgaggaggaaatgtgatctggctgtgtttgtcttctgtacaaagcctgaagtgcttatggttttttggctaacagccacagagggcaaagtttaagactttcttgtaaggactaactgttcttttcaagctactgtttgtttttctaaaagcaggatttgcttccgtaggaggcaagttccttgatgtggaatagtgcaacctgtatatgggttattataataggaaagacatttgtacttgcacagtttaaatcattcttaaattttgaacatgtgaattgtcccaaaaaatctttaattttttggtaatttttactctttttgtgcacatgttgatttcttaatggtaaatccttcatttaaagatagtgttctctgttgagaatatttacatggaataaaacaatcttttcatggcctgttaaggtgtttagtgtgtgatctttcattgctatgtgaatcagagatgtgatgattttgttcttgaatgtgccaagtctcagataatacagagtagatgacaaattccataagtgggacaagttttttttgttttttgcaaagcagttttggaaattgtattctaattttggtttctctaagctttcctaaaggaaaaaaaaagtttgctgtctctttagagtgaatttaaattgcatgcaataatttggatttatctttcttctccagtagctgtgttgcatagactttccttttacaccatctgtccactgcaaccatacgaactgtccctgtacctcatagcccaatctagccactacacgctggacagcatttcctgtgctccggcttgattcctaatcagttacaacacccaagtcttcctggcatttcaaagcatggaaagaacatttgccataattagtgacacattatctgtaacttcaggaagtctaatttcagaagattcaccttttaaaaaatgcaaatgtgaaactatgactgcaaacttttagaaactcagaaaagggaataaaattcagggtagatgctgaacaatgagaggttacgattgttgagatgaaaatttagggatcaatgccaagtttggaagtaggaacacacaaaacaatgaaaatagcaggaaaatagtgtcaattgttaaagcttcagatggacagaggtttggggtggagagctcaaaacaatgaagaaagcttttattatcaaaactaagatcagtgaaatcacttcctatttgcgaggggaagataacgtccttgataacaacaaatgaaaagtctctctagtctcattgaaaagggttttattttgaagaatgtacaggttaagtattccttatctgaaatgctggggaccagaaatatttccgatttttttttttttagatatttgcattacatacttaacagttgagcatccttaatccccaaatccaaaattctccagtcagcatttcctttgagcat

SEQ ID NO: 55110 - DNA, 1002 bp, Homo sapiens
ctttggggacattttttaaagttctgagagagagaagatgttcattttgatgctactttaagcaagctttcagtctatttttttttttttttttttttttgagatggagtctcgcttgtcacccaggctgcagtgcagtggcgcagtctcgctcactgcaagctccacctcccgggttcacgccattctcctgcctcagcctcccgagtagctgggactacaggcgctcgccaccacgcctggctaattttttgtatttttttagtagagacgggatttcactgtgttagccaggatggtctcgatctcctgatcttgtgatccacccacctcggcctcccaaagtgctgggattacaggcgtgagccaccgcgcctggtgctttcagtctatttttaacacatcttaggcagaactgaagtaactttttgtttattttgtttcattaggttttcaaccagatgaagaaatgaatgaaatctgcaagactgaatttcaaatgcgattgctatggggcagcaaaggtgcacaagtcaatcagacagagagatatgagaaattcaaccagattttaactgccctctcgcgtaaattggaacctcctcctgtaaagcaggcagagctttgataactctccagagaacctttagaatatcttttcaagtttccccagcttcatctttgggaaagcttactgtttttgataaagtaataatgtgcaaatctgacaatatacaagcttttagtatccacaggatattaaacgtgtaaattgcacagagcacacttatttatgaattgtctaaagttactactgattttaaaatgaataatttattattaaggtaactactgctaatgttgatcagcaaatttaagagaagacctagctatgttggctggttgctttctattatcatggtatttgaccattttagttttaattccatgtcagataagtgtaaatagaagagtttaaaagcatgaaacatttcagaaggt

SEQ ID NO: 55111 - DNA, 1033 bp, Homo sapiens
cgtgggcagagcaagcatggggctaccccgctggggagtggagtacaagtacacagggcatgttatgaggccctgagttatctgcagcactgtggatggctcatcagggcttttatcagatgacagcgttgcttgtagaaggctgcagttgctgtaacaagacaagggctatgagtcacctcattctgtgcttaactttggaaaacatgtgatatggaaaactctactccttattcttcagagtccacatgtgttcccccaaacaatgtatcagtcccactgctgatgccgcttgtgacgttaatggagcgccaggctgtgacttttgaaggaaccgacatgtgggaaaaaaacgaccagagctgtgaaatcatgctgaaccatttggcaacagcgcgattcatggccgaggctgcagacagctaccggatgaatgctgagaggatcctggcaggtaagagatgggttttgtaagctgttctctaacactgtatcgtaattgaaatgaaggaatggaagagcatggctgacttcacttagaaaaagaccaaaaaggaaggattaaagaatggaattccatttcctatatggctagttattacttcctcttaattccagaatgactcaagtgccctgtttctccttgtgtgttctgttgttcaatggtatagaataaacagagagaaggggtcaagaaagaactggggccgggcgtggtggttcaagcctgtaatcccagcactctgggaggctgaggcaggtagatcacttgaagtcaggagttcaagaccagcttggccaacatgatgaaaccctgtctctaatagaaatacaaaaattagctgggcgtgatggtgtgtgcctgtgatcccagctactcaggaggctgaggcaggagaatcacttgaacccgggaggcggaggttgcagtgagccgagatcgcaccactgcactccagcctgggcgctgggcaacagaacaagaattggccaacttgcctaccacttattaatagtacctctaataggtgag

SEQ ID NO: 55112 - DNA, 1016 bp, Homo sapiens
gggccgggaccccatcagggctctcctgggtccgtgcagcagcctccaaggcagtggaagaaggagcagagggtggagtccagagatgcagcagagcagaccagctaagatttggagggcagaaggaagcctcatcgggggtgcttctgccaccctgccctgtggagtcggctcacagtaaatgctctagacatgtttgtccttcctttgtgtcagtgagctgcataaccttgggcatttgtcagggaacctaatgcaggccctgcggtgtgagcttgggatcccctcagccctcaggcaagcaggcgtggctccagggaagtgacccaggcatggcatatatgtgccgacgaaatgcagactggagagcaggggccgccgcccatctgccaggttttccagagcaaacctgaatcaatcacaggccttttaatctcgccacccagagcgtgggggacacccctcagaagtacagggtttgggacctctgacagagggcagctgtctaaatatgcgaggaagcgtgcatggcgtgcgtctgggctgccttgccaaggtcaagttgtaaatctctttcccaagatctggccagaattcttcccctttccacatggctgatgattcaaaacttgtattttcaggtagcttttaggggttctaaagttatctgaatcctttgcaaagtccttgagaaaggtgaacttagcagttatgttagaaaaggggaaactgaggcccagagagcacaggtaggagcacagtaggaattctgcatcctgtcgtggcgtctaccactagagagctcatccacagggtcatcccctcagggttgacagtagttcagccacagaagttacagggtagggttagtaataccacctaaacatccagatgtgttttgatagcctggggtaattaaggttgaggacaagtgtaccagatcaaggagaggaaccgtcccatgcctgccgtgtgttcaggtggctagacttgttgttgcatctgttagttccact

SEQ ID NO: 55113 - DNA, 1066 bp, Homo sapiens
cagaagcttgcattccttatataaaatggaatagtatttgcatataacctatgcaatcctcctgtagattttaaatcatctctagattacttacaacacctaatacaacgtatatgctttgtaaatagctattatactgcattatttagggaataatggcaaggaaaaaagtctacatgtttcataccaatgcagctttttttttttttttcctgaatatttttgatccttggttggttgaatctactgttgcagaagccacggataaggagggctgactgtattctagacaccagatgttgtctcaggcgatggtgggctcggtccatcttttcaatataaagaggctggttcctgggcatttgaagcccttttttatttgtagctcagtgaagtcaattagcttcagacgtcagggcttatttaggaactgggttttccttcctatgtgttgaatcatggcaagaagtccagtctcagaacactcctgcagggagtgccaaagttgatggagggctccccaaaacaggcttgaggaactttaggcagctgctgaccatcctggagtaaacaagacccttgctgacaacagaacttgagggatgactcagaaaccagagtaactcattgcccaggcctgggaggtggggctgagggtggacttctgctgagcaggccttgagaagagagccagggctgcactggaagaacaagggcctgctgtacttttggccagatggcctcgggcagtgctcacaggtagtcacgcaatttgcgaagttatccggacctcactttaaagcgagcttaacctgtttgggaggtaggaggattgaggatttctgttctagtcagtcaggcacattgggccctgaatctgagagcagaaccatgtcagtgggccaggagggagactctggcctggtatgaacctgcgtgggttctccatagaggaagctcctcgtagaaacaggcctgggtttacagagcagcccgattcccaggggaatgaatccttcctgtggccctgggcagggcttaatgatcctctaggtggaggagagat

SEQ ID NO: 55114 - DNA, 1469 bp, Homo sapiens
tctatgaccatacaacatttgtagcccaggtgtcagcagtccccgggatttctatttgcacccaggagtgtgggatggggcaagcccagcccagccctcacgatgctgtagactccctgagattgggcgtgggacagtcacactgaattttcttttggaaatgaaaatgaaaattgaagcccaagggcatgaatggagggctggggagctgccactctggttttgtttgttttatattctccacacagatgagctttctctgaccttttcttatcccccacaggctgcaagctgccacctcagtcctcgggtgtggacacaagcccctgcccaaactcacctgtgttcaggacgggaagcgagcctgccctgagcccagcagtggttcggagggtctcctcagacgccagggctggggaggcgctgaggggatcagacagtcaactgtgccctaagcccccgcctaagccctgcaaggtgccgttcctcaaggttccctcgtctccctctgcctggctcaactcagaggccaactactgtgaactgaacccagcgtttgccacaggctgcggcaggggagcaaagctaccctcatgtgcccagggaagccacacagaactgctcacagccaagcagaatgaggcgccaggtccccggaactctggcgtcaactacttgatccttgatgatgatgacagggaaagaccttgggaacctgcggcagctcagatggagaaggggcagtgggacaagggcgagtttgtgacgcccctcctggagactgtctcctccttcaggcccaacgagtttgagtcaaagttccttccccctgagaataagcccctggaaacagcaatgttgaaacgtgcaaaagaactgttcaccaacaacgaccccaaggtcatcgcccagcacgtactgagcatggactgcagggtaagcgctgggggtcctggtgctcctctggcttttcaaggtttggtaagagctaggggtcccggtgctcctctggcttttgtaggtttggaaggaggggatccatctggcctcactctgcctcacccattaaatgctttgcccataggaaagtctgaagataacaccagcatgggaatttatttaaggggtgggaaccacaagctgggacaacctttgcccaagcaggaagcttataaaattcatctcagacagagggatggcaggctgctgccgggggtgggggccgccctcttctcccacccacccctgctggcatcagcagctgcaacagaatcctcctcacacctggtgcttatttataaactacccccttgcctcagctccatcagaattggtaaagccaaagctacaggagagtagattgtagatgaaaatgtagtttctggagtagcagaccttggttatttttattacattatacttatgcattacatatttattttattactaaaatgatctttagtataaac

SEQ ID NO: 55115 - DNA, 1055 bp, Homo sapiens
gatatttccttttgtaatttgccctcggtcttgtcttatcttcgaaaggttgctggaatttctctgttccttggagtttgggggttttttgatttgttttttctttggtgcttgtaaaggtaggaaagaacttcgtgatttctgtaacataacaatgttttatgcttatgggaaggccaattaaagttcataacaacttggctggtgcagtgcctctgtctctagctagggagattctggtgcttggtgctggagaaattcccagtctgaattggaaagggacagaaggaataacagcgagtgtgttgaaagttaccttccaccttttccttgtgtggttacacagtgtgcctcccaactgctgcttggtgaccgtgccggtgccttttcccagctcagcaggaggaggctgtgtgggggtcccccgagagcagccaggaggttggggatggcagcctccccaggcagtcctgcaggttatttgggggatgctgagatttgcaccaaaatggaagtttccccacagcttccttcctaactgcaacactatggagcatgtggaaaatgcatgttagttaggcaagccattccctctgggcctgtaagtaattttaggctctgttaaaagtacacattccagttcatcagattttcccgggagtatcgtaaaacttttaccctactctgttcaacaggatggaacagcccagaggaggcatcctaggactcagctgctgcattggtcatggggacagggggatggagtacacaacacagtcatatattaatcgtcccatcagtaatttgtttctccagcggtcattcctttacttttagggtatgctgtagcactctcgttctgagcagttttctttttttttgtttttgtttaagttcccatggcattgcctaaaagttttattttacacgttagtaacacatttccatcctatgtgtcttttacttcagaaacaaagaaaagagtggtagccagcccgcctgcctggatcacatgcaggacagaagagccttgtccctcaaagcccaccagtcag

SEQ ID NO: 55116 - DNA, 1023 bp, Homo sapiens
cttcctagttcgtgactctctgtccagccctgggaactttgtcctgacctgtcagtggaagaacctcgctcagcacttcaaaatcaaccggacagttctgcgactcagcgaggcctacagccgcgtgcagtaccagttcgagatggagagcttcgactccatccccggcctggtgcgctgctacgtgggcaaccgccggcccatctcccagcagagtggcgccatcatcttccagcccatcaacaggacggtgcctctgcggtgcctggaggagcattatggcacctccccaggccaggcccgggagggcagcctcaccaagggaaggccggatgtggccaagaggctgagcctcaccatgggtggcgtccaggcccgagagcagaatttgcccaggggaaacctcctcaggtaggtcagggcctcctctgcaggactatgaggggcgccggggtgcccaaggttagttaggcaggtgaagaattcatcatggaacaaagaaataaaagatgttaataggaatgccgactgttcgcagaatagctgtcacgaggcagtgaacaattagctcccagctgagcagtgtcagcaatgaatggtacaggagctgaggaagaatttcggggggtgctgatggggataccttgtgaagggggtagacttaggctggtctgatggctgggggaaatttggatagatgctgcaaagggctgggggtgttccaggtgggaggcatagcatgggcataagtgtggggacagaaaatggtatgaagagcttgaagtgaatgtgctggtagggctggaacaaagggtctgtgcaagggacccgtagcagtgggcttagggagatagccccagccagatcatgggggccttaatgccaggtgcagggctttaagggagctgtacagactcagcatagcgaacacggtgtcctaagaatagaaatggacagtgatgtaccgggggtgaggagagagacaggaacaggaaacccagttagtgagtcatggagggcccc

SEQ ID NO: 55117 - DNA, 1275 bp, Homo sapiens
attaatttatgtgacgaaggcagtagtgaaagttctagaaggtttccactcccaaaataaccactgtgtcatcatgaggtggccatatggggtgatccttttgaattgctttcttcagttgtctgggagacattgtccacatcatctgctaaggcagaggctcccagcagcaaacctggctctctgcagtgtattcgagccagccctcactggctggaaatggaaaaccttttgcaattgcttgttcactctgggtctccctctctccctcctttcctctcattttcctccctctctctttccctccttcccttttaaaatacaagtctaggcagttgtgtaaccttcaaacttttcataaaatatgcaagagcttaaaggcatagtttttgaagtctggtctttcatcccaaattatttgagagcgtcaatcttaatatcttcatttctctctctctaggtactttcctgtaataccctacctcctatagtaccctgtaggattcactctctggagtctacagggagaaagagcaataatttaggattttcctgttcttctcttaggaattaggacagaagtaacaagatagctgattttatattttttgtaaccagtttaaaagcattatctcaaaacctggaataaaagattgatgcatataaagtgctaaaaagaataataacccttgctgttatgagcagggctgagaaaggagccggggagagggagaggtggctgagtgttaggacatcagggaggaaggaaaatgcaaagataactgtggaaatagcttcttggatataagcaaataaattttcaacaaagaactgtgcaagacctgctgtatattttcagatctccacattttcagaggtcagaccaagaagtgggcccagggtgcagcacaagggatttaggctaagcctgcagactgcctgtcagggtgactcaatgggggtcaggtcacaatatgggttaggatttagttcagctgccagtgacgggaacacccacaaatcacaggcttccataaggtagatcacctagaagacctggaggctggcggtccagggctggtgtgttggccccacagtcatcagggacccagcctcaatcagaccttccacccagccaattccttggtgtggctccccactcaccgtccagaatggtgttgagtctccagccatcacatctcagctccttggtcagaactgagtcctgtggccacatctccctggaagagacagagattgaggaatgtggtcttt

SEQ ID NO: 55118 - DNA, 1118 bp, Homo sapiens
cgggcagtgagtgaggattgaagaaacttgtggcaggcagcctccaggcacttggcaggctccaggctgctttccttaactgcttgcctcccaaacacctgcctccctcagcctcctgcatcagaccttgaacatgaagtctgcttattttatagaaacagattagtagcatcctgatatgagtctattatgacaattaacagtgctgactacatgccagggatgttcttagtgctttccagatgttgacccatttaatccttattaacacctcatgacatattatcatgcccattttgtagatgaggagcctgaggctctacagagttaatgtcacctgcccgaggccacacagcaggtgcgtggcacagtggcctgtggattgaggtggctcttaaacaccttgctgtaacactttttgatatcagggctattaaaatgctggggataggaaagatgtagctagactcagattttcatgaaaagcatcaattatagtaacttattaattttctaactatcctgcaatttggttggacaagagggggcctcatccaccccctacatttgccctgtttgtcactttacctacatctcatctcagaccccaatgctaatgactgggacaaacatgaacatttcgaagtggggccatgtgagtgggtaaccatgtacagtagttactaactctccttcccttcttttctttctttcctgctgaagttatacttattatttatgtacatagtaccttttcttactctccctgtgcctctaaaaggactactcaaatttcctgaagcacaagatatgagccctgcctgcatgtttgtctcattgtggtctcatcatggttgtaggtagatttggtccctagaatgaagctggcaagacctgtgggcacaatgttcttgatccaaagcccagcagcatcccttcctctggaggctgagcccacagctgctgtgtggggtgagctcaggatggctggagcctctgctgaggcagcgaaaaccaactttgtctctctgactcctcctctgctgccacctccttcccctcaagacaaaacactagaaaaacaaggaatcagatgccttctaggaatgaggttcaaa

SEQ ID NO: 55119 - DNA, 1078 bp, Homo sapiens
gagcccttggaagcataaccaatatttcctcaggccttggcagccaacagccccaaataatgtcctgaaaactttaatgcctcaactctgctgactcttggaacccacttcataatggcaggacccttgcccatctcccctgccagtcatgcctctgacagttatttctgggggcccacagggacgcttcctgtttgcatccacagccctctcatgatctgggcctcctagcaaattcagagccaaatcccagtgtgtctgcaagttcagtatatgtcaggggccatgggtcagctccctggggcaacaggaaatggtgcttaaagctcaggattctggaggaacagggcaggactggggtctgcgcccccagggaccaggcccgaaccctggcatgaatgaaaactaaatattagaagctcgttgattctgtgtatatgtgtgtgtggtgggagaggagttgaaagagactgtggctgtcatgtcggccttagctggagcacccttggactaaaatctctgaacctaggggcaatatgacaaggttggtggtattgtaggtggcaggttgtgggactagaaatgggaggtagggaaactgttaggaggctattgcagaagttctaggagaaaagaacagtaatctaaacagtggggattcgaatggggataggtaaaagaatcaggaatgtcttaaccaatggaagccgattctgagggttctagttcaggtaatgaggacagaagagatgccagtgactggggaaaagggcgaagatcaggctttgcagaggggatgagttcaatttatccatattgacatctgagctttaatgcggattccagtaaatatccctaccaggcaccgaccctaagggctggagatggagatctgggcgttgtcagcacatttcaaaagactctgacctgtgcctccagccctggccccatccagcccattgctctcactgcagccagatctctctaaaagtatctttttatatacctgttgccttcctgggcaaagattttccgtgactctgactttctggagtgtgatggtctaaaccctcagcca

SEQ ID NO: 55120 - DNA, 2088 bp, Homo sapiens
gccaagggtccaacacctaaaaggcagagaagtctcagggacacactcagggaccctccctgctggcctgtagagtgcctcttgagtgaataagagtaagacaccctttcctcaggacactttattgtcatatgttgggcagctgttgtaatcaatatatagatccatgacagctgtgtacaagtggcacctccttagctatggttctggcaacgtcctggaccgctggccaggccaccatgtgcccactgggctgggtcaggcaaagatgcccaattgcccacgttcacatttggttttgtttacccaacagggatataaaatatgaatttttttctctttgaacttttttatttgtaaagttaattatttaagtaaatgctttggctttaatcacagttattagcataagaaactatttttctagcctagcatcccagtgggaaaagtaggattggtgaattcaaacctttcttcatttatctttggattataataaaataaactatttttaagtaagccacaaaaccagcaagtgtcagtaaaaggtgaaacagaaccaatctactaattatttcattgcaaggctttaggatcgccacaagtgccattcctgttctttctgttctactttagatgaaaacacccaagggctcgtactagaagtaactggtcttcaaacttgtggagaactggatttttattttcagcttcgggcagggtttagagtgatgaaagtaattggggtttattcattctttgggttcatgatcaatttatgcaggttttcaattgtaaaaataccaattgggtctttaaaagtcctttatatacttcagaatttggttgtaaacttggcttgaaattcaacgcaaggcaggggttcaaaagggctgagtttctgaattctccaaagaacttcatttcgggttggatttacttgtaagacgatgccagatgtagcagccttcttcagaggaagggttcagactgctttgtgtagtgcttttgaaagtgtgctttttggggattcagtttctttacatgtttacaacattattgggggcagtgatgatgcaggtctcaggtcatcacagggattcccagagttcagtggatttgagatgtggatctgtctttttggacccccagcttgggccacctggtacagttcacagcccaacccccgtggggtttcccaccctgagctcattggaagacactggccttgcttagaaattagaccaatggccgggtgtggtggtgcagacctgtagtcctggctacctgggaggctgaggcgggaggatcacttgagctatgaatgcgccactgcactccagcctgggagacagagcaagaccctgtctcaaaaaaaaaaatgaaaaagaaattagaccaatgttaacatcgaagatccagaactccagtcagacttataattttatttgtaatcaaaatttctggataggatttctagaaaatcccaacctgtggagttgtttgatacaatttgataagaggcctggactgttgtggacttctccctcaagctaataaactgttccaaaactgaagaaaggaggcttttgtttgagaaccctgatagcattccgggtgttggagcctgacactcccaactaggatagaatagcccagcagcttgctagcttgctccttctccagcctcctctcccttctcctccccacctcctctttttatgcacacattccctccttcttctttttctttattcaaccaagttaattgccaggcttgatcatggaataaatgaatgactagaaaatcatctcagtttttaaaattcaacaaaaaatttctcaacaactaagtgtccaagaagacagaatctacatacaaggacctcttagtcttgtgcaaacacaaaactgtcttgcactcgcatgctgggctgtgtcacctgtgtatttgtggatatgtgagccacctggcgctaatacatatacttgttaatagtgagatatatgcatacaaagtgcttgccaccaagcgacagtatgcctgcttactcaccctgcatctatagaaccattgagtgctactca

SEQ ID NO: 55121 - DNA, 1762 bp, Homo sapiens
attgccaagtgcagcggatgctgtccaattctgatatgattggaactctctgcagcacttgacaatgttgaccatttcttcctgaaatcagctttctcaacctccaggacactgcattctgtttgttctcctgtgtccttcctgtccagtcctactgtcttcttgggtttctctttctagtctgcctctgaaaagcctcccccagccctcttctcatgctgtatcccatctgtttggtgaaagttgggatagaatacccctctatactgaggactcccaagccgtagttctccagataggctctccagtcaacctatgtccatagcacctggaccccatggcccagtaagtgactccatccagaaggcccagcagaccttagttctacatcttcttccacaaacccactatgccctcgtgcatttttattggatgttggtggctcagtcatctttctggaatgcccatgccccttcctcctattcattttccacatgtaattaatgagtaggtcttcatgatattaccttctaaacaccactctcacctgtctctttctttctgtccctaccaccaccctattttcttgtgagatgtaaacattcttgctcactgtttagcccacaggaatgctgtatgaactcatgagatctgagttgtattgggttgagtatcttgtgtctttaagtccagtttctggttctctgtttctctgcatgacatgtaggatgtttgctgtttgcattttttaaaatgcttgttaaatgagatatgtgggtatctagtgctttgagctcctctagaaggaatatacctttaaagtgacctgtgagttgtatattgaaagtggtgcagttgatgtctggccaaaacccatcttgtgatgaatcattttgttttactgcaagcctgctgcgtacttagcactgacatgtgatgcgctttgtcccagagcagagttctaagatggtagttagtcatggtactattttggagagagagaatttgaaagtcatttgttctacaccccacgctggaaggctgtctgaatctttggcttttcctccatgtgtttggcatatcttgtttttccttccaattacatctttgggtgtctttcaactacggtgcattttgttcattcagtactctccttttcctaattcatctcattcattcaaggtgaattaggaaatgagagtatttgaattaagttgattttgatttgctgacattcttattgaagagcaaataggacatctggtttgatgaatagctgtgttccagatcattcataatttgcattaagatgttgaattaacaagattgaattaccagtggtgaggatttctggcttggatcttctagcattttgaactctgatcagccggttttcaaactcttttattagggtctgccttagccagggcagtctttgttcttttcattctttaaagatgttaagaaagcactactattactgagtgtaatcttgctgctgaactcagcgattaatatttcacttgcattgtttcttttaacccaagtgccagccctgtgaaagcaagagagatattattcaaagtcgctcgaggacatggttaaagggagcaaagtagtttagacagggttttcacagtaggttggactggtgtttagcttttatcaaagcccttcatttctctagtccaataatgattaagtgcacccattgaccttcggccttcctctgaagtgtggcacatccgacttctctctagga

SEQ ID NO: 55122 - DNA, 1316 bp, Homo sapiens
atagggacggcatttcagcctgggggagcagcagacccagtagctcagagatagaaaagccactggcatttgcaggagtgcagaaggccaggcctgctcagagcagaaggttcactgggaaggttagtgtgtgacatggtcagagaagtcacagaggatctaggaataatcccagcagccaggcctcctgtaccaggggttaataagtatttgaggcacatttccccattggctttcatcccattgcatccttagttcagctcagcagtcaccggttgtggtacctcggatgtgtcggtgctggggacccagtgggagttgttggtccagtggggatctctgctgtaataccatgcctggtgggcattctgcagacatttaactctggttgaaggaaacgatcggttatcactgatttggtgttgctctctttagagggtgctgtggctccctggaggcacatgcctggcatagatggggcaggagtggcgaggatcagggatggcctcctgcagggaggcagagcctttgctgagtctggtgaattagtcgaagttatccagagaaggaggagaattggccttcttcgtggagagaggagcacgcacaaagtgtagagacgtggagtaccccggtgtgggcaggcagggaggcatcagcctggaaggggagcacagggagtggccgctggcaggcccgcccccaggtccctggtgagctagaggaggaacttggtaaaaagcacaatgggtcacatttctggggctggcactggaaacaaacccctacctcttctggccccttgtgtctctgactgttagtaacttatttatttaggtatttttgtggacaggggacaaaggagctgaaacttgtcactttgtcaatgtttgcgcctgaggaaggtcaggggtgcctgtgtcagaggaacctaagagacgggaattaccttgcaagggcggaaaagccacctttctgaaagagcgcagatagagaggttggggtgtggtgcctgtggatagatggaatcagtaagtctcagctaaccaggccttaagtctagtggccatggtcttgtcaatgagcagccacagaaggcagggatgttagacatgtgctttcctagacttatattcgactgtctttgcagccaggaagtgctatgtagtattgtttcttttttgttttcctttaaagtcatttcccctaccctgaaaaaaatatctggagcctcttggaatccatattacagcctgaggagtcacatctgcccatcctagagtgccaggcccctggaacttggtttcatgtgaaac

SEQ ID NO: 55123 - DNA, 5370 bp, Homo sapiens
tgcttatgcaggggtcttcctccggcctgccttaaccccctttttgaattagagggtgggcaacatttggcctgaggtaatagaggtttccttcaaggacccacctggcttcccagccatggctttaatcacaagtgtttccctcggtgcaaaggagtgagccttccaggcagccagagaagggcggtggatgggagttcaccctgtaggaccttttccagagctcagagctgcctgactgggcccctcccttcctcagtccctgggagttccttagaaatgccctcccctatcccgaaaggggcatggtgtttagaaagccctgtatccaaatttgatgagtcccaaatcccacacaccagatcatcagaaagtggcccactgccccaggtcacagccctttcacggggctgtgtgagtaacaggtttaattataagacattaaaaaatctatttgtgtttctatgtgatcagataccagattctgcagtctgaggttggagtccctagccctttgttctctgctgagtggtacacaggtctggtcctctatttctttgtaactagaataatcattgtggggagaatgggaggaattgatcagcgtaaataggcagcgtttaaaagcttaacaagtcagtgaagggcactttgagaatgtatgcaattatcatctttagttacaaaaacaacacgttattttagtctctctccttgaccgtttcaggagaaaattgattaaaacctttgagtgctgcttcagaaattatttttggtgtgaaataaaaataaaagatgcttaggaaacagttacctaataagattagtcattatttaatcccggtggaacaaattctttgggtattttggagatattcttagaataaacagagaaaacctcaggtaacaagagctgtgataccacagtgacctaagtgtctttggttttgtttttaccctggctgtggagcactttattcgtaattctatgtgatttacatgtctgagttatttgcatattactttcaggaatgcatttcattcacgatttctgggggaagggtgtctgggcttcggagtctcttggctgactaatctcacgaatttctgtgcaggatttcagtcactgcccccctcccttttctcaggcctgggatggtgcctgtctagcctcttggggaggtttttagcttgaaggaatcgttatttgctctccaaggagaataccaggtgaaaatggcccattctgtggtggctaatggcctgattgatgagtcatgctcacagaactgctggggcctgggcctggctgctcacacggacttaccctttgaactccatctaacggaaatgagggcaagccagaaaacgcttcctcacaggtgcggtactggaccttcgaggacagtggggacccactgaccagacagtcttcaagggctcttccagctcagaaaacccttctgagttctgccaccttggtgcttccttctaggttctctggtggactttctgtggcctgggagccgtcaagactgcagaccagacctccagagtcagagaggagaatgagtgagggaggaaagcagaaaggaagtcatcgcccacactcgctgtggcaatagcgcctcacttagcagctccatccccatgttgacacgttgatgaggccgggcccttgcccttgcgtgggtgtgagactgtggctctccatacctgctcactgggcccagagcaatttcctatttttgtgggcagacttgacctagtccaaaggccaaggtctcccgaggatttgacgctaatcccgttggatatttctcatacctccctcatgcctcatctggtattgttcctttctggactgaatagatcttgtttcttcctcattacaagtttctgcctgtgtgaagttttagaaagcttcaggacacattccatatttgaggccgaagccacaaaaagttaatatttggagcggtaggataggagaggaagagctacaggcagaaatctggatttgattaaaaaaaaaaaaaaaaaaaaagaactcgttgagcatccgctataactggaatgaagggaaaagcagttagttttccctaaaggtgttatgtggctcttggtaggggtagaggcctcaggtcgcagggaatccaggagggccttgcttggctgcgttggatgcgaggtttgtgtgcaggatctaggttacgcaaagtgggtaatcagagtggcgatgagtaattaaagtgaaggatttaaaggaaggtataggacaaacagttgagtcagaagtgggtacacagtccccatcctcccaacaggttgcacagccaggtgggagggcatagggcgctcagggtgtttgctgacagacttgctaattaaacaccaaaaggcaatattgctttgccagtagtgatggctgtgccaacgttatcagctgcaaactggctgccaggagcatcttaattaaaaataaacagctctggaggtgggcttgggagagtgaggacagggatcctgcctgggttacttagtacatctagtatttctcctagggaaagtcacttttaggccacctcctttcctcaaaggagcctctgttcataacaaggtggtgtgaatgtacaacttaccctgcttccttaaacctctgggtgctggagtgacaagcagacagaaccactaggagcaggtcgcatggtacagttcagccccagaaggaaattctgggtcgggggagaggggctgctaatgatttctgcctggtctctaaattgaggggacagctaaagcccaaggcctcttctaagaggggttagaatttcatcagaaagcaagtctggtcacatgagaatttctggcactgtgtgcatggcaggctggacaccagcctgcgagaattgagcgagtggatcgtattggcttcagcagaggggaaaagtcccagactagcctgggagaaggagccgactcactcccccggctgccgacttccctgacttctgggcagaaacagcacagctgctgtggtgggctagggctttaacgtccgaagccccctttcttttaaccctaaagaaagtgtgtggtccccgggactgaagaccgaaagatgcctaaggaatgcagtgctttccacgccctctcagcagctctgtgctgcttctatcaccgcaagtctttcattggagtcaaggtaggtttggtttggaaataaagtacatctgtcaatcttttgggggaccctgaaagcatgagtttcctaaagggcaatagataaaagtttgcagcttgctgattgtgaaaacagaggtgctttctttgactgatgggtcttcaagagcccctagtggtgtacctcccctggaagcagaacccagtggcacagaacagggctccttgtctgttttgggctgaagctgtttttcaggacactttcagttctctgtaggctgaaattttatactaaagtagctcaataggacagagctatttttcttctttctctctttgtctctcttccttcatttctaacgaacacaaggtagctgagcccttttctctgtttatcctgctggtccattacttatcaataatgtacataatgtacagaagccacacaatatttcctttcaaattgcagccaggtttcaaaacatctcagggttcagaactgttgttgtctttactgctcacattttaacatttgttataagacaccggtgccaagagctttgtataatatgtcaatacactattttgatgaaaatattcagagaacctcctttggctaattcaagatgaggcctgtgttctatttgcctgcctgtgacgcactaggaattaagattaatataggctttcgtggatcttggggtttgtctgccttggaaaaagcctgtcggccccagcctgactgcggacctcgtttattcctgggaaattggactctgaaagctctcaaggaatccttcccaccctgaagcagagctccctctcctgtgggactggctcattcattacctttgaaaaggctgcagcagggttatgatgttctgcttctttcttctcaatacgcttttaaaaaaatcaggaaaactacctgttagtgggagaaaacctttttgtttaaaaatatacagagtgggaaaagggtgagtttccattgattttgctccctggtaggagtgttcatttttgtccctttgtcaagaaatttgacagaggatgagtaattaatcattggttagaagcattcccttcctgacttgagcccctttctgtcctggagcccagtgaagtgatgcgagatccatgtggtttctggcctaaatatggatcgttcaagtgtggggcagatgaagtcatgccattaacagtattttaaagcttccaagatagactaggaggtcccaaagggtatggtgcacttcggggattggcagtgggtttcactctaatagaagtccttccacaagccaacttctgctaattcagtgaagtgcaactcagcattgggtgtatgagggagtcagcctataaatatctgggtctgagggatgagtttctgtttgggtacctgttggtctgcagttacggccccaaggctacataatatatagaaaaggccacttaatatatggggtagtcgggtccagctgtccttcagcttgtgcactctctatctctccaccgtggccactcttggtggttgactgtggtagaaacacccttctttccgcctggacttctactctattcccagtttgtcgaagtcttcatagcacagagagaaggcctgagctgctcactcactggaaactgtagccctcggtcccaacttagggtttaccaactgcaccctcaagatgagtctccctgttttgttttgcttagctagttacttgggaaagaaatctgcttgtacttaatcccccatcctgccagtggtgccccagttgataatgccgagtcgctttattgactcccactttaattaggggttccagatcttgctgctcataattagtttccgttgcaattagagtttcaaaattaaattgggattgattgcctgatagcaaagaggaaataaagctccaattcttgaccatgtatactgcttctcttggcatgaatttctcataccaaaaataacactgcggtagccatggtaactttccatttggtctaatccatatcatctctggagaaagtacgatggtattaatagtgtttgctgtatgggaacaaaactaaaaatatagagggtccctccttacataggagaatgattatacaggtgtttttagagagtaagatcttatttgcagcggtcttacagaatttaggatgtattta

SEQ ID NO: 55124 - DNA, 1934 bp, Homo sapiens
ggcagtatctgggaggacacagagagaaagtctagagagggcagaggggtcacaacatctgaggagctataccagacacggttgtagttctagaattggttggtatcagacaacccagtaatacagggcggggaaatatgaaggagtcggcatgtgagaggtggttctctggggatgctaaacacatgtggaagatctgttcccagggctgaattgcagggccagggcaggaggaggtggggctggaggagtgaggatcctgtagggcatccaatcaggactgaggctgaagtccaattctgcaactagcttggtcccaaggcaatgggaaaggaggggtaccacccaggccccataggcagagggggcccacaggatccccagtcagattggctcagacaagggtggtacatggagagctggtagttgtggatgaacccaggagtcccctgggttaggatcatgtgagcagatgctgtggatacacctgctgcctgttaaacaactcctaacatgacagagactctggagtagacaatcctgagacatctgggcaagtgtgattaaaaccatatgtggtatttgaataagcagttttagaatttaatgagtaacatatattttaaggctaaaagcttttagaagtctccttattataccagctcctaagtataccagctgggagccagccagtggtcagtggctcatggcatgggtgggtgtccactctcttctcgtggctacaggcgtggttcctgtagcccagcgtgtgggtgggcgtgtgccctgcgagtacagtggggaagatggggtttgttgtcccttctttcgaagggggaaggaagctcatgtttgtagagtgcctactatgtgttgggtgccaggccctccatgtgatatctcacttgatgcttacaataacttggtaagtctggggaggaaactaaggctcagagaagttaattaattccccaaagtcacccagctagctagtggtgaagaccagaacccatcctggctcgctctctagcctcctacctccagggtgtgttacagagccattttgaagacaagcaggtgtctgtctcacagctcagttttggaagatgccattttgcagaggtgcttgtgagacagagaactggcgcagtggaggtgggagagaggcagctgttcctggctggtaaggcctccagagggcctcgcagatgcccgtctgcccatttctgcagcactctgcatgggagggacctctgaagggctttgtggtcgttgcctattagttgcttacatagctcatgcctaccaaaagtggatggaaagggaaagagaaaagtgtacagcaaagaaaacccaggagctgagatggcaggagaagtaagtgattgctccaggtgtaattgcttgcatagtaagtgtagaagaaaaggaatcttgggaagtaggtggtgaatcatcttggatggataagactccaaggggtatatggatgggcttctagtggatacaagaatcccctgaagcagaggtgtccaagagggagaatgggttcttagtttctgtttctggttgggccagtaaagccccttcctcatccctcttttccacttatcactagagacagaaactaaaaaccatggctttggctgggcacagtggctcacgcctgtaatcccagcactttgggaggccgaggtgggcggatcacgaggtcaggagatcgagcccatcctggccaacatggtgaaaccaagtgtctactaaaatacaaaaaaaaaaaaaaaaaaaattggcgtggtggcatgtgcctgtagtcccagctactcgggaggctgaggcaggagaattgctcgaacctgggaggcagaggttgcagtgagccaagatcgcgccactgcactccagcctggcgacagagcgagattccgtctcag

SEQ ID NO: 55125 - DNA, 1035 bp, Homo sapiens
tatattcttaaggcttgtggtccaaggggaaaaggggatgtctctctcagccctagtttgaaaagtctcagggaaggactctgtttggtctcatgtcattcacctgcttactcttggaccattcagtgttcagtattctgattggctcacacatccattaaaaggatgaatacacatgctactcagtaaagcttttaaatataatagccaccacctgctatctataccattcccccccttacatttttaggatcagaagtatattctgctatatttctattatctctattcaggatacatatataaaatgttgagacatgaatgctaagttttgcgaaaaaaaagaaaatcttttcaagtcctattcccatctttccctagtttatctccctcctggtttatgtactggatacccattgcctccaagtttgccagatttgctactgttacagagaagttatgggcagggggtggggatgtccagaggggctgtggatccccagcccatctatagcttgtccttggatggattcccacatcttatcacaagtgacccaaccgggagtcctggtgttcctggatagttacccagatgggtttctgctgctctccctagtaattctcccttcctccacccagcccttccacccatttggatatacactgcaaggcgtacccaaatctttgagccactggcaaaggaatttattgtccccaccttggcaccaggaagggcaaatattgaccttctggatgtcactcctgcagacagcattatgcttggcagttgactacgttaggaagtgaagaaactggccggcagtcaatgaggtccttccatgcacagaaccctctgaattggcctcttcctatagaggaaggggtactgtttgtgtttccatgtgacaaaagcggtcccttagcccttcttgtgcagcaagcctttgttgcctcctggttcttctcagattctgatgtcagcatccatctctcccagccctgcactttcctttcagctgtgagcggaataggacc

SEQ ID NO: 55126 - DNA, 1042 bp, Homo sapiens
ccattctcctgcctcagcctcccgagtagctgggactacaggcccccgccaccatgcctggctaatttttttgtatttttagtagaggtggggtttcaccatgttagtgaggatggtcttgatctcctgacctcgtgatccgccctcctcggcctcccaaagtgctgggattacaggcatgagccaccgcgcctggccgtaaaatgactcttagggccaaagtgggaagcagccgtaattcagccagaggctggcaaggctggcttacccggtgaggagcatgacttctgtgtggcctgtcatccctcacgcctctgcagttctgaactatttttggagagacagggaagggcccctaccttcttgcaaataccatgaacaagagccacgtctctagaaatatgcatgcacacttactgcacatcttagttccaggtgtttgtggaccccaggttgagaatccctgagctatctccaaatgttcagtgggcccctatcatgttcaggcattccaatgatgacaataagacatgggtcatgaggccaacagacaagggcaccagtcattttaatgagtgcttcagtagctgaaccctggaggacagggttggagctagggcttcttaaggggagaaggaaacccctacgggcccacacagactgagagcaggggctcccaaacttccaggccatgtccacctaaggactgtctaaggagcacatttgggaagatttgaatgtgatttggagatgatgtaaacgtcctgtcctttgacctggaaagaagtcatgagggttgccctcgcaggtgactgtaccgggaaaagctcacctggcctcaataaggggatgtctcagccagtacctctaaattgggtcctgtggccttccacatagcagaaaagccttttggaaacatcctccaggagctgaggatggtgctgatgccacataagcagggctgagaatgcagtttgtttgtgctttcccctggctgggaggtgctgggtgtgggagcagaactcacccctacaccagtggc

SEQ ID NO: 55127 - DNA, 1712 bp, Homo sapiens
tctcaagactttttaaattattgaggaccctaaaaagtttttgttatgtgacttctagctattgatactcatcatgttagaaattaaaatggaatattttaaaatgtttatttaacttatttttacttgatgagcatttcatgtaattcatttaaaaataagaataaacccattatataccagtgaatgtacatttgtggtaagaatgacattgttttacatatttgcacatctctttagtgtctgatagaacacaacttgattcttatatttgcttcggtgttcactctgttgttttgtgttactttggttgaagtctcaaataatgtggccctgcacaggtatgcagttcagaaagggaggagtattttaatagcctcttcagatcattatagttgttggtctttgatactagagttcaacaagttgtagttccttaaaagttaactgcaatgtggactctgaaatcctgtcaatgaacttgttttatttccttaaaattcaatttgaatggatctctcttgcaatttgaatggatcttttacccatgcatgagtttatatcatcatgcattggccatttgaaaaatattggtttacgagttatgcagatcttataaatgttacatatttcactatgtaatatcagaactcacattcattaatatgaccaccgatctcatcagaaaaatcattaaagtattggaaagctgtcaaactcatgtggtgaatacaagttttccaaaattctaattttcacttgaaacctggaattttatcattggcaacaaacactgtctgttgttttccttgaagtaacaggctcactttgttcgtttttcagaaaatggctgccaaataaatacccgagtctgaataaccaagtttgtcagacattctttgaagtaaaaattgtgctctatgaaaaagcagctagttgagcccacaattcaattgcacagttgcttttccttcacacaaactctgtgcttggaaacacagcagaattgttttctgtgcatgtcctgttgcattgtatagaatactaaagagacatgtactcgagggcccatatttaataaagtgagtaattctcactgcttcatcaaagacttctaggtggaactggctatttttcttcaattctttgagccaatgggagtcaagagtgcaatggcccctggtagagtttggtgcctctgccttgctttgtgctgaggcaccaggaattaacccatcatagcttttgcaccaccagtataaatgtcaacccagtgaaacaggcaaaaaatgtctctgtattattatgaaaataagttttgacctctcagacccccagaagaccccccagcctgcagatcagcctgtggaacacactttgagcaccactgtaccagagggtcttttgctacttaagagactaaaagctgcaaaaacacttaaaacacaaataatcccctcttgtttatctaaatccatatttatttctctagcaaagtttacttttaagctcagcttgcccaacagttgcatttacatttaaagagacttgtttttaatgtaggaaagacattaaattttcatttaaaagtaaggaaaaaattgagagtcaatccttgaagtaagggttctcaattgtgggcctgttccttgcagtggagtggattgtgacacctctggaaatgctaactctatgtaacataaccaagtcat

SEQ ID NO: 55128 - DNA, 1542 bp, Homo sapiens
actcacatatttgggcagagatatacactgtttttaaaagtgtagttctggcaacttctatgacttagacctatctactctttgggagatcttgttaactatagggagtcagtaacttcaacaccaaaacgagaggcctggattgctagctttagaatcatttgctgttaagctctgccctctagtgctcatcagtgtcacaacagttcagcatttggctacaattcggtttctaaatattctaagagcttttaatattaaatgtaatagcatgtcaggacttgtattcaacttcagaaagaagagctgtgtttacaatacatgaaaatgcagatttaaattgtcaaggaattttattattagaattaattgtcaatgttcttgaatgaagagctctaaaatgctatgatactgtatgtagattttgagataggaggtttgcatttggcccaaagtgttacctccggtaaccaagaagtttcctgggaacaacttgtatttgaattgtgatttggtatctgaaaaaacatctcggcttggcaggaaggatgctggtattgggtaaggcagaagactccatgcctgggagacagcgtgtgcccaggctgactggagcaggagagaacagtgggaggagccttgggagaagcagtaggtgctccatgttgcttgaatgggaaaagagattccgagaagaagatcacgttaagaaatgagtttgggaggaatttatttattgccaaactgtctaactacatataactttgcaacttgcttttttcattggacatcattccatattaaacgtatgggcctccctccttctttcgaatgggtacccagtattccattgtatgaaatacagttatagttaactagttgcctactgacatttgggttttgctaatgttctgttagaaacaattttgtggttagtacatagtcatttagtaagtatttgttgagtctcttccctgtgctggtcactgttccaggggctgaggatacagcagtgaacaaaacaatatccctgcccctgtggagcttttactctgggggtggaggactggaaagacaataagaaagacagtcaagtcaatcctgttagctgacgatgagtgcttagcagaaaagatgcatcagggaaagcagctatgaaagttggagtaaggggacattaaattttagatagggtgaccagggaagggcctcaccaagaaggtgacttttgagtggaaatacaagtcaactgtaatgtctaaggggaagaagaagggcaaggctttgaagccagggtccgcctcttccatggaggaacgaggaggccagaggctggagctggtgaaagcagctggtgttagagtggcagaaggtgatgtgcgagggattgtgtgtcagagtaaagacttcaattttttctggaatgagatgggaggcatctcaggttcactttggcttctgtgttgctgctagactgcaggggacaggggcagaagcagggagaccagtgaggaggctactgtgattgtccagatgagagat

SEQ ID NO: 55129 - DNA, 1074 bp, Homo sapiens
acctaatctagagaatattatagcttagcctactgaatattatagtttaccccagcatcacctaagagtatcatagtgcatgttgctaggccagaaaagatcacatttcaaaatttgaagtacagtttctactgaatatatatcacttcagcaccgtcgtaaagttgaaaatcagtggaaccattgttaagttagggcctctgtagttgtgacactatggcctcaaaagcctaacagaaccttttacagagttttctgacccttgctctaggctgtttgcacctttgctgtttctgttttgccttcccaataatgcataacaggctttcaacaaaagtgagtccttgggcaaattttatgatcttgcacaatcacaaggatagtgcttttgtcacactgtgcaggatttggacgcatctctgcatcttatgaggtgtacctgtcagctctgagcagcatctctctgctgccctggtcggttctggcatctttagcccagatggatgaacaggtgtgtgggggcagcatgggtacttgaaccctgactgctcctgcctggggcttgcgtggataactcctcaggccagacactgctttgtccatgcagcctgagatgggttttcttgtgccacaagtcagagagaagggacttctcactgggcctcctgaacttgatggtttgagataaggtcaaaccctggagctgccctctggaggtgctgaaaggaacatggtctggccagtgagaggaataagaccagatttacattctgtgtgaatttgtattctgtgctgcaggcatcagccttgaagctgaggcaccatcctccctaactcgaggaaggattcttctgagatcccgaactgtagggatgactgagagactcaaaaactaacaggcaggcaagaattgaaactgtggcttctgacgggactcagctccatattggacttcgaatctggtgtggcctgtccacctctaacctcatctcctgccaccccaatagtcactgtcctctgccaccctggctttccctagtgtctctggggctttgccttcccattggcctggaa

SEQ ID NO: 55130 - DNA, 1676 bp, Homo sapiens
taggcatgagccactgcgcccagccaaaactccccattttaaacatcagatctcatgagacttattcactatcatgagaacagcatgggaaagacctgcccccatgattcaattacctcccaccaggtccctcccacaacacatgggaattcaagatgagatttgggtggggacacagccaaaccatatcatgggtgaatcttgaatacattacgttgagtgaaagtagacagtctcaaaggctacgtactctaaaattacatttgtatgatattctggaaaaggcaaaacttatagtgacagaaaacaaataaatggttgaaaagaggttggagaagagatgaagtacaccaaggagcttccagggatgatagaaatagaaatatcgtgattgtagtggtagttacccaactggggttggctgtcagtgctcatggaattgtactgaaaagggtgacttttgctgaatgcaaattatacccaataagcctgaccttaaaaagcaagctaggctgggtgtggtggctcacgccctttgggaggccgaggcaggcggatcacaaggtcaggagttcgagaccagcttggccaacatggtgaagcccctgactactaactaaaaaaatacaaaaattacccgggcatggtggcatgcgcctgtaatcccagctactcgggaggcggaggcaggagaattgcttgaacctgagaggtggaggttgcagtgagcaaagattgcgccactgcactccagactgggcgatagagccagagtgtatcaaaacagacaaaaaaaggcaagttaaagccttgtatttcagtccttaagtgctgccacctcagtaggagaaattttccattttgagatgggccacaccagggaggccagacccttgatgagatggaaaaagtgccgagcttgaagatttttgactgcagtggctcattcaacagatattttttagtatataccatgtgtttgtaattgttcagtcaggtcagaccaggtgggaagaaagtgttaccaggagcctaacctgagatagtcgcagtgggaatggaaagttaggccacatggtgaagggcttttagagatagaattaagacccagttattagggaagctgagagattctaacaggatgtaaatggtgcaggtgagggagagaagctaggggcagttcctgggaccacaccagtacctagcattgtgccagaagccagtaaatagggaggaaaggagatgtccatttggaaaccttgttaccacagtgacgttaatcttcgagcatttgtggatatctttagaccaaggggtcagcaaactatagcctaagaccaaatctagcccaccacctatttttatatgaccactaagctaaaagtggattttatattttaatatggctttttttttatgtggagtttcgctcttgttgcccaggctggagtgcaaccatgcaatctcggctcactgcaacctctgcctcccaggttcaagcaattctcctgcctcagcctcccaagtagctgggattataggcacccgccaccacgcctggctaattttttatatttttattagagacggggtttcatcatgttggtcaggctggtcttgaactcctgacctcaggtgatccactgcctcggcctcctgaagtgctaaaatggctt

SEQ ID NO: 55131 - DNA, 1039 bp, Homo sapiens
ctacagttattttagtaaagagttcttttctaggggtggtttaagctgtagttttttaagggaggaagtgattggctagggcagggctgggtgatttttcttttagaagaagtgtttattatacattttccattttaaaataaattgtcctcaaaaaagttacattagaaaatatggtgaagtagaaaaaaatattggaatgcctgttttttttgtttttttttttcaaattagccatgaataggcaagtgtttttttgtggccaggctgtaaacagcacgcttgcccgcctgtggacaaaggcctgctctccaggctaccgcagtgaggaagtgtcaggacggaatgcaaccttttgttcctggctagattcctagtgaacgcatgtcctctttcttttgtagtcagccttggtgggttcttgttagacccactgtgagctgtaatagaatgacctacagtctctgagcttgttgcgcaggttaggagaagaaaggacaaggctgcagctgttatcctgagtggggacagagccctgcagcttctcccttcacagtgcagatgaccccagagaaactcaggaagctgtcctttctggggtcaatgctctgaaaattctccttccccaagggtcttctaggtctatagacgttacaggccatccaaggctcagatctcagcaaggccatttcctgcagccggctggggatatattaggtcacccagcatatttaaaaaggagtaattatgcaaattccaatgccaagaataagtgccctggctgccggagacctcagtggagaaggggtgatgtgacttcagctccctttttgtgctcaagatggctgcagccatggtcacaattaaatagctgtctttgagagaagccttttcttccagcaggaaagcaggccagtctgctctgaattagccagctcacaaagccatgaaagggacttacaaaaacaatggcacgctgtacattccatgagattttaacaagttatatgaaccaaataatgggccgattggctggctc

SEQ ID NO: 55132 - DNA, 1050 bp, Homo sapiens
ccactcacctcggcctcccaaagtgctgggattacaggcgtgagccaccgcgccccagcccacacttttgttctaattagcaatgtgaccctggatttgccacctgctctctgtgggttccattgtccccacgatagaaaccttggagtgggctattgttccttctagcttacgtttataggattctccatgcctagaataggctggagaggaaaatcttgtagccagtggtaaggagttcttaattgtgcgatatccctgttgatcctaagattgccgtattgattggaacaggataccatttcatgttgtatcttggatatgaagaccaaggtcatgatggatcataactgccaccaccatgttcccagaagagtggaagttaccccagcactcctgcattgctctgtgatccattatggttcacttctgtaaccccctttcaacctatgaagcctaggctcacttccactctttatcactctcttccttttattttcccctggaactgcatctttaagcttcagaagttgcccccacaaccagcactaaatataaatgtatattatctcctctgggtgcgatggctcatgtctgtaatcccagcactttgggagcccgaggtgggtggatcgcctgaggtcaggagttcgagaccagcctgaccaacatggtgaagccccgactctactaaaaatacaaaaattagctgggcatggtggcaggcacctcaggaggctggagcaggagaatcgcttgaacctggggggcggaggttgcagtgagccgagattgggccattgcactccagcctgggcaacagagcaagactcgtctcaaaaaaaaaaaaattttacattttctccttcccctttatacctatattccttttagcctcaagactagtgctgctttgtttgttttgttttttgagacaggggcttactctgttgcccaggctggagtgcagtagcaggatcatagctcactgaagctttgaactcctcggctcaagcaatcctcccacctcagccccctcaggtaactggg

SEQ ID NO: 55133 - DNA, 1063 bp, Homo sapiens
ggaaatggatgccatcgtcaaaggagagatctagagctctatgtaaagagtaaagggaaggaaccctaagaacgacctcagaggaatcccagcacagtttgttccagggagtcagcagaggaggccgagtgcagagaaataagataggatatggatagataggatctggatagggttggtgttcaaaagaagatttttttttttttgatgatagaattcaataggagactatcttgccatttaaactaaagcatattttatccactacttgatttttttaaataaggcagacatgttttcagggccaccctccctggggtctgtgtcagcagcatggtgattatactcctgtggtttcttcccagcggtcctggacattccccaaggaccctgtagacagaggaggtacatggacactgcagtgtctgcctttgcctaaagggtgatggctgctttttcaaggtttaggtaggtggccacgttgaggatgggtgtctgcccgggaagacaggtcaaggggatatgttcctttatctggtaggcagaagcccttcctcttagaggcttgaggacattatctcaaaaccatagcatttttattctgcctctcgattagttagaaaaagcctttacaaacacactctttcagaagccggtagggaatgggtgggggtggggtagatgggactggtgggattggaggaagggcagatagatagcagccaaacaaagcatctgcttttatcagaagtgctgtgtttgagcttagacagcctgaagcctgatgattcactgatgccagatcctctctgcctgccaagagacatactggccttgatacggtttttcttgttcttaccctattcaatttgactgactgctgccaagttaaaatttcaacagtggcttttagcttcatgctgtcactagaattctgctgagcccaggttaacccatgactgggtcaagtttttatcaaccagtaccactgtgtattagtcttggattcctatatagactcaccatagtgtaatatgcaggatatttaaatgatgctgtttta

SEQ ID NO: 55134 - DNA, 1061 bp, Homo sapiens
gagcctttgcctgattgttcttgtgcttaatatcagtgtctttgctgtttattcttcgatgcgtatttattagcttgttttatgccaggcattgtgctagatgccaggtacctagtgaagcacgaaatagatgtatcccctgtccttagggagttctcagtttagggggcattcaggcaaatgcatcattaagtacgtaactacaaaatgaggaggtacaaggaagatacaacatcagaggaccccaagttacttagactggtggagagaaggcctctctggcatgggaatttgaagatttgatataaaaagagaatatatttcagtaataatttttatgtaaccgtgttgaaataatgtctttgaaatagtaggttaaataaaggattaaaattaacttcagctattttttaaattgactatcagaaaatttaaaattacccatgtggctcacgttgtgtttttattggctagcactggtctagatttgggtaaggacttcagattttctctgtagggcaaaaggaaatctacctttaaaggattttaagcaagggaatggcacgatcagtttttagaagattgctttgtctccctgtggaggaggattgatggagaagaggatgaggagggaaggcaggaggtggttgtaaaagtacagggagcaggtggggttctgcactagcgtggtggtagaggagagaagtctgtggattcgagatatagtttgcaggtacagtctgccatatctgctgaggtttggatatggtggggtgggggagaggtatagtcaagcatggctcaggcagctgggtatatgggatagggcatttgctgagatagggaagcttgggagaggaccaaggctttatttgtttggttgattgcattttcttagggaagggggttatggtagattgctgagaatcaggacttctgtttggggtttgctaagtttgagatgcatgcatgtctaagtggaggtgttaaacagacaggcggttggaattatgagcctggagctctgcaaaaaaggtctggcctgaaaggtataaagttag

SEQ ID NO: 55135 - DNA, 2043 bp, Homo sapiens
tttgtgagattttggtgcacccatcacccaagcagtatacactgcaccctatttgtagtcttttatccctcgctcccctcccactcttccctccaagtccccaaagtccattgtatcattcttatgcctttgcatctcatagcttagctcctacatatcagtgagaacatatgatgtttggttttccattcctgagtcacttcacttagaataatagtctccaatctcatccaggtcactgcaaatgctgttaattcattctcaaggatgaatttgtattcaaatctggaatcttccttgggctgagaggggactggttcctgttgtcgggatgtctgtgttgctaggatagctgagggatcagtgcttggataccattcaggtctttttcctgcctgtgggtacgtggaggcacacattcctgggaacagctgtgagtgcctaattccttcggcctcttgtgctgtgggagcatgtggtaggacaatgtggtgtttcattagtttgcatgagtggaactgactgactcgtcacaagtgttttaactgacagtggccagaaagtctgcagaattatccctagttaaaatgagcagtacattttcccaggcagtaagtaacctaccctgtcacaatgtcagatcttcaaggttgaagcaaagatgtaaggtccagaatctatgcagcttttttcctctaaaacattgatttaaagccctaactctgggctgtatcaatgccctcatctgaaaaatggttttagttattcctcttcagaaccattggtttctgtaactactgccttctctttaacaaagcaagatgttccctcagacacgcaaatacaccagcctttagctcagggttaatcagaaggatgtacgatgcgaaggtccacatgcaaacatctgcagtttatttatacccaggcatgtctgctgtctgcaaattggaagctttttgtgtactttttggagaaaaaaattggattttgagttaaaaaaaaaaatcttgggccgggtgcggtggctcattgcctgtattcccagcactttgggaggctgaggcaggtggatcacctgaggtcaggagttcgagaccagcctggccaacatggtgaaaccctgtctctactaataatacaaaaattagttgggcgtagtggcacatgcctataatcccagctactggggaggctgaggcaggagaatcacttgaactcaggaggcggaggttttagtgagtcaagatcacaccactactctccagcctggatgacgagagtagaactccgtcttagaaaaaaaaaaagaaaaaaaaaaaagcttttattagattaatagattctatttaatagaaggtatacttagcatagtgacaatggcttaacagcccaagttcaagaatgtttctgaaaagtaatagtccatgggttgaattgatgtttttataagtttaaagttgagttttagtaacattttgaaatacccctcggtgtttgaacgcagctgttgcgaatggtttagtgcattccgaggaatggtgaatgtcccggtccctggtggcctctggtgtgctgaggacaggagcagctgggtcagaggtgagctcagcccctgcatcttgcgctgctcctgggttgaagaagcccagagggtgggaagtgcctgcagatctaccagctgtctgatggttgtcctaaatcctctactgacaaggatgatttgaacctaaatgccaggatctacgcattctcagctgttctggggcaaaaaaaaattgttaacagattgcaaaccacaaccaagaaaatgatcagagaattacacaatgcagtccttgttgagtggagctgtgtaacatctcctctggactgccccctcctcactcccaccccaggacagacctgttttaaatcatgttttttttcaggccaccagcatgctatttgggaaaggtgaggtattttagtcttctgggtttttcacgcccctcaatatatgttgaaacaccttgtaaacagaggtgctatgcagttataaat

SEQ ID NO: 55136 - DNA, 2374 bp, Homo sapiens
tggtggaccgcttttcatttattaacttaaactgtcctgagctagatgtctaccatgtactagacacagacagtttatagacttactccttgaagttctgaggccctggctaggtgccagctcttacaaagggaaactccacactaggggggtgggtggggaggcagtagtgatggagtcacccttcctatcttggggaagttcttggtaaacacccaaggtccaagctgtcaagctgccaagagtgtaaagctttttgatttgaaaactgacttggacagaggtcatatttctgtaaaagatcttatcggagggtgggtgcaggtcctgagtttgaagtccaggctgtggaagacttaacaagcactcctggtttagggtttgtttatgattgagagctatattaatccaaattcacatctttttttcttaactgaaaatatcttattgttaaagatgaatacaggaagtaacaaatgcatatccctcaaaaattgtgctgagtgagaaggcacatggttctctgttaaagggtcgtaaagtcctaccctgctctgtactactattaatatatttatttctctaacacattaaaaaaaaaatctcctgaggtgttcccaattttgaggagtacaaaataccttatattctttttttgttaagtattcttaataagattataagctgcctgaattcctttttgaaaccagcaatgatataaacaaagtttttgcatatgcagagctaggaccaagcagcctgaatgagaacccaaggctctagagaaggaggttttgccaaaggtgccacagcaaaaatacagtgagagaaatggaacttctcattcaactcttccagttgaaaggagctgcgaaacaccaaccattcactccagctcagtcacctctttttttcttttcgtagtgaattcaggggttaatttcagttgacagtgacttgcccagatgtcagctctgaaaacattgcatctcatcatgttgggtattggcctgacgggtattggcatgaagatagtgggccgccttggatgtctcctgcctcctctatcttgctcagagggaggccctccagataagcacctctttgtcttgtgaagtactctgttgcaagtttgctcttttccaaaaaaatatgtttagcttgttaatcattaaaaagtcacctttataggccgggcttggtggctcacgcctgtaatcccagcactttgggcagccgaggtggacagatcacgaggtcaggagttcgagaccatcctggccaacatgacgaaaccccatctctactaaaaatacaaaaaaattagctgggcatattggcgtgtgcttgtaatcccagctacttaggagactgaggcaagagaatcgcttgaacctgggaggtggaggttgcagtgagctgagatcacgccactgcactctgccttgggtgacagagtgagactccatttcaaaaaataataataataacctttattataattgaacattcattgaaaatacatcctctcggaggcccaagacaaagcagaggaagtctcctctttgaccttaaaacttgcatgattaagctttcatatctacatgtgtcatttcctccattattaattcctccattattaattatcccaataattataacatgaataattatcctaatattattaattgttatctcctacattttatagttttcagatagcttaaaggatatgttcataaactaccttgtttgaacattgtaaccctgtgtgagagacatagcagatttcattatgaacattgttatcaccatcatcagtgtcatcatttagagttgaggaaatgggttcagggatgttgaggcacctaagatcataccttaatggataactgagctaggattagaacctagaaagtattatagggccttccccagacagtgtgttccatagcctccgaagaatgttggcaccagctgtgggcatcctctgagctatcttcttgcacaggggtcagtaccctgcttgtattcagtgctttggacacctactttggggagaatggagccttgcctgctgagagccaggcagaaggcaggcctggaagggggagttggtcttctcttttggtgactgtatctcttggctttgttgttgtcttggctgcccttggatgtacttgtggttttgaaagagggccaaagccagaagccagggagctcttaaacctgctgcttgatgtcacagaaggagcctttgttctgcaagcagacccaggtttctctgagaggtctgcagacaggatttcctcttgacattcacattgttcagctgatatccccttgattcatttatcttcaaggatgaattttt

SEQ ID NO: 55137 - DNA, 2463 bp, Homo sapiens
tggagctggaggcactgactctgctcagggtaaatgcttctactcatggtcctagataggagagagtgtcggggctacttgctgcacacagcctgacgtgccattctcctttccctttccatgcttcctttgccccccaccattttttttcttttcttcttcccttctcctgtctcttcttccccgactgtacaggcacccatgggcattacctaaccctgctggtggcaggcagatcctgacccctctgtgggggccatgtacatgcagcccccaccccagtggctttcctctgcagctgagcctgctggtgtatggcagaatggcccacctcctgaccctgaccctagcccgtgttcactaattagagtgcattgatttatttataaacactgggtctttgccagaaaaattctgtcccatcctgtgtagcacaactgaggactggtctggcactgaagacaattctagcagctaaagaatttcaataatccctgcctgttcttatcatttacagggcagtgaaaataatgtgagctaattatctaacagtttataatattttctttcgtacatttattactgcaactatgagtcctctcttaatcatctttttttgctggttgtgcatggcttatatgcctctaacaactctgaaagtgtttgccctcttggttttgctgccaacccaggacaattcctatgtaggatcatttcaggaggaagataagtaaacttcccattcttattagactccactagtgatgccattaaatgttgatctgttaatggtctgtgaatatttcattttatgtggcatatttccatttccttttgtaagtaggaagtcagttcttgtgactctcatagatttataccttcactcttttctttcccccttagagttgagaattatggctgcaggaaaatttgcaagccttcccagaaacatgccggtgaatcaccagttccccctggcctcatccatggaccttctgagcagcaggtcccctctcgctgagcatcgcccagatgcctatcaagatgtgtctatacatggcacccttccacggaagaaaaaaggtcctcctcccataaggtcctgtgatgacttcagtcacatgggcaccctcccccactccaaatccccacggcagaactcgcctgtgacccaggatggcatccaggagagcccatggcaggaccggcacggcgaaaccttcaccttcaggtaacttctgtaatttcactagtgaagatgatttgtcttaaacagctttttaaaaggtttttatggccgggcgtggtggctcacacctgtaatcccagcactttgggaggctgagatgggtggatcatgaggttaggagtttgagaccagaccaacatggtgaaaccctgtctatactaaaaatacaaaaattagctgggcatggtggcatgtgcctgtaatcccagctactcaggaggctaaggcaggagaatcacttgaatccgggaggcagaggttgcagtaagccaagatcgctccactgcactccagcctgggcaacagagtgagactccgaagtttttattaggaaaaacatcaaacatacacaaagttgagcgaataattaactcccatgcacctgtcagccggctccaacagttaccagctcaaggccagtcccgttttgtctgtactcccacctacttccctcctttggtattattttgaagcaaatctcagatttcatattatttcatctggaaatattttggtatgttcctttcaaagataaggactcttattttaaaaactgtataaccacaatgtaaaaaaaactataacacctaaataaaaaccacttcttaacattatgtaacatttgaggatattttaaaatccagcttcctctcttaagtcccttaaaagaaagcccaagtattttctttttatcatagcatcagattctgaactatgtccatccacttctatagagatgccaggatgtctataaattagaccccatatctccttatatttagttgtcagcatgctgaaataaaattttatgtggatgcaccagcaggtcagcttcagaatactttaggacaagaattgatttttccctctctgtgacagagatctgggtaaatgagccttatggttgtaaatgctttttctctgggtttgtaatgggcctggctgtgattggtttctgcctgttagagctagtttggaaactgcactccttttcctgttggggaagatcagcagcctgtgatgctatctggtaaagaatgggactgtttcttttgttatctctctttttgtccaagcttgtcgcaaagccacttggatcctagctcatttatttgttcaatatttatatatggagcacctatattagagtatgttgatttcataagccccagggcttaccaggaaaattctgctcagtcctgattatcttaaat

SEQ ID NO: 55138 - DNA, 1993 bp, Homo sapiens
tcttgggaagtttgcaaagaaagcgaaggagcctgccctgtaactgttgacaacatctccctccctctctccctttgttgagaaagaatgaatagttggttgtgttgctccctctgcgtcgcggtggggagaggcgagggaaggcaaaggaagggagggacggtgggaaggaggttccgatagatcgtacagcccaactgtccttacccacttaggccgctgagggcgccgccgctttaaaacggtgtaatcaggtgtagacactcgtcgaggaggaggttgagcggactccgaagcatctggcaaggcggcgtgttccgtggggcggcgggtcgggtcatggttggggttaactcgcttgaagcaaggtgcaaaggagaaaaaccattttcctaacctcatatctgttttcgcttaaagctgttagctgagatggaaagtagagccgtgcattcagattgttttaaaccttgactttatctcccaaggctacacagacctccccaaggaaagtacgctggccgagggaaggtcattttgggagctgatagcctcccttgtgttgcctgggactgagttgagatcctggaggctgggagaggcctcagtgctgggggtggggcccagctcaacacaggtccaagtgggaaggggctacccgggtaacaatgggaagcccacaggcaaagcgcttgtctgcgggcgtgccagggggtattgaggataacgtaaagaccttgccaagccaggggatcccacaccactccaactccaactttctctaaagtgctgctgagaaggctggcatttccaggatgactaaccaaggtctaaatctcctgttcatataggcagaactgcttgtcaaatggatgctaatcttaagaaccttatcgggtaaatcctgtactgtgttgcttgaaatacaatccatggaggaattattcatacttgaatcatttggctagacttcataagtttacttcaaaaataaagagatactcttaattcctaaacccaagcaaaacttcattttaagtggataagccaattgaatatgtgtggttgtttcatctcctctctccatctgactctccagagaagttataaaactacagatccaagttgtaaattctctgtcatggggcagccgagacggttacatttccagagtttaaaatataatgaaaagttcttaaagctcacatcagataaccattatgagttaaacttgaaaatatcccgtttcagaaataaaagagtaaaatccaaacaagtgggctgcttatctctgcctcagcttgcaagatcatcagtttctttgagacatcattgtaaagcaagtgagttgggcctcagttcacaaacatttcaaagcccagcgactgaccaggcccaggaaggcagcacatgtggtaaagtttgtcagcctcgctcttgttcctgatgttcacatgagtctcagattttcatatcaagatgcagagtctttgacttttgtataatatttcaaaatctggcattagactgagtcaggacattgtgtttgttttcctgcacagtagagagaagtcagatggccagagtctcacctgggcttttttctaaagactgcatgtaggctcacttggtttgcctgtacgtgtgtctgtgtctgtgtccgtgtccatgtcctacttggcttggtgtctttgcatctattgttctaggttaaaacgtttccctccccatccttcccagttgcagtcttcatttgtgaactctcagagttacttcctttgtgaaccctcagtataacagagatacagtgactcttatctgacaagatagataagagcagcccctgtcctgcttagaggggacctgctatttactaagtgtttgcagtatttcaagaactttgtatacacaatcacttttaatctttacaacaatcttatgaaatagctgttaagtcattttttaaaatgagaaaccgtcaggttgagtaact

SEQ ID NO: 55139 - DNA, 1066 bp, Homo sapiens
ccgaatttctgaggtatccgggctctggtggactgaggggggcgacgcgccccgcgccgcagcatcctccgagagctcgtcttgccgccagcacctgcctccaaggacgccgcgcagctgccccgagcccgcgcgcccggggcccgcgactgcgtgggcggaagccgggagggtgtcagcacgcgtgggagcgctgggagcatgcgtatgcgggtgcatgtggtcggagggcgcgcgctcgagcgcggccgcggggtttcctggtggctgcgagcggtggggacggcagcgggcctggcgccgctgcccagaagggtgcggtcgccacgaatctgagaggcggctgggtgggggccggcaggtttccagtgcccgcagtgatccccatccgcaagaccccgaagccctttgaaatagacggtcaaagccgcgtggttgctctgcgactgcagcggcgagaccgaacgcccggcccccgttcctattagctcacagcagtcccggccccgcctacggaggattcgcagggcggccgctgggcgcgctttctcggctcggccacagcccgtttctgcaccaaacccgccagccgcggcccaccctgtgcttcacccatacccgcccctgcccagcatcgccaggcctcaaatgcagaatagtctctggcagagttcaaagagggaaagggaagtcctgggaagagtccagtgtggtagggattttacagtcttacttaaccccaagacgaagctatggggcgggtacatacacaccaccgtcccctttataatataaagaagggaaactgcagctaagagaggttaaaaaactcgtgtagggacgcccagctagtgagcgtggagaactgtgatgaatcatattttgttatgtttgcaaactaacacgttagctttcacggtttcatgaatgctgacagaacacaccagacttctgagtcagagataaaagactattacaacaaaagcaatagccagagtatcaccatttttgagttggctccctggaccccagttctcacaggaacgaagcacacgggcccagatgc

SEQ ID NO: 55140 - DNA, 1197 bp, Homo sapiens
aattggtcactttgtcttcagagcgtctatagtgttttgttcagcacatgttatgctttaatattttagttactttttgtggagcttccttaagactgcaggctctgcactgcaggaaccagatgttctttgtttccctaacatgtaacacagtgcctggtgcatagtgatcactgtaaattttattcagttgagtgtatgaacaaatacagaatgatcactaagtaggccaaactggcagcctttgtgatgacctaggaaaccaaataggtatgtagtagaatttatgtgtctaattcattgatttgggaaactagaacaaaaagtatatattatctgttccacttttctcctttagttacactgtgcatcatgaatttagtgtttagcaaagaaattttggatctactataaactactgaagaaacataatagcaccactatgctacttttttttttttgctttaaataaatggcaaaatttacattactattagtgtaatgtaagcttgttctttccattcctttctctaaatataattagagctacactgaagtatgaaagcatcttggcactcaatgcatgacttatttcaatcaattgttcacagattggaaccattgttgacaatccagctgatttctaccattcacgaattcccaagaagcaaaggaaaagaactattgtggaagaactgctggctgattctgaattcagaaggtaaaggaattcatatttattttataatatgtatactttgctttaaaaatgtataaacttataaattttcaaataatttaaaaataactcatttataataacccataacatattaacatgaatatatatttttatgaaaaataatttagtgcaaatctctttaatgtctggcttaactaaagacagaggctcatacctgcttctgcagataacatacatcacgtagcccctggaaaacactacactcatgagagaacgagggtgaaaaaagcgattaatgccttagtattcttgagaaaatagtttttacctaatgaatcccttgaaagggtctactccacagaccacactttgaaaaccattggtcgcttctaagaaatatatatatcatactgtgcattttcaggataagtgtgactttttgttttgcttagtcctgatttttgtgtttttatccctcaaaaatgtttaaagca

SEQ ID NO: 55141 - DNA, 1050 bp, Homo sapiens
ctaaagagttgggattataggcatgagccatcgtgcctggccttttttttcttttttctttttttttttgggagggagctgggtttggggggagacagggtctcactctgtcacccaggctggagtgagtggcacagtcatagcttgctgcagcctcaagctcctggcctcaagtgatccttctgccttagcgtcctgagtagctgggactacaggtgtgtgccaccatgcccaactaatttcttttctttttttttttttttttacagtcagggtcttgctatgttgaccaaggtggtctaaaactcctggcctcaagtgatcctcctcccttggcctcctcaaagcactaggattataggtgtgagccactttgccaggctgactaaaaattttaaaacttacagaagtttaaactgttgaaaaacttatataacattctgacattattttaaaaccaattttatgtttttatagcttctgcagaaagccgtcattacacctgattttgaaaaaaaccactgtgttccaccatatagtgaatcaaagtatcaacttcagaaaaaacgcagagtaagtacagtgacttaattaaaatgcttagatatgtttggctatatattttcagcttatacaacataactgcacaattaaactgtatctgttggtctatatatgagtccaaagaaaataattacagatttctaagggctgtaaaatatagtaccataaacacattatgtatagattttcacatctttgcagccacaatagtgcatctataagtagaggttttttaaaaaaatatatatatatatagattacttctatctgccatttcgactagttatccagagagcttgaaggaaagttgaggatggtattctagtaatgttactgtaatatggagcaccctggcacatggtaggcactaactaaatacttgttgtatgaatgaaacaaaattaaataacttgtaggagttttctaaagaatagtattttgttttattgtagaaataacacaaggttctggatccttgtatgagtg

SEQ ID NO: 55142 - DNA, 2403 bp, Homo sapiens
agtaactccaacaaaggagtcttacactgaagaaatagtgtctgaagcagaatctcatgtttcaggtatttctagaattgtgcttcctacagaaaaaactacaggagccagaagaagtaaggctaaatctctgacagatccaagccaagaatctcatacagaagctatatctgatgctgagacatcaagctcagacatttcattctctggaattgcaactagaagaaccaggagtatgcagaggaaattaaaggcacaaactgaaaagaaagatagtaagattgtaccaggaaatgagaaacagatcgtgggtacacctgtgaattcagaggattcagataccagacaaacttcccatttacaagcaagatctctttctgagataaataagccaaatttctataataatgactttgatgatgatttctcccacagaagttcagaaaatatattaacagtgcacgaacaggccaatgttgaatctcttaaagaaacaaaacagaattgtaaggatttggatgaagatgccaatggaataacagatgaggggaaagaaattaatgagaaaagttctcagctgaagaatctttctgaacttcaggacactagccttcaacagttagtttctcagagacattcaaccccccaaaataaaaatgctgtatcagtgcactctaatctgaactctgaggctgtaatgaaatcattaactcaaacatttgcaactgtggaagtaggcagatggaataacaacaaaaagagccccataaaagcaagtgacttgacaaagtttggtgattgtggtggtagtgatgatgaagaagagtccacagttataagtgtcagtgaagacatgaacagtgaagggaatgtagattttgaatgtgataccaaactatacacgtctgcgcccaacacatctcagggtaaagataattctgtcttactagttctcagcagtgatgaaagccaacagtctgaaaacagtgagaatgaagaggatactttatgttttgttgaaaatagtggccaaagggagtcattaagtggagacacaggaagtctgtcatgtgacaatgcattgtttgtaattgacacaactcctggaatgagtgctgataaaaatttttacttggaagaggaagacaaggcaagtgaggttgccattgaggaagaaaaagaagaggaagaggatgaaaaaagtgaagaagattcatcagaccatgacgaaaatgaagatgagtttagtgatgaagaagacttcctaaatagcacaaaggctaaactgtaagtttttcctttatttttataagtttttgatacatgtatttcaagtggttaatttaccataaaaatatgaaatgttagcctggggaatgagaaaatcactgccttgggttcttcatggaatggctcattcatttgacattatggagccaggtgttgggtgtgcacctgtagtcccagccacccagggaggttgaggtaggaggatcacttgagtcccaagagttcaaggctgcagtggtcactactgcactccatcctgggccaacagtgagaccctgtctcaaaaaataaaataaaatgatgaaaaatatatttatttagagttttttttcaggaattcctcataaaaataagatgcttttttttctttattgtggacaatacaagggaagagaagaataagtgattttttaaaatgccatcttatatgtttccattttgatttaattacttgatctttaagtgatgatttctttttcagtctgaagttgacaagcagcagcatagaccctggtctgagtatcaagcagttgggtggtttgtatattaattttaatgcagataaactacagtctaacaagagaaccctaacacagatcaaggagaaaaagaaaaatgaggtaagttaattgtgctgttaggttttcacagaactaaccaatcacttttagaaattagtccttggtaaaagacttaattttcctacagtgaaaccacattggcctaatgtgttagttttttccttctctctaaaacagtcatttctttttacaataaaatcctatctatgaatgataatgctttaaaaataaatcaatacagggtcagtgttcctcatcttacacccaccaattatgatcccaggggttttgtttttttcccttttcttgctatacttttagttcttaagttcttaactagtgtagactgttgagaatctgaaagctgtgaatgcctgcctgcctcttccacccggaaaaaaatgcacatgtgcatatagacattttacatataatttcagaaggaattactgttaaggtaactttacccaaacccttagctttagccaacaccttgcactgttttctcctaaatctatattttctagccttg

SEQ ID NO: 55143 - DNA, 1057 bp, Homo sapiens
tcaaaaaaaaaaaaaaagctgtatctgttgatagaagtaatgaaaaggactggggcatgtggaaggaagtgggactgagtagcaggttaaggataagaaaaacttccctgaagaaattagctttagactagggtcagatgacaaggtgtggtaggcattctgggcagaaacccttgtttgcctggtttgtaaatatgcccctattgaatgatggagtagttaatatgtaaactttagaagttcaaggaaaacatcttcaaaagcttattcttatagaaaggaatggcttctgttgagataagcgtaggttaagtttggaaaagtcataaaaagatgaaagcttgctaatttcctctaaatatatcaggatatggtcatatgtagttccgctaccagagaagtcaacaaaagctttaacatgtttcctcagcaatgactaaatgtgtaaaatgtcatgcaagattttgatgtgtctgctggtccattattttaaggttcatgttttacaatgaacattacttattttgattattttccctctttctttgctcactgttgattcttgcattctattcaagttttttttttttgttttttttttttttgagacagggatctcactctgtttcttaggctggtgtactgtggcatgatcatggctcactgcagcctcaacctcccaggcttaagccatcctcccacctcagcctctcaagtagctgggactacagacatgcaccaccacacctggctaacttttatttttgtagagacaggatctcgctatgttgcccaggctggtcttgaactcttggactcaagtgatcctctcaccacagcctcccaaagtgctgggattacaggcatgagacacagtacctagcctccttagtaattctttaccaaaggtctttagtgacagtaaattttctagatcccatttgtctgaaatgtctttattttgcactcaacctttgttttttgtttttgtttttgttttttatagagatcagttttcattatgttgcccagattggagtgcagtggttattcacag

SEQ ID NO: 55144 - DNA, 1019 bp, Homo sapiens
taaataagctatgaactttgatgtacactataaatctccttaattctataaatttgtgtctgtaacctgaatagtttgaaaacttctttaaaaatctcttgtatttcatccgggcgcagtggctcacacctgtaatcccagcactttgggaggccgaggtgggcagatcacgaggtcaggagtttgagaccagcctgaccaacatggtaaaaccccatctctactaaaatacaaaaattggctgggcgtggtggcactcgcctgtaatctcagctacttgggaggctgaggcaggagaatcgcttgaacccgggaggcggaggttacagtgagccgagatcacatcactgcactccagcctgggcgacagagcgagactccatctcaaaaaaaaaaaaaaactcttgtatctcaatatttttaaaccacaggcctaaataaaactaattttgctcaagttttctcaacctagggaaaaagaactatggttccatattcaaaataaatattatagacccttttcctaagtaggattttgtggtttactgattgggtaatttgatcattaaaattatgtgaaatctgcccgggcacacctcatgcctgtaatcccagcactctgggaggccaaggcagatgatcacctgaggtcaggagttctagaccagcctggctaacatggtgaaaccctgtatctgctaaaaatacaaaaattagccaggcgtggtggcgggctcctgtaatcccagctactttggaggcgaggcacgagaatcgcttgaacctgggaggcggagtttgcagtgagccgagatcacgccattgcactccagcctgggcgacagagcgagactgcgtctcaaaaaaaaaaaaaaaagaaaaattatgtgaaatcatgtgatttgcctgggaaaacttgtttagatattgagctacttatgccttctagcctttatattaattgtatgtaatgttattaaatatatatatagttcatctttacatttggaaatgcccaa

SEQ ID NO: 55145 - DNA, 1075 bp, Homo sapiens
ttcaagatatggatgaagatatatatatatatatgaagatatatactcatatacaccaaaaaagttgtaaggaaatgcatgacaatgttatatcatctccaattgataggattatcagttactttttttttctttagactttcctgtattttccctgactatacattagaatcacctggagatctttaaaaaactgcagatgtctaggctccactcaccaaaagttaagaattaaataggctggggtacaggtgtagatactttttaaataactgcctgggaatttctaatattctggttcagattcatagcacacacatgaagaataagcatattatatattaaatgttgaggtgtttcttttgttatgttaaatgcttacctacatactaaagtgcttttttgttttccaatttaacacgctggagttttgtttgttgttgtttcttttagaactgctttctgaagcaagtttccaagaagctcttcaggaaagcattcctgacattcaagcgcacgagtgggtgccgctgtggctactgcggtattcggtcattgtgaaaagtagaggaattatcaaatcaaaaggctacattttacaagctaaaagaaggggttcttaactgacttaggagcataacttacctgtaatttccttcaatatgagagaaaattgagatgtgtaaaaatctagttactgcctgtaaatggtgtcattgaggcagatattctttcgtcatatttgacagtatgttgtctgtcaagttttaaatacttatcttgcctccatatcaatccattctcatgaacctctgtattgctttccttaaactattgttttctaattgaaattgtctataaagaaaatacttgcaatatatttttcctttatttttatgactaatataaatcaagaaaatttgttgttagatatattttggcctaggtatcagggtaatgtatatacatattttttatttccaaaaaaaattcattaattgcttcttaactcttattataaccaagcaatttaattacaattgttaaaactgaaatactggaagaagatattttt

SEQ ID NO: 55146 - DNA, 1035 bp, Homo sapiens
accaaacattcagtttttcagtgtctcaagcttattctttgctgtgactactagttacagaatattaggtcataattcttgtgatcatccatatgcgatagtagtgagcaagtagaactggagaagaaaattttatgaagataagggagctactaaaaacttctgggacctaggaaacaagaagaaattttgttccctagaaagaggagcatgtagtagtagctgcaagctgcctaggaataaggcaggtcagagaaacccacttgtctgccacacagagcaagtaggtaaatgggcacttacacatttttgaaagatagaaatgttctaaatgaaaagtaaactatgaaataatctgttattttgaaaacaagtgaagaatatggacagaattcagtgggatactttgaaaacattagaaatatttgtttttatgatgtaagcatttattttctttgtgtcttccttcctatcagcctgttcagtccttggagttgcacagctggattctgtgatcattgcttcacctcctattgaagatggagttaatctttccttggagcatttacagccttactgggaggaattagaaaacttagttcagagcaaaaagattgttgccataggtacctctgatctagacaaaacacagttggaacagctgtatcagtgggcacaggtgagggatggcaggatcatgagcactccaggaagaacttgcccttttcagtctttgctgcacactgttgagcatcatgcacatagtggccacccctgcggggtgacttttccacatgtgggagttttgttttgtttctgcaggagttttgaggcaggttttatctaaatcatttgaggtttttgtttgtttttatttaaatatatctctgattgaactgaatgttaatcctggttaaaatgagtgacaaaaatactagaagatgtgtgttaaaacatttataccaaatgaattaaggccatttccttcagttctacttatgtgctgaaaacaataatacctaaagaaaaacctta

SEQ ID NO: 55147 - DNA, 1030 bp, Homo sapiens
ttacttaaactccaagatggagttataagaggtcagtgctggctattatataagagtcagaatagaacttcaacttgctgttcttcatgatgatgtcatcatgtcatgtaatttatgtgtcaaacttcagagcagtagaaagattaagatgaaggagatggaaaggataaagggaaggcttagaagcagcatccacccaaagcaagcataagcacccccttcctggtaagatactggtaagcaatgtgtgaggtcacctgggaatataaaaagaaacctgggcaagttacatgaagagaaagaaaatactgtaacacccattcaggaaatgtagtaagtgacaaattccagaaactgtactatactcaaggaatacaaaaatgaaaagatgcgccatctctgccctcaccttacaattagcatagcatagtcattaaaagcttgagctttgaagtttcggggtgtgcagattacaggctagtataatgttgggctaacaaagactttaacctccctgagtctcagttttctcttctataaaatggggatgtacctgtttctccggcttctttgtaaactggatgaaataacaaaagaagcacttagcacagtgtttgcctcaaagtaagttctaggtagctattatttgctaccatgttgttattattgtggttgttgctattttattattattgagatggataataataataaattacatgtaagatgagatagggtattgtctctttttaatctaattatagtaactaccatttattgagtcttgctttgtgccaggcactgtgcttggtactttatggttatattttctcatttaattctcaagacaatcctgcaagttaagtctgttactgcattgcattagtgatactaaataacttgaaggttgtcatacaaccagtaagtggttgaaccaggaatccactcaggtatgcctaactccaaaacccattttttcctgttaatttcacattgctgtttgtgttggaaaggacgtaaagcaacattc

SEQ ID NO: 55148 - DNA, 1043 bp, Homo sapiens
agtcaatatagcaaacatgtaatttacaagattaaaaataattaggcttgtgataaagtcaatgaatttcctacgtaattgtaacattagactgttttattatttgtcctgacattttgcagaatccaagattaattaaagaaatggtttcaagaagagggtgaatactataaaaatagacttaccttcctgaattgaggaattcatcaggaaagcctcaagtgtgcaaatgagccatccttccagagggaaatttcttagaattatcccacgatttgagccaaagcacttccgatagaatttttaacctctagttggttctgctccttccatttttactaatttttaagaaaatactatgacttataattgtatctggaatgattatcaactccttttcatccactgacttaaatttgattataaatatgctttacataaagatctagaccttataatttgaattcaagtgaattgttgtgactagcatgtaaattattattatggattgtaaatcttaacataggtagttctgtgcccttaaattgataaaccagttatctcttgtaatcatgtgtactaagatatacgtagtaaagtgattgtatcagtttttatcataagcagtcatagttcagatagttcagaagtttagtgtctgctgtttctattaggaaagtgcttttgcaattcaggggcttgcctctagttactcatttgtgttttcattgattgcccacagaagaatgcaaaacactgtgtccttggttatctaataaggcagtgatttcagattgccaggtttggcccattagtggtcataaatcagttcagtgagtcatggaccagtatattttttctaattaatatattggaagccattagagtgcctggcatgttgtgagcataaataccgctttatgactgttttgttccattatatgtatataggtctttgctcactatgtgaatgtatgtcttactttggactactatcaaataagtctgaaatacactttaataaagtatgtttgaattaattt

SEQ ID NO: 55149 - DNA, 1054 bp, Homo sapiens
gatgaagtagtattcatagtacacctaacttttagaatgttgacattagactctctattgcagtgaggcaaatgagtaagcactcaattttggctttggaataccctaaataccctgactttagtcattacacattttatgcacttatctgtgcgtctatgtatgctttatcagtacacattctatgcatgtaacaatatcattgtacattctatgcatgtaacagaatatcacatgtgccccataaatatgtacaaatataatctatcaattcaaaaattaaagttttgtaaaaactggaaaataaaaagactagtcactagttggaggtgacagagattaatctggaattacaaacttgttacctatttgttggccatttctgagcggatagtcatccactgcacattgtgcatattggtggtatgggacaattttagtatttaaaaaataacaaaatctttagatttaggagctatatgactttggaaaattactttaaagttggataataacaccttcctcatcaggttgttgtgagaattaagaggtaatatatgaaaacgctcaccatgcaggcatctatctccctgtcatctggttccatcagaaagataaatcttaattaagagaaaaaccttcctaaactatgtgtgtttagaaaaaccttcctaaatcagctgtgttcctaagtggtttctgctctcttctatgagatgttggtaacagaccatgcagcagcacacggcatccctctgagttaagtgctggacctgtgcccaggcctgttgttggggtcagtgcccatcaagagatgagaactcttgcttgtaactttagtaggaatctgagtctgtaccatattctgtgttcacgttccagctcagtgtgtatgttttgttttatttaaaccacctactttggctgtttctcccacagataaatatttctgtattcggtacatagactcttaatttcttccagtactgttggtggtagttcaatacagaattttgcacgtatattgatattattgggtgaaattttacctatc

SEQ ID NO: 55150 - DNA, 1063 bp, Homo sapiens
aaattagcagtttgggagaaggtccttgaaggtagcaaagcgaaaagaagaagggggcgcttgcgcataaacagctgcttctgagaacgaaaactacgtagcatttccgagtcccggtggccgctcaggctgccctttaaagagacgtgtaggaagcccaccctggggcggccgtgggcggagccgcgacctgaacgccgggagacctcaccaggcggaggcggtgtctacctcaccaggcggaggcggtgtctgcctcgcgctgtcctctgaccgccagggggagccctgccgcgcgctgcgctccgggccgcgccgccacgctctctcgacccgcgcgcccgccgcgcaccacccgtcgccacgcccgccgcaggccaagggccagtcacttgcgggccggcgtcccgcagcccattcgcgccccgcccctgccccgccgcgggatgagtaacggttacgaagcactttctcggctacgatttctgcttagtcattgtcttccaggaaacagctccctcagtttggaatcagctctcccgctgcggccgcagtagccggagccggagccgcagccaccggtgccttcctttcccgccgccgcccagccgccgtccggcctccctcgggcccgagcgcagaccaggctccagccgcgcggcgccggcagcctcgcgctccctctcgggtctctctcgggcctcgggcaccgcgtcctgtggggcggccgcctgcctgcccgcccgcccgcagccccttcgctgcgcggcccctgggcggccgctgccatgggcaccgacagccgcgcggccaaggcgctcctggcgcgggcccgcaccctgcacctgcagacggggaacctgctgaactggggccgcctgcggaagaagtgcccgtccacgcacagcgaggaggtgagcgtggcgacactcgccgcggggctcccggggcaggcctcgggcggggccgggcggttccggcaagggagaagcgcccgcgggcgagggagggtggcagggcctcgcgcgcacctgggctccgcccgcggtcagatgctgaggcc

SEQ ID NO: 55151 - DNA, 1017 bp, Homo sapiens
accttgaattgtagtttatttccatttacttttcagagtcttgatttgtgcattctgttcagatttttaggtgaattcagtgggagacgggagaagttagcttactgcatctgaaccagaaaacttccttaaaatatttttgagtgtttaatattgtatctcatttattttccaaattttgattaattaatatattatttacttaaagaatcatgaaaggatttaaaagaattataaaatccaggatttgaaattaccttagaagtcatttaggccatttacttttgacaaattctcttcacctcaaacaatagctaataatagctaagattgactacgtacctgccagtgtattaagctcatggtctacattaattcatttaattctcacaaaaatcctatcaagtttttagctccattttactgatgagaaaactaaagtttagaaagccttctcaagatgcggtccttggaccagtcatattgccattactttgagagcctatgaggaatgcagaatcttgggtttcaacacagatccttagaaccataatctacatttggacaagatccccaaggtgattcatttgcacattaactttttcaatgcactggtttaaataaattataaataacttgatgaaggtcacctagcgtgcaagttacctttaggatcaagagagtaagcagtttacctttagctggagaatgctctaacatagccagttgctagaattaaactgtaccttatgcagtttgaattttctttgtttcttgaagaagttagggcacaaataagctatttattctgttatctgtacttttcaaatactatttatgcagagtcaagtatccttagggaatgcctgtctacattgaaaaggacttagaggctaattatcctatcatctggtatatcaagagagatgaagaggaaacatggcagtctttgaaataacattaagctaatcgaaatttagcacttattcagattgctacccttaaataccttcccca

SEQ ID NO: 55152 - DNA, 1029 bp, Homo sapiens
ctgaattttggagtttgtgaaagaatgtcttagagaaggcagtagtttattttacttgacaagaaagttcaccttttaggcaagtgtgtgtgtgtatgtgtactaattcaggcacctgatagcaaggataggcaaaagctttgtattattgatgaaatgtaattttacgaacaaattctgtaagattatatggaatatagtaaatataaatataaaatgctatttcaaatagaagcaaatattttatagacagtgtactaattataaattgtacatggctgtccattaaaatcaactgcctttgaatcactgaccagaacagattaacttcagaagtattattttgaaaacagaagatttcagaattttcagttatttcaacttagctttactatagtaaatatttgtttaaaatataaattctagtgttatttttttttctgtgatatttgtgaaggtagaagaagcaaatgaactttacaaagtttgtgtgacaaatgttgaagaaagaagaaatgatctagaaaataccaaaagagaaattttagcacaactccggacacttgttttccagtgtgatcttacccttaaagctgtaagtaatttcttcagtattttgaaggcaagaagaaaagaccatcaggcaaggcatggtggctcacacctgtaatcccagcactttgggaggctgaggtgggaggatcacttgagcccaaaagtttgaggttatagtgagcttcgattatgattacccactctagagtgggtgatcaagaaagagagagagagagagagagagagagagagaaggaaggaaggaaagaagggagggaggaaagaagggagggaggaaggaagggagggagggaaaagaaagagaagtctctatctgcagaaggggaaggtatgcctgataagttacaattcttacgggatttagattctgagattaatgaaatgtgttgagtttgcagattgattttcagtttttcatagtgatatacagtttgaatttcttttgatctgcct

SEQ ID NO: 55153 - DNA, 1080 bp, Homo sapiens
acttttcacaaacttcttgtagttactttctatgaatgtcctggattaatctcttcttgcttagtaacctagtgtattcatttttaatgcaaaatgatatataaagttttacatatagagcttaagggaaataacctgctagagtagatagataatatgagatatagactgatcaagaattgtgtaaagcttttaacttgatggataatagaaatatattttaagataaaaatacattatagtttgaaaccattttaagtttaaactctggccttttaattgtaaatttgtcacttgtattttttttaaaaaccagtttttattgactagtatcttaggatctcagtgcttctttgtttggagttatgatgtgatcacatttaacatatacttaccttgatatttttgttttcaggaaatttttcccctttagaactagacaacgtgctgttaaagaacactgactctatcgagctggctttgtcatatgctaaaacttggtcaaaatatactaagaacatagtttcatgggttgaaaaaaagcttaacttgggtgagttgccttttaaagcatctgatttagagtataataattaagttgtttctaactcattttttacagattatgagtaatagaattccaaattagtacctgtttcattataatgaataaaaccattatccagaaaagactcttcttacactagatggaattagtgagtatttactgtggaccaactactagacctagggacacaaagacaaatagaatactgtctctgccttcaaagaagtcatactctagtgggtaagaggaaatgcagtcagataatatggtcaggagataacagcaacaatagatgtatgagtagaaggcaatggaaacagagaagaaacattttaatagctaatatttcctcagtgttttacagttatcaaaatgttttcgtagtcattatcttatttacttcttacaaaaactctgagaagtaggcaagacaagaattgtttttcctatattacagctgagagagacaagacaggagatttcttaaggtcatatagcagatttgcttaaag

SEQ ID NO: 55154 - DNA, 1050 bp, Homo sapiens
tcctgtggttgggtccatttgacgtaggaaaatttgacatcattggaattttaacctttctgttaatggtaacacagtgcattgattggtcttaaataagctgactaatgtttataatttacattgttgacactgttacctaaattcacctttccacattttagatgaagttttggtatctaaaatgactgcattttttttttttaacaaaaatcagacttaattctgttttgctgatctgtaacatcttgaattaagggctaatcacagaattctgtctagttagaaatgaataatggagcatgagactctgttcctctaaagtaaaagattgtatatctctgacttgttcttagtacctgtctttcaatgtttagtgcctcttaggtctaaatttgatggcaaggataataaatagttacaaaaacagctcctattcttctatgataaatggcagtttcatttccatattcataatggtatgtctagatataaaaatgaagattctcagtgttatttatatgagacctcttggggctttatagaaatttgtaagatttcaataaatatttctatgtatatatataagttaaatacttattttctgatggacattttgaaaaaccaaaattgtatcttgtgcttgtactaaatttaagagttaatttctaatctgttattttcaggttgaaatgcccaaaatgactggaattgaagcctcaaagttttagtatttgagttttccttaaaacaacaatcacataagtgattcttttgagaatgtatacatattagaaaagttgttcatattcccattcattttaatagcttgattttgaagtctgattgtggatgattaaatggcagtaaagttacctaaagttattgtggaaagatatcctaactacattaagtattataatggtagtaaatttaccaaaatgataaatttgccatttatttaaagaaacatagctttgtaataacaatttgttcttaactaggttaattttttaaatttataaacaataaaatgtatacttcttgata

SEQ ID NO: 55155 - DNA, 1033 bp, Homo sapiens
atttttgttttgtttttgttgatgggaaggaagacttagatataataataatgctcaaaaattgccctagattcattttagaaatgatgtatgcatataaggattaatgttagataggtttgaaactagtttaaatgtagaagttagattctcagaaataatttgagattgacaaaaggacagtgaataaacaaactttaaaaattataaagtgtggtccccagtttaataatcaggaggagcaataatagaaatccaactttgatttcagttttatgtaatcttccctcagcttcatatacttttctttttgaaacataccattttagagagttttttaaaaatttatattttcacttcaaaacattgcaacaacccagagttatttttgtttctataaaaattaattgaaactttataagtttataagcctatctgcagatagttctaagtagttcattcctcatacgccaagcattgtgctatgatcagagaacacatggttagcaaatagacatacatggtcttgatttccatgagattatactctagctaggaagacatgatctatttgaactgtggtatgagcagtgatgaaaagtagaggatactatggaacatctcacaggagattctactctggtttgatggtagtggttttgctgggggatggggatggtccaggaacgtttctttgaggaggtaagctttgagctgagatcagagtgagtaaacaaaggagaaggaatattccaggcaaatagaattacatatagacaggaccctgagctgaacagttggtgtttttcaaactgtagggtcatgacctattatgtgtatgaaaccaagttggtgagttgcacccagcatttttaaaaatgaaatgggatggaatttttaaaaactcacatacatcccatggagccttacccagaagcatgccacacacaaacataatacacttaacatgtattattatgtaaaattatttcctggtgagagtcatcgtaaacaaatactgttggaagaatga

SEQ ID NO: 55156 - DNA, 1027 bp, Homo sapiens
gggaggagagcagagggcggggccggccgcgcaggaccgccccctggctcgcgccgccgcgccgcccgcgctctggagcccactttgtactttggcccggcgggagcgcgctcggcagcctccgtgggcggaacagttcccgggacgcgctctgcgcacgcgcggactccttcagggtctccggaaacgcggcgcggaggagctgttgctactcagccctgcgaggcgtcagtgctgcccctgcctcacccctaccctcccactcttcgcgcgcacaccccggctttcacaataactggatgagcgggcctggcctgcagcgacgacctagtgggccctgcctctccactcccgcggtgatgtaccgttaccaccctcttaaaggagcccaggaaggaggcggacggccccgtcacagagcgtgtagggaaaacacagcacagtgattatcaggacgaaaccaaacaatcggaactccgcagaggtgtagggagatgtgaggagaatgacacagatcaaagagctttttccaagccagtattttccaaaccgcgggttataatctctagcgcattgtgaaattggtttggtagatcgggatcatcaccctccgtttttaataaaattgagaatagaacaaaatagaaaagtttcacagtacatcacgtagtaaaggagttgtttagagaaatttcgatttcagtgttttgcacgtatgtatcgccagcggcgatgtaaaatgtatgcagatctggtcagaaaaaagtttgagaaacactgttctttgcaaagggacattcagaagtaacaatcgtgcgttgtattaatgctggcctcactcccagaatcagaagggctttgcagattacaacattcttctcctgtctgaccctatgttgcaggaattgttatcgccagcattgagcctagcatatatacagtaacagtgaatcgctgttttcagctgaggaaactggagaaaagcaagtgtgtcagaaaataagctcataaaacctcgcataatgca

SEQ ID NO: 55157 - DNA, 1057 bp, Homo sapiens
ttggcaggattgccgtctaaagtggtgagcccttggagtcggtgaaccctttggtcggtgaacatttggtcggtggcatttcatccggaaaggctggatcggttctgtcggacttagagggaaatgttttccttcctgggctctgtaggtgaaagatgagagtgtggtttaggtgaggatcaagctcctttttaatgacacgccactgcttccaccgcgggagaatttcagtgcttagatttaactttgggaggttatcagttcagaaaaagtaaaaaagagagagctgaattacggttgcgacatacaggtatgtatgtcacatacatgcaatttttatttgctggacaagtgaaagagaaaaggctacttcccaagcgttcttgccagtcattgaatatttcgtattaaatcttgacatactactttcatgaattttatttcattcattcctctgagcaggtactgttgcctcccgtgtttgatttgcctacaatatctaattagtagtaaaatttgggctaaaacacaaatagacttctagtttatagtaccctttccattaagttctttctagccgccttctgtttttatcttactagagtctgaagtgatgatctttcttttccttcctaaatccatttaacagagttgaaaatgatttgcagcatagtctgggcaataacagcgcttactcatttttcttctattcagtttgcttttaaaaggattaatttgggaaaataaaaagcaagtttttctgttggtttgtatgaactcccagttgcaaatagaagttacctgttacctgggaacatgccagtagaaagaagatgttaggtcctttaacttgaattctgtttttgcaaagaagtgtttcagggcatagaacaggtgttttaatatggaggaggggactcgaggacagccctacaagttctggattacttttatgattatatgtatatgtgatatagtatcacatacatgccacatacatatagtacacatagagcttgaagaatttttacaagtagaacacactcgtgtaatcagc

SEQ ID NO: 55158 - DNA, 1719 bp, Homo sapiens
ttttatgatactgtaggccaggggtccccaacccccgggctgtggactggtacaggttggtggcctgttaggacccagctgcacagcctgtgcaagcgagcattaccacttgagctccgcctcctgtcagatcagcaggggcattagattctcataggagcgtgaacctgttgtaaactgcacatgtgagggatctaggttgcacacttcttatgagaatctaatgcctgatgatgtgaggcaaaacagtttcatcctgaaaccatcccccaactcaaccccaatttgtggaaaaatcgtgttccgcaaaactggtccctggtgccaaaaaggttggagactactgctctaggtatcccctactctagcacttaccattctgtattgtactagtttgttttcttggcttttgcctacatcagatcctgagtttcttgagggcatgaactgagtcatctttaattccctagttcggctctgtcatgggttagacagtgtttatagagaggataaatgacataggatagttgaagaacttttaagcgtaattgacaggcatttggagatgcctagtacaaacatgaatagaaacattctttttgcagaagtaatagttgtgtacctgagcatatataacctgacctgggtagtgggaaatcagtgggccaattttagaaggcagggaatggtaccagtctgtatagccatagtattttattatctttaaaaaacagaacagaacaaagcagtttctttcgcttcttatcaatgcttgtcaaatagagttcggatttctcatcttggatttcagagcctccctcaatctggtcttactttacctggctaatcttatatgccattgcctgccaatgggtactctctgttccaaataggacagtttctacactgttctttgaacaggccacactcatttttggctttggagctttattcatgctgttactcatacctagaatatctttctatgatatccctgttctccaactcttgtcatccttgaagggttaggtcagggtcaccctatccatgaagtgttatttaactactccagatgatctaaatgatgatcacctcttttaaaatttctgaagcatgcatttaaatacctttattgttttatctattcattgcttgactggttataatctagctaggtctaccaaagtccacctgcttatggggtgagtttcctgcttttaaaagcccccctctgtaaatggtgggaacacagtttcctctcctaaatatttctcaggaatttcagggagcttgtgtttcttttagtgacatcttacttcgcttcctttggagcactttctgctctattttagaaggtacttacatcttgtctcttgagcctgtctctttggcgtctgccttgatttctctaaagaatcaatcacaaagcagatatttatagtagggctttattgaaaatttgggaggagtggtagggattatatcccagcatagtgaacagcttaaaatgcttttatttagaagttttttggacattcccactgctggaaatttcttgacttttttttttgtcctgagtctcagccctgttgcctgctgctgggcctttctttacccattgggtgtccttatatctccagcttcttactccctgcactacgttactgctaacccctctacaactttcctgcaaacttcaaaattcagctttccttcctt

SEQ ID NO: 55159 - DNA, 1016 bp, Homo sapiens
ttttagaacagcatcttaataaacaaaaacaacactcacgtttcagattttatatttttgtttcccaaaggatttatatcactgtatttccaagtcattgtcatgttaatgtctttcaaatcaacatctctgctcatgaacttcaaatctaagcattttaaaaaattgtcttctgaacatttccgtatacttagcttacgggatgtgaaatcaacatgtttatagtgaatccaattactgtttctctgaatgcttgttttactgttattctttattgtagtcagtgaaatcactgtcctccagtcacccagggtgcaatctgcctttgagacttggagaaaaatactttgccatttgagatatcagtttggagttgatagctgctaatacttcctctgtcttaagtttgtggtcttctctccctctcatttccatatgcagttagttcccaactcttatttattcccttacttgtcatttctagtaattttcatgcttctttcttccactctcatacccactgtctttgttcaggcattcatcatctctgatcttgggataatccttgggtgcctaatacattctaatcactgaggtcaaggtttcttagacagggtcaccatgtaatttattatcctaactggtacagttttgagactgaaagagtgcaattaattattatatcaggacaacagatgtaaacaaggaccattctgggcaaacttaattcagatggccactccattccaggaagataagtgctgaattttaaagacgagtagtaatcaaataagttgattgatgaagagtcctttaaagcaaaagagatagtatatgagcaaatagtggggtgagagagagcgcagtattaggttgaagcatgtgcagttgccattttataagtgagaaatggtcaaataattcagtttcacatagtttaacctgatagatgaaggtaacttgagcacagagtgtgcctcgtggcaggagatgaacctgaaaagaaggcaggagcc

SEQ ID NO: 55160 - DNA, 1005 bp, Homo sapiens
cacaatgttttcaaggttcatcatgttgttgtatcagtattgcattcctttttattgctgaatagtgttctttgtatgcatataccacattatgtttatcagttcatcagttggtggacatttaggttgcttctactttttggctattatgaataataacaatgctgctatgaaaatttgtgcacaagtttttatgtagagatatgtttttatttctcttgggtgtgtatctaggagtggaattgctgggtcatatgttaacgcagttgctttgttttagataaacattaatttattgcggtaaatgtcagcttattgggtttaacctactatctataccattagtctaatttttagtgcaattctcacatctggtatgttaagtagaagaattatctacaaatttaatttgcctttcctttctttcacagaactgctgatagtattgactatgtaaggaccaaggagattgctctgtgacatctcttaatctttgtttctggttattcagctgtgactacatccaactatagcaaaatctggttcttatttctccattgagaccacaataattttataagaaacatctaattcctttattaatttattaattcacttagtaagtcagtctttcagtaagtaataagtttccaccctcatggagcttacattctgcatatcagctagtatgctagttatggtatccttaacaaataagaaaattagaacaatttaacatgacgtactttcagtaaactgatgctggcttctagtgattagtgtctctcaagtcttccccaaccctccatgtcagtgtctgttctctgaatatcctggtgattgacatcaagattgttgttctttagtctctgtaatatttccttcctagtctttgaaaaatgtgataagatgtgcttatgtccacttctctggcatatctccagctccgtgatctctcatgtctaagttctatctgagtaatcaaatgttagttatctgaactta

SEQ ID NO: 55161 - DNA, 1070 bp, Homo sapiens
gagaagcttgcgagaattttatgtgtgtaaactcagtacagtaccatagttcatatgattttaatcccttttttcccccattaaatccttcatcttttttacctttaatcctcattctcttttttgttttactgtttatcatatttctaatgccataactgtcttttgctaccccaaaccttcccatcccacagcttaggacatgaaatgatacaaatatgtttgcctaaatttgtctgctactttttatgtgtaactcttcccttcataactaaattgaaagccctatgagggcatggacactattataaatttttctaacaaattaaaccaaatttattctacctaggcaaaattttaggcttcaattttggttagttgtataactgtatatgtgcagttactgtcatttttctttgttaaagttatatgtcaaaatataagaaaatcaacaatacactatgatctaggtaatctaagttacattcccagcttctgtccttgactaggtatatgaaggcaagtcctttgacctgcctaggattcacttttgaattctgaatgagaaagattaaatgaatctatgaggcttttttcatttatataatattcttgcgttccctttaaactatatttaaaattacttatagaaaaaatgtcagccaactatattgaaacttacataaagctttagatttggaaaccaaaaattgttaccaaggtaatatttctttgaactttctaaaatgcatgtatttaatttactatacctggtttattttagacaggttacttggtacttattgctgttatgctggtgtctcgaacatattgtgatgtttggatgattcaaaatgggacactaattgaaaggtactttttcaatcaccttcctcctatatgtatgaaatgctaatttgtctcatatttatgcattatctttataagcaacaaatagattctaagttaggtaaaagataacccaagtcaaattatgtgtttgttcatttacttaaaaaatacttagtgtttcccatgtgccaggcaatgtgctatactgtgatggggtc

SEQ ID NO: 55162 - DNA, 1061 bp, Homo sapiens
tatcaacttcatctttctatttccacccccgccctatacgttttgtagtttccagtgttcttgccttttttttttttttttttttgagatggagtcttgctctgttgcccaggctggagtgcagcggcgcgatctcagctcactgcaacctctgcctcctgggttcacgccattctcctgcctcagcctcctgaatagctgggactacaggtggccaccaccacacctggctaattttttgtatttttagtagagacagggtttcacagtgttagcctggatggtcttgacctcctgaccttgtggtcctcccgcctcggcctcccaaagtgctgggtcttcttgctttaatcaggattggttgcattttaggcccactgagtagcaatcacgtttgaatttgcttttatcattattttgggaatttctttcatctttgtatcctgaattaaataacctgtttctggattttttgtttttctcttcctcagtttactttctcgttttggcagatgcactctttttctgagtaaggatgaagggagataaatttttgagaccttgcagatctgaaaatgtctttcttctagtctcatacttgattgataatttagctatgtttgtgcattccaagttggaattcacttttcttcagaattttgagaacatcactctgttctgggtctcaaccttggctgcagaatgattggaatcatctggagaattttaagaattatgaatgtctgggccccaccactagagattctgattcaattaatcaaacctttttgaagcatctagtggattctgttgtgcagctccagggtgggtattgaggcctcttgccattccgattgctcagctatagctggagatttgttcctccctcaatctccccctcaatctttttttaaaaaattgttgatgttgtattactggatgtttgaaaatttcactgaacattggtatgaattttttttttttgttcattgtgctgggcactaggtgaactctttttccatctagaaacttattcttcatttgagaaattttcttgtgtt

SEQ ID NO: 55163 - DNA, 1023 bp, Homo sapiens
tgcatcttattaaaatctttaagggttttacttattaaattctttaaagacttatgatactaagttcctattttcagtttagttttgtaatttataatataattttcaatgtaaaccttcatactagataaaaaagggattatgtttggtttaatttcatttataatgtgtatatatattcatatacatatgtatgtgggtgaggggttttttggcattttttttttaaccttcagtccaggttttcttcagtgtttagcatcatcaatgaccattagatagcagtagcacccttctcctagttctaacaaccagaaatgattccagtcattgcaaaatgggtatgggcagggggcaacttggggagttggggggatttagaggggggaatgcaaatcatcctggttactttaggccataaactattacagtaacttgaactactaatttactttaagttaaattggaatttatggtctgaattttttacagataaattgtttagtctaaaatataagtgattttcttaggttggttctcattttaattttcttggcgctgtaagaatgtaatattctgaatttgtgggtaaaaatgagaagcttggttgtaaaatccagttatgttgaaattgccagaaattcttgtttaataaagctggaagctggggctacatagcttttagactttttaaaataaacaattggaataagcaacatagatatcaaagattaagattcagcaaagaccacttgagaaaatttgtaatgtaacgatggaaaatgttagtaaagatggctctagaaataatctggaaaatagcattagttggtgtaaaacctgtagtgttttttttttttaacaaatgcaaatatagtgtatatagaattccgttgtctagggttgtagtgctgatagtaggaaacagaaaatataaatgtctgaactcctaaaagcaagtctttacattggctagaaaggggatatatttgactttttgcccgtttaccaaaaaaaatgggc

SEQ ID NO: 55164 - DNA, 1050 bp, Homo sapiens
aagtcatcattttctggacttgtgtcctcctctctaaaaatcagttagggcaatcaataggatctcttctggctccaaacttttttgtttctatgtatttgagctaggtggtgtaatatgatttttttgttgttgttttatctttaaagtcacttgttttaaaatcacttttcttcttgctattttagagctttcacatattataaaatggggaatctggacaacagaatagctaatccagaccagctgcttacacaagatgtagaaaaattttgtaacagtgtagtcgatctgtattcaaatcttagtaaggtaagtttctctcctttttaaaagattatttgtttaattttttgaattttgaatctaagcaaatttatatagaattgattttgtggacataacagcagcatgtaaatatttaatgcttttataagaaaattagagttgttgtaatagttttaattattttaattttttctattatttttgtgaggtactttggcaaagaactgataatttagtgtcttataaggattttctaagaattttgcaggttgattccattaaaacaacagaaatttgaattctcatcttttgacctgtgtgcatccggccattgttagagattgactgtcaatttatgtttctaactccacacttataacactagactaggacttcctttctgcccatttctctgcttcagtatctttaattctaatagatcattagtaagtagtagtcaaaaaatttcacaagatgcaagtatatttcagttttctaattactgtttttcccattctcctcagaatattgccaaagctcctgactgtgataggccttagtcagttttccttcttctcactgatttctccagttcttatcttagtcatgttatctcaccacccttacagcttttgctgtagtcttcttattaaaccctcttctttgccattacctcttgcattgactatgatatgtagtaggcacctataaaatagtctgcccagcatcccctcccctcttcatctgagatgcttcagttcc

SEQ ID NO: 55165 - DNA, 1028 bp, Homo sapiens
acattactgagttactagtggttaattatcacagtagaggtatcttagttgatggaaagtgataaatgtttttcctacttgatggtcagtagacattgtgtaagctgttcccattttaagtttcttgagaggaaaactgttatctttcatgtattctttgatctacttactatcacagtacattgtacatagtgggacctctacatgttgataattatatattaaatgtttaatgacattttatagttaacatgttgtattagctatcattctagtgctttagttttaattctgtgtattctaatatttattttacagccatttttagacatagttttgtatatctttaagttaacgagtgcaattggagctcaggtgagtctgcttttatttcaacttttaaattgatataatataatatttgaaatacatattgtgaatagcttgatggcctgtaagaatttttgtagatctcaaagaatgtattttcacatgatttacctaacaaagtctggttataaaataatacttcattcgagattttagaagtactaatttttctttttaattttccttaaattaggtacttggaaaaattttgtggcattaaaaaccagacaaatgtattggccaggcgtggtggctcatgcctgtaatcccagcactttgggaggctgagatgggaggatcgcttgaatccaggagttcgagacaagcctggacaaaaagcgagacccgcttctttaaaaaataataataaaacagaagttcttaaaccatgaatatacttgtacttattgtttcaaagtaatgtctaaaaagagatatggagacatccattttaatatgaaattctaatgttaaaataacgatacatttagagtgggtgtaacagttccaagaatattttataatgtaaatggttggctatcccatgagccttattatccaagtctctgatatttgtgatggcaagaatcacttttaagttttctttgagttatcttattgaaatgtaactttagtca

SEQ ID NO: 55166 - DNA, 1042 bp, Homo sapiens
tagtcaaacaattatgatgcagcatgataaagtttagtaatagaagtttcaagaaagtatttagtgccaagaagaactggaggtgatatctgagctactttggggaggtaagtaaacatccattagattatgtcaggcttgccaaacataagaacaacctcactgaatggaaactgttcaggaaacatttatatattttagtatggcagagtatagggtatataggggaatgagggaagtgcctatgatgaacttggaaaggtatgcttcaagcatacctttctttttctcttgggatggtcaatgggtgatgaggtcacgtacaaagttattaatacatagtacagcagctggaagcaagatgtacacgcagggaaagacagagctcgttcagggggagctgaacttgaggcatctgcacagtattaaggtaaagatgtgtagtacttatttcttgggttcataagagtgataggactagaggtatagatttgagatgagaagagaactaaggaaggagtttgagggaatattaacattaaaaaagaaggcaagaaaaagaggtctaagaattattgtggaatcttaagagattatcaagaagagttccaacaggagagtgttagataacatagaaaaactgtgaactgcaattaggagtttttaggtgagcaaaatgtaggagagctgagggataagctacagtggtaagaggaaaagcccatgagtagtaaaagtgtagaggctactgtgtactttttcagaaaaaaaacaaagggaaaaaattacccagtagggcaatttctttcagtcattgaggttaattataaaaattgtacatgtttgtatctaagtgaatttattattatatcccagaactttgtgtatctttctctcccaataataatagggcccagcgagcatgatggcctacttggttgtttctgggctattcctaactcgacttcgaagacccattggtaagatgacaataactgagcaaaagtatgaaggagaatatagatatgttaattctcggctc

SEQ ID NO: 55167 - DNA, 1443 bp, Homo sapiens
tgttctgtcagcctaggtgacatcatagctcactgcatccttaaactgctggactcaagcaatcctcccacctcagcctcccaagtagctggggctacaggtgtgcaccaccacacctgcttaattttttatttttattttttgtagagatgagggtcttgttttatttcccaggttagtctcaaactcccagtttcaagcgatcctcctgccttagcctcccaaaatgctgagattatgggtgtgagccacagtacccagcaataataattttttaagtgaaaaaaaagtaatggtaaaaattggaagtaaacaaagtaaaaggtcccttcacaatacctcttcactgctctacctaatgctacatttacagacaaatagaaggcttataattagccaggagctattaatatttgagtctaaggaaatgttgattaagtatatgttaatttgatttaattacttcacagactgatttttttttttttttcaggttcgatctggggctaatgttctaatttgtggtccaaatggctgcggaaagagttcacttttccgtgttcttggtgaagtaagtacaagttggcctcaaaattttgcagtcttattttgccatactgtctaccactttgtaaattttacaattgttcttctcccttctctctctttaatagttatggcctctttttggaggacgtctaactaaacctgaaagaggaaaattattttatgttcctcaggtaagacctagcttgagttatctttgatctaaagatctttttgtttatttattttttcatgttgcttctaattgacttttgctctactactgtcagagaccttacatgacccttggaacacttcgagatcaagtgatatatccagatggacgagaagatcagaaaaggaagggaatttctgacctagtaagggaatgtttatatcctagatccactgaaaatactccagattatttattttaatcaattaagtattttaaatgccaggtagtttatcttaagctgtaaagccttccaaagctgtaaattgtgattttctaagctgaggtaagatgttaatcccttggcttaaaaagagtttaatcttaacctttacaccattgtttgttttctcattgccatcatccttttactgtgtacaatagtgttattctctttaagctactagacatattttgtcaagtttggtgtagatactaggagctgaaaggttcagggctaccttgtgccacattcttttctgaaatgtatcttttaagtggtacagacaatagaattatagtgattccagtttaaaaaataaaccactattaagaatgttggcttatattaagtttaatttcatctttaatcattttgctgaaaggtactgaaggaatacttagacaatgtccagttgggtcatatccttgaacgtgaagga

SEQ ID NO: 55168 - DNA, 1081 bp, Homo sapiens
tggctaccgaagtaaactgatgtactgaattccataatacataacattcaatttttaccacttctgtttagcgaacttgtatacttattttctgttcagattaaaaaaaaaaaaaaaaaactcagatatcctatacaacctttgcttgttctttttattctggtatctaaatactgagaagttcatttataattcagccttgacttgaaaacatagatagtttaatcttgacttgaaaaacacaaaaataaattcagaaaatgcttttagcacagtgtctcttttttaaagttttgccaagtgtggtttttaattgaatgaatttctcttttagaaaagttcagtaaaatctgtgtacctgacaaatgctaccaaacagccaggagaccttaaaagatactattcgtcttggaaaagattttaaggcatgggaaagtttcagattttcagatttctgggttaccttaaacctactcgtagaagtattctcctagctgccttataattgcttttgttatgattcttgccatcaaaacaacaacaacaacaatttgggctttttttcttaattattttcttttttatgtaacaaatattacagtgcctcaccatttgaggcacagaggaagatccttctggagaatcacattaacataatagtggttcttcgaagacccacagtaaagaaatccattggttcaaaaacatgattgaccacggaacatctttttctacataattcctattaacaccttccagaaactgcagtgggaaatggtagtttaatccgaagaataaaccaaagaataagaactttcatccatgagcaccacgctgcatgccaagacatatcaccgtgttctcataataagtttttactttttatataatgagaaaataagtatgaaacagcaatggtagtttgttttgcattaatagaataaaatatatctagcatttgtctctttctcccctttctgaatgattaacatttggcttaaaaccggtgatatgatagcatctggcattactttatgtaaagttttaacttttaaatttggtgtttaaaatcataatttgt

SEQ ID NO: 55169 - DNA, 2079 bp, Homo sapiens
catctcaaaaaaaaaaaaaaaagaaacaacgaaaaaagaaatgatggcttagctccatgtgaagatgatatttgaacattttaaaacactttaaataaactgttctctcctgtttattgccactgacaggagaggtttctctttacctctggtcctgcacccctctgagccatcctacccacagccttcagtcattgtcctaaagcctagctctaattccactgcctctccttttgtgcacacacacttctctgcttccctggccgttctctatcttggagaggcatttcaaacgccacttccaccagaaggccttgctactgcaccaactagttactatctcttcttcacccaaatcctggtagcactttggatctcccactttgcacttagggttcaccttccgttataatcattgccatcaatctcagcatcgtttttaggcacttctttccagccattgttcttacctccaactacatatcttttctggactgtgcattattcagtttattaaatgcccattaaatgtgtttagccattgtcaattactctgaaacgttcaggttttgacaaattctttcctaatgtaagtgtggtggaaagagtgaaagaaagtcaaattgcacaaaaataggatggtgtaatttggggttatgccgtcaattttgtccactgataaatgggatttgagctctccaagttgactagatgccctttatttttcagaaatattctacatcattggagctgtggtatttgtggtcatcatccttgtcatcatcctggctatatctctacacaagtgtagaaaggcaggagtggggcagagctggaaggagaactccccactgaatgtttcataaaggaagcactgttggagctactgcaaatgctatattgcactgtgaccgagaacttttaagaggatagaatacatggaaacgcaaatgagtatttcggagcatgaagaccctggagttcaaaaaactcttgatatgacctgttattaccattagcattctggttttgacatcagcattagtcactttgaaatgtaacgaatggtactacaaccaattccaagttttaatttttaacaccatggcaccttttgcacataacatgctttagattatatattccgcactcaaggagtaaccaggtcgtccaagcaaaaacaaatgggaaaatgtcttaaaaaatcctgggtggacttttgaaaagcttttttttttttttttttttttttgagacggagtcttgctctgttgcccaggctggagtgcagtagcacgatctcggctcactgcaccctccgtctctcgggttcaagcaattgtctgcctcagcctcccgagtagctgggattacaggtgcgcactaccacgccaagctaatttttgtattttttagtagagatggggtttcaccatcttggccaggctggtcttgaattcctgacctcaggtgatccacccaccttggcctcccaaagtgctagtattatgggcgtgaaccaccatgcccagccgaaaagcttttgaggggctgacttcaatccatgtaggaaagtaaaatggaaggaaattgggtgcatttctaggacttttctaacatatgtctataatatagtgtttaggttcttttttttttcaggaatacatttggaaattcaaaacaattggcaaactttgtattaatgtgttaagtgcaggagacattggtattctgggcaccttcctaatatgctttacaatctgcactttaactgacttaagtggcattaaacatttgagagctaactatatttttataagactactatacaaactacagagtttatgatttaaggtacttaaagcttctatggttgacattgtatatataattttttaaaaaggttttctatatggggattttctatttatgtaggtaatattgttctatttgtatatattgagataatttatttaatatactttaaataaaggtgactgggaattgttactgttgtacttattctatcttccatttattatttatgtacaatttggtgtttgtattagctctactaca

SEQ ID NO: 55170 - DNA, 1039 bp, Homo sapiens
agagtcaaatagctgtctggttcaaagtccagctgtgtgattttgagctagtcacccaatctcactttgtctcagtagccttatttgtaaaaacaaggcaaattacagagccatcccctgggttgctatgaggactcaaacatgcatcccaagtgctcggtgttgctaggtatgatggctcacacctgtacattcagcactttgggaggccgaagcagaaggatcagcctgggcaacatagcaggaccccatctctacaaaacaatgtttaaaaaaaagcaaagtgctcagcacagtgactgcatcattaggattgattgtagggctcctgatgttagcacagaacaccacagccaggaagcagtctatcttgttgggtgcaaattgtaacattccatttatgtttcttccttcttttctttctttagcactaagtcaggagattggaaaagcaaatgcttttacacaacagacacagagtgtgacctcaccgacgagattgtgaaggatgtgaagcagacgtacttggcacgggtcttctcctaccctgcagggaatgtggagagcaccggttctgctggggagcctctgtatgagaactccccagagttcacaccttacctggagagtaagtggcttgggctgtaataccgttcattcttgttagaaacgtctgaacattctcgtgatcttgtgcctttaggggctacaaaattaaaaatatttattctttttttctcagaaactggtatgtatcacagccctcttcacacattccagatgtggtaggaggttcacagaatgtgaactttggagctgatgacagtgtcatcaagtaactttctcccccagtctgtccccagaccctgttactgtcctcagtaaccggctgaatgtgtgttgggagagggcgggccagggaagcgggtagggataggaaatccaccaaggccggggttttagcttttccctatatatatatcatgtatcctgatttttctgtcccgttatcacactaaaaatcccagttgaggatttt

SEQ ID NO: 55171 - DNA, 1025 bp, Homo sapiens
atgtggtgcctcgttttccctgagattatgtattaattcaacctgtaaatgcaaaccatctaatagtcagcgagaccctatagccctgctgcttaatgggggcacacaagggcatgcagccctcgtaccaggcagactgtgttcatattaacagcatcgtggagaaactcatgctgggggacaggggagggagatgtaaatgctcagcagggagatctggagattcctggagcaggtggagttgggacctggccttgaacgatgggtctggctctggcagtcagtaatgccaaagggaagagcagcataactgtcactttccatgggacagaagtgtgtgaatcaagttgcagtgacgcttcacctatttattattttggtcatttagaagaatttcattgtcagtagaagtcctttaaatcatttccccttcagtgacgtctcacaaaagaaagatctgtctttagctttttagtctcagactttattagacagatactacctgtactcttattctgtaatctttgttgggatggattcacatcttgcaaaggaagggaggcatgtagtataatggggcaaacagacccagctctgccactcgttagatatgtgaccttctgcaagttgcttagtgcctgtgagcttcagtgtcctcatggataagaaagatccaacaccttcttggaaggattatatcaaatgaagtaacatgagtaaagggtccagcagaatacctggcatatagtggagtcaatgaatgattaataatattattaatagtggtcatgagagaatatatgtataacatgttattatgtagactcactatatagactctattctacatagaatatagaacattatataacaaacaactataataagtagactatagtaaacaacctcactttgtctcagttgcctcatcttgatggaaaactgctctttctctcctgttaccctgacagagagcgtctacattctaaaagaaagatatttaacaaaatggttgagtacagatc

SEQ ID NO: 55172 - DNA, 1039 bp, Homo sapiens
gcaacccacctaagctgcacgtcggagtcgcgggcctgggtgaatccgggggccttgggggacccgggcaactagacccgcctgcgtcctccagggcagctccgcgctcggtggcgcggttgaatcactggggtgagtcatcccttgcagggtcccggagtttcctaccgggaggaggcggggcaggggtgtggactcgccgggggccgcccaccgcgacggcaagtgacccgggccgggggcggggagtcgggaggagcggcgggggcgggcgccgggggcgggcagaggcgcgggagagcgcgccgccggccctttatagcgcgcggggcaccggctccccaagactgcgagctccccgcaccccctcgcactccctctggccggcccagggcgccttcagcccaacctccccagccccacgggcgccacggaacccgctcgatctcgccgccaactggtagacatggagacccctgcctggccccgggtcccgcgccccgagaccgccgtcgctcggacgctcctgctcggctgggtcttcgcccaggtggccggcgcttcaggtgagtggcaccagcccctggaagcccggggcgcgccacacgcaggagggaggcgacagtcctggctggcagcgggctcgccctggttccccggggcgcccatgttgtcccccgcgcctacgggactcggctgcgctcacccagcccggcttgaatgaaccgagtccgtcgggcgccggcgggagttgcagggagggagttggcgccccagaccccgctgccccttccgctggagagttttgctcggggtgtccgagtaattggactgttgttgcataagcggacttttagctcccgctttaactctggggaaagggcttcccagtgagttgcgaccttcaatatgataggacttgtgcctgcgtctgcacgtgttggcgtgcagaggtttggatattatctttcattatatgtgcatcttcccttaataaagagcgtccctggtcttttcctggccatctttgttctaggtt

SEQ ID NO: 55173 - DNA, 1037 bp, Homo sapiens
actgcgtaagatgagaagccattagagggtttggagcagaggagtggcataacttcaaagggtccctctagctagcgagctgacagcacacataggagacagaggtagaagcagggagaccacttaggagacccctgcaggatctcagaggagatggtgtgctgagccagcatggtagtaggtgggaagaggtcacattctgggtaataggatttgttgatagatacagtgtggggcacgaaggacaggagggggccaaggatgaccctgagaaattggaaggatagagtgtctttaactacatgctctcccatgaagggaatctggggcagtagatttgaacacgctaggagtgcggggcctgttagaccccaagtggagatgagtgagcttgggtttcaggtagacatctggctgaatagaaatgcattgctggtattcggagccacagcctagagcagatggcagaataaagggtaggtgggggtagcatgagggtggagaagaggcgctcccggggctgagcccaggaacaatgcaaggctaagagttcttctaagtttcctaccctctttcttaaaaaacctaatttcctaggctggtattttacaaatcttattccatttcattcagttctataacccccttaaattcttttcagaacaagacaaatgtatttgaaagcagtgcagtaatagtaatatcagttcatccctttgagaaatatttgttaagtgccagttatgtgtcaagcattaggagctggggataaccagacaaactgcctctcttgtgaaacagagtatatttgaggggaatgacagatacttgacatgtagataaacacatagttaggataacatcagatcctaacaggtgcaatatcagatcataacagaaactggaacagataaagaggtagagagtaactcaggacagggagtggtggcttcactgaggatatgctacttgaactgaaacataggtgatgagaaggagtcaggcaatgttccggcagaagagcattccaggatagg

SEQ ID NO: 55174 - DNA, 1026 bp, Homo sapiens
caagatcaatatacaaaaatcaattgtatttctgtatactatcaatgaccgtgtggaaaccaaaatttaaaacacagtattcatttacattatcacctcctcaaaataaaaaatatgtaagtataaccaacaaaacatgtacaggactgctgaaaacttcaaaatgatgatgaaagaaattaaagaagaagtaaataaatggaaaaacatattgtgtttatggattggcagattcaacatagtgaagatgccaattctccattagtttaacacaattctcctgaaattgacttattactttaacacaattcttatcaaaactccagcaaggtttttttgaagacttagacaagattattataaaagttacgtggaaaggcaatggattagaataattgaaacaatttcctgaaagaattaaatgggaggaatcactctatctgattaagatttacttcatagcaacagacaatagagacgatgtatattagtgaaggaacagatagatcaatgaaattgaatagaaaagccagaattaaatccacaaaagtacagtcaactgatcgtcaatggaggaagaatagccttttaaacagacagtgctggaaaagttggacatccttaggcaaaaagaaagaaaaaaatgaacttcaatctatatctcctatcttatacaaaggtaattcaaaattccttatagatttaaatgtaaaatgtaaaactataaaacttttagaaaacataagagaaaacctttaggagctagggcaaggtgaagagttcttagacatgacactaaaagcacaatcaacaaaagaagaaatccattaagttgtacttcatttaaattttaaaattttgctctgtgaaagactataaaagagatgaaaagacatgctatagactactagaaaatatttgcaaaacacacatatgacaaaggactcatatctaaaatacatgaactctcaacactcaacagtaccaggggctagggagtagggaattggggatgtgactacaaag

SEQ ID NO: 55175 - DNA, 1052 bp, Homo sapiens
aacaatcttgcatgcaatctagcatgcaaaaaagtcataggtcaacaaggctcgctcttctaataggaagaaggaagcaatctttatatgtgtgtctcttatagaggcccatctaaaaacaccttcatgagccaccctatgtgcagtgatttttccttcttcagaatttgcacaaacacctcaaagaattgttactgtgtggtgcactcagttgaattctatccaggcattcactaagccatactgtgtgttgggcactgtaccagcaatgggggttcagagattagcaaagtctgcttcctgtcccaaagaagcttccggcacaatcgggggagacagacaagcagatcattcctatgggtgtgcctagggtgctaggatggcacagaagagaggaatcccggtatagtctgggaacattggggtgggctcccaagttatcagacagatggggagatggacaggcaggcagatgaccactactgagttttgtgccaaacaccatgctgaatattatacacatcctctcactgaggcttctacaactccataaggccagttttattctttccaactcacctgaatctgggaggacaagtaggatcgggcaggtaagaggaaggggaaaggtgatcccaggttcagagaacatcatgaacagaagcagggaagtgtgcacaccgggactgtctggggacctgcaagcacaagtcatttgtattactggggcaaaaacttgactgagatcaaaatggaaaaggaaccagaagtaaccaaaagaatcaaccccagaaggttttgtttgccatgccaaaaatgacaacggtcttcagaccagtctctatggaagcctggcattcatggggctaggccatgagttactgcacatgtttggtgctaatttcattaaaatgtgtttcagataatattgtagcagatgctgtttgtaccctgcccatacttcctgctccttgacattgcattacacactagcccacttcaaactgccagcccttgcattgctttgactgagttttctttgacagacagag

SEQ ID NO: 55176 - DNA, 1041 bp, Homo sapiens
tgtcactataaaattttgcagagtttttttttttaatggttctcttattcttactgcatatttgaaaagtttagggtaaggagtttgtgaggaaaacctaggatttcttatttgcaagaaattattttattaattacatgacttactctgtttctggcataagcctctgttctcacttacggtgttttttcatttaactagttacattgtctaatggttaatatttgtggtgtaaaggatgatagctctaaatgagggtttgtcaacctttgcactgttgacattttgggccagataattctttgttgatggggaggggcctgtcctgttgagcagcatcccttgcaccccacccactagatgccagtagcccttccccctagttgtaacaaccaacagtatctccagacattatcaaatgtcccctggaagggggtgcaaaatcaccccttcttcactgttgagcaccattgctctgaagttatgacttatgcttttttctcttgcatcttctgttattaactttctcaatattttaaatgtatgtctcttaagtgctgcaaaatcagaccactctgaagtccactcaaagcatttttcactcacttgggtctgaagacaggcatgtccttcaatgcatctgattactcagagaagatttccctagcttgccagagaaattccctctttctccctcattcttcctctatacacaaggttggcacagatcaatcctaaaattccattcaccatgacttccaaaagcaagtaggcttcttgcttttaaagcctgtgatgtcctaccttctcagagttccctaggtgaacacataatcaaggccccactgtcagcctccctgcactagagggacccttgatttactgcatatgtacatttgggtgtggtcactttatgttatcataaagacaagtctctcctaagtgaacagacacccatcttttcttgcacaagtgtactttttttcttagcctccctccctttctctgtgtttggtgtctttatggacttgtgccaattta

SEQ ID NO: 55177 - DNA, 1052 bp, Homo sapiens
tgggcctgtcctcttcactagaaagcaagctctctgtggacaaagctgggccctataccgcccagtaagctccaggtccctaatgtaatgtatggcaggcagtgtgtgatctgtgaatactggttgaatcaagtttgaaaaaacatacgtatctgcaggcaagctgtgggtctacacggtttactctggtcatgtgactactatttcagaagatccatgaggtcaaatgactcagcaaaattttgcaggccaaataacaggaaatccgaacttcaaaagcacactccattaccactgatctaaaacacatgtgcctggagatccagtgctggagctggggagattttctacagcacacaccaaccgactgcccgcagcctgatactgggcctccaggagggactgataaaccacaggctcctccggtgtctggtcccccagcaagggcacttgcaaagcctgcagatccctaagcatgcatacagagctttgcctcccttttccaagaattctgtccgcctagactttccagatcatcaagacctgcccctacagacactcaaatttttaaaagtaaaatctattttgataaaacatattccaaaaggaatacaatcccacaattccccacctccttaagacctcttcttgatagatccaggctgacatcagatatattaattgctgtctttcgcacaggattgcccatcctactactggagaggtaaaaatcattgtgccctcaaataaaaattaccacaataataatagccaacatttatgagcactttctatgtacccagcacactaagagttactctgcatatattgtttcatttttgcttcgcaatatccctaaaaggtaggtgttatttttcccatcagtttccagatgagaaaaccaaaaagcagtgaggttaagttacttgcccaaggttgcaaattaaataatggagacaggccctaaccgaggccgttgggcccccaagcccacacaggtaagccctccactctgctgcctccctaggtacaatgagcctgaggtacaatga

SEQ ID NO: 55178 - DNA, 1052 bp, Homo sapiens
ttaaagggatgttttctaattttcaagtacttattgtcccttataaagtgatcttgtaaggtttttttcccccttcttggtctatgtttaatggttttttgtgattgaagcaatggggaacaactcttccttacagcgaagaaaacaaactccaagagtagtaaatcttcatgagacttattccttctccttttccttcttaataggtttatttatctggattaaaactcacattaagctttttttggagggtatttgcaaaaggcctacactaataacaagtgactttccaatggcattattagattatgagcttccttggaacagggagtatctttagttctgctgaagagtgcaggatgaaagttagacaaaaaataataataataataacacatttaacagttatgcagatattgctcaaaaactggcttttactagcagggtggcacatttctctattgacctgatatcagaaaaagcaaagcagtcttttaaagattcagacaaaatgtttctggaatacatctgttgaagaacatgggagaggataattatattagttgtattaggaaataataaattcgacctgcaaatatatagagtatttaaaaattctttcttgataacttttattcccatggagagtaattttcccaaatccactgaaatgagttcacataactcaatgtttgtaaatagcatccctctgatctcctacagagcaagtggaactgtattccaaccccagggccagaaacttgagaccatgtgccagtccatggcaccagagtccggtctgtccccatctctatggccactggtgcaaacatcaagaggagaagtggaggtggatgggcctcctcttctttttttaccctcccatggggatgggatgtaaaagtgggaccagaagaagacagaaataaacaagtgttctcctgttccctttaggagtctgaacatggaaaatagaggcccagaacctgccagaagacagcagtttctggcagacatccaggaaagccctcttgttgtgtcttcaaaggcaa

SEQ ID NO: 55179 - DNA, 1045 bp, Homo sapiens
agaagaaaaaaaggaaacatgaaaatatgtgagataaaataacagagcaatactcactgcatcataaatccggaggtggctaggctggaccaaaggggacatcaggtagaaagttaaagtgtctgtttttcccaattaagtttgtttaaatgatttaaatccttgaactacacactttcctaagctgataggaaggaactagtactgagtacattcgctcactggggcataaatctgagctgctggtgaaggttggaaactctggcatgtgaacctatcagaagccttcgtaaggaaatagccactgatgagttcgttgtgacagagggctgcaaaaccctgagacagcctgagttaggaaagaggcttcacctcccaggagaaagcaaaatgatctcatggaaacccaggacttactgataatcacctgtaaatgaagctctgcctacgcgtcactttgcaaggagaatcaatgtcaacataagcagacccgccttgagggaaaacaaggcaggctgctgtactgaggaacaggctgaactggggtgtgcctctcccatgcctgctgcccagcagtccaccctaaagataaaccagccccaactggctaagaccttattcctccacagcaaatgtgcacccaactaaacctctatggtggtttcagacaccagtatctgtaggaggccggcaagctgctcatttcagcccctttcaattcaagattctgggtgcccccaaagttcagcctatttacctctcccagatcatgggtacccacccctgttcccacctctgttggcagggcctcagcaggaggtctttccatttccaaaaaatggaaagaccctgaagtgaatcataagtcacagtgctctcttgggatccctgttacaggaagtagcgggaaacaagatgccttctcatccccatactggtgtcagctgtcaggaatgtggtttctcagaaacatactgggtgacagcctttgcagatactttaaggtgagaaagctcccaaaagggcagagaaagcccattcccac

SEQ ID NO: 55180 - DNA, 1022 bp, Homo sapiens
tgatttattttcaacccaaaagagtaatgcttaaggtacatgaaggaaaaccaaggcacatatatcaaagctctagagaatcaggtttcagttccactaaactatttccaccagcctcttcaatgattaggattttaaagctcaaaatagtttccacagcagtattacaatgatataaaaattacatgcatagaaaccctaaaaggaaatcacaaaaacataaatagtagatatttattaaatggtataattataggtattctttttactattgccattttttaagttttttatttaatggatgattattactttgtaataaaatgaattttttaaaagactgtttaaatgtatgatagatgatctcattttccttttagaattattcatattgcaaagtctacagtatattacacttagtggattttcactatgtctttcttttatctccccactatgtatttcttgaatgaaggaacagatgaatgagttttgaattctaataagaccaacatatggaaatttttgtcttaaagtgttgcgctcatattttccaaacagcgatcaaacttgagacctttgggcttcctcgaaaaagacctatcaaaagcttgttttagttgtcttaatcagttcttagttatttttgcttgtgaatacgagttttgaatataataaatggattgaattaaagaaaatatgtttaaacacattctgaaatgtattacttctctaatttctactatttaaaaattatgtctcctattgagaacaacattctgcaggcttctcaagaaatctcacttgttatcaacaaatatttggatcccatcagaacatttgtttttcatttgtaattgtatttactctggagtccttctgtgaactgtttggttatgactaataagttaggaacaattagctaaaattcattcaatcataggaatttacatttggaggggtcattaatggtcatttaagtccagcatttctcccaagcaagaatcccttctacagtcttg

SEQ ID NO: 55181 - DNA, 1044 bp, Homo sapiens
atgctaagaatctcactgactcccatggaagctgagtttgtttgtttttttaaatgcttatcttcatgcccatcaaagatgaaagttttattttgtttgcatgtacacttctaatccccagcacagaactcagcacatcaaaaatcttcagtaaatgttaattgcctgaataagtggaggtttgaatccattcattcatttagtgtattattgaatgtctactatgtggtgggtatttatctgaagcactgggggtacagcagtggacaagaaagacatggttcctggcccatgaggtgttttcactctagctggaaagactaatctacccatatttccctttcctacttaaatcttagacatatcatcagtaggcagatggaagcagccactattaggacaggttgaggaataagtagcaatttcttacacattcttagagattacttgagaacctccagggaagactacacttcctgtcaggctgggctggtggatgttcaagtcagtattgtttgaatattaaagaaatgtaaccttattttatccctatagctgatgcagcaggacattcaatacaaagagagagaagatgaagctgtattaacacatacatatatgttctacttattgatacatttatatatatgtatacacacacacatttattcttattcaaacacatacacactcacataaaaatggaaagatattcacctaattttttaaatgattatctccaagtagtgggattatagatttattcttttagtttttctatatttgacacattttcttcagcaaacaaatattacttaaataagcaaaacaattgtattaaacacacacacacacacacacacacacacccacacacagcaagtccggctaactggtcacgctgctgatgcctccatgctttgttcctgcaaatgccttctccctcctctctccctttcaacatcttcctcgccctgtaaataatctcagctcaagcatcatctccactagaaagctctcctgatgcccaccttccccagggac

SEQ ID NO: 55182 - DNA, 1179 bp, Homo sapiens
catgcagcaatctgcagtttctgttcctcgttcacagtttttattttcataaggccatgataggtacttcctccacccaatgtggtatatttaaattgtgaatcattatacaggaagtaaaaggaattcccaaagctctatacatatatcctttgggtttttttttaattaaatgaggtttcatgaatcaaaaataacacgtacaaattatgtaataaaaacaattcataaggcaggctttcaaagaaggacttagagtgattatctattgtaagtatcattgtgccaaacagttattactcacagggctgagggtggcttgcattctctctaaaaatagatctttccatgaaaacacataatatgttcttgttgctgttcgaggtaaaaactacaaaagaggatatttttatcctctaggcagttaactttcattccaaatagaaccaaccaaatcatttacaaaaggaaaaaaaaaggaacccagacatctggaaatttgctgtgtttcttttcctgcagtttacatttctgaaattcctttccttattacataaaaccatactctctaaccagtaatatccaataatgaatgtccccagtttgtaggcagtgacagtaaattcaagcatcaaaaacaaaagaaaaataaacaaaaagagagagacagagatcattcaaagaataaacagtccactctaacacatctttttctgtcatttctctcccaggctccacattgaaaggcagtgcagtgttgcaaaagagcctgatctgtaattagaaagggctgactgcaaatatctgtgtgagaacactggctccatcccttactaccgatgtgaccttgagcaagattcttaactagcggttccatttgctcatctgtaaagtgtggatgatggtatctctctcgtggcgtagtaggactaaattagatacatgaataaagtgcttagcaccctgcctagcacacggcagttagcaagtaggatccttgctcttagacttgagcaggattttgaggaaggaatggctgaaaactgagggaaaaaagaaaagaaagaagtgaatgacataaacaactgaaggaggcagttctgcctggtggcctgcccagatattggaaccctttgtccgtattgatgcatttgatactacatatttgcatcttggtgg

SEQ ID NO: 55183 - DNA, 1041 bp, Homo sapiens
ctgatgcctctcaggcaatgtactatggggtgcccacggctgggataatccatcccttccctttgagaaaggcaacaaccttcccatttccaggcaagactcacaacctcatactcactaggagtgtaactgagatttcccaacattgcatttctattcctgcgggaaacactcagtgcctttgtgatcagttttcagatggcaaataggatatttttctctttcttaaattggcatggttttaggcccagcacagtcagataataaagacttggcttttagccaattttatttgacaagaaacttgagaatttccaaaagcgtaatatgggcattgattcacagtgtctttaaaaactgtataccaaaacacacgtgcacatctagcgtgcaaatgccttgtaagcgtcatgtttttctacccgtcttggtctgctgccctgcttcctgtcatcgtgaacaggatgtgacccaacaggatgtagtgctcccttgttttctgttttccagctctaaataacgatgtctgggttggatgacttgatcattgacctctagtgaccatggacaaccagaggaaaatccacactcccataatctgagactcaaagcctggaaggtggctggactttctattctttctctaggttgctggtagtcttctctttctaagtaggtaaacttgggtgaacagcaggtaaaagccgaacagctgatccatcatctgactggatccgtaactgttcttctgcatctctgcagagctgtgctgctctagtggggagcactttggacaccgcaggagaatatgacagggaccatgggctgactcacagcccacccaccaccccaccactctccagcccccttgccgggcactccacttgaccatctgagatctcgggcacttgcctacctggatgtgtggagagggtctgatcctgaccatcacagctggctccttctaaagggctgtcgtttatttagtgcctatcaagggcctggccctgtgctgggacttcacagacccaacagtatatt

SEQ ID NO: 55184 - DNA, 1037 bp, Homo sapiens
aacacatttacaattaccagaattttaaaaataagatattataggccaggcgtggtggatcatgcctgtaatcccagcactttgggaggccgaggcaggcggatcacgaggtcacgagatcaagaccatcctggccaacatggagaaaccccatctctactaaaaataaaaacattagctgggtatggtggcatgcgcctgtggtcccagctacttgggaggctgaggcaggagaattgcttgaacctgggagatggaggttgcagtgagctgagatcgcaccactgcactccagcctgggtgacaagagcaagactctgtctcaaaaaaaagaatattatagaaaaatgaaatgggtattctcctcagcaaatagttctctcctccttcaattacttacaacatggagtatttattttagaaaagaatatcacaaaatggctattttctgcctccgatgtgatttaaaccttctcaagtctctttgtgtttgtgagcacctgctagttcagcatttttcaagcttcacttgcaaccagttataagactatgaaatacattatttttaaaaaggcaacagagtagtaactaagagtgtgaatcatatgtaataagggtaaatgttgttttgtgagatttctagttttgttttatatatgtaaggacatatgaaggtatgtgcatacaggagttgggatgtaataaatttcttactgtaagtcccaaacaagagttcaataaacaccaccctagaggattggaataatgctttgttttaattaaataatcattatttctcagggatttttcagagaggtctcctacattgtaaacatactcacatttttcaaaagaatgacaattcaaaatcaatacaagttttcctttagtacatctcagcatcataatggtggcaataaacactcattgtatttttccccttagccttctcaaaggtgtaaacatgagccattcgccatggcaatgcaaccaccgttccatcattacaactttattctacaaatatttgtaaggtg

SEQ ID NO: 55185 - DNA, 1036 bp, Homo sapiens
tgaaggattaaaatataaagtggaagcactctttcagaaggtagaataaaaagacaaagagacacaaaataagagagaaaggattaaaagaggataaatttgggagacccactatctgattaatatgagcccagaaatacagaacaaagaaaagaagaaagagaggaaattaacaaagaaaatttgccagggctggaggacacaagtaaaaagaagattccagaagcttcccgagggaaaaaagatcacaggcaaaggatcaaggacccagaataggatctgactttcaccagcaactctgaaccagaaaaacagtgaaggaaggctgtagaagtctagtgaaagattatttccaacctagaattgtatagccagtctatacctagtatagagttgtatacctattcttactaccagtcaagggtaaagaagaacaaagtcatgcacaggcagtcccaagatttccctgccctcatcctttctagcagggatgttccccactgaaactcatgtgtaagccagagaggaaaacatgagtttcagaaaacaggcttgagcagagcagagcaaggaattcccaggagggtagctgcgcagcaggcgtggaaagcgtccagtccaaggtagacaatgggctccaggagagatgtcaccatgaaaagaaaatggaactgagggaataccaggtgtgttcgaacacgttaagaaaagcattacacgttggtgaagcgttcggtgaggcccatggaaatccaagctaataaaaaaatgtgaaacaattaacttcagaaaaaaaaagttgtacaggaagggaatctaattggaatatgctacttagatcagttgtgaatattatttacagcacatattatttatgtatgaataacaaacactaagcattaactaaaagctttgatgtaattacattggaagaatgggaacatgagtgtgaggagattgggggagttaggctatgtaagaaaataaaaccagaatctttcatagtagaaaagtcagtagacaatatctgaagcca

SEQ ID NO: 55186 - DNA, 1037 bp, Homo sapiens
gatcatgccactgcactgaagcctgggcaacagagcaagactccgtctcaaaaaaaaaaaagaaccaatattctgccgggcacgttggctcatgcctgcctgtaatcccagcactttgggaggctgaggcgggtggatcacaggtcaagagatcgagaccatcctggccaacatggtgaaaccccgtctctactaaaaatacaaaaaaaaaaaaaattagctgggcatggtggcacgtgcctgtagtcccagctgctcaggaggctgaggcagaagaatcgcttgaacccaggaggtggaggttgcagtgagctgagatcgcaccactgcattctagcctgggtgagagagcgagactccatctaaaaaaaaaacaaaaaaacaaaaaccaaccttctaaagtctgtaagtcccatagacatccactgagttggcccagtatgccaggcaccatggtaaacatttggcatacacagtctaagtttatcttctctaggactctgcgtattaggtaggtattatccccattgtacaaatgaggaaactgagccccagaggatgaagagcatgtccagggtgacagcactactatgtggtcatcctcgtggctccaaaagctgtggcccactggctttgctgtgctgcctggagttccttgccaaggataagtgtaaagaggaggaaaccagggagtggcgctcactaatagggacgagcccatctatgtcatcttccttctgaggaagcttgaagtcagtaacagcccaggcattccccgtcctccgtgtttcccatgtcacaggtccactgtttaattttgccttccagaaagccaggccttgcttctgatttgctcctttccaccactgattatgcacaggtcaaatgggattaaaggatgtaacagcactccaactgggaaagagcttgggggatgaaggtgacacttcgacacggtcctctaacttggacctgcctcttcgttaggaatcattgttctggtgggctttccctgctgagtgcagagctttgctggc

SEQ ID NO: 55187 - DNA, 1069 bp, Homo sapiens
cttctttttctgcagatcactgcctcgtatttaatttagcaccatctctcataagtagtaaaaacagatttcgctctttggctaaaatgattaaaatttaaaaaggtattatactttctcatgcatgtgttgactccaaagagttttggggcccataagcatttatcttttcttatgtatcaggcccactgaaagaaggcattaaaagcactctgatagagaaattatatatgccttcctgcaggtaccataccactagcattttaccagattcaaccctgagtgcaacagagagatctagaattaacatctgaatgaatagggggaggagggaggaatcactcaagacacaggatacggattaaacatttctgcagcttcagcattagctaatttatacttattctgagtagaagctgcttgtcaggcagctggaagatggagtgcactaacattttcatcgtaagtccttgttctgagcatttgtatttgcctgggatgacagaactcaggattaacgtgccaaggtaatctgcagactctaacaaaatgtggaaatgattggccataataaggactaggaaacacgttttattggttgtggaagttaagagatcctaaaggctaacctttaaacaagcaagcaggaggtagtggcattcggcttttgatttattcccaaaattcagtgtgcatacttctttagcatcacaaaacaggtgggtggatatttctgtcttgaaattgaagctataaacacacaagacagatacgaggaaggattcccaagttggcattggtagtatctcaatattatgtcccaattctcactcccttgcttgggatccaagactccctccaggtacaggtggattagttttcagactttaatggactggtcacctgggactgtcccgagtggctgagaagcactgggggaagaacacaatgaggacgccctgtgtggctgtgagggcttcaaaacaatgaaatacatagcacaagtgcacatgtgagggccacaaagagcagaaccacaagctggagggagaggggaagagagggccca

SEQ ID NO: 55188 - DNA, 1108 bp, Homo sapiens
atgatcctagctactgggaaggctgaggcaggagaaacgcttgaacccgggaagcagaggttgaagtgagccgagatcgcaccactgcactccaacctgggtgacagagcgagactccgcctcaaaaaaaaaagacaaaaggctggaaaccatatccctgatagggcaccatgcttgccttagagattttcagtgagacgtcagatgaatttcctgcaaaaaaaaaaaagaaagttccacaaggaaattttggttttggacttacatagaatgtgcgtgaaatttgctttgaaaatctcaaaccagctgttgctggaaagctgctccagtttgggggcctgagtcttgtgcagggatgtggaaactcatttactcatattatttaactaggcatcttcaatcatcttgggttttcaaagccctgatgaccaatctattcattcatcctcaaagcacatctgtaggatgggtgggtgaagaatggcataattgttcttttatagactggaaaccaagatcaagggcatttcccccaggtcccctggtgaatccatgagacagagaccgttttattttaattttttaaattctaaccttctggacattacactatcaattttcattaggaaaaattgctatttaaaagcatggtggttacggtaagcacaggctctgtagccagactgtctctgtgctcaaatcccaattctaccactgactagctgttggtcttgggcaaatgatctaacctctctaagacctcaatttcctcatctataaaatgacttacagcacctaccgcaaagggatgttgggaggattaaagaacctactccctgtaaagcacagagaaaatgtgtaataaagagtggttattatcatccagacatcaccaaagatgatctcatttacaactgggaacacagaggcaactctttaagcacctgaggaggtgtggcaggggcctgtagttgctttacctgtaggctttaatccctcacacccacagggatccaggaaagggctttttagaccacctgccagcccccagcatcgtcttacagcagctccaccattgccgctcagcctctgtctctgcctcctctct

SEQ ID NO: 55189 - DNA, 1050 bp, Homo sapiens
attgtgcattaaaaaataacttatcgccagggtggtggctctcgcctgtaatcccagctactcaggaggccaaggtacaagaatcgcttgagcccaggaggcagaggttgcagtgagccaagatggcaccactgcactccagcctgggcaacagtgtaagactgtctcaaaacaagcaaataaaacccttatgctttacccatcatttccacatgtttgtagtgggacattcatattaaccataagtacctatttatcttttctatttgctgcaactatatgaaaatatatatggatataatcagactggaaaggactttgaaaatggtatttgttatgggtagagagagtaggtttattgtaactctagtttgcaaacactctgtattaatatattgccttaaaaacaattgttataagaattatcttttaaacaattctcttctgtttcagaatgcatatactacaactgctattaatgggacagatttctgtacatcagcaaaagatgcattcaaaatcttgtccaagaactcaagtcactttacatctattaactgctttggagacttcataatttttctaggaaaggtgagatatcttgactaaataaaggagcctgggattctgaaaattaagccatacaacaattggtttgaaagggaactatatttcttgagtacttactctatagtgggtgctgtgcttcattatctcatttaatcctcaatcccatgaggtatccctactttgcagaagagaaaatgaaggtttaataacctttccagggtactacaataggtagagccagaattttaatcttagtcttactctcttacctgtgatcagttctaccattctgattccctctttttcaggtctaaaatgaaaatgctactaatctcagaaaatgaacgtttgtgggtttctcattaagaatatatggaaagagtattgaaacctggactgggcacagtggctcacatgtgtaatcccagtattttgggataccgaggcaggcagatcacttgaggtcaggagtttgagatc

SEQ ID NO: 55190 - DNA, 1107 bp, Homo sapiens
gtactccagcctgggcaacagaacgagactctgtctcaaaagaaagagggatggtttctaaaaaaagttttaaagtgaataggcttattttggtgttaagtgaaaaagcagaataaaaagcttgtgagatattattacatttatataaatacaaaagctaggcacagataaaattacatataaccttcctactcgccattaactgggtttccttttgatacagcttttcattttttcctctatttcattctgccaaaatttctgacaagcattctttacaatagtgcacacacacgttgcacacaggaacgtatattaaaccattacttgtaactgacaaaaacatctaagcaactgattcataaagattttcaacaaactcttcttttgcacaggtgttagtggtgtgtttcactgtttttggaggactcatggcttttaactacaatcgggcattccaggtgtgggcagtccctctgttattggtagctttttttgcctacttagtagcccatagttttttatctgtgtttgaaactgtgctggatgcacttttcctgtgttttgctgttgatctggaaacaaatgatggatcgtcagaaaagccctactttatggatcaagaatttctggtaagcaaacatttcatttccaattgcaatctccatgctcgcaatcttgaaagttttgtaaagctgcacacacgaaagaggctcatacccagcctctctcttctagagggctctgaggcttctactacccccgggcctgaaagtgggatttgcgctgaactctccaaggctgaacccacctccctttctgagaaccttctccctgaagaagtgaagctgaacaagaatgctgatcagatggattcctaagtagcagcagcacttcttaccctgggcagaagatgtcctgaacacagtagttcagctccctttggtgctcatggcatgatctggccttttgggtggtctagaagtttaacagttgatctttttctaaagcatttttgcatctccaagcatgatgttcatacccactatattagggagagcacacttgtgtgctcctctgtgccagtattgacagatctgcaattct

SEQ ID NO: 55191 - DNA, 3641 bp, Homo sapiens
atactgttctcagtggggaagaaaaattaattattgtttccctgaactttgctgagttcaaattcctcattccacctttctccagctctgtccaaggacatgggagttacaggaataaaatgtggttcctttctggagaaaatgttggtgattttgaaactttaaaaagcccttgttaagctcccagagaaaacacttggcatttgctttcacattttatgtaaaacattcctggagtagaacagcatattgcttggcctaggattacttctgttgaaataaccgaagctggtacctcttaatttggttatctggggaaagagtagcagaggaaattattctgccactgtaatgacttttggtgtgtcagtccacctgttaaagtgtgtttaattcttctatgtatgagtttttatctatagtgactttaaaattttctttttaaagttagcacttgaaatttgtttgtagacacatagaagagttgactggagcctcagctcagtaacttgtcggttgtgccccttctgtctttttggtagcatggaaagttttgtttgtgttgtgtatattgttgacatctgataatttgtgcaattttatttttaacttaaaagatgggaaccaacaaatgtgccagccaggcaggtatgacagcttacgggactaggaggcatctttatgatcccaaaatgcaaactgacaaaccttttgaccagaccacaattagtctgcagatgggcactaataaaggagccagccaggtaagcaatacctttttatacgtgtacaagagtacacttaccttatttttattaaccagaagtttaaagtaggtattttttgtatagtttatttagagtatattccttcaggaatgtggactttgctgggaaagcaaaataatcaaaagaccttttcgatagcagcaaaagcatgatgtgtctcgtggtttttgttggcagttagaacagctggcctttctacctagccagcagaaaaaaagatatgtttattacagtgttcttgctccaaaatccaagtaaaatattgctcatttaaatgctgacttttttttttaaggagcccttaattaataggtaaaattacctggtgttccactaagaaggatttaactagcattcctattagatgtgtcaatataaggagatggaaatgcaacatggtgaaaataccagtataccacatccaagatagaaatatttccttgttaaaaatagatcaccagcacctcagaaggaagttcaacaaccatttgagaacagacaggtctcacatccaacaacagctgggatagggtttgaaaaacattttcttaccgagtccaagggagatttatcaaactttgcccttatggaacacatcctaccgggtgcggcattatgtctctcatagctgccactcacgtttacttttctacccactctgaacctggaagtgtgtgcttgatgtaagtagagagatgaagtatgagttactgtactctgaaaaagaggggagtggctgtgaagtggctggttcttctgtatctcagccttttgaaaagactcaagtccttaagatctgctcaacatagtttctgttgaatatattataaatttttgaaattggtaacccagataatgtatgtggtccccatgggcattcacatggaactttctggtgtggaagcattatgatttcacattctttatgtctcattctctcttaaatccagagtaggtagtaatgtctccattttgcagtttgagaaacctaaagctaaatttacgtgtttgaggccacatagtaattttatagcagagcaaggattttgaagaaaggtctcacctagctcaaaagccaatgaatattgcttcatggaagtgattcggtatcaggatattttggttaagctagctttacccctgaaccaaatgaaagttcatgtattactgttcatattcaatgtgaattctataatttataaattattcacaagaatagattctagctgctgttttaacttttatactatgttctaataccaggcagggatgttagcaccaggtaccagaagagacatctatgatcagaagctaacattacagccggtggacaactcgacaatttccctacagatgggtaccaacaaagttgcttcccagaaaggaatgagtgtgtatgggcttgggcggcaagtatatgatcccaaatactgtgctgctcctacagaacctgtcattcacaacggaagccaaggaacaggaacaaatggttcggaaatcagtgatagtgattatcaggcagaataccctgatgagtatcatggcgagtaccaggatgactaccccagagattaccaatatagcgaccaaggcattgattattagatccacacagaaggagctcagtatttagtcctttgtttttattcagtgagaaccaagctagccttgagtaatttttatcttgtcttcctaaaacactattaagcttattgtacttttaagaaaaattgccttacgtacattcctttttcctttttctgcctcttccctcaatagttgccttttagtgctgtaatagttaaatcctacagcataatcaataactcgcatatgaagtaaaaaggaatactgtgaaaggggagtactcttgtacagccagttcttttatgcaaaaatctatgcatttttacaatcttatattaaactggtattttcaaacaataggaaactttttttttttttttttttttttacagtttagtgtatctggtttctacatggaagactaaactcatgcttattgctaaatgtggtctttgccaactaaatttaagatgcagcattttagaaatttacatatcaatgtttctacagtattgtttgctaatttttaaataaagtcatgatcagtgtgcatttgtgattatatgtgtactcattctcttacctagcgaacaagatcttttcagagtggtgtttctaaaagagcatgtacaaaagtggcctgtggacatttaggcctgggtgatgcatttgctcttcctgtttgtgccaatgtatcaatgtagagttgctctgttttcttcaactgtatttattgctgcatttctcagcataaacttatcccattgtattttttataaataaatattttttttgaactttcatatgaaccacaggctgattattttctggctagcttctagataggtagggtcagatttttttttaagtacctttttcctaggtactgttacaaggtacattaacattttatttacttcacacaacactgcactctatgcttaaggagattgaggcttaggaaaccattacacatagtaaatgacagaattctaatcattttctgacccttgcttatttcactgacttggctggcccagattcatcttaaattcaacttggaataatcttaaaatctttaggaatattgacaggaggggtggggaattttcctatcttagggtaagtaaacatgaataagaaacatgctaggtcagccataggatgtgctgcttggtaataagccagggtttatagtgaaacataaaccttcagtcctgacagagggaaggacaaacaatagctaggtgtcatagtgacaaaaat

SEQ ID NO: 55192 - DNA, 1064 bp, Homo sapiens
cttccctctgtcaggactgaaggtttatgtttcactataaaccctggcttattaccaagcagcacatcctatggctgacctagcatgtttcttattcatgtttacttaccctaagataggaaaattccccacccctcctgtcaatattcctaaagattttaagattattccaagttgaatttaagatgaatctgggccagccaagtcagtgaaataagcaagggtcagaaaatgattagaattctgtcatttactatgtgtaatggtttcctaagcctcaatctccttaagcatagagtgcagtgttgtgtgaagtaaataaaatgttaatgtaccttgtaacagtacctaggaaaaaggtacttaaaaaaaaatctgaccctacctatctagaagctagccagaaaataatcagcctgtggttcatatgaaagttcaaaaaaaatatttatttataaaaaatacaatgggataagtttatgctgagaaatgcagcaataaatacagttgaagaaaacagagcaactctacattgatacattggcacaaacaggaagagcaaatgcatcacccaggcctaaatgtccacaggccacttttgtacatgctcttttagaaacaccactctgaaaagatcttgttcgctaggtaagagaatgagtacacatataatcacaaatgcacactgatcatgactttatttaaaaattagcaaacaatactgtagaaacattgatatgtaaatttctaaaatgctgcatcttaaatttagttggcaaagaccacatttagcaataagcatgagtttagtcttccatgtagaaaccagatacactaaactgtaaaaaaaaaaaaaaaaaaaaaaagtttcctattgtttgaaaataccagtttaatataagattgtaaaaatgcatagatttttgcataaaagaactggctgtacaagagtactcccctttcacagtattcctttttacttcatatgcgagttattgattatgctgtaggatttaactattacagcactaaaaggcaactattgagggaagaggcagaaaaag

SEQ ID NO: 55193 - DNA, 1643 bp, Homo sapiens
gagagaatgagtatttagtaaccacaaatgtattctgaaattaaaataacacataatgaattatttattagtatgagtaattatacaccttttgacaaataaaattccaggcctggatagctctgatacagaatccttttaaaatatataaggaagatcttgcccataaaaactgaaaacacgtaactgcttaaaaatattaagactgtgatgtgacccacagtgagagacacactctcttcttgctctttcctgttccagagagagccatgcttagtatgtatttggttgaatccttgtcaaacagctttctgggcagcgtcttataactgtttatgaagacttggaattcttagaaattatgaatgtcaatatttagctccagaaattataaaactcttcttctttatagttggagaatattggcaactttattaaagctattcaggcttatggtatgaagccacatgacatattcgaagcaaatgatctttttgagaatggaaacatgacccaggttcagactactctggtggctctagcaggtctggtacgtacatgtctttaatggctggttaacagattcccaccacattggtgatgaattgcatcattgctttttcatgggggttcagaccaggtggggcggggcctgtctcttctgtaattagtagctttgtggaaaggctgctgacatcagctgcatcgtactagatagcttacttagaacactcacatttcaaatgatgcagtatattattgaacagccttaaatactttttatctctagtttgggcccctttgtctatggacatatcatttctttgttgttccttctgtgaaactctgttggccttttcagttagtgtgcatgtttctgtctaggctaaaacaaaaggattccatacaaccattgacattggagttaagtatgcagaaaaacaaacaagacgttttgatgaaggaaaattaaaagctggccaaagtgtaattggtctgcaggtaagtaatgtggtgttgcttattcaattacttattcaatatgattaattctcaccatgcaaaatattaagcctctcctaagaatagacagaagtactatagtactggggggggggtgtagtttatacaatttatatctatttataaagcccataagacagtgataattttttagaggaaacctcaggtatgccacctgacttgacaattatttctccaggaaacgaaaatttttaattgaatcatattgtcttttttttttttttaaaaaagaaaaatacacttttaaattttttattttatctttttttttttgagacagagtctcactcttttgcccaggctggagtgcagtgacgcgatctcggctcactgtaacctccacctcctgggttcaagcaattctcctgcctcagcctgccaagtagctgggattatgggaatgagccaccatgcccggctaagttttgtagttttagtagagataggatttcaccatgttggccaggctggtcttgaactcctgacctcaggtgatctgcccacctcggcctcccaaagtgcttggattacaggcgtgaactactgcacctggcctgttttatcttttatatatagatgggatctcactttgttgccca

SEQ ID NO: 55194 - DNA, 2491 bp, Homo sapiens
gtcaaagctgtagagccatttctccaacttgggtaaagggtgcaaaggatcaagaactgccatctccctaatgccacagtaatttagtgaaatcatttgccctctctcagtcaaagcagaagcttcatgccttggcgtggcggggaggggaaaagaggccctgaaaacagcccaggagtggtctgattatgtgccaggggatctctcaggctcaggtgcatggtgagccttcaagagggggacctggaatgtagacatttccacctacttgacctgggaaacgggatgtttttcctaccttgagaagttaaaaggctgttgtggcttttgatggacacaaaaaggaactgtgatcaagtgtacgctttgaatctgttttttaagactcagcgttggttttcactgttgggtgacttacaggtaagctggccaggttcgtaaatgtctgtcctgatcctggtgatcaggctctctcccttggaaaggacctgaatgcagcccacagtcctatatgctctggcactatgaacctagggcatttcccacagttctgcttggttcctccgtgagtggtgtagactggaacttgtgggacttctttgtgactaaaatgtcaagatgccatttcatttcttccaatgattaaacctccctatgtcttatggacacagcagacatttctaccttcattcccatttccaatgatgtaattgattcccaagctcatgatctctatctcctgagcatttcctatgtatacttggcattttcaccagtgctgaatgagaagacaaatgatactggatctttccttcttcccagctgtgggtttttttttggcagtggggcgggagacagggtctcactctgctgcccaggctggagtgcagtggtgtgatcatggctcactgtagcctcgatctcgtgggctcaagtgatcttcctacctcagccttccaagtcactgggatgacaggcatgcatcgtcaagcccagctgaattttttatttttagtagagacaaggtctctcaatgttgtgcaggctagtctcgaactcctgactcaagagatccacccagctcagtcccaaagtgccgagattacaggtgtgagccactatgcctgcctcagctgtgttctccataaccctgattgaccagccactttaaggggactccaggacaagggatagcttaagaacttgggcatgtgatttttttcacaatattttgtttaaattttattttttcaattattttaaattgaggtctggtcttattaaaaagggatctttcaaaacttatgtttaatagttttaccatgtataatagcatagcatttgtgttggtaagttggcctttatttttgaattctgcaagtaaaaagttaaactttcttttagttttatcacatgtttgggtgtcaggttcaattctagatactaagaatctgaatgaactagatgcttttcctgcctgtaagaagtctaataggatagagactacataaacagaatttaaatattgtacagtaattagtactgaggaaagtgtgtgtgtgtgtgtttagtatatagtgtgtatttggctgaatagaaggcaaataccagaactttccagtcaacaaaactattggaatgttatgtattggccaggtgagatactctgtaaaataactgcatgtgtcagaatcctttccccagctttttttggaatagggtgattaatgacttaaaccttaaagtttgagtgccatattgtaacataccattaaatccttgtcacttcctgtggatcatgaaatctgatgtctcttgattgatgttctctccttgtcagtcccagcctctccatggtctgttcaaaattttgtatgacacggtcttcaccaaaaatttgttattagttactgaagttgtaacggttaagtttgccattgagatctattgagtgtcatttactacacttcacagctgtggtcttaatggctagtgaaagcagagcgcgttgtgagtcggcagtttctgatgcttttgtgaaattcttctaaagtgagttaacctgtatttcagattgcttccaagtatgatcatcaggcagaagaagatcttcgcaattggatagaagaggtgacaggcatgagcattggccccaacttccagctgggcttaaaggatggcatcatcctctgcgagtgagttacagccctccagaatctgtttctgctcttccagttctttccacagccttctctctcactctccttctcagcccagggtgtcagaccttgatattctacagatatctttaatgctttcccttactgatgctaaagggagcaacttgatatttcaatccttgtttttgtgtgccagtaaataagatgtctctcatatttttcttttcagacttataaacaagctacagccaggctcagtgaagaaggtcaacgagtcctcactgaactggcctcaggtaacagccaaacca

SEQ ID NO: 55195 - DNA, 2200 bp, Homo sapiens
acagggtctccctctgttactcaggctggagtgtagtagcacagtctctgctcactgcagccttgacctcccaggctcaagtgatcctcccacctcagcctcccaagttgctggaaccacaggtgtgtgccatcatgcccagctaatttttgtgggttttgtagagacagggtctcactatgttgcccaggctagtctcaaaggactcaagtgatcctccagtgttggcctcccaaattgctggtgtgagccactgcacccgtcctagtaatttttgaagctttaatttcttgtcagtctcacaatatttgtatattgagtcataatgtttttgtatttacctgattatagacatttggaggggaaaaatttgtgctggttggtgccatatgctgataccttgatctgaagacacagttgtacctctgagaggaggacctggctttaaaatgctcctggactttacttctgtttacctgaggcgagcatgattttccacagcttttaaatgtctagttcctccgcatcaaatctttagcacgttcgtgccatggaatgagtcttagattctgtggtgacctcaagaaaagcatgcattctatcttgacatcactgtcccaaatgtaaaatgtttttctctagaattcccactcccaccccccataagatacatgcctgattttgtaaaatagttcctttgtcctttttgtcagcaacaatctgaaaaagaataagaattcgggatgcaaacacattctaagcagagagaagagctttagcaaagacagagaggcaggaaccagcctcaggaagagtggtaaagggagtggacagtggtgaaggctggcatcccaggtgagcctgtctgcagtggggttttctttgctattgcaaacaatggattgaacaagttgcagtggggtttggttaatagaatgctctgtacctggagctgataaaattggagggcgtgcatgctgttgtgtgtcaggtattgcggtgggttccattcctattgaacaggcttcatcctcacagtggccctggaaggaaggagtctacccacaagaaatggggtgacctgggttcagttacttgccaaggtcacactggaacttgggaacacagggttttgaagtttgacttgaaagcgtgtgatcttcagtaaatgtttataggattcattgcggagagacagggtagatgaaaatgttgaaacctgttcattgtccttgcatgagataccaagaatagcaagtgatagtgagaaggaaggagaggaggaatcttgatacttgagatggaaatctatttggttcctattttgggaccatgttagcccccattgttctctctttattttaaacaccctattttatatatatttttgtgaactctttaatacaccgtatttaatatttgtctctttctgctagaatgtaagcttttaggacagagactttgcctttgaactgtgcctgatatgaactagccatttagatgaaggacagaaagaaggattaatggagaaagaagatgaaagaagaatctaaggaacacacggaacacttgaaaaacagaagctaatgttgaatacgagtttacttagagagtttggagtaatgcaggattatcctggtggctcaaaacggggagccacagctgaaattagggagactgttgtaatcactggggacaataaccaggaattgtctgcttccaggtttgaacaagctctgtgatgataatacattgtgagaaggaatccatgtgaaaaacaagcagtcttcattcttcagtagattctggaatgtcctgggtgtaatgggggcatcagacagttcttgtacatgaatgtcatcactctacctcatggcagatgtgcccccatctttttttcaaatggtacttgagctgaatgctctcggcgtacaccgagaagtaccattcaacagcgcaggaatcgagcttttgggtcagctgtggaggtgctttttgaagctaggtctccctttactctttctccctttctgagggttcttagggggaagcttctcaaatttcagagccagggaggggcatggctgtttcccagcagctggtaggcttgtatctgctctagtgtctgccttcactgttaggacacataggccctcggggttgtgtttctgaaggtggtcttagtccagagctcttggat

SEQ ID NO: 55196 - DNA, 1996 bp, Homo sapiens
tacaaatgcgggaatgagtttgttagactcttaaatattctagtggtgagacaaagaaaacaaaaacttgaggaacatctctattttcacctctttttacctgtggggcttcagctaagatctcctttcagcaaaatctctacagatctctaaaattcaagacccggctggccttcttcccagtgagagaatgttctccaacaagctttcttggaggtcatctcttcctgcctgtgcttcattggcactcaaaacatgatatttttccatgcctgtttgcttctagtccatctctcaggaatttctccatatatttccctggcctgtcctctgtgtgtcactcagaataaatcaactctctcttctatatgacttccatctaaatatttagatgggagctaacctgcctctcctaaacttccaggtcatatgtagccactcctggctagccagtttctcataataggctatatatggtttttctaatcccttccccacctagtttactccttctagaaactgatgtcagcttatcagtgtcccttcagaatgcatcactcagaattgatcatagtattgccacagatgtggtttaacctaccagagtacactgggattggtaactgacttcctttgattacaaagctttagctcctcctgttttaaccaacagaatcacttggccaggtagacaaggtaactctgtgtagaagaaggattctaatccttgctttgtcaaattgacttctccagtctataaagtatggtgatgatcactctgggaggttttatggctcacatgaactccatgcgcacccgtttcttataaataatgctttccttggttacctcatggggctgttttgatttaaacaaataagcaatactattttatgaagaattgtataactatgcagaccaagatagtgttggctttttaacttactcaactcactgagtaagtgttactagttctaaaactttggggcaggatttgacatatattttgaataaactgtgtattaacgtaagaaagatccttctgattcccagtttccttaataagtatgccaagtagtttccaagtcattaatgaccaaaacagaagagaacacatctaaatccaaacattgaggtacacatcaccacgagtttcctctgccatgacataatcagcacagtgggcatggtgttccttctgactgtaccctccttctagggttactaaactggacttcaggagtgcgctagacataaggaacttttatgagaaagtaatgcaattatatccctagtgggccatctaagattaccagattggcagatcaaggagatgtgacgcccataaaaggcagtgacattcaaatgcagatgcctttccgaaacaagatagatctttaaatctgaggcatttccctaggctggtaatcctgtcagtgggtgaaaaatcatggattgagtgcccactatgtatcaggcatgggcatgaggattactaagatgaacaggagcctgacctcccctcaaggaggggacatgggcaggtgttcttggacatgccttgtgtgtccatgcagccttggtgatggctgcccttctccctgagtgcttgcttgcacactctctccccaagagtccactctaggagggcgcctgccgggctcttcagccagtaatagatccttgccctctgggtggggatggagtgggagcaggcttctctctaggttctagttactaccgtttgccaaggcttctctcacagtgagctgcttgatacccacttttttgttacttgttatttctgagtctagattcttctgggaatccagtgtctatacttgttcgctccttgtttagatttgaactttcaaaaatccactataaactatatgtgttctaagctttgcagtctaaaggtcattttctagacagagaagacaaaattgacattctgttagctctgcatctttctaccgtttgttatactctttgc

SEQ ID NO: 55197 - DNA, 1546 bp, Homo sapiens
tttaacaagaagctggaggaggagagattagagggccctcctggaaaatactaggtgctacagagaggcccagaggatgactggagacaggccactggatttggctactgagaagtcactgatgacctgttttgtttgagacaggatcgtcctctgttccccactccctgcaatccccctcccctgtttccccccaggctggagtgcagtggcatgatcttggctcactgcagccttgacctcctgggctcaagcaatcctcctgcctcagcctcccgagtagctgggactacaggtgtgcaccaccatgcctggctaattttttgtatttttcgtagagacagggttttaccgtgttgcccaggctgcactggtgaccttttgagagatcgtcggtagagcaaatttccaggggttaggagagagtactaagggaggaaatgggcaggcttggcatgaaataaatgacaaacaggacagtgtatgaggctggcagcaggttcaattaaaaatttgccatttcagggaagacagggtagcctgtgcccattgatggaccaagtaaaggcaacagcccaaaacagatggtgtgtgggggcaaagcagaagggcaggagggtcagtgggaagagaaggggcccagctcagaaggggaagggaagaggaccatgaaaacgcagcactgatgtggagaagtcctcttttcatctgaaataggggtgtcactttgctcctgaccttattatgctagagccactgatgtccgatggggaagagagcaggaataggaagagatggcccaggctaagccctccctgtgagcgcactgctgattgggctgcccctttggagcttgggcactggttcactctcctctttccattggcccttgatctggaagggatgggaagttgggtttattttgttagagcctggttgtctgtagcaagcctttactgtattatctccaagagacctttgtgttggggcatagcactctgatggaagatgtaatgctttcagggtaacttattttctccctcatccatgctctcagattgcattacaattatgtaaaatatggagttcacctttactgtcgatgtggagggtcccctgtgacttcatcataagatccttgcagacttcgggactggaaaggggaaaccatgttcaggctgactttcttttagaggaactctgaatcttgtagttgattatgtccctctttgtcttggtgtttaagaagcttggacttcagtttgcatccagcctatctttgggtggcatttgtgtaggatttggtggcatgcaggtgtttgagccttgcctctgacttcatctttttttcacacatcctcattaaaagcaaaatgaacctaatggctttttacttagggtctcagaaagtacaaaatacctttgtatggtatttcataaggcacagtatgaatatttttaaaaggaggaaatgggaccagcctaggcaacacagggagaccccatctctacaaaacatttttaaaaaggtagctgtagtggcaca

SEQ ID NO: 55198 - DNA, 2993 bp, Homo sapiens
ggataggggacatgacaccaagcagtactactgtgtttcatttctgtgtcaggaatgtgatctgccccagagtccttatccaggactccaccaccaggcagcgtgtgaggcatttccacagtgaaagcaccaggtctgtagatctgcaccattctgtccacattgcccttagggctgaggacttctctgtagagctagaggtcttgcttaccgggcttggttgtattctgctttttctaacaggttgattccttttaaataagatatatctttcctttcttggtttcagatagggcttgtattcctccacagctagctggttaacatattttccttcaagtgtttgaatttggcttgcttgaatctggaggctttgagtttatgtgttcttatgaagtctctacctagacctgtgtgaagcaagtccttgagtggagaagactaatgcttagttttcccccacaaggtagggagggaccaggaagcttcagggtgtgggcgtgactgttgagtgctgtgtctgcggtgggaaggccagggaattggaggcatgaatgcagagaaaagaggaggccttttgtgcttggaaggactcttctgggtcagttgtaacctaagcatttatggttatttcccctctgctggataattttccagggaactctagctgtggagtggccacactgggcgggctatggcttcattgcttcttcccgcctccactcccaaatgtttggacactgatctttctccattatctgcagcttctcacccttaatgttacccaggctctgtgaatggatagagtgtgcttcattagtgcacaatttcctggtctccttttgtttcttgtgggaggaaataggagagaaaacaatcaataccatgtgtagcaagtctctgtcctgctgttggttaattcaaacatgtgattccactttgaatgcaaaaatagcaacagcaatcatattctgcttctaattgagtgtagaaattatatgtacattaggcatcatcttgtgagcttgctgtggtctttgggccttagcagctgagctggaaccctagggctgctctttagagtccacctatggctagatgccttcccctgaatggttccattctctactctgaatactggggtggattttccttatctttcttcaaagaattggatgttgtattttttaaaaaccccatccctacctctccttgcttacatacagacgcattatttgccagccagattttcatttcaaggtttattcatctctgagcttcccccccttctttttcttctttagtgacaccctttcctgcagttggtcttacatcaccttcaaaaaacatgcatgtggcaggaggttggtcttcatatgggccagtgggagagttaaagtgtttttagtctgaaacagctctgccaaatatcttatgaactttttttttttttttttgagacagtcttgctctgtcacctgggctggagtacagtggcacgatcttggctcactgcaactctacctcctgggttcaagcaattctcacacctcagcctcctgagaagctgggattacagtcgcgcaccaccatgcccagctaatttttgtattttttgtagagatggggttttaccatgttggccaggatggttttgaactcctgaccttaagtgatccacccgtctcagcttcccaaagtgttgggattacaggtgtgagccaccgcacccagccttatgaacttttgaactgtgctggcaatgcgctttggaactaaggattcctatgggcttgtttaaatcaattcctcccaccccttgccgactttttttttttttattttattttttttgggagacagtctcactttgtcgcccaggctggaataccgtggtgtgatctcggctcgttgtaacctctgcctctcgggttcgagtgattctcctgcctcagcctcctgaatagctgggactacaggcctatgccaccatgtctggctaattttttgtatttttagtacagtcggggtttcactatgttggccaggctggtcttgaacttctgacctcaggtgatctgtctgcctcagcctcccaaaatgctgggattacaggcatgagccactgtgcccggcccaattagtcctttctacaactgggcaatatattcatgtgcattagtctgatacgatgatattggtggtgggtacatttggatatattgtcacatctccatgagttaaaaggactttatgttaagccagagtctaagcatcttcaggcagatagcatagttgcctgtgctaagactgtgtatagtacagagagttcctgtctctcagctttgttgtagagtagggataggggagcatccaatgatggaaaagacttagacttggagtcagatctgggtccgaatccctgctgagcccacaacctttggacaagtcatctctgcatgaagacagtacatctacctcagggtgccatcttccttgcttatgagaaccacttctctttatgccaacagttccaaaatagaaaagtaaataagtgaaagtatcctgtataccttactcctaccctaagtgcttgtactgctttgaatattgttcaaccattttgaaaactgaattatagtctgttgtatggatttccactgattattcactgcttccctgctggtggatatttcctttaaaagtacttgtgtagaaaagtgtgtaacttttgacataacatttaaatgtattttgatattgccaaattgctctccaaaaaaattagttcctaccaatggtaagaaagaggaggaggatcttttgatgttaaaaaaagaaaaaagtaacttgttttagtttctttattaccaagtcatgagtcattgacatctgtaatccctactccatccctcgtccccagcagactcaggtgggaattgacagtgggctgggatgagggcgttttttccacaaattatttgataatagtt

SEQ ID NO: 55199 - DNA, 1053 bp, Homo sapiens
aagtcataatgaatctgatctgcggcataaaaaaagtaagcacaattggatcgttttggtttttcacccatcattagcattgtattcaggagagtgaggaaatgcattttcttctctctcttttttatttttttgagatggagtctccctctgttgcccaggctggagtgaggtcgtacgatctcggctcactgcaacctccacctcccaggttcaagcaattctcctggcttagcctcccgagtagctggaattacaggcacctgccaccacatctgactaatttttgtattcttagtagagttggagtttcaccatgttggccaggctggtctcaaacgcctgacctcaagtgataacacctgccttggcctcccaaagagctgggattacaggtgtgagcaactgtgcccagccctgcattttctttctcagtgaaactaggtggtggttggagaaagcttgtccttagaatttgttggcaagttccatttaaatctaggcattaccctcctgtagcatataccatgtgcattggctctccttaactctgaacttattttatagcccaaatgggctcttaacttatttatgtgtacttgtaccctcagatttttgttaaggattcttggaactcataggtagatccaggttgtttgtggggacgaagtttatacaatttgggggtcctcattatgaaaaatatataaatatcttttaagttttacaaaaacctatggccatgtgaacccttttgaacttgaagacttctccatacctgtcatacaaggttcttgtcagggaaagtagagcttagtggttaagaacatggactgtgggaactgggttggattcctggttctgcatcttactgtgaactttggcaagtgacttaacctgcctgtcttgtatgtaaaatgaggatatcataacactcatctttatagggttgttgggagaaatcagatagataatccatgtaaagtgtttagaataatgcctggaatcaaaagcccacattatataaattttagccatggtttcattttgctg

SEQ ID NO: 55200 - DNA, 4974 bp, Homo sapiens
ggcttccgctcccctccgccggcccggtccggcccgccgcggaggatgcctggaggttgacgtgaatggcctgtggctgggaagcccccaggcgccctgcctagcccgggggcggggccgcctagccgccggccccggtggcgtgagggctggggcgggggccggggacctcgcggggagggagcgggagggaaagcggcccccgcggcccttcaattggccgcaccgcccctcggcgcagaggcgggaggaggcggccctccattggtcgggcccggcggccaatcctcgaaggcccaggcggaggcgggggcggcctgtggggaaccgaggtgcgggcggcgagcgaggcagccgggtgcttcgcagcggagctcgaggctctgtagcacccagttggacccagtcgcccaggcaccgcccgcgccccgcggccgtctcctgcgcctcccagaggagggagttcgagcatcccccgcggcggccactcctcggggccaggagcggggaagcgaagtgcgagagaccccggaccccagcgctgtctcttcccgccgcccgaaccaccatgacccacttcaacaagggcccttcctatgggctctcggccgaagtcaagaacaaggtacgcctggctcgggcgggcgcgggggcccccggggcacccttgggctggcctggcgctgggccgtgcttcgtttgctcttcgcgctgtggctcaccgttttcctggagaggggccgtcgaggcggcgcgagcgtctctgcctgtcccggtcgcgtccagtccccgggcttgcggggccggctcccgggcacccgcctggctttgttcccgcgccgtgggacaggactagtggctggcggtgggttcccgggcgcctggagtcccgcggcgccagcctttccggctgcgggggtctcgggggccgtttggtgactgcagaacgcgccctccgggaagggggcgctcctgcgtggccactcgcccttaggcggagcccgtctgcgcggccagggacccggcgagccgctgccgcagcccccgccatctgcccgggccccgggtgctggcggactccgcgcctccccacggggagagagaccgcctaatgtcccgccgaccccaggggccccgaggaacggaagccggtccgggacccatcacagtctccgatctcggtgcctgggaggcatttggaggcagattgctgctgctgcttctgctgttgcttttgcgggaaatggagacaaagcctgagcgcgccactgtgcgagtgatatctgcttaggcttgagactttttatgaaacactgagaagtttgaagtacattagactttcacgacataaaggattatttttgtgggttgcttttgtttggggcttgtttgctgaggcggcttatagtttggagcgattgggatttggtgacgctcagctttgccactgagcccaagaatgcgttaggtttatctttaggacttttggcctgggaaagagatgagaggcgtccccctccccaaatcctctccttccttcctccctccctgcattccaagcccatgacatcaggggtttctggggggagagaccagccaatcggcgcggaactgtgcacagaacgctcattgtctcctttctgctgttctggccaaagcgccacaaaggagggctgcctgtggtttaattcccattaacctcccgggagcccaagcatgtcaggattgccaccgcaccgtccgaccgctggtggaaggcactggcattgtcagagctggaacatcccggggctgcgggggtaggcggtgtgaagcgaattatgtaaagaggtaatgaagcgcaccgttgtcaaaccccaagggagagttgtggctcttgtctcccgctgttagtctgcacatcatactgtctttgaagcaaggagttgattttagtctatgtatctaaagttgaaatgtttaggtcctttaccttttcaaacgtgttgcccgtattagacaacagtttgctaacaatttttttagagagcagaaaggtgaatggtttgtgtatgattgagtgcaaacctcaccaactgaaaagtttgtaacaagttactgtttccttccttccaggatttacaaaccgaactttaggaaacttcagaggaatgggcatgtccaaaatgttggatgtgatgtgatactttggcctggttgtgcacattcattgtaattccccccagtgattcttggctggcagcagttgagtctctactaccttttgcattgtaaatgaggtactgataacgttggcagcccttcaagtgacttacttttcttggatgttaataatatccatgctaatttcttttttgctgactaatgtagcagcttttgcccttttcctgcttaatactgagcagatccaaggaaatgcatacacaggctagatcactgtaattattgtaaatatttaaaaacggtaaaacctcagtttttagaacctttggaaagttagttatgaaagctgtggatttatccctttaagcaccaaacccattttttaataacccgtttcatttttgtagtcctttcagacagtattctttcataggaagtcttttgatcttaacagcagagcagtcctgtaaggtgaggaggattgctgggattatccaacatcatttacagatcagtacactgaagctcagaaagatttgctcaaggtcacagaagttggactattctaagaattttaactctaaaagcgatgtcttagttgagtgaagtacttagggatgttctacacaaactctgctgtctgtcgccttccccccatttttttttctttcttttttgagacggagtcttgctctgtcgcccaggctggagtgcagtggcgcgatctcagctcactgcaaccttcgcctcccaggttcaagtgattctcctgcctcagcgccccgagtagctgggattacaggtgcctgccaccatgcccggctaatgtttgtattatttagtagagacagggttttgccatgttggccaggctggtctccaactcctgacctcaggtgattccccctgccttggccttccaaaatgctgggattacaggcgtgagccatggcgcccagcccttcctcccatttttgctacccacctgtcacttcttgacattgtgattatttatgtcatactgtttctgatctgttctgggcctgggaatcaaatagccatgtttgctaggcctttgtatgagatgctgcattttgactgaggcctcaggactcccgggtgaaaggtgggtatatacaaaagtgacattgcgtggtttgacaccttttgattccttcctgctttttctttattgcataattgatacattgcttgaatgctagattccccccatctacccccacatctcatttaacaaagaagtatagaaacatcctggggagacagtgtggagtggacctgggagtctagcatatgtgagttctagtccccgttctgccacttcctgccttctgtgatgctgggctagctacttgacatctctctcctagcttctgttctgtagaatgggggaaaacaatagttgccacccccagacaccatgttgtggagatgtgtctggcttatactcaactcagtgactgtattgtagctattagctcttagtaacagaaaattagtttttagtattatatttctaagatttgtatgtccctgcctctttaagtatttggtttgtattaataccttttggtcttgttatataatattctagctgtaaaagcatttcatcaatgaattgaggaagtctctgattttaaatactttaatcagtaaaatttcagagaaaaatctttaagacatttgattggtaagatgataatacatggcagaacacacaagcttactttttttaataggcaagaagatgtgtgaaaacagccttaaaaaaaaaaagcctaagaattccagtctttcagcctggaatatgaacaaagtttctttaataacaaagaaaaaaatgacaccaaatgatcaataacttagagtttacaaaaactatcagagagtaaaagggccagggaaaatgcagacactggtagggatggttcggtggaggatggaaacactcataaaataatgggccctacaggtattctacaggttgaaccaggcccttgaatgcatcttgggaaccaaaatgaaaagtgaaacaactctgtgcctcgtaaaccatgaaaaaacataacaggtactcaagggaagcacagtatttcctggcaaaatgttggagttgggggtagtttcccgtaaagttggatgggaagagaggacgcagtgaagcatgtcttcatcaggtttagagcaaatgccgcaggaacctttcttacaggtctcagggaaagtggaaaaaataaattgacaaatggggagctgaaataatcttacctcggtatgtttttttgggaggaagctaactggaatattaagaagcatggaattggaatgcacattcttccagtcttctgcccccttggaatgtctgatttgagcaaagcagcttcccacgggatcttcttgattacaaaatggtatttctcaacacctaaaaaccttcttgaaaggcttattaccaaaatctttggttgttgaagttaaacaatcatacagtaataattagataggaccagtgtccgcgaagtcctcctagcttgtttgccgggtgcgctttagacgcacagctgctctgagggtacttctgatcagagtaacccagggtgacccagctataaattacactcgagggtggtttgccttgtcttgctggtagagcaccagaatcttggtaaaaatgtgttggtgggcttagcttttttctttttaaacttggaagttcagaaattggtttttaattaaaatctttttttgtttgcttattatctgtctcttcccaccagagataaagctctc

SEQ ID NO: 55201 - DNA, 1145 bp, Homo sapiens
aattaaagatattttctcccaaatcaagaataagttggtacattaaagaaaacagtgaatctcagttgattttgttttctgtatttttatgtgacattcaaggtccacagagcagtcagagaagagcaacacatgcctgtccgatgagtgctgactgagcaccaggaactgtgctagaagttagaagttaagtgatttgccctgagtcacacagttggtaagcaagagagccaagacaacacagctctgcctggctccaaagtgcatgggcttaaacatgcgctgtttgctgcatcctggttcttgacagagaaggacttattagaatcataagcagatcccctctgaaatcaggctgttcttaatgcaaaatgcctcccttagattattattctgtattttcatttgaccttcaactttttctttcaggtgttgtgtaacggaccaggaacatgtgttcctatctgtgtatctgcccttctccttgggatactaggaataaagaaagtgatcattgtctacgttgaaagcatctgccgtgtagaaacgttatccatgtccggaaagattctgtttcatctctcagattacttcattgttcagtggccggctctgaaagaaaagtatcccaaatcggtgtaccttgggcgaattgtttgacaaatggcaactgacttctttagaattttgcagttaacagtagtatgtactcaaattggggggaaaaaaaccctacatgtttcttgtaaaggcgtctgacagtcctgagaattattgatggtaaggaataaaaaatgtacagatgactcagtgaagaaactgaggcttctcttatgaaacaaacattgataaacgtaactactaaatgtttatgcctctgtaaaccaaatttcttttctagataaaaatatgtattactacctgcaaattttcttctggctgttttagtagtattttttttacagaactaaatatagagtttgtatgattagtaatatttcctgtcctacagctttttttttttttttttttttttgtaaagtattctgcattgtaaaagaagagagaaaaaaagtatttctgagttttggttcagatacaaaaggctttatttcctgtatggaaacagtgatgtccccagtgaa

SEQ ID NO: 55202 - DNA, 1192 bp, Homo sapiens
tttgagttgtcaccaagcaaaatgcaagtaactaatatttgaggatgagccaataaattcagtatccttaaaacattagtgcattagcctaaatgaaaacaatttataacttgcttacctttttggtatggtttaaaagaagatgaaagctattctgggtaaagagaaatcggcaagtggctagatgactgtagtacgttcacgcagtggcacaattgtgcctatgtagaaacatggaatggatgtagttgtatacgtggaaaagtagaccccaaaatgctgtatacacaatgatgacatctctgaaaattctgttaccaatagaattgtaagagaccttgggttcatagatagtcagggattcgagggtttagaatttatttggtgatttaatgttgttcttgatattttgatgtttctgtttaactgttactcctcagatgattaaataaacataaaaaagaagaaatacaatgtaccatcatgtgagccaagcaaatacgtcatccccatctgctgcacatccttttccttcctgctgtccacctccactgatcgctgacattcagcaactgcctttcccaggcttcagcccggccttcctgtcccctgactgtaacctctgcatgttatataccacctgactctaactgcattttcttctttactcccttgattactctcagattcttctctttctagttgcctgaggcttttgtcccactgcttttgccctcctgtcttagataagtccttttgcttatcctttccgtaccctggagcactctcccagcctctttttgctgtgcagtcgccatccatgttttgccctgtctgactcctatgcccatggtccagtgcttttagccctgtctgaggaaatcctgtgactgctctgatgtgatctggccccctctgtctctacatttgctgctctcaaatctttgttcctcccatctagttagggttcttgatagcaaactatagaaatctactctggctgattgaaacagaaaaaggatttagtgaaggctattgagaactcttggaattaccagcaatgtcaattaagtaggcttagaaaatatagagggacaaagtgggaactgagcagccagaaccatgaatgaaattctatggccacagagctggtttcaggagatgctgctgctactgttgctggacagtgaac

SEQ ID NO: 55203 - DNA, 1028 bp, Homo sapiens
gggtgcagtgtgtcagagaattctttgtttgccactttagtaaggggaaaaaagactaagctgggccttgaaacagggtgaaaaacacttcgtggaaggcaaagatgaccctgtttttatatggagtttgtgaacacacaatcttgagttctaccggatactcttaaaaagcaattacagagtcctgctgagctcacatgtgcttgccagccaaacagtgggagtggggaaggagcagtagatactatcgttgctttaattcacttttgcctgcaggaggaatcttgtcatctactggctccccaaactattttcaaatgggatattttatttctgagtttctgaaggctactggcacacaggccagctctcacttttcatcattttgacatgaaatggaaaatccgtttgtggctgttttcgtagcatgtgatttactcctgttcttttatctgtctcccctttatattttttgtttggacatatttttctcttcaggcttttgctgtcctggcgtttttatgttcatcctccttcccctgccttctccccatccccaacccgctcagcctccttcccctggtcctcagtcccttgccccacccctcttgtgctcatccaacttaaggcgaggctgcctgtctttctcctccctgatctgttccatgctgctgctggggccgcttgcgctacttctccccaccttccaggttcccccccccaggtacttacagggctttatcaatattggcccatgagatagctgacaacaagcagtcattgctgaactcatccctcatcactgttgtagaaaaatagattatcagcaacattcttaggcatacctctgtctttaaggtactttgtgcctgcaacaaccagtgtttccagtttcctggcaaccatattgaagcatgaatttaagcctggaaatagaacatcatatgagaagcaccaaagtggaagtttagaaaatcatgcctttctgtcagacacagattcaggtctctactctatagtttattagc

SEQ ID NO: 55204 - DNA, 1054 bp, Homo sapiens
ccgaacaacatctgtgtcaaaattaggctgcatattagcagttagattgctttgagttgttttgattcgtctccattttgggggactctcagcagcttgaaaatgatttttctttctaagtcgatgctttttccacttggcaaacattacatttttcctgtctgcagaagccagcgtggctttgcctgtgatttttgctctcttgttttgctttgcctgcatcactcttgagttgtcactgttccagcccatcacaggctcattttggatctgaggctggtggggactcttcctttcaaggtgaaagccaatgtgttttcccaaggatagctgtgaggtcacagttaaaacaaaaatgaaagttgaatgaaaaggaattcagttgtgagaggataagaaaaaggaaaacatgaggtaaacaaaactgtttttgaagaagggactgatgtggtcacaggcagtgagctccagagacctggccttatagatgagggtaatgggagatgctggtgacgaggtgagaacagagggtggggtgaagagaagggaagcctttgaaatgaccttagatgcatgaataattcctagaaccagtcccagcttcacagactttcagtgcttattttaaaggatcatgtgaagcaggagctctatttgtatagcacttgaaaatcaagaaagtgatgtttctgtttagaatctttaaaatcgctctttgacctgaggaaaaaataaaagaagggggcacagacagcaccgataattgaatatgtaatggagagcctcagaagggtgctgctctccaagttaagtgggatcattaaagttttagagtttgtgtaactagagtcagtagggaagcgtcatgggaagttttaaaaatttgaatacagactgtgaactccttgaggaacggtgaggtgtattactcatcttggcagtgctagcacctattctagagcgtggggcatgtaggagttcaataaattttgaaagagtaaatctgggtaggagagagattaggaaaggagaagtcagagaagctattaaaacc

SEQ ID NO: 55205 - DNA, 1072 bp, Homo sapiens
actcttcagcatcctacttttcttgtctctcttgccaccatatatttgattatacatcagtcaagttcatatagggagcgttgggaggccttgtgggcatacagagtactatgggacatggccctgttctacaggaattaggaagctgagatggaaaggttgtttcactgtttcactaaaatatgttttcttctatacgatagagaataagaaagagtcttacttctttggccaatagtgtgaaagagactggattatattgaagacaggtaaattttgcaggatatacacattgaactacaaagaaagaaagaagagagaaagagacagagaagaaagagagaaaacaaaacaaaacaaaacaaaaacatcctttctaggaacatataacccagctgactgccaggtaggagcaatagcaggacagcagaacttgccataagggccttgaggcctaaagttcaacagaaaagtctcaaaatttctgaggtcctgttgtgttcttattttgatttttcccctaaaaggcttagggaatgtgtcggggtaggtggcgggcggtcactggtaacagtggtaggtgggtttggtaacccaagcctacagtgcaaaacagggcacagagggcaaagagagaggaggaggcagggagcttagttcctgtagaggcagggaaagagacaacaaactctatgggtttgagagtgggtgatttgaaaaatcaaggaagaaaaaggaaatggatcaggatgagtagttggctatacataagagtagcaggaggcagggagtaaacttcgtggttcagctccttatatgttggggaaagcagctcctcagcagtgagacacagagatccaagcaagatctagagaaggaggtgagtcagcagcatatttcagaacacatggaagacctgggttcaggtcctggtgctgtcactttagggaagtccagattcctcatctgcaaagtgagaaagttggaatagtatgtcccttaaaaccctgagatgtcatgaggttaagagccagcatcttccccatcaccatccagcatggactagacttct

SEQ ID NO: 55206 - DNA, 1055 bp, Homo sapiens
tttggggtttttgtttgtttgtttgtttgttgtttttgagatggagtctcactctgtcaccagactagagtgcagtgtcacgatcttggctcactgcaacttcctcctcctgggtttaagcaattctcctgcctcagcctcccaagtagctgggactacaggcacgtgctaccatacccagctaatttttgtatttttagtagagacaaggttttactatgttggccaggatggtctcaaaactcctgacctcaggtgatccaaacacctcggcctcccaaagtgctgggattacaggcattacaggcgtaagccaccgcgcgtggccaattttttgtatttttagtagagacagggtttcaccatgttggccaagcaggtttcaaactcttgaccttcaggcaatccacgtatcttggcctcccaaagtgctgggattacaggtgtgaaccaccgcacctggtccagtttattacttcttacttggtgctaacattatatttaataattgtctcatattatagttatccctttgactgcaattatcacttttcctgtgctgtcctgatagactgcagtgagttccttgtgaatgtcttattcacctctgtttccctagcccagttcctgtcacctggcaggtgcttgttgaaagtttaatgaagaaacaagtgaatgaatccatgcttagagagtacagctctgaaattcaatgtcgtaaacaattgtttcatacatgattttaatatatatattttattttaagaaaaggaatgcaattttcttaccattttaaggacaaaggaagggtgcttcaacttcaagtgacataaacctacgcttaaaattggcttgaacaataaagggaatttgtcaacttacaaaacaggaaaaattcagtcttatttctggcgaggcttggtccggttgcccaggcatatccctatagcaagagttgtctctctgctctgtcttctgcagtggcagctccaccgggcttcccacagtgctgcctccagcagctccaagctctctcattagggtaacaaaaacct

SEQ ID NO: 55207 - DNA, 1031 bp, Homo sapiens
gaatggttcttcactggtgtagagagccaggtttactgttggttgcaccatctgttatcaggcatgcagaaacatttttcttctggagaaacagaggggaaggtgttgttacagtgtacatgtttcctctgtgtcgtttttaagggaaataaacatgttccaaaagatgctgttaaaataaatatttgaacacgttttctgtttctaggttgctcttaattccaaacatttaaataaatgtgcatttgaatagctttaggtggtttagtctattagctgaaatggaaaagttcatgtattgacatcatcaataatacttcataaaggtttatgtatttttatgtgtttggattccataagaagttgaacttagataattttatcaagagtagcacagtgtttctcaggtgcgagccagcatacagcgagacccttcatgtgtctctggatgcacatatatcttcccaaccttaaacacagctcattgaaatacattaaagctactgaaagtgagttctgatgcaaaacacatgtgaggtgtgtaggaacaatgaaaagctagaggatctggagttagaggaggcattgagagtgcttttcccttaaacgccgtgatagtcctcccttgatctagaagtattctctttgaatccttccatctcttcctcctggtacaccagatgacttcatcagcatctccctcttttatgctaacacctttcgctgtcaacttttgagacctccccatgtatctataagcttcccagtctcttatggcaaatttaaaagtttacaaataggttctctcattgaaaaaaagcattgtagtaaagtttaaagtggagctcagacaaatcatgacttattaagagactacaggaagccattcagcatttaataataactgtttacaacatgaggcaaagctaataatgttatggttttattaagagatctgtcatctctgtttttcttaaactggtttaacagtcagagctttgtaatgtgtttcagctgaagatttattatag

SEQ ID NO: 55208 - DNA, 1026 bp, Homo sapiens
ttcctataactatctttacaatttttcctctgcagtttttcccaccaccctgactgaactcccacaccagatccctggagaattatctaccaacacagacatttatgtttatataaattatatgtacatgtatatgtacgcatatttatgaataaagaaatgtttaggtgtagaagagaagtcaaggaagatcacttgggatatatccctgctctcgtgttctgaaacactggattgagtcaatatgatgggatctgtgtcttacctgtcattttccctcagagactagtacagtgccttgagcttagtaggtgttcagtgaatgcttgttcaatgatgaatgattgaagatctttaaaagttctcctccttcttgaagagagaatgtcaactccctagatgattattagaaagtttattcagcctaaatggttgtgtgttgtctgcagttctatttgtaatgtctgttttacatattgaaatgtactattttaacataggcagcctactttaacaataaagtatttttttttaaaagggtaagtagttaggccgggtgcggtggctcatgcctgtaatcccagcactttgggaggccaaggcgggtggttcacccgaggtcaggagtttgagaccagcctggctaacatggagaaaccctgtctctactaaaaatacaaaaattagctgggcatggtggcatatgactgtaatcccagctactcgggaggctgaggcaggagaattgcttgaacctggcaggcggaggttgcagtgagccgagatcatgccactgcactccagcctgggcgacagagtgagattgtgtctcaaaaaaaaaaagaataagtaactagatagaagaagaagggttttgagaaacatgatgggttttggaggaatgtacaaagttagatttggaaaattcttcttatgaaatacacatataaattgtatcattttaatatggtcttcttaacggttaactgtctatgtttccagatgatgtcctaaaatagtcgttcc

SEQ ID NO: 55209 - DNA, 1026 bp, Homo sapiens; identical to SEQ ID NO: 55208

SEQ ID NO: 55210 - DNA, 1026 bp, Homo sapiens; identical to SEQ ID NO: 55208

SEQ ID NO: 55211 - DNA, 1013 bp, Homo sapiens
acatgagtgtttgtttctgtaattagctatgagcttgaattttataaatgtgcactaaaagtttgtgcatattaatatttcttcccatagttaggcacagcaaggtgtgtatttgtggatagtctgcaagatttgtaactttctggctgttaaaaatacattctgacactttaatttggtatctataatacctggaaagaggagcttgtctgttataaccgagatttcatgttagtagaagtagaatcattagggctgtcaacttgtcacctcctacctaacttttgctttccacctgacttgtctcagcagttgctttcaaaatcatcatcttcttcagatttttcaagttcttattctaaactcatctgacctgttttaggtgggacaagatgaggaaaactgttttttatattttaaatattagaagagctacaaatcaataggttttatactttcagataggttaggtcatgaataattacatttgaatttatttaagacaaatttagtgtgaacagtgaatttatttaagacaaatcttaaagatttgtagaataatgacttagttttttcatgatgggctcttaccacaaaactgctttggcatttggttaaccagactcatgctgggttaaagtatatagatataacagtaattcagatttaatgcatatcttggattgggactgactgaggaacctcttgttttaaagtgatttgtagtatatctataacgtttgatccttttgggtaaaatagtagctgacaaaaaataaatacaaattaattttcatgctcatctttacctgaaagactcagatttctctttaagccagctcaggaatattaggctaaacccagctgttttgcagatgttcttactcagattgaaacatcaattaattaacaggtatctattcatatttaactagaaccctgctaatgtagagaaagaatacttttttaggagatcttttttcagttctctctaaaatgtcattttatataaa

SEQ ID NO: 55212 - DNA, 1141 bp, Homo sapiens
atttaggagtacttgattcttcagaaaacctccaaagtagatgtggactcaagtggaaagaaatgcaaagagaaaatgattagtgtactgtttgaaacaaaagtacagacagaacacaaaaggtataatttagtactattgcagatggaaaagcaactgaatcgataattatactctgacaaatctaggcatattcatgagtttcttttgtataatgcaggtttctggcatttgaagtcaaagagtattcagcgttggatgaattacaaaaggaatttgaaactgcaggacttaagaagcttttctccgaatttgtacttgctctggtaaaatgaaatggaagacaggaatcttttagtaaaatagcagtgttttttgttgtttttgcattggatttggggagtggttaattgaaatagtcaattttaaagtttctctgaagcaaaatgataggcatcattctaacttcaggaacaaaagccagttctgttttatgaaatattaaacatgaagaaaacttgtatattctaatgtttgccaggaaaggctaggttcagtagatgagacattatttaaaagataaatttaaaaagatggtaaatgaacacttgtttttatagacaatatttgtttgaaactatgtaattttctggctaattttcttgtaattaaatgattttttaaaaaagatttgttttcatgtttgcttttcttatgtttatatttttagcatttgatcgccattttcccccatccaggttatgtctaatgttttaataaatgttaagaaaaatataacactgattttttttaatggaattgcataaattgtttaactgcaaagttctataaaacaagatttatagttgctttttgagggtgttctagaatagcatgatacttgctagccttaggactagagatttgattccaattaaaattcttatttgaaaaattgaacttcttgttttataagaagagaaatgttcatacagaatgaacctggcttgcaagatggaggaaattatataaaaatactattttttatttcttatgaaatcggtcaaaacatggtgaaacatacttatcatgacctaatgagagaagccgtaagataaaacttgtattaaaatctgtaata

SEQ ID NO: 55213 - DNA, 1055 bp, Homo sapiens
atcaaagctatgaggaacttataaaataagttggaaacggtacccttcttttaaaaatatttcttgaggaatttgtgtaaagttagtgttatttcttctttaactgtctagaaatatccccagtaaatctctcttggcttggagatttccctgcgggaagatttttccagtataaaataaatttcttaaatagaattagacaattcaggtgttctacttatttttgtatcatttttataaattatattttcaagtaacttgttcatttcttttttttttttctcattaaacttttttaatgggtctcaaaattctgtgacaaatttttggtcaagttgtttccatttaaaaagtactgattttaaaaactaataacttaaaactgctgcatgcgaaaaagaaaaccaaagtggtccacaaaacattctcctttccttctgaaggttttatgttgcattattatcattaaccagtcttttactactaaacttaaatggccaattgaaacaaacagttctgagaccgttcttccaccactgattaagagtggggtggcaggtattagggataatattcatttagccttctgagctttctgggcagacttggtgaccttgccagctccagcagccttcttgtccactgctttgatgacacccaccgcaagtgtctgtctcatatcatgaacagtaaagcgacccaaaggtggatagtctgagaagctctcaacacacatgggcttgccaggaaccatatcagcaatggcagcatcaccagacttcaagaatttagggccatcttccagctttttaccagaacggcgatcaatcttttccttcagctcagcaaacttgcatgcaatgtgagctgtgtggcaatccaatacaggtgcatagccagagcttatttggcccggatggttcaggataatcacctgagcagtgaagccagctgcttccattggtgggtcatttttgctgtcaccagcaacgttgccacgatgaacatccttgacagacacattcttgacattgaagcccatattgtccccagga

SEQ ID NO: 55214 - DNA, 1053 bp, Homo sapiens
tgatctttcaagtgttttttgagttaaacttttgtccttttttttttttttttttttttttttttcaatttgagagcaggtactgtttattaaccaaccagcttagaaaaataatcatggtagacaccttagttcattcttctaataagcctgttgatctggtcctccctgttgccagcatctccaccttctacaaaatgggtggtctttttcttcattccacctcgtggagaagacaatttgaagggccacaggaagttatttgcctctttgaagcgttttccaacagtatagatctcatgaatcaaatcctccatgcagatgatgccgtatttaccaagagatcgagcaatcaaagcgttatctgtcaaagcaattcgcttcttattgattttgccataaccacgcttgtagattagttcatttactgacttcagattggggtacctccatgcaatatatggctctacaatcctcagcatgttaatcgaagccttgttgagcttcacaaaggttccattgaagatttgacgaaggcgaagaagctgcaacacctttcgaacctttgggctcactccattgatacctctgattctgatgacaaacgccaatttgggttctgcaggtacatagaagttgccagcttttcttgccatcctcgccattcgaatttcagttctgtacatctgcctatattccttgtgatagtgctttgctttttcatagataagcttcctccttgcctttcgaagcatcttttgggcaaacttctttctcaggcgcttgatcttcagctctgcgaaattccttcgctttttcttaagggtttctggaacagcaggaacctccttcttcttctcttctacaccctccatggttccagccggaaaaagagctaaacttttgtctttaatggtctttctactagtcaaatctctcattccaataattgcaatatttaaatatttaatttaaaataagtacataatttgaatgccactaattcaggttagtccatatcttccaaaaccaggccaaattggtgatatttcc

SEQ ID NO: 55215 - DNA, 1016 bp, Homo sapiens
ttcagcttttcttgattttagacttttttttgttagctcagtgagactattaagaaagaatatttgtgagtttgtaataggagatttgttgcatttctttaaaatggctttttatattcttcgtaatttgtaatatcaggggtgtcatttctgtactcttaaccattttgccaatgtgaaatccttgcaaagtaatcggcctattacttgggaagacagaattgtatgaaatgactgtagaataattcaggatggtccccaatacggtaaaatgttaactttttagatgtagattttaagtatggtgaaatttgtagcagtgttctttagtaagttaactattaatatatcaagacctataactggacaactaataaataacctgtttcttaaaatgttagctttttctaaatattctgaaagtactggttgtaaattgctgaactcacaatttaaattatgatatgactattgaattcatcctcattggcttgcatagaaaattacaatcaaataatgctaaatgtaacttttttggtaatagttgtgtgtaactggttgttcattatagatgtgttattcaaaactttgggtttttaggttttgacttttcttaaaatacttttcttaaatgctacttaatgctttctctagggtatttttattagaatttcaattaacagatattttgatgtctgcgaaatgacagtactatgttagaaattgatgtattggctccttgagggcagtgaccctatttgttatgtttgttcctcaatcattaatagtacacatattaaatagtacatatacacttaatatttaataactcttagaagtgtcataggctttaatatgctcatactctaatgagccatttatcaataaaaagataaataacaagactatgtcttttaggactttagttagagaaataaggactcaaggttttaattaagtgctatatggctacagtaggaaagattggtttgggttggtaggctcagaatagtggt

SEQ ID NO: 55216 - DNA, 1069 bp, Homo sapiens
cttgaatgttaccaatactattgtatattccatatgcagcaatattgcttttttttttttagagtcttgctctgatacccacgctggagtgcagtggtgtcatctcggctcacagcaagcttcgcctccctggttcaccccattctcctgcctcagcctcccgagtagctgggacttcaggcacccgccaccacacccggctaattttttgaatttttagtagagacggggtttcaccctgttagccaggatggttttgatctcatgacctcgtgatccgtctgcctcggcctcccaaagtgctgggattataggtgtgagctactgcgcccagcccaatattgctttttaatcccccttcttaccctgccatgggtaggtggctgccacaacttttgccttattttttcaatatggatttttcatgtaaatgacaaaaatatatttagtttttttttagtttatggaaacggtatgcctatataatgttttccatgtcttgtgttttaattcaataatgattctaataaatagccgtattttttggatagttttataatactcattgctgtgatatactcttttgtgaaaatacccattttatcttttattggacatttgggttgatggacatttgaatatttaaagattttgacttaggccgggcgtggtggctcaagcttgtaatcccagcactttgggaggccagggcgggcagatcacaaggtcaggagtttgagaccagcctggccaacatagtgaaacccccatctctactaaaaataccataattagcggggtatggtggtgggtgcctgtagtcccagctactcaggaggctgagacaggagaatcgcttgaacccaggaggcggaggttgcagtgagctgagaccgcgccattacactccagcctgtgtgacagactgagactccatctcaaaaacaaacaaaaaaaaacaacaacaaaaaaagattttgactttaagaacaatactgctgtgaacttctttgtacttgtttcctggtgcatttatgcaagcgtttttgagagggtatatttaaaggta
